United States Patent Application Publication US 2026/0103690 A1 - sequence listing, part 67

SEQ ID NO: 327072 - protein, 530 aa, unidentified
MNKDAPPLPDPDTHLGVIHQRGKRPVQAAPPELVNNSAAGHIPGGQQLATPEPRLPGPNPARVKERSPTPVVAAGPSAKRTSPHEGSCIRSRPSRRSGALQTARIMNTNNDWTKHTHFAALDWASDHHDVVIVDHSGAIAAEFRFAHTAAGWAEFTEKMQPYAGAPFALETSSGPAVDQLLQRGWTLYPVNPKAAERYRERKVPSGTKTDRHDGWSLADALRTDGHGWRPLLPQDEATATLRALCRDEIALIEQRTALVNQLIAALREYYPVALEIFDDWTQPFTWALIQQFPTPLTLQSAGKRKWEKFLHTHRLWRTDTAPARLKLFARANALPASAAVRNAKSLLATSLVKVLQTLETQLREYRRRITETFAQHPDHDLFGSLPGAAEKIAPRLLGELGAIRAVYPDADALCCQAGVSPVSFQSGKLDKARIRWACDVVLRHTVHLWADCSRKKSAWAAAYYQGKRQQGHDHASALRCLGKRWLKVLWRLWQDGQKYDATRHEQSLKVHGSWVQAHLDAALQATPATL

SEQ ID NO: 327073 - protein, 343 aa, unidentified
MQIRSVGIDLGKTTFHLVALGASGKVLVKKKFTQKQLLAFTANMQTALIGLEACSGAHFLGRALRQQGHDVRLIPAQFVKPFVKSNKNDFVDAEAIAEAVERKNMRFVPIKTDDQLDLQAIHRVRDRLVSRRTAVINQIRAFLLERGMVFAQKPAKLKAGLANVLENADNALTPMMRNMIGILWDEWKTVEQQIEELTDKLEQIAASDSGCCRIRQIPGIGPIVATAIVAAIGNGAAFRKGRDFAAWLGLVPRQYSTGGKARLLGISKRGNIYLRKILIHGARAAAMRIKRDRFPIGAWMNALEARAPRNVLVVAMANKLARIAWAVLSTGEDYRPTASMATA

SEQ ID NO: 327074 - protein, 422 aa, unidentified
MRVVYPICCGVDVHKTFLVATIVTTTKEGAPIYQKKRFSTFNKSLRELREWLLANNCHDVCMESTGKYYIPLYNLLEDDFHVTVANPKWVAAIKGNKDDVKDSKWIADLFRVGYVPNSFIPSRPIRILREYTRYRYKLVCCKSAEKNRYQNAFTVCNIALDAVVSDMFGKSATAILDYIVNAESFDLKHCVSLLHRSMIKKADQVVEAIEGFQMTADQKQRIRFVKSHLGYIDSLLREMDSKIDSMVTPIDNAISLLRSIPGVDRSTAITVLSEIGTNMDQFSSSHRLCAWAGLAPSNNQSAGKKKSVRILRAGVYLKPALVQAAHAAVKDKDSPYYRTKYERIAKRRGKKRAIIAIARMILTAVYHMLKTGESWNPCDLARIDMPQELHERQQNQAIKQAANFLIKHGIVLPEHVRLPAVA

SEQ ID NO: 327075 - protein, 307 aa, unidentified
MFVGIDVSKDRLEVHLRPSAERFQVARDGGGLEQLAARLSAAGPALVVLEATGGFEITVAAALAAAGLPLAVVNPAQIRAFAHAIGRLAKTNRLDAELIARFAEQVHPEPRPVLGAQAQVLAELVARRRQLVEMIGMESNRRRQARSAKVLRGIERMLAALQAALAELDQEIDGQVRGSPAWRAAEDLLTSVPGIGKITARTLIAELPELGCLDRRRIAALVGVAPVNRDSGAWRGHRAIAGGRSTVRKVLYMAALTAISWNPAIRTLYLRLRARGRPAKAALVAAMRKLLTILNAIMRDRRPWQTT

SEQ ID NO: 327076 - protein, 418 aa, unidentified
MKVVYPVCCGVDVHKTFLVATLITTQGITPHYSKKRFSTFNNSILQFKQWLIDNNCYDVCMESTGKYWVPIYNLLEDTIHITIANPKWVKAVNGNKDDKKDSKWIGDLFRLGLVPGSYIPDKPIRILREYTRYRSKLVSCKSSEKNRFQNAFTVCNVALDAVVSDMFGKSASSITDYLISSDSFDPQYCASLLQKSLKKKADNVVESIEGYQMTREQKERIAMVRSHLEFIQESIAKLDEKLDKMVAPYESAISLLCTIPGVDRTSAITIISEIGTDMSQFANSKRLCCWAGLTPGNNESAGKKKSVRITRAGVYLKPALVQVAHAAVKSDKAPYYKIKYERLCKRRGKKRAIIAIARMILTAIYNMFVTGEVWNPSDLYKIDIPQEMLEKQKEKAIKQAVKLLVSNGVIKATDISVA

SEQ ID NO: 327077 - protein, 380 aa, unidentified
MKKIRFVGLDVHAETISVAVAEPERNGEVRSLGSIPNRPESVRKLVKKLGLVDQFQVCYEAGPTGYGLYWQFTELGVKCEVVAPTLIPVKSGDRVKTNRRDAEKLARSSRAGDLTPVWVPDAAHEALRDLVRARLAAKRDQLRARNRLSKFLLRHGRRPASKMSAWTDAYLNWVKKGVHFDQPAQEATLADYLHEVEHARDRIARLEKAIDDSIETMPEKMRAVVDALQSLRGIAKISAVTIVAEVGEVSRFKAPRQLMGYSGAVSSEYSTGEHTHRGGITKTGNAHLRRIVVEAAWAYRHRPCIGASLKARQKTASQEVKDIAWKAQHRLHQRYIKLMARGKIKQKAITAVARELLGFIWAIAVEAEQKHNSSQKRQAA

SEQ ID NO: 327078 - protein, 310 aa, unidentified
MRQVSACGIIHLHPLGRSFRVTNDTAGLRRLKRELDALDQMPRSALHIVMEATGKWHRAVQRSLHADGFYVSVVDPLRARLFAKACGFLAKTDRLDARLLAIMGEALKPAQTPPQDQALEALQELVNARSAANGERTALSNRMKTAVTAFLRKELTRRLAALDTHIARLDAEIERSIGAEPEMRRRLDILISIPGIGAVTAASLIAGLCELGACSGKQAAMLAGLAPLACESGERAGHRAIRGGRPAPRNAIYMAALSASRHNPDLAQFAERLKKAGKPNKVVLVAIMRKLIVLANTLITKNRIWTPNPP

SEQ ID NO: 327079 - protein, 368 aa, unidentified
MEKFITFVGLDVHKNTIDVALADAGRNAEVRHYGTIGGGLGDLDRLVKKLSSPNKELHFVYEAGPCGYDIFRSLTDKGFDCAVVSPAHIPKKPADRIKTDRRDAMMLARLHRAGELTYVFVPRADDEAMRDLTRAREDAKKAQRVAQQQLNSMLLRLGFRYPKDNWTKQHFLWLADQKMPMPAQQVVFQEYINAINETNARVERLTQQIETLVPTWRMASVVKALQALRGVSIIVAATMIAELGDLTRFDHPKKLMTYLGLVPSEHSSGEKTQRGKITKTGNGHARRVLVEAAQAYSHPARITRPLLKRQEGLSQDARDIAWKCQMRLCTRFRRLMAKGKNRNAVITATARELAAFMWAIANHTPIAI

SEQ ID NO: 327080 - protein, 352 aa, unidentified
MQTLVVGCDAHKHYSQLEVQDSTGQALSRVRVDHAHGSILRFFSTLPKGTPVALESVGNWYWIADEIEQAGCLPLLTNPAKAKLLMGHVNKTDKLDASGLATLLRLGSLPSVWLPPAELRDQRELPRTRMALTTLRTAIKNRIHSLLAKYNLSPDGGAQLFSKEGRAWLDCSVNSLPPESARCLTQQLQLLDSLSLQISTLEQRIHSLIPLTPTMQLLKTIPGIADILAIVIEREVGSIQRFPSAPQFSSYCGTTPRVSSSGGKTRYGKLRTESNQYLKWAFIEAANAVAAHHAQRGWTTRHASRLYLRIRSRKGGSVAIGAVARHLAESAFWVLTKNEPYRETNAVSPRQG

SEQ ID NO: 327081 - protein, 367 aa, unidentified
MTIRLVTDHSELMSIGVDIGKDVFHIVGFDTAGEIVLRRKIKRLALTKTFEKLPRCVVGMEACLSAHFVSRSLRGLGFQPRIIPAKYSRPFNKGQKNDYNDAEAIAEAALRPNLKTVPEKSQEQLDLQALHRVRSRLVSRRTATINQIRAFLIEQGITVRSGARSLRNSLLTILEKRSDEISPRMEGVIMGLYEDRLWLDERIESTTDEIEMISKREGNCQRLMTVPGIAPLISTAVVAAIGTGEAFERGRDFGASLPGSGMPAYRERGLGLVPQQFSTGGKPVLGRISKRGCRYLRTLFIQAAHVILMRPQNWQNFSFGPWLEQASQRLHKNKLAATLTNKLARIAWSVLRHGKTFDDDRIEATAI

SEQ ID NO: 327082 - protein, 409 aa, unidentified
MYYVGIDIAKSFHVACVLDKEDKVLKSSLKFNNDENGFEHIFLTLTSIDEIPNFTIGMEATGIFFENIYLYLKEKGFNVVLLNPYQTNRFREMDTMKKVKNDNIDALMIAALIKSGRYSKAYVSEDTYQGIKSLYRHKASLQDELKKHKRQVSTLLAVVFPEMEQVIKDPYNVTGLALLEKYPTAKHYSHASVERILKTFRGIKGNNFNEAKAEKLLELARHSVYQGNGRDERAFVITSHLKQIKFISHEIEATENQMLLLFNQQPLLDSNEEQEVMDIIDNLRTIPGVSDKTIFALISECGDLSRFSNQNSLIGFLGLYPTLEQSGNKTVHGPIAKRGAKLAKKALYQAAVASVRHNAELNKLFHDKVSQGRAKKEALVIVARKLAHIILAIYKNNVAYNPNRVFVAS

SEQ ID NO: 327083 - protein, 349 aa, unidentified
MTTQRLSYVGQSVYVGVDVHKDTYAVTCVCNKQIVKTATAKADPAGLTASLSQWFPGARLYTAYEAGFSAFVLHRALTKAGIMNIVVNPASIAVAANDKVKTDRRDSKKLAIDLSDGRLQGIYVPTEDEELARLLPRTRAQIVEHRATIARQIKAKLHQFGLIAPASRRLISNRYLREIDAWPLPPDLRVSLTFLAEQWRFATRQLIEMRRLLREQAKAHPAIEQVYRSVPGIGEVVARTLATELGDMTRFANERALFSYTGLTPSEYSSGPSVRRGHMSRQGSSRVRHLLIETAWRALPRDAVLKEIFDRIAATRGKKRAIVAIARRLTGRIRACFRQGTTYAVGTYA

SEQ ID NO: 327084 - protein, 351 aa, unidentified
MNYVGVDIHKHYSVLVVVDERGQELKRGRINGNEAAGFAQFFSSLQGKSKAVLEACWNWGRIHDLLQEIDAVEEVVLANPLKTRLIADAQIKTDGLDAKALATLLRGDLIARAYVPTKPTRQRKEVLRQRLYWARLRTRIRNRIHALVDRQRQLEMPQCSDLFGRKGLAALNKLSLTEPDATLLREELTLLALIQNQIKAQEARIVEFNVKDETTLRLQSIPGMGKILAAVAAAEIDSIDRFSNAAKLCAYAGLVPRTYSSGGKVYRGPLLKSRNKWLQWAFIEAAWVAVGCSAYFGGLYRRHRARGKNANLAITIIARRMCQISWTLLKERRDFSETFPGRSAVRLTAAA

SEQ ID NO: 327085 - protein, 354 aa, unidentified
MLIIGCDYHPGFQQIAYVDTETGELQERKLGHRQEAEQFYRALKEQSASVRVGMEASGQARWFERLLAELQFELWIGDAAKIRTKRVRKQKTDRQDAQLLLGLMLENRFPRIWVASWENRDLRQLLWHRHRMVQMRTRLMNQLQAVALKEGIRRKKGLWRDAGRKQLESLALAPWASQRRHDLLELLDRLSPKIAELSQRVEEQAGKCPAAQRLRTHPGVGPLTALAFVLIVGQAKRFGCGNQVASYLGLVPEEDSSGEHRRLGHISKQGNALLRFLLVEAAQVTVRSDPEWRRKYFHLALRRGRKIAKVAMARRLAVRLYWMWRKEWDYEQWKKFGPHAGQPGTGVGVQSNTE

SEQ ID NO: 327086 - protein, 362 aa, unidentified
MIPNTMDGFRSLLQRIWECCDSQDKIKVGLEAIGHYSYNLLGFLLDNGLPTYVLNPLRTNIYRKSLSLRKTKTDRVDARTIASMLLSDAGLKPYTDTAYHNEELKSLTRYRFDKVKERAKLKGSIARLVCILFPELEKLVPSLHFASVYALLEEFPGAKQIAAAHLTRLKALLETASKGRYKRDTALEIRDAARNSIGSWMPAKSLELQHTIRLIRELDNEITEIEEQIQTIMDELNSPITTIPGLGFRMAAMIFAEVGDFTRFDSPDKLLAYAGLSPSTYQSGQLKNCYPHMEKRGSRYLRYALYNATKYVCHWDPTFAAYLAKKRAEGKHYNVALSHATKKLVRLIFAIEKSRQPYCSAT

SEQ ID NO: 327087 - protein, 364 aa, unidentified
MDVHLRSTTVCALDAETGEAVTRRFRGNPWGEVAEWMSGFPGPSLAAYESGYLGFAPQRELAGLGVECVVAAVSKIPRSAADSASKNDRNDAARMAKAILAHDISPVWVPSPEVEGIRDLAGAYDGATARLATAKQRLLAFLAKRGFVYGGTTPAGNPRKYWTYDFLRWLDKVRPEDDGGVRTLAALRNEVEAAAEARADLLSEYRAAVDASPIAAEVAALQSIKGCAFALAAAFSAEVGDFTRFRSGRQVTAYFGLAPSQRSSGDSVRLGGISGAGNALVRKLAVEGSWCYAAARHQPKLMPRDTGVPLEIRMHGRKGSERLLRRREEMLARGMPAAKANAATAAELVRWLWALGMMCREGAE

SEQ ID NO: 327088 - protein, 400 aa, unidentified
MSERRARVWAGIDAGKGHHWAAAVDETGATLWSKKVDNDESAILTAMGEILDLADKVHWAVDISGTSSALLLALLAAHGQQAVYVPGRTVNRMSGAYRGEAKTDARDAYVIAETARTRRDFAAIDVPAQLAADLALLTAHRSDLVADRVRMINRLRDTLTGVFPALERAFDYSSQKGALVLLTGYQTPAAIRRRGRARLTAWLANRSVRGADAVAATALEAAQAQQTALPGEDVAAQIVADLAEQILALDDRLKRIDQQIRETFRSHPQAEIIESLPGMGPILGAEFVVAAGDLTAYADAGHLASAAGLVPVPRDSGRRTGNLHRPKRYSRRLRRVFYMSAQTSMMREGPNRDFYLKKRGEGCKHVQAVIALARRRASVLWALLRDNRVFTPELPVAQAT

SEQ ID NO: 327089 - protein, 410 aa, unidentified
MEVFCGIDWASDHHDIALVDAEGTVLSKERVANDAAGFARLLELLADAGDTADNLIPVAIETDHGLWVASLVETGRQVHAINPLAAARYRTRHSVSRAKADITDAIALANIVRTDRHAHRPVPVDTELAKAVRVLARAQQDAVWERSAIGNRIAALLGEFYPAALQMVALLTGGLTRADVRTILRRASTPAVALTLTPVKLRGLLVRAGRERYIAEHATALRAIFATAQLRQPELVEEAMGIHLIALLDQYEAVDQAARRLAEATSERFVEHPDAAVIVSFPGLSAVSGARLLGELGDDRNRFTDARGLKAYAGAAPVTRASGRKTVVTHRRVKNRRLESIGSSWTLASLRASPGARSHYDRRRSVGDWNRAAQRNLYNKFLGQLYTCLHTGQLYDEGRAFPSELLEPAA

SEQ ID NO: 327090 - protein, 365 aa, unidentified
MKKISTAAAEKNEKIEGQKLTVGLDLGDRSSWYCVVNEAGEVLLEQKLATTPKAMKEVLGGMPRSRIALGTGMHSPWVSRLLSELGHEVIVAHARNVRLIGESRRKDDRFDARNLGRLARIDPDLLSPVQHRSRKAQADLTVIRARAGLVRARTSLINTARGLTKSYGERLRGCSPRKVNRALAEGLSPELQSALQPLLDEIESLSERIREYNDRVKHVAQESYPEVTRLEQVKGVGTLIALTYVLTLEDPRRFRKSRDVGCYLRLRPGRRNSGQSEPQLHISKEGDPYLRTMMVQSAHHILGPFGADSDLRRWGLKLAERGGKNAKKRAVVAVARKLSILLHRLWVSGEVYEPLRSQRALTAAA

SEQ ID NO: 327091 - protein, 352 aa, unidentified
MVGQGERGIAVGQFVGLDVSVEDTSVCVMDAGGAVLHESKVKSTPAAISRALRRHAPEAERVGIEAGSSSSWLCRQLREAGHPIIHMESRHAHRALSMRLNKTDKNDARGIADLMRVGWFKSVHSRTLDSQYTRSMLLARKRLVDTRRQFENRLRNIMKVFGCMLGTTAGRGFAQRVEVACKNDAVVHRLCEPILRLLRELRVQINAYERELRAAARHDETTRRMMTVPGIGALTALAFKSSIDNPHRFRRSADVGAFPGLTPRRHQSGEMDWTGRISKLGDSLVRTYLFEAASVLTGKIERWSRLKAWGMRLAKRVGMKKARVAVARKLAVILHCIWVDGTEFEWGPAPPA

SEQ ID NO: 327092 - protein, 331 aa, unidentified
MNYSYFVGLDVGKKTFDASLMSADEKELSHKSFENTPEGIQVLLEWIAGYHLSLSELLFCAENMGSYVTELSVSSVSLGFSLALVCPLTIKKSTGLQRGKNDRVDAKRIANYAVLHHRKLKLYQLPDKDLVKLRGWIIIRDNLVKQKVSGIKLLETFSQMVKLADVTESISFLEEQLESIKEKILKVEEAMEQLVTASTSLYTNYTLLRSIKGIGIINAIVLLCVTDNFQRFSSPRKFACYCGVAPFEHTSGISIRGKTRTSPLANKEVKTYLTRAAITAISWEPQMKAYYKRKIAEGKHKASVINAVRAKIIARSFAVIRRQTPFVTLVV

SEQ ID NO: 327093 - protein, 435 aa, unidentified
MEEVTDEPLYRDRVCGIDIGKAGLVATIRVPSDANPARRAAETRAFGTTRREVLALADWLRSWQVPAVVMEATGDYWKGPFYRLEAEGLDCVLADARQVKHLPGRPKRDPSDSRWLAACFERGAVTSCFVADPEFRVIRLHTRYRRDLTGERTREKQRAEKLLESAAIKLSSVVTDLHGVTGRDIMDHLIAGERNPKALAQLARARARRKIAELEAALEGAEFFTPAHAALLAAMLERIDRVNAEIARLTEVIERLLEPYEEQLAQAESMPGWGRRSAQDALAETGVDMSRFPTGAHLASWAGRTPLDNSSGKRKGKSKSKKGNRYLGGLLGETTVAAGKTQTREGARYRRLARRRGKPKAQVALGNTQLKVYHKLLSSPGMRYQDLGPDYYERQAGTRRQIAHHISKLGALGFEVTLCRRPAPEPDGSGETQAA

SEQ ID NO: 327094 - protein, 392 aa, unidentified
MEPIERYVALDVHKHYVMVAAINAAQEVVLTPRKLSLERFAHWAPEHLTPKDQAVLEATVNAWTLYDQLAPLVHDVKIAHPLLVKLISAARVKTDTRDTLHLARLLAAGLIPAVWVPPPPVRELRMLVAHRQRLVRQRTQAANRLHSVLHAHQIAPPPGRLGSSESPTWWEQLELPAVERLRVQQDRAILQTVERLIAEVDAELTRLSRQDPWQELAPFVLHLPGFAVITTMTVLAAIGDITRFPSAKKLVGYSGLGASVHAAGQTYHTGPITQQGRRELRTVLVEAAWSAVTHHPFWKAEFARLVPSLGKGKTIVALARKLLVVVWHVLTHQVADRHADRPMLTRKLPRWGASHGLAASAGLSRGTFAQQILERLGLRGGETAIAHAGAGP

SEQ ID NO: 327095 - protein, 376 aa, unidentified
MKKSSTKGMRFVGLDVHAATIAVAIAEADGEVRFLGTIPNQESAVAKLVKKLNTDGSWEACYEAGPTGYALYWQLAKKGIVCTVVAPTLIPVKAGDRVKTDRRDAERLARCFRAGDLTAVWVPDPAHEALRDVVRAREAAKGDQLRARHRLGKFLLRQGIRPPEGIRPWTKKHLEWIKTKVQFEEKAQQWTLEDYVNEIEHCGQRIERLEGRIDEAVKSAPGTMREVIAALQALRGIAAISAVTIVAEVGELSRFATARQLMGYSGAVASERSSGERTSRGHITKTGNAHLRRIVVEAAWTQRFRPVLSKHLKARQEGLDPEVIEIASKAMHRLHSRYERLSIKGKNKQQVVTAVARELLGFIWAIGVAVERKSAA

SEQ ID NO: 327096 - protein, 354 aa, unidentified
MNSVRYVGMDVHRETISVAVLEENGRLMMQSVLATRAGAILDFVHGVRGRLQVTFEEGTHSAWLYDVLSRRVEKLVVCNPRKNALLKSGSKSDRIDARKLAELLRAGVLSPVYHGETSAVEVQQVARSYSQLTEDTIRVMARLKAVFRGQAVSCAGKKLYGKRHREQYLAQLPGSLRRRAEYLYEELDALQPLRQAVRRELLAECRKHAAAEWLQSVPFLGPIRAALLIGRVQTPHRFRTKRQFWSYCGLALETRDSGEYRVVNGQVERRRRPALIRGLNWNHNHEMKNLFKSTATAASVRQGVWREFYLQLLDKGMRPEMARLTLARKIAAITLKIWKKGERFNAEHLKLQAV

SEQ ID NO: 327097 - protein, 392 aa, unidentified
MDNKVWVGIDAGKALHWAHVLDASGQQILSRRVENDEVDLLKLIDEVLALSEEPVWAVDQPGGSAALLLALLWERNQQVLYFPGLAVDRARDAYPGESKTDARDAYIIAEQARMRSNLAQIVPGEGALAELQLLLARRRDLVADRTRSINRLRDVLLSLFPALERALDLNAKGALILVRHYQSPSAIRRVGHRRLATFLKNRSVKGAEDIAHKAITAAKAQSVSLPAENVAVTICSELAEETLAVKESIDNLDRELRRRFFARPEARILASLPGIGPILGAEFLVSVGDLSAFESADRLAAYAGLVPAAFDSGKRVGNHRRMRGGNKVLKRVFYQSAFASLRSSPHSRAFYDRKRAEGKKHTQALIALARRRVNVLWAMLRDGTTFEARPAA

SEQ ID NO: 327098 - protein, 348 aa, unidentified
MILVGCDLHSRTQQIALLDTRTGELVEQELAHEGDAGERFYRALPPPGTIGIETTGYTQWVHALMHQLGHTVVVGEAAKIRAMVVRKTKTDRRDARHRLDLLQHDRFPTVWIPDPGTRDRRALIAHRVRLVRMRTVVKNGLQAIALNQRLALHSALWTQRGLTQLKALALPPHTTRRRDDSLALLAWLTTRIDQLDAHIATVASADPRVQLLLTHPGVGPLTALTTVLVLGPLARFPDSKHVVSYVGLAPAVNASADKQRLGKITKQGNALLRWVLGQAAPLAARADDELRRRYFSILHRRGRPKAKVALARKLLVRLYIMLRDQIDYEEFRRRGRAPRPHQLPGAVM

SEQ ID NO: 327099 - protein, 356 aa, unidentified
METAYDGRQVVGMDLHRRRSVLVRMTEDGRRLGTAKITNSPAELRRAIARAGKHPRVVLEATYGWYWAADVLAAAGAEVHLAHPLGVKAFTYRRVKDDVRDSADLADLLRMGRLPEAWIAPHEVRELRELTRYRIKLVRMRTSCKDQVHGVLAKLGVPVTCSDIFGVAGSAWLDGLRLPQPYAGKVTSLRHLAGELTTEITMLSEVIASLLAGDRGYQVIQQLPGIGPVLAAVITAEIGDVTRFRNAAQLCSWAGLTPRHRESDTKVARGHVTKQGSRLLRWALIEAIQRIPRDSVIGAVKDGIIGRRGKEAKNIAKVAAARRLLTLVYYGMRDGQIRCLSRPPAGPPVTETARAA

SEQ ID NO: 327100 - protein, 456 aa, unidentified
MSQEKSEQSRRTQQVPMAQINLDAAGLDIGASEIWACVPADRDEEAVRCFKTFTPDLHVLADWLVDCGITTVAMESTGVYWIPIYEILESRGMQVCLVNAQATKNVSGRKSDVLDCQWIQQLHTFGLLAASFRPPAHICVLRSYVRQRKSLLQQRAREIQHMQKALHLMNLKLTTVITDLTGLTGMQIIRAILAGERDPVALARLRNSRCKSTEAEIAKALTGNYQPEHLFALRQAVEGLDFYTGQLTACDAEIEAHYAVFQPQVDLLEQPLPDEKRRPWANQPNYDLRTHLYLTAGVDLTAVNGIDVLLAQDILAEIGTDMSKWKTEKHFASWLGLAPNNKSSAGKVFSRHTRSTANRAATALRLAAQSVGRSQSSLGAFYRRIKTKHGAPVAITATAHKIARIIYHMLKHRTPYIDSGMDAYLTLQRQRALRSLHRLAHKLGFHVLPDALPAVS

SEQ ID NO: 327101 - protein, 309 aa, unidentified
MNPDQKIYCGVDVSKNYLDAFTDGKTVRFANTVKGICELMKQAGDVHYVFESTGGYERPAAWYLLAAGRIVSVVNPGRVREYAKSIGQIAKTDQIDAQVITRFAELVHPREAELPSADQRKLAVLVERRQQLIDMLVAEGNRLDTAGEPYLHKMIQKHRQWLEKQIQQIEQAIEETINGNAEMKQKAVRIQSIKGLGRVSAATLLAVLPEIGTLSRKEVAALAGVAPYNRDSGTFRGRRHICGGRKRLRACLYMAAVCASRSNPHLKVFYDRLVEKNHCPKKVALTAVMRKLLIAANSAVKNPEFLVVV

SEQ ID NO: 327102 - protein, 315 aa, unidentified
MHTIEQPNQPVHIGIDVAKATLQIDLLGKSRKLPNTTAGHQALLELLPENVFIIMESTGSYHIAPLECFQAAGIPVAIVNPVRVKQFGKARGTLAKTDPVDAALLTDFGRAFLPRPTPPRDPERVLLGELVNLRDTLSAQVTLWNNLVEHQQSAVARKLSEAQARAATKAMTDVEVRIAKLIKESQTMAPVADVLRENKGVGAVTAAVLLAEMPELGRLNRRQAAALAGVAPCANDSGKHEGKRYIRGGRPRIKRALYLAALSAVRHHTTLSPAYKALRASGKPAKVALIAIARKLLVILNAKLKEYYATLAQPA

SEQ ID NO: 327103 - protein, 343 aa, unidentified
MQAITTIGLDIAKSVFQVHAVDAKGNVVLRRQIKRRYVLAFFQKLPPCLVGIEASASAHHWSRQLQALGHTVRLMPPAYVTPYVKRHKNDAIDAEAICEAVTRPNMRFVATKTREQQSCLTLHRTRHLLIRQQTSVINAIRAHLAEFGIVAPVGRNGVDQLLGIVADASDKRLPELARACVAALGTQLGTLKAQILQFDRLIMAWHRSSEASRRLDDIPGVGPALATALVATVADPRAFRSGRNFSAWIGLVPKQHSSGGKDRLGSISKRGDRYLRFLFVAGALAVIRYAKIHGTKHRPWLTALLARRHTKVAAIALANKIARMTWAIMAKGEHYKEPVALAA

SEQ ID NO: 327104 - protein, 344 aa, unidentified
MKIAVLGIDLGKNVCSVVGLDPSGAVVLRRRVRRDTLIDLVAKLPSCIVGMEACCGAHHLGRLFAAQGHDIRLMSPEYVRPYVKAQKNDDRDAEGIAEAATRPTMRFVEMKTEDQLDMQTLHRSRERLVGERTALINQLRAILLDRGIVVPQAKRKLEQYLVILMNEHGGEGLSARMRMLVADIRAQWQELDRRIGEFDAEFVRWAKENEDARRLVTIPGVGVTISTALIAAVGKAETFEHGRDLAAWLGLVPRQWTTGGKPRLLGISKRGNKYLRKLLIHGARAALPYVAEKDTALGRWAKSLLSRVHQNVAVVAFANKLARICWAVLRRGQKFGAQEAPLVV

SEQ ID NO: 327105 - protein, 422 aa, unidentified
MFKIIRNNCCGLDVHKTWIYACIGITDAHSRTEYYEARFSSFPKDLRRLAAWLHEYRCEEVCMESSGKYWIPVFNALEKTCKVILAHPKYTKPQKGNKTDRKDARWICDLFMCGMIKPSFIPPPAIRHLRELIRYRVKLTNMLTGEKNRAHNCLTVSSLKLDDVFTDIFGKSARSITEHILAHPGEQFDVTPFVDKRCKTPIDVIQDAVDGAISPEQAVKLRECLNHIDELSAHRNNIEKEILELVKPFSAHLALIRTVPGLDKDPMTAITILSEIGGDMSVFPSAKNLVSWAGCCPRNDMSAKHVKSTRIAAAGSYLKPILVQVANALIQSTKHPEFTERYRRIKSHRGHKKAIIALCKMLLTAIWNILSTGELYNPSGYILQAPRPVSEKKLITQKQALELLRLRGFTIVEEDFPQVSPS

SEQ ID NO: 327106 - protein, 367 aa, unidentified
MQGLPESLPESTPSGAAPFGKGGWTMIEAMIKNCAGLDVHSKSITCTIIREGDDGQIAKRTKEFRTFHKQLQELAQWLEDSRVDLAVMESTGIYWKPVHRVLEQAGLTVLVVNAAHVKNVPGRKTDVQDSEWLAELGRCGLLRASFIPSRDLRELRLLTRYRKKLSGYISGEKNRLHKILHDCGITLGCVVSDIDGVASRSMIEALIEGDKTPEQIAELSGGRLRTDAKTLAMALEGTVSDRHRFLLKRIHRHISWLEQEIAQIDRQVFSAMKPYDTEWKLLQTIPGIDQISAAMLLAEIGTDMKRFGNKNRLSSWAGMCPGNNESAGKKSPAAPGKPIIMSEPYCVKSPTAPGKRTASSNRFLRGS

SEQ ID NO: 327107 - protein, 349 aa, unidentified
MNDGISVGRRFVGVDLHLHRSVIAGLDEVGSQLGWVRIDNDPAVLVREVRNAGGRGCPVAIEATYGWYWAVDALLAAGFEVHLAHPLGMKALRKRKRVKTDPADAYELANLLRLGSLPEAYIAPPDLRELRELVRHRRQLVKLATAVKAGIRALLAKHNIRLSATQLESDTATGLLDALALPGTYAVRLASQRRLMLVLADEIAAVEVDLHARLRGHPGYRNLLTVKGIGPVLAATFVAEIGDVTRFPTAGALCCWAGLTPRHYESDKTVHRGHISKEGDPLVRWAAVEAVQRQCEPTVKAVKDEIVARRGKGARNIAKVAAARRMLEVVYYVLRDGQARCLTSAAAVA

SEQ ID NO: 327108 - protein, 317 aa, unidentified
MEQRQSSRKVGGIDVGKHRLDVAVHGLEDEQQTANEVAGFSELIAWLRAREVGRVGLEATGGYERGVRAALEQAGFEVVVHQPIEVRRFAQLKRWRAKNDRLDARLIAAATAQVEAVRAAQDPRLTELAERLTAYEQITDQAAELKTFLESVTLADVEKSFRAQIAALERLKAKLLAVILRRLKAEADLLDRFRLLLSLPGVGPVVAATLVIRMPELGSMRRGQAASLIGVAPFDRDSGQWRGVRFICGGRARPRRMLFLAAWQAKRCSPTLKAFADQLLARGKPAKLVIVAVMRKLIEAANLVLQRGQPWLKQPAT

SEQ ID NO: 327109 - protein, 346 aa, unidentified
MKIKRVGVDLAKNIIHVHGVDRQEKVVWRRQLRRASWLKVLLDKVEPGCEIGMEACAGAHHWGRKLQAHGLVVKLMAPQFVKPYVKSNKNDRNDAEAICEAMSRPTMRFVQVKNVEQQDIQAVHRVREELMGQRTAKANQIRGLVAEYGLVAPKHLSQLRTAVPEWLEDADNGLTARFRRLLLGLRCDLTELDRRISELDAEIAAMAKSNPVAQRLQQLRGVGPLIATALVAAVGNGEQFTKGRDLAVSLGLTPRQHSTGGKERLLGISKRGDSYLRKLLIHGARSVIYRSKDKDDGLSRWIKALAARRHINVVCVALANKTARMAWAMIRNDTDYQPQRAAQPLG

SEQ ID NO: 327110 - protein, 316 aa, unidentified
MAEGAVYVGIDVSKPQLQVAIRPSGEHFAEANDARAVRRLIKRLQALPCRRIVLEASGGYEALLAAELYAAGLPVVVVNPRWARDFARSIGQLAKTDTIDAQLLAQYAELPQLKVRELPDAQTRELKAWCARREELIEMLVAEQHRLEHVPPRLRREINGHIDYLRKRLKHLDHDHDLDQAVRNSELFRQQSALLTSVPGVGRVLCVTLLARLPELGRLNRAEAAKLVGVAPLNHDSGRLRGVRMIAGGRAALRRMLYMAALSAIRANPVLRAYYRHLRDQGKPGKVALVAVMRKLLLMLNAMLKTQTPWRPPCPA

SEQ ID NO: 327111 - protein, 344 aa, unidentified
MGYFAGLDVSLEETAICIVDGSGQIAREARVASEPEALATFFEACGMTMERVGLEACSLTAWLHQGLSEAGIAAICIEARQAKAAMGAMPNKTDRNDARGIAQIMRTGWYRAVHVKSPSCRSWRALLTARRMVLNKRRDVENGLRALLREVGLKVGTPSRRNFPARVRELAADDPVLASLVEPLLSIIAVMTHEAERLTKRVLDEVRVEPTCRQLMTVPGVGPLTALAFRATIDRPSRFRKSRDVGAHLGLTPRRYQSGETDLQGRISRCGDELARTALYEAAHSLLIRSTRWSALRAWGMRIAKRRGMARARVAVARKLAVILHRMWTDGSEFRWSKQPAVAA

SEQ ID NO: 327112 - protein, 345 aa, unidentified
MHIASIGIGLGKTTFHLVALGDRNKVLVRKKFSRTQLLAYTANLPLSLIGLEACAGAHFLGTVLREQGHQVRLIPAQFVRPFVKSNKNDYRDAEVIAEAVERENMRFVPIKTEDQLDLQALHRVRDRLVARRTSVINQIRAFLLERGISFRKGPASLRRQMPEILENANEKLSTRMRRLLDFLWQEWRGLQLQIESLNADVEQIASSDPTCVRLQQIPGVGPLVSTAVVSAIGNGAAFKKGREFAAWLGLIPRQWSTGGKTKLLGISKRGNPYLRKMFIHGVRAAVMRVKRDGSNLGTWMSGLETRAARNVVIVATANKLARISWAVLASGNDYQPRYKPLAFSN

SEQ ID NO: 327113 - protein, 402 aa, unidentified
MNAVGIDVSKGKSMVAIMRPFGEIVSTPFEIKHTTSDIHSLVELINSVEGESRIVMEHTGRYYEVLAHQLSEANLFVSTINPKLIKDFDNDSLRKVKSDKADAVKIARYALDKWQNLKQYSVMDELRNQLKTMNRQFGFYMKHKTAMKNNLISILDQTYPGVNTYFDSPARSDGSQKWVDFASTYWHVDCVRKMSLNAFIDHYQNWCKRKKYNFSQSKAEEIYGKAKELVPVLPKDAITKLIIKQAVDQLNSASTTVESLRTLMNETASKLPEYPVVMAMKGVGTSLGPQLMAEIGDVSRFTHKSAITAFAGVDPGVNESGTYEQKSVPTSKRGSADLRKTLFQVMDVLIKTHPQDDPVYQFLDKKRAQGKPYYVYMTAGANKFLRIYYGRVKEYLSSLPES

SEQ ID NO: 327114 - protein, 419 aa, unidentified
MFKIFRNNCCGLDVHKTRIYACIGITDADGRTDYRQKRFSSFSRGLRELAGWLAEHGCVEVCMESSGKYWIPVFNILEKSCYVELAHPKYTKPQKGNKTDRKDAKWICDLFMCGMTRPSFIPPPDIRHLRDLVRYRFKLTNCLAGEKNRALNCLTVSNLKLDDVFSDVFGKSASSITRHILGHPGERFDVTPFVDGRCKTPIEEIQAAVDGSISPEQAVKLREILRHIDEIEAHRQNIEAEIMRIVAHYEPFLELVRTVPGFSANPMTAITVISEIGVDMSVFPTAKNLSSWAGCCPRNDQSGNKRRSVRISRAGVYLKPLLVQVANAVVKSDRHPECKERYRRIKARRGHKKAIIAICRMLLTAIWNMLSRLEPYSADGYLVDRRTDRTKVVTTSQALHLLRSRGYVIKDDDVMPAPA

SEQ ID NO: 327115 - protein, 415 aa, unidentified
MTKIIRIGMDTSKSVFVLHGVDAAEQPILRRKLRRKQVLEFFAKLEPTKVGLEACGAAHYWARELRALGHEVVLAPPQYVKPYVKRNKNDAADAEAICEAMSRPTMRFVPVKTAEQQAALMLAGSRDGLIRRRTQLSNTIRGYAAEFGLTAAKGLDKIEPLLARIAAAALPELAKEMFATYAREYARLKVEITKIEAKLMAWHKDNELSRRLEEVPGVGPIGASLAAMKVPDPHAFGCGRDFSAWLGMTPQDHSTAGKTRLGVITRAGDEALRRVLVVGATAVIQKVKQGKGQPSPWLVALLRRKPPKLAAIALANKNARIIWKLMVSGERYNPARAAAARGEGVEVPSCTSGTPCSPPSRTLRAAAGDGPRGPSLTAAALGVTGPRQVGTEKRPSGRTKKLTLKKLENVAPAAV

SEQ ID NO: 327116 - protein, 343 aa, unidentified
MKLMRVGVDLAKNVIQVHGVDRNEEPVWRRRLARKQWLKVLCETAEPGCEIGMEACGSAHHWGRRLQAQGFTVKLIAPQFVKPYVKSNKNDANDAEAVCEAMSRPSMHFVAVKSVEQQDIQAVHRIRSELISQRTAKANQIRGLASEYGLVAPQELRRLCRAIPDWLEDPENGLSERFRWLLNGLWDDLKGLDARVAELDREIASIAREEPAARRLQQLRGVGPITATALVAAVGDGTQFANGRQMSAALGLTPRQHSSGGKDRLLGISKRGDSYLRTLLIHGARAVIRTAKHKEDRLSQWVTALLERRHPNVVAAALANKTARIAWAMLRNGTDYEPNHVTC

SEQ ID NO: 327117 - protein, 336 aa, unidentified
MNTICAVVGIDVSKKKLDIALLVDGKTRAKVVENSIAGHQALLAWLEKSKVPLSTLHVCMEATGVYSEPVALALHQAGITVSVVNPACIKGFGHSENLRNKNDIIDAGLIARYCAAMKPEHWAPAPLEQRQLKAWSMRIQTLKEIRQQEQNRLEALNVSGVQDVAQHVQQLIDWLSKEITTLEKDINDHIDRHPKLKHDAELLASIPGLGMTTVAKILGHMGDIKRFDSAKSFAAFLGVTPKQRSSGSSVRGRTMISRTGNTSLRAALYMPSLVAKRHNPILYRFAERLAATGMAKKAVIGAVMHKLTHLIYGVIKNGKPFDANYFAKGLAIQDGI

SEQ ID NO: 327118 - protein, 378 aa, unidentified
MKSILYVGMDVHKSNYTLCCYCVEKDETFAAVQMEPKATNIIKYLEQIKRNYGGCEFLCGYEAGSLGYSLYHQLIAYGIDCVILAPSTMADTNNRRVKTDKRDAMNIAKNLAYRTYSAVYIPTEEDNAVKEYIRMRDDAKDNLKKLKQRVLSFCLRNGRHFTETQSHWTLKHIAWLKRQDFGNAILQEAFEEYLTLYFQATDKVELFDKRIEELAKRESYEEKVKKLTCLIGVKAHSALATIVETGDFIRFKTAQQYAAYLGLVPGEKSSGESKRRTGITKAGNSHVRKLLVEAAQSYSRGAVGYKSKTLSARQKGNDPKVIAYADKANERLRRKFYRLTFNNTKRNVAVTAVARELACFIWGMMTGNTDRAIEESVS

SEQ ID NO: 327119 - protein, 311 aa, unidentified
MTKSVVGVDVSKGKLDVGVNDEKRVQTWTNDASGCTGLGEWVVEQGVSLVVVEASGGYEAAIVSELVSRGQAVALVNPTRVRAFARAEGVLAKTDKIDAQVIARFGATMKPQATARRDEAQVALTEQVSRRRQLVVILTGEKNRLQTASPAIQAHIARHISWLQAEIEMLEQQISQAIAAHPEWTETVQRVDSVPGIGFITAATLVADLPELGQLNRQKIAALVGVAPFNHDSGKQRGKRRIFGGRTSVRSVLYMATLSAIRYNPVIKAFYQRLLDKGKLKKVALTACMRKLLVILNTMVKTGQNWNPAIS

SEQ ID NO: 327120 - protein, 412 aa, unidentified
MQIIHECCSGLDVHAKTVVACLIRRGKKQTRTFSTMTDDLLRLSDWLVEEGCTHVAIESTGVYWKAVFNILEGVLEVILVNAQHVKAVPGRKTDVKDSEWLADLLRHGLLRASFIPPLEIRELRELTRYRQSLIREQTALSNRVQKLAESGNIKLSQVASDALGVSGKLMLRAVASGETDTEKMAQLARRRMRSKIPELRRALEGRMTKAQRWVLGELLTRYEEIERAVERVERQIDEEVSQGPDPFVEEAVTLLQTIPGIGESVAETIVSEIGVDMGRFATDGHLASWAGMCPGNNESAGKRKSGKTTKGSTYLRAALTQAAWAASHTKGTYLQAQYQRLAKRMGKKKALVAVGHSILVIVYHVLANRASYQELGGDYFDRQNVVQQRTRLIRKLETLGLKVTVEELPVAA

SEQ ID NO: 327121 - protein, 348 aa, unidentified
MTVYIGVDFHARQQTISYLTTEDGEIKREELDHREPAKVRKFYEQFAGEQVVVGFESSGYAAWFEELLEELGYEIWIGHATAIRSFARRRQKNDRRDAELILELLVEGDFPRIYRYSPESRAVLQELRYRQRLVKMRTMVMNSLLYMATSRGVALRGQLRSKRGLARLQQIPLPATLAAQREELCQLLLELTARIEKVEISLEAKAARDIRVRRLRTHYGIGLLTGLCLVHTLESVERFANPRKVTAYVGFDPVEDSSGQRRRIGAISKQGSRLLRFLLVEAGQIAVRKDEELARCYRRVQVRRGHAKAKVAVGRRLLVRAFIMLRDEIDYAEFQRRGVAARSAREIA

SEQ ID NO: 327122 - protein, 346 aa, unidentified
MLYAGLDLSRQKLDVHILDEEGRTVDLLAVRPDADALRTLAERIARHGQPIEAAIESMNGARFVHDALERYGWDVAIADAAKAKGLAPLAAKTDKIDARVLAELARRELVPAIWLPDPDVRAERERARFRLYLVRHRTSLKNRIHATLITFGHPVPVSDLFGVRGRELLAALAIPEPWATTLGTSLRLVDELEAEIGTCEAELRAMGADHPYVPLLCTVPGISWVLGYTIAAEIGDIGRFASPKRFTGYTGLCPRVYQSGPVDRRGSLTKSGPKYLRWALVEAAATAARNPQYRERYEHTKRRLGKQRGSKIARVELARELASAIWHMLTRQEPFRAAGPTFDLVA

SEQ ID NO: 327123 - protein, 486 aa, unidentified
MKKKRTYGSTDVERLDLLALIRLLTVGCIVAVDVAKTRFVAAIATATGDVLKIVRFAHPVQTWAFLRVMEALQEAQLAPRVVMEPTGTYGDALRYQCHVRGVSIEMMSPKHTHDFAEVLDGVPSMHDPKAAVALARLAVIRPSRGWSPDSEQKRDVRALLDRRWPLSTTQALYHGHLEAMLARHWPELGSLIDVHEQRSWMPLLRQYPGPRAVGAASEEAAQVLRKASRGRLSSERVAAIVEAARTSLGMPMTKGEETKLRSIVEQIEQQTKGLDAVDRELSEMVAKDEVMSRLAVVVGPACAASIVSHVGSPTSFATPSALEKAMGLNLKVKSSGNGEGKLHITKRGPAQVRQLLYLAALRLLKSDRIVAAWCRARKSYGGESKKRKAIVAVMRKLVRALWHVARGATFDASKLFDVRRLDLSGAADKNAATAPVTATQPTQDVRRLDLSGAADKDAVTAPVTANQPPQAAPSLRCEGGVPQQHA

SEQ ID NO: 327124 - protein, 354 aa, unidentified
MKILALDLGKYKTVGCAYERESGKHRFRVSATTPAALQQLVQEEKPDRVVIEVCNIAGWVCDLLRGMGVEVQVANTSDDAWRWRKVKKKNDRCDALKGAQLSAVNQLRTVHIPIIEVRQWRALIAFRQQLVSRRGKMKNHIRDLLLSEGQLLPRGAKCWTQLGVARLEAMAKPLAAVGVHELWRGQLHLELRQLREIQAEIKVVEEKLDAIAASDPRLALLRTIPGVGPRLAEAIVALLDQPERFRNTRQVSAYIGMVPKELDSGETVRRGPITKHGSRLVRSLLVEVAWAGLRYNPWVRQTYQRISGGKKSRKKIAIVAVGRRLLVRCWAMLRDGTCWQTPLTVATSGAQRTQ

SEQ ID NO: 327125 - protein, 342 aa, unidentified
MQQSIFVGLDLGSSHCHQTVINADGAIIRSRSVPTSEQHLRNSFADLQGDVHVHAEASELSDWVRSIINPMVTRFVISHPRSLAWIAKDSVKDDAVDARKLAELLRFNLVHEVYYEDRADRRSFKQLVVHHEQLSREQARLKSKIKARLRTLGIIRKDAWLFSEAGQIELFASITDPLIEQMFCQSFAVLNQMLISLMDAKTAMIEFSRRLPEVRLLQTAPGVGVITACRFVAYIQTPQRFSNKQKLWRYARLGITCRESNGKRLSHPHLDPAGVGSLKDCSRKIFEAARRTKTDNSFKCFYEQSLANTKNAVHARLSTQRKILATLRAMWQANQPYRNDGG

SEQ ID NO: 327126 - protein, 358 aa, unidentified
MASIPPTSRVVIGGIDTHKDLHVAAVLDTAGVLLGTEAFSTTRAGYRALVRWLRGFGDVRLVGIEGTGSYGAGITRHLGEAGIEVAEVDRPDRSDRRRRGKNDTIDAENAARAALTGRRTSTPKTKDGKVEALRVLRLTRTTAVKSRRAALQLLGNHIVSAPEELRDQVRNLTRMQLIRTCASWRPDTTGFRDPVVATRVALKSLARRILDLNDEIADLDQLITTLVGELAPQLVAATGIGVETAGQLLVTAGDNPQRLRSEPAFAMLCAAAPLPASSGKTQRHRLNRGGDRQANSALHLIVITRMRVDQRTKDYVTRRIAQGHSKPEIIRCLKRYVAREIYYLLKPPTQANMKSRAA

SEQ ID NO: 327127 - protein, 376 aa, unidentified
MSKDTLYVGLDTDKKSIEVALAEGLPGGEVRAWGKVANDARSVLRLVKRLRAGGRPLEMCYEAGPCGYGLDRLLNGQPGVRCMVVAPSLTPRRPGDHVKTNRRDAIMLARLLRAGELTAVWVPDPAHEAMRDLVRARGAATGDLVRCRQRIGGFLLRQGIGYVGKPWTRKHRAWLGELVATLPLAAHRLMLGEALQALDEATARRDRLTDHIAELVPGWSLAWLVDALQALRGFALINAATLAVEIGDPRRFATPRQLMAYLGLVPSESSTGDKVRRGGLTKAGNGRTRKALIEAAWTYSRPARAPHGNPRHAPAVVAIATKARHRLSQRYRRLVARGKRPVIVVAAIARELSGFAWAIAQVAGPTATAPQPPAKR

SEQ ID NO: 327128 - protein, 476 aa, unidentified
MKQRQRSPSKPKLSQGVPKPASLAPREKPVTLSVQHPHAAGIDVHSDMHMVCVPADSDPEPVRRFGANTCDLEAIADWLKQCGVTTVALESTGVYWIPLLELLEARGFEVWLVEPGQLSHCGARPKTDVLDCQWIQRLHSYGLLRPSFRPPESILALRGYWRQRQMQIRYAASHVQHMQKALEQMNVKLTEVVSDIAGLTGRRIITAILAGERDLYKLAALRDPKCKNDLSTIAKALQGTWRPEHLFALQQAYDLYQFHHQQIDQCDAKIQAELPKLPNRAGDKPFTAKPPRRGRKANDLGFDACGPLFKALGVDLTEIEGIDVGTALVILAEIGVDVSRFPTEKHFAAWLGLCPRVYESNKTQKKKGPRKGKNRVAIALRMASQSLGRTMSPLALFYRRIKSRIGGKGAITATAHKLACLVYRMLKYGRDYVKQSMDDYEAKIRQQQERSLRRKALALGYELVLKPAAPQSVSDS

SEQ ID NO: 327129 - protein, 320 aa, unidentified
MHSATLGLDIAKASFHAALLHHGKLHHHRFDNSTAGFAQLQAWLVKHRSKRLHACMEATAGYGDDLADFLYNAGHTVSVVNPARIKGFAQSQLQRNKTDRLDAALIARFCAQQQPEAWTPPPAEIKQLQALMRRLEALQEMRQQEVNRLEQAGKQALIHESLAKIIATLDAEMARLRQLIKQHIDQHPHLQRDRELLLSIPGIGEITAAWLLSEVQVQTYKSARQVAAHAGLTPQHHESGTSVRGRTRLSKTGNARLRRALYMPALSAKRYNPIIEAFCQRLEKRGKRPMEIIGAAMRKLLHLVYGVLKSGKAFDASFAS

SEQ ID NO: 327130 - protein, 452 aa, unidentified
MEVIYSRCAGLDVHKKTVVACVIWTKRNGRKKQETRTFGTTTGELLQLLTWLQGWGCTHVAMESTGVYWKPVYNILEDHVEVLLVNARHVKNVPGRKTDVSDAEWLAELLRHGLLRGSFVPPREQRKLRELTRQRSKLVEERAAVVNRLQKVLEDANIKLAAVVTDVMGVSGRAMLAEIVKGQADPRAMADLARGRMRSKREALTQALTGRVQDHHRFLLEQHLIHIDFLDEQIERFSREIAAQIKRMSAMPEYTVPAPASESADVGEQPEPLTYARAIELLDTIPGIDRWLAEVMVAEMGIDMSRFPSHKHLASWAGVSPGNNESAGKRRSGKTLQGNKNLRKGLVQAAHGASRTKNSYLKAKYHRVAARRGKKRAFVAVGHSILVSAYYMLLRNEPYRELGGNYFDERKRELVVHHLVRRLNKLGYQVALDGQQTVLEVQAEDFPVAVAA

SEQ ID NO: 327131 - protein, 343 aa, unidentified
MTFVGCDLHTRQQQVAVLDTTTGEILEQQLLHEGTIVEDFYATLPRPVTVGIESTGYAIWFHTLLQRLGHTVLVGDAAKIRAMVVRKTKTDRRDALHILDLLRHDRFPSIWIPDPATRELRALLMHRLRLVRIQTMLKNGVHALALNQGLARGSKLLRRAGLAQLQALPLPPYTAQRRDQSLDLLATLRTHLDHLDEAIAAAALAHPDAPRLLTHPGVGPVTALATVVVLGTVSRFPDSKHVVSYVGLAPALNASADKYRLGKITKQGSALLRFVLGQAAAHAARLDPDLTRTYRTLAQRRGRSKAKVAVARKLLVRLFIMLRDHIDYDEFRRRGRAPAVVPG

SEQ ID NO: 327132 - protein, 392 aa, unidentified
MVLVGIDVAKDKHDCFIRSSEGEVLADLFTIPNNRDGFDLLLKKIRSSCHPEDKIKVGLEATGHYSYNILGFLLDNGLPTFVINPLHTNLYRKSLSLRQTKTDSIDARTIAAMLMSDVDLKSYTDTAYHNEELKSLTRYRFDIVSERAKLKQSVSRLVNILFPELESLVPTLHMASVYAVFSEFPGARHIAASHLTRLKNVLYDASKGRYDKEMAIELREAARRSIGSSMPAKSLELQHTIRLIRELDKEIEEVEAAIKEIIDQMAPPILTIPGISYRMGAMILAEIGDFSRFDSPDKLLAYAGLSPSTYQSGKLNATGAYAHMEKRGSRYLRYALFNAAKYVCHWDPTFSAYLTKKRAEGKHYNVAISHAAKKLVRVIFALQKSGKAYQTA

SEQ ID NO: 327133 - protein, 399 aa, unidentified
MTESSDYESVQVFIGVDVGKDTHHAVAINRSGKRLFDKALPNDENKLRSLISDLKQHGQILLVVDQPATIGALPVAVARSEGVLVGYLPGLAMMRRIADLHAGEAKTDARDAAIIAEAARTLPHALRTLKLADEQIAELSMLCGFDDDLAAQTTQASNRIRGLLTQIHPALERVLGPRLDHPAVLDLLQRYPSPEKLASLGEKKLAAQLCKLAPRLGKRLAADIAQALAEQTVVVPGTNAAAVVLPRLALQLITLRKQRDEVALEVEQRVLAHPLYPVLTSMPGVGVRTAARLLTEVACRAFASAAHLAAYAGLAPVTRRSGSSIRGEHPSRRGNKALKRALFLSAFAALRDPLSRAYYTRKMSQGKRHNQALIALARRRCDVLFAMMRDGTFYTPQAS

SEQ ID NO: 327134 - protein, 313 aa, unidentified
MPVSLSKPIVGVDVAKNELVIYQFDGDLLEEIPNTKISIKQWLKALSGTVAIAIEATNIYHLDFADLAYEAGCTIYMVGGYELKHYREGVKIRAKTDALDAKLLARYLKNEAEELRPWTPPSPLYRQLLSLFRRRAALVQARVGLVQSWANEPLLKAAFAEQVKSMQQLETLIEKTISDQLKEAGLLGQLKRCLKVEGIGFLTGARLITAFQRGDFRNADAFIAFLGMDLRVAKSGQKDARRSLTKRGDPEARRLLHNAAMSASRTKAWKGYYEEQRTRGFSTTQALVMLARKLARVVFALLKGQSEYQPKAS

SEQ ID NO: 327135 - protein, 415 aa, unidentified
MCKEKIIKKGRFVKREVLVVGIDIGSQSHIATGVSLESDFTKPIIVRNNRGSYERFIETIEGWKVKLGCKDVVVGFESTGHYWKPLGYYLKSRGISLVEVSTISTKKSREMMDNSPLKADKKDARIIADLVRQGKVLTAILPEGKILELRNFMHTRENFIKERKGIENKIHKIIDITFPERMSVIKSVENKTSIYLLRKAPFPDNIIKRGLKWLKREMRKRSRGRYNDLDAERLYSLAKDTIGLKIGLEGLHYELKSLLKRLEVLKEEIKDIEKHIEEIARDMEEYRYIKSIKGVGMITTAAIISETGGIKNYGNAKELEKLAGINLYEVSSGKHKGEKRITKMGRALMRQKLYLAAIQQARENMPLNNFYKRLINRGIKRPKALIAVSRKLLTIIFALVRDGREYEEGYVKEAA

SEQ ID NO: 327136 - protein, 339 aa, unidentified
MAKTTTIGLDIAKNVFQVHGVDEVGQVVLQRRLRRAQVESFFAKLAPTLIGVEACGSAHHWGRVLTGLGHEVRLMPPAYVKPYVKRNKTDGRDAEAICEAVGRPNMRFIAIKSEEAQAVGSLHRARDLLVRQRTMLANALRGMLAEFGVVATRGHKGLTELIRGVDAAPIPEAARVAVGAMARQWKELDGEVDALERRIVRAAKENEAARRLMEIPGVGPISASAIVTAVADPHVFRSARGFAAWLGLSPRQNNSGDKRRSGRISKQGNRNIRRLLILGASAHMRQVRARKGKDPWLSALLARRPVKVASVARAAKTARIAWALLARGQRYRAPAAAAA

SEQ ID NO: 327137 - protein, 394 aa, unidentified
MKLVGIDVGKNSHHFCVMDKETGEFNVVPSSFSNNKEGFDFLINSLKPYSKKSILIGMEDTGHYHVALLKFLLSNGYTVALINPKTTDLTRKMEGGITKNDKLDTITICDVLDTPERKKQYRITKVDRFDLYEQRQLTRHHHNLKEELNVYCNRLQKSIDLVFPEFNTLFSSKYSIVYMNLLKTFGSAEAIASTDIRTIRKCFEIKGRGNRISLTPEKLKECAKNSIGISSEVETIQIKHLVSQITLIKEQIAEIDKKIEEFSITNNSPILSIPGISHFSGTSILAELGDIGNYSKPSQIIKFAGVAPYHYESSQYNAQHTGITKKGSKYLRKTLYQIILTVINNNPVFKKYYRLKISQGKGHRCAQGHCIRKLLRIIYHLLETGQSFDPALLR

SEQ ID NO: 327138 - protein, 424 aa, unidentified
MKYSQNEKIAQVTEKTLIVGVDVASMTHFARAFDFRGIELGKIIRISNDAQGFRLFKLWVNELKGKYNRDTVMVGMEPTGHYWFNFAQFLKDSGIRIVLVNPFHVKRSKELDDNNPTKNDRKDPKTIAMLVKDGRYQVPYVPEGLYSELRTAMETRWHIVQGLNAIGNRVKRWLSIYFPEFSKVFSAWEGKGALIVLKEFPTPEKVLQKGVDGIAARWRKDKLRPLGLKRAMRLVEAAKNSVGVREGLRAAETSLRMLLAEYEMKKQQLEEIMVLVEELIYQIPGIKEVLKIKGIGLVTAAGLMAEVGDLSRFDHPKQIQKLAGLNIRENSSGKHKGKTTISKRGRRRLRALLFQGIMPVVAKNPEFRRLHQYYTTRAQNPLKKKQSLILLCCKLIRIIFALMKKQVAYDPQKMMNDIQRPVAA

SEQ ID NO: 327139 - protein, 417 aa, unidentified
MRRPASGGMRTFGTLPIEDALKVQKEKPASMTKNSNSKNLQKKQAAKEQGEQKLWAFVATQNQTQDANKRLTFGIDLGDRASCWCALDAEGEVLARGEVVTEKQPLEVLFSRIPKSLIAIEVGTHSPWVSRTLEKLGHEVIVANARQVKVISESNKKNDKRDAELLGRLARADPKLLAPIKHRGEAAQVDLIAVRMRAQYVELRTQAINTVRGLVKATGQRLPVCDADSLNRTHAEHLEPAVRKLAEQMLGLVEELSKQIAKSDETLKQIGKERYAKEIGQLEQVKGVGPVTALTFVLTLDDPTRFPKSRDVGCFLGLRPKSNQSGSSEPEMRISKEGDGYLRKLLVQCAQYILSKRGPETDLKIWGMQIAAKGKKTAKKRAVVAVARKLAVLLHRLWVSGERYEPLRHNRGLAKAA

SEQ ID NO: 327140 - protein, 353 aa, unidentified
MRKIAYLGLDVHTNGCVLGDMDQDGGFRGNQCFGTSEKGLIGAIQGVKAKEKYLVIEEGTLAYWAAQVARPYVTEVIVCDPGENWLICRSSSKHDKVDTRKLCRLLRLGELKRVYQAETDQRAIFKAAVQHYLDLRDQQVALKLKIKATYRRWGVIDVEGEEVYGLRGRDKYLKQLKHLSVRNQLGRLYGVLDQTEAMQKLALREMKRLGRNYAEIREFKKIPGIGDIGAHVFDAFIQTPHRFANKRLLWRYSRLGVTDRSSDGKPLGYKRLDRAGVSELKALSYRAWMSAMKGDNEVKQFYLNSLQRTYSRVHARLNTQRKILAVMYGMWKKGEPYRAEHFLRSVDEVALYD

SEQ ID NO: 327141 - protein, 318 aa, unidentified
MKQNNFQNVIGVDTHKDTLACWCNGKFKEFKTNISGFKQALKWGGKSIWAIEGAYCFGQAFSFYLTKNGCKVYDINPLLTKSWRSALKISSPKNDYGDAKVISLFANIDNMNEVSLETIKLKEKLTARKALVKQKTQITNAIKMLYYTRGEELPFKLLYTKKALNYFKNSNDIILKTQAEILEKVIEGINSLEKVLEEEIPENVKKLKQIKGISTITACIIYTETKGRIYTKEQFANFCGLAPIDCSSGKTQKMRNNRGGNRILNSVFYSLSIIQIRCNPVSRAYYEKKKSEGKSPRHARKCLARQLANVVFNVLKKL

SEQ ID NO: 327142 - protein, 348 aa, unidentified
MVLIGSDFHPSWQQVSWLDRETGETGDQKLVHEAGSVEKFYKQFPAGSRIGMEATGNCQWFLELMAKLGHEVLVGDAAKIRASDSRQQKHDKRDARLLVQLLAEDRFPRIWVPSREEKDLRQLLIHRYKLVRIRAQVKNGLQHLALNQGLQRKKRLWSEAGQKALCELPLAPWASRRREDLLKMRSELDAKIDLLDQAVMEAAEKNEKAKLLMTQPGVGPITSMAFVLTMGDVKRFPRGKQVASYLGLIPREYSSGGKQRLGSISKQGNSFLRMLLVEAAQGAARYDAGMRNEYLHRCHTKAKGVAKVAAARKLAIRLYWMLRTNTAYPEVVHVESSSRVALVVRHGG

SEQ ID NO: 327143 - protein, 405 aa, unidentified
MNAVGIDVSKGKSTVTIRKPGDVILLPPRDIPHTKSQINALIELIKGLDGETKVCMEHTGRYYEPVATWLSDAGIFVSAVNPILIKGFGDDSLRSPKTDKADSKKIARYTLDRWANLKQYGCMDKTRNQLKTMNRQFGFYMDQKTAMKNNLIALIDQTYPGANSFFDSPARNDGSQKWVDFIHTYWHVDCVRSKSLETFTEHYRNWCKRKGYNFSTLKAQEVYQLSSDLIAVFSKDANTKMLIRQAVAMLNTASATVESLRLEMDKTASTLPEYPVVMAMNGVGPTLGPQLMAEIGDVTRFTHRGALTAFAGVDPGKDDSGQRVRKSVPTTKKGSPSLRKTLFQIMDGLIKRSPADDPVYAFMDKKRAQGKPYYVYMTAGANKFLRIYYGRVKEYMASLETTQQQ

SEQ ID NO: 327144 - protein, 388 aa, unidentified
MQVVADRAAAPTAIQTDLRAIFVSLELSRSTWLITSLSPGGGAKMSKHSVQAGDIAGLLKRFAQLKEKARARTGRDFPVITIQEAGLDGFWIHRVLQSEGIESHVVDPASIATSRRRRRAKTDKIDGETLVRTLLAYKRGEPRVCAMVKAPTPEEEDSRRLCRERKVLTAERVLHVNRIKGLLFCQGISGYEPLRRDRHERLEELQTGDGRLLPQHLKAQVNREIDRLELLLKQIKAVEAERDALLVAAHTPAAVPASMLLNIKGIGPEFAAVLWSEGLFRHFDNRRQVAAYAGLAPTPWQSGAVDREQGVSKAGNPRLRTTLIQLAWLWLRNQPHSALTLWFHERVSRNGGRLRKTTIVALARKLLVALWKYVTAGVVIEGAAMTAA

SEQ ID NO: 327145 - protein, 311 aa, unidentified
MNTVRYIGVDLSKLELIVDLAAEAKPRAFTNDAAGHAALIAALPAEAHVVCESTGGYQRPLVRALQQAGVRVSVVMPGRVRAFAHARGLRAKTDPIDARLLSAFGQAMALGAPPPPPSAAQEELQQLMRARRALIALLNEESSQVDHCTLPFLQAQATERRTLLERQVREIEKRLRELIAADPVWRQRAARVQQVDGIGEVSAWTVLAEMPELGQLEKGQAAALLGVAPDPDDSGPRHGRRHISGGRSSARKVLYMAALTASQRNPVLAPFYQRLVHERHKPKLVALTAVMRKLVELLNRILADPDFKLAG

SEQ ID NO: 327146 - protein, 349 aa, unidentified
MRFYHGPHQQWCGIDLHARTMYVCILDAQGQALVHKNLKADPKAFLEVIAPYREDLVVAVECIFTWYWLADLCAAEGIEFVLGHALFMKAIHGGKAKNDRVDSLKIATLLRGGMLPQAYAYPAGMRATRDLLRRRLHLVRKRGQLLAHIQMTAQQSNVPPLGRRIAYPANRAGVAEHFEDRAVRRSVAVDLALLERMDGIVRELELDLVRQAKQHDPQAFQLLRSIPGVGKILALTMLYEIHDIHRFGRVQEFASYARLVKCAKESAGKRHGTSGAKMGNVHLKWAFSEAAVLFVRHSGEGKKALARLQKRFGKGKALSILAHKLGRAVSFMLRRGKAFDRERFLATMS

SEQ ID NO: 327147 - protein, 386 aa, unidentified
MQKLNDLSRSLTALEPDGTLIAVIEMSLSSWLVAGIVPGVERQPLKKLAVDESALLKLLHRWRDEAEKAGRRIERIAVAFEAGRDGFWLARWLRARSIEAHVIHASSVAVSREHRRAKTDRLDTELLKRAFLGWLRGERDHCKMVAIPTTKDEDAKRPNRERESLVGEQTRIVNRMKAALIRLGIRGFNPKLKKAAGRLEDLRTPEDEPIPPNTLAELRRDMERRRLVSDQIRQIEEARLDRLKQAPGEGPHAMVRLLARVIGVGIETADMLVQEVLSRNMRDRRAIARYAGLTGSPDESGTKRREKGLARSGNARVRRGMIQLAWRFLMFQKNSALAQWFRARTENARGTRKLMIVALARKLLIALWRLVREGVVPDGVVLRPAQ

SEQ ID NO: 327148 - protein, 407 aa, unidentified
MIFVGVDWAEVHHDVCIMDADGQVLERKRISDSLTGLSELHALVANHLGENDEPGDVIVGIEKDRGLIVMSLLAAKYQIFAINPIAAARYRERHVTSGAKSDPGDAKVLADLVRTDRHNHRAVAGDSALSEAIKLLSRMHQTTIWNRQRQVNSLRSALKDYYPGALEAFGTDLSGQDAVAILAIAPTPSLGRTLSRAKITSALRKVGRSRHLEERTERIYQTLRHEQLRQPAVLETAYGVATETAIANIVQFNASLVKLEASLSEHFEQHPSAKVILSLPGMGTVLGARVLGEFGDDPNRYSDAKSRRNYAGTSPITRASGRSRVVLARHSRNKRLAGALDQWAFSSLLPSPGARRYYNELKARDKHHRKAIRQLANKWVGILHACLESGTPYDENIAWSRRQERAA

SEQ ID NO: 327149 - protein, 406 aa, unidentified
MTAAQNHSTQGATARLFASFELGWSKIKIASTCDPLQKPRIQEIRARNLEALQAELAKAKKRFGLPEDATVVSCYEAGRDGFWLHRYLTTLGVKNVVVDPGSLKVNRRRKRAKTDRIDARLLLDNLLDHEAGKKHVWSVVHVPTLEQEDRRQLHRELETLLGERTEHVNRLKSLLATLGLKLDKVDAHFESWLDKQRVLESGAEVPGDYRERMLREYRRWELVNRQAQDLEEEQKQRVRTSTAPAMTKVRKLMRLKGIGIKSAWLFGMEFFGWRTFRNRRQVGSLAGLTPTPNQSGETSKELGINKAGNSWIRSLIIEIAWGWLHWQPKSKLSCWFKAHFGSGAGRSRKKGIVALARKLLIALWRWVEFDEKPEGAVEVDWEPKVRPTKAPRGEGATRRTRRGVKG

SEQ ID NO: 327150 - protein, 343 aa, unidentified
MRTITTIGLDIAKSIFQVHGVDAVGQVVIRRQLKRRYVLAFFRKLPSCLIGMEACASAHHWSRELQALGHTVRLMPPAYVKPYVERHKNDATDAEAICEAVTRPNMRFVATKTPEQQSCLTLHRTRHLFIRQQTSVINAIRAHLAEFGIVAPVGRNGVAQLLGIAADANDKRLPEVARACVTALGAQLRMLKTQILEFDRMINAWHRCNEASRRLDDIPGVGPALATALIASVADPKAFRSGRDFSAWIGLVPKQNSSGGKDRLGNISKRGDRYLRSLFTTGALAVIRYAKIHGTRHRPWLTALLARRPTKVAAIALANKIARMAWAIMARGERYQEPAALAA

SEQ ID NO: 327151 - protein, 379 aa, unidentified
MTTTVPELAIGLDLGDTHSQVCVLDSRGKITSRSKVATTPESFEALFHSFAGKPVRLTIEVGAHSRWVQKLARRCGIEDLVVANPRKIALISQSLKKTDQEDAYVLARSGQGLPEMLSPVEHSSDELYSDRALVESRALLVRTQSQLVTRIRSLVKTTGSRLPPCSADAFFRKAPEHIPPILRGACAPLFEVLEKIHQQIAAIDKSIRQLVRKKYPIAARLQEIPGVGPIVALSFVLTVQDPGRFRTTRDIGAYLGLAPRKQQSGSSNPQLGITKAGDSEMRRLLVLAAHCLLARGKDCALKRWGKALSERGGRSAKKRAIVALARKLAVAMLAIWKGNTPFDPWRGVPESERPTSPPLQLSATSARELRAPATPAPEA

SEQ ID NO: 327152 - protein, 347 aa, unidentified
MLIIGCDFHPGFQQIAIFDNRTGEVQEKRLQHRAEAEQFYRSLAGQEVRVGMEACGHYPWFERLLQELGFELWFGDAAQVRASVVRKQKTDRRDAEHLMDLLRQERFPRIWVPSLEVRDVRQLLVHRHKQVQARTRTKNQLQAMALSHGVQKKYKLWTEAGRAELEQLPLLPYAAERRKKLLEELDELETEIVELNRRVEEEVKPRPEAVRLTTHPGVGPVTALAMVLTLGPAERFESAKQVGSYFGLIPSEESSGGKQRLGRISKQGSSFLRFLLVEAGQTAARYDPQLKRFYRRLATRKNRGVAKVAVARKLATRMYLMLREGWTYAQLNQAVMSVSPSHSVAGE

SEQ ID NO: 327153 - protein, 419 aa, unidentified
MQLMIEGQSHFQPFGLSYWGFANLNKGVGSTTASYDYHIGVDYHKSYSHLVVQDSNGKTLRSGRVKNERQSLGGFLERYRENSHAVVEATRDWMVMYDWLDDICDDVVLAHPWKVKAIADAKIKTDKIDATVLAHLLRADLVPEAWAPSERSRDLRVALRERMFYVRLRTMTKNRIVTVFDRYPEQTTQLKKLGDLFGKAGRVQLAQVNVSPIDRIQIDRGLDFIGDIDVRIKQSEATIRAMTKANTNVKLLKTIPGIGEFFARLIDAEIDDIGRFRNPKKLAAYAGLVPSTYSSGGKTFHGKIIKQGNKWLRWAFVEAVTPAIASDPQLRAQYEHLRFRGVNKARVAIARKLLTIAFQILRDQRAYELRGESPTEGASRYPGCPDVYLASPAGLGCAHRGEWETGSRTPPCDRSQKRH

SEQ ID NO: 327154 - protein, 413 aa, unidentified
MDKIYDICCGIDVHKKLIVACLNHKRKKELREFGATTRELMELAEWLQKNNCEIVAMESTGSYWKPLYNIMESYGLHVIVVNPAHMKAVPGRKTDVKDAEWIAELLQHGLLQPSYIPSKYQRELRELVQYRKSLVGERMRELNRLQKMLEGANIKLSGTVTNINGKSARKILEYILSGNEIDEKKYDEMYEEKLIAHNLKASKEHILDDLKGFMSPLQRRMLKELLQHLDELNVHIENLNDEIDNFMKPEEKQASQVIQDVTGIGNTSAQTIIAVIGTDMERFPSDRHISSWAGLCPGDNVSAKKRKSGKIRKGNALLKSTLVLCAHAAVRHKSSYFHAQFKRISTHRGKKRAYVAVAHSILIAIYHILKDGVKYQDLGAEYYNQFNAERKIHAYLKKLKALGWEPPKEAVPA

SEQ ID NO: 327155 - protein, 387 aa, unidentified
MQRNDLSRSLVAFDQNSTLVSVVELSLKSWLVAGLMPGVERSPLKKQGADPDMLLALLHRWRMEAIKAGGKVERIVVAFEAGRDGFWLARWLRARGIEVYVIHPTSIPVPREHRRAKSDRLDTQLLMRSVLGWLRGEVKHCSMVAIPTLAEEDARRPNCEHETLVKERCRLVNRMKATMVRLGIRNFNIKLRKAVDKLAGLRTPEGVPLPANTLDELRRDMARLRLIQEQTKAIETARLARLKAAPQEGAHPMLLMLAKVLGIGVETADMLVHEVLSRDLRDDRAVGRYGGMTGAPDESGSKRREKGLAKGGNARVRRGMIQLAWRWLMFQKGSALAQWYRTRTAGARGDVRKTMIVALARKLLIALWRYVTTGEVPAGAKLRPAAI

SEQ ID NO: 327156 - protein, 400 aa, unidentified
MIHNNASLEIRVGIDVGCYNHSIAIGLSSGELLEEFEIAHRPEGFHQFFDHIRKHCQKQTCSVAVAMEGFNGHARPLDSLILARGYRLFNINNLKLARFKEIFPAAAKTDEIDARKALELFQLRDYIPTAKGVLQEVGLCPEENAILKRLTRRRRRLVKERVRLFNSLQDDLHAVCPGILEITKNVRNLWFLRFLTSVDSLPKLVRLQRKSLLKIKGVGIKYAGLIHGWQKRAQFSPEVEWTGEMIQEDATRILELHSKIKALEKKMQAVAESSKIATILSSLPGFGAISTAELAGEIGTVERFATESSLAVYLGMSPLNKDSGKRKGSKPPRHVNSRAKTAMMAALDKHRKLVAESQRYYLKKKAEGKGHNQAIRALGRHFCRTMFKMLKQNTPYKYRE

SEQ ID NO: 327157 - protein, 365 aa, unidentified
MKKISTVATKQSRNISEQKLTIGFDLGDRSSWYCVLDETGSVLLEQRVSTTPKAMKEVFGGMPRSRIALETGMHSPWVSRLLSELGHEVIVAHARNVRLIGESRKKDDRLDARTLARLARIDPHLLSPVKHRSAKAQADLTVIRARAGLVRARTALVNTARGLAKSYGERLRGCNVRNMNPEKAEALSPELQRALEPLLAGIESLSERIREYNEGIEQLAQESYPQVARLKQVKGVGTLIALTFLLTLEDAHRFRKSRDVGCYLGLQPGRRNSGQSEPQMHISKEGDPYLRTLLVQGAHHILGPFGVDSDLRRWGLKLAERGGKSGKKRAIIAVARKLAVLLHRLWVSGEVYEPLRNQRALSAAA

SEQ ID NO: 327158 - protein, 482 aa, unidentified
MKKSSIYPNRSQELLTLFEKAGNPSKLMCVPIDYAKKDHLVMFCNGSGEVLRKPFSVKNSVDGVKYLIDQVDRSCRHRHIQSDHVFFGGEDVNSYAENFANTIRANGWLVANVNAHDAKKQRENLQASTDRLDLMGIATMLLNRRANCSPAQAGVYRNLRTLVRHRKKLVKMKTEVRNRIHTIVDRLFPGFLNEKKSGVLPFSNSSLYMMQTRFSAPQIRRRQRGALIHNLEKRGTKKAEQVAAKLQEYASQVLTTPDEYTATLQISLASHVTHYRCLFDGAQQLVNEMAQLLAQTQGAFLTSIKGIGIVLAAGVTAEIGDPMAQRSTDQLVSYAGIVPKVKQTGGSQGPSITSHVSKRSNHILKDFVVQSAFHMGRYGPKDLQDDFSRREAAGQHADFGIARRFVRMAMCMMRTSQVYLPPEMRSTHIKPERRANYYLAMWPYLRDKWSKANSLKVSFAKDNPLGQWRNIVQEIYGIKLKM

SEQ ID NO: 327159 - protein, 358 aa, unidentified
MSHIKSSRLDFTGQPIYIGLDVHKKSWSVSIFSKYGEYKTFSQPPEADKLVHYLSHSFPGALYYAAYEAGYCGFWIHDQLRQNGIQCLVVNPADIPTKNKERRTKRDPIDCRKLARSLRNGEIEGIYVPCRSKLEDRTLIRTRQSMVRKQTRCKNQIKGMLLFYGVVIPEQREMGHWSRRFIQWIERIRMERASGDIALKAHLEELNHLRQLIASLNRAILHLARTEEYRPFVRLLKTVPGISTLTAMILLAELGEITRFPSLDELSCYVGLIPDTQESGEKEYVGAITQRRHAQLRWLLIEASWVAVRKDPALLMAFQEYCKRMRKTKAIVKIARKLLNRIRYVLKNQAEYVPCVIE

SEQ ID NO: 327160 - protein, 348 aa, unidentified
MNALHYIGFDVHKKTISFCVKTAAGEIVEEGSVPAQRGGLRQWAAARPQPWRGAMEATLFSGWIYDTLQPYGEQLEMAHPAKMKAISAGKKKSDTLDARTIADLVRCNLLPACYVAPPRIRELRRLLRYRNLVVSEAVRMKNKMAALLMETGALYVKEKLHRKKYFANLLEELEEVPESVIDLLRLSRGALEMFESTQKRLVRELLIDSELAQRVERLMTIPAVGEITALTWALEVGDPQRFRSNSDAMSYCGLTAALKSSAGKQQRGPISKQRNRWLQTTLIEAAKLAPRWNPQLAALHARELERGHRNRATLAVARKLVAYLLAVDKSGQPFQVRAPSELPTPKAA

SEQ ID NO: 327161 - protein, 353 aa, unidentified
MRTYYVGMDVHLASMVMVVLNGAGKVVMELVIETGAERVRGFLKQLRGKVYVTFEEGTQANWLHDVVRPMVTEVVVCDPRHNKLLQSGNKNDRVDAKKLAELLRNGALKKVYHGDNGVRTLKELVRTYDCLVSDSTRVMNRLKAIFRGRAIACAGHEIYRQDRRERWLEKLGEPGAKQRAGFLYEQLAALKPLRRKAKLAMVKEVRRQTAYLWLMSVPKLGSVSVAQLIAVVGTPHRFRSKQQFWTYVGLAVVTRSTADHEVVAGVLRRSRRPVSTRGLNRNHNHLLKRVFKNAATSACHSGPFKAGYDARVARGMAPSLARLTIARQLAATTLAIWKRGEQFDPERKKQQAA

SEQ ID NO: 327162 - protein, 341 aa, unidentified
MMSNVTTIGLDIAKSVFQVHGVDAAGEVAVRRKLTRGRVLPFFESLPRCLVGIEACSSSHYWARELIARGHDVRLLPAQYVKPYLKRQKNDAADAEAICEAVTRPTMRFVPVKSPEQQSVMMLHRVRLMLNRQRTQISNALRAHLSEFGVVAPIGRNGIEQLLVVINDENDARIPADARLCLRMLEAQLRVVKEQILENDRRVRASARETELGRRLMEIPGVGPLLASAFVATVADPHAFKSGRCLSAWIGLVPKQNSSGGKEKLGSISKAGNRYLRQLLVVGAMAVIRYAERNGTRRPWLVQLMARRTTKVAAVALANKTARMVWALMTGGERYREPVIA

SEQ ID NO: 327163 - protein, 346 aa, unidentified
MEQIIRIGMDTSKHIFQLHGVDAAERPVLRKRLSRKQMVAFFAKLPPTVIGIEACGAAHYWGRELAKLGHEMKLIAPQLVKPYVTRNKNDGRDAAGVCEAMGRPTMRFVPVKTAEQQAALMLAGQREQMIARRTQLGNMIRGYAAEFGVTAAKGVDKIEPLLAELAQDASLPALARELFALQGREYALLQVELKAIEIKLRAWHRANADSRRLGKIPGVGPIGATSLVMKTPDPRAFASARHFAAWIGLTPKDHSTAGKTRLGKITRAGDERLRSVLVAGATAVIRQAMQGRGHPSPWLVALLKRKPPKLAAVALANKIARIAWKLMVTGENYDGARMLAASAQAA

SEQ ID NO: 327164 - protein, 340 aa, unidentified
MGEITTIGLDLAKHVFQVHGVDVDGVAVLRKQLRRSQVLSFFSRLPRCVVGMEACATAHYWARELDALGHEVRLMPAQYVKAYVRRNKNDAADAEAICEAVVRPTMRFVPVKTAEQQAALLLHRGRERLVRERTALVNALRGHLAEFGVIAPLGLHNAGKLIAIIRDERDARLPALARQVLQVLATQIEHLEAAIAALEKQLMGWHKSNPVSQRLATIPGIGPIIATAIAATVVDPIAFRSGREFAAWLGLVPRQNSTGGKNRLGGISKRGNQYLRRLLINGASANLLRSKATNADPWVIGLRRRRPSLVVAVALANKTARIAWAVMHRQEDYQRMAAAA

SEQ ID NO: 327165 - protein, 345 aa, unidentified
MLAEHVDHVIGIDPDRDRITAAIVAADTAAVIDTTELTTTADGYRQLVTWADHHSSAESRAWSIEGAGSYGAGATQWLTRCGEWVLEFDRPSTTTAKDRAKTDTLDAVRAAREALGRTRLAQPRRGAERQGLRALTVARDGAQRARVAAINELRSVIVTGPIELRDQLTGLTRGALIDRCARLRACGEHAALKAALASIARRIRNLDAEIADLDIQIRPIVEHQAPQLLNEVGISHTTAARLLIAWSHPGRFPTEAAFARLAGVAPIQASSGQHTRHRLSRGGDRQLNRAIHSIVITRCRVDPATRNYLARRIADGKTPREARRCLKRYTARRIWRLLEHPPTRA

SEQ ID NO: 327166 - protein, 475 aa, unidentified
MSRVGEEFEDVLLMSLSGSSPIDIEEDVVSKGSGLSRGDKRRNARLAELRRLVPVEHAIVGIDLADRKQAVVVTDHDSRVLDCTTVKATAWDLGPVLDWAHRVGRKHGFAGVTVGCEPTGHSWMVLNQVAAQRDMPLVCVHTMLVSHAREAEDYTRDKSDDKDAMLIARLVAGLHCYAPERADETWARLRQLGARRERLITEATACLAQLRDLLKCAWPGVLEAAADPFESSNWWAALAVVLERCDGRPQRLSRGGLARFEAAVVRELGRWGGQRRRRAIIEAVHTALVDPRAVWTQRRGALQRACYVLADWRLAKTRLAEVESRMVEVLDELGLTAWVTSIPGVSAIGAAAMLADTGDPTRFDSPRAVVKHAGLAPRDNSSATYAGRCRISRRGRPRLRLAAWRAAWGALPHNPVMAARYRYLTTRQHNRLTDGQARAAIAAALLRWLHVVVTQRVRWDAAIAGARVDTLPAAA

SEQ ID NO: 327167 - protein, 351 aa, unidentified
MMIIGVDYHPSFQQIAFMDQATGEYGERRLNHSDGEAEKFYRELKQPGVRVRVGIEATGYSRCFERLLVGLGIEVWIGNAAEIKAKRVRKQKTDREDARLLLRLLLENRFPRIWVPSPENRDLRQLLWHRHRLVQMRTRIMNQLQAIAMNEGQRWKKKLFSEQGRAQLEKFPLAAWASRRRQDLLELLDRMDPTIEELTAAVEQEARKRPEVLRLMTHPGVGPLTALAYVLIIGTPERFPGGKQIGSYLGVIPSEDSSGGRQRLGHISKQGNALLRFLLVEAAQAAARCNPHWRRRYVHLAMRREKSIAKVAMGRRLGVRLYWMWRNGLEYSQSIEFGSYAGKLVIGHGVN

SEQ ID NO: 327168 - protein, 347 aa, unidentified
MEDAMGMFAALDVSQEETAICVVRQDGTQVVEAKVPTCPDAIADWLTERTEGLERVGMETGPLAVWLWNALTERQVPIICMDARHASGVLKMMPNKTDRHDARGLAQIVRTGWFKAAQIKSHDAYVNRAMLTAREALVGMRVRLENEIRGLLKTFGIMFGKRVGGFKRRAEEIIEGELAVAPELVPIFEALMQARRDILARIAALDSRIRAVAKRHATVRLLMTAPGVGPITAMAVVAAFDDASRFRRSSSAGAYLGLTPRRYESGEISRNGRVSKRGDAFTRKCLFEAANAIFCRNLGGPRLRDWAKAIAERTGPRKAKVALARKLAVTLHAMWRSNTPFREVAMT

SEQ ID NO: 327169 - protein, 344 aa, unidentified
MRTVCGLDVHKDSVYLCILSSTGEIYEKKFGVLTTELIEMRDLMLSHHVLEVGMESTSVYWVPIWRVLEPHFKLKLINPYFIKQLPGHKSDVKDAQWIAECMLKDLVNGSFVPPERIQQLRHYDRRIYDLDDEIIRKLAKLDAAVQRCNIRLSNYVSNTDSVSYKAVIDKICEGVTDPNVLVEEIHGRIINHHGKETIIASLTGSITECDIDIMQQLKAEIDLAEQHKQECMDKMLAICENEYSTQLHNLQTIPGVKMRAATSLIAEIGTDMSHFETANHLASWSGLKPRNDQSNKTIKSRRITYGNRYLRRTIIQCSWGASRTKNCFLADSPTTRHKSERKTE

SEQ ID NO: 327170 - protein, 395 aa, unidentified
MVQAGTFATTPEGVREFAAGLGPADEVALEATGNTWAIVTVLASRAGRVVVANPGKTRAIAEAKVKTDKVDAAILAQLLAADYLPAVWQPDAAIGALRRQVLRRAHIVRQRTRLKNQVHAILHRNLVPRCPAADLFGIKGRAWLAAQQLPPDERAAADALLRQLDFHAQELALIDADLGQVALARPEVLRLMTIPGVDATVALSIVAAAGDFTRFRSPDRLVSYLGLNPRVRQSGGQPASHGRITKAGPAHARGMLVEAAWSASKAPGPLRAFYQRVRARRGMQIAVVATARKLAVLCWHLIIKQEDYAFALPSLVAHKQRKLELRAGLPAARGRKGTAARYSLKAVRAAEHDLAAQGEAAYRTMVAAWQPARPARKKVTGAAASKGTRLIKPTG

SEQ ID NO: 327171 - protein, 338 aa, unidentified
MAMYCGIDLHSNNNYVAILDGDLGDVACRRLHNDLEQLKKFLEPHRDELVAVAVESTYNWYWLADGLKKAGYDMRLVNTTKASDYSGLKYTDDRHDARWIARLLALGILPEGYIVPPEERGVRDLLRRRAFFVQKRTAHLLSLRTYFERSTGRQVPADEIQTWDSETVHKLIDDRFVAESIAVVLPVVRVLTAQIKAIEKIALAEGKLRDEFQLLRTAPGIGVILGLTIMCETSDIGRFPKVGNYSSYCRCVKSERRSNEKKKGVGNRKNGNKYLSWAYAEAAHHAVRYEPRAKRYHARKRARSHPMVAWRALSNKLARGCYFVLRDQVPFDPTRAFS

SEQ ID NO: 327172 - protein, 324 aa, unidentified
MKIVKDDRFAGIDVSKARLDVCVTPGGKFFQDGNDRAGIKHVAARLNRLKVKLVVIEATGGYERLLESELALAGIPAAIVNPRNTRDFARARGLLAKTDRLDAGVLAMYAERMKPEPTQPKTRDELEYSSLVSRRKQLVADRAREKTRLEKTFFEWEKQSVEAHIKWLGGQIERIEGKIRERIGQDGDMSHLYRIMTSVPGVGPVTGATLIASLPELGGLGGKQISALAGLAPFNNDSGSHRGHRSLWGGRDGVRCALYMAAVAAVSCNPVIKTFYERLRARGKTGKAAMTACARKLLVILNAMARDGGAWNPERAMKTHAALA

SEQ ID NO: 327173 - protein, 324 aa, unidentified
MDAWIGIDVSKDTLDACFLRPNGKTISKQFLNNSAGCQKMLNWVSTLSAPLRHFCMEATGAYSQSAASFLVEKGERVSVVNPARIKYFGMGEGILNKTDKVDARVIALYAKQKEPQPWRMSQPEVLHLLALMRRIQAIETHLGQERNRLGEPDLDPAVACSIDTIIQALEQEITRLQTQVREHIDLHPNLREDKKLLTSIKGVGEKLAHWILAELPDPKEFESAKSAGAFAGLSPMEYSSGRTIKKRTRISKAGNSNLRRALYMPAMAAVRFNPIVADLYQRLIARGKCRMVALGAAMRKLLMLAYGVLKTRIPFDPEFAISKP

SEQ ID NO: 327174 - protein, 429 aa, unidentified
MTRISAGVDVPKNRSTVCIMDQDGKFIMRPFLVWHSTEELDFLADTLKRLNGEVRVIIESTSIYQYPIALHLKEKGIFISIVNAYEMKQFANIDFRGGKTDKKDSRTIASYGISYWDKLVEWQIPKDTYFNLDLLNRTYMNAKKHRQIILQELQHYIDCAMPGMDKELHSLNLSTKKDFMLDFVEKFWHRDEIVNMTEAEFTEVFTAWAKEKGYRPGKGKAAKIYAIAKSCIPYYPANPTVKTILQCIVDKLSGVNRTLVTIVTQMIEEAKKLPEYQIVREMPGVGDPLAARFFGSAGDIRRFKNSKALVAYAGIDSPPDESGDFSSTHRHITKKGSKVFRDTGYEIMMALRAQKRTWEKVRKNPEVYDYMLKKEAEEKPRKVAKIAALNKSLRIVYARIKELYDNMALAERAKTKTRSKTRAKTKVTA

SEQ ID NO: 327175 - protein, 344 aa, unidentified
MELYVGLDISQSMTHLCVVDSKGKRVWEGKCPTKPEAISQAIRDHATDAQLIGMESGALSPYLWHQLTATGLPVVCIEARHAHKTLSEQLNKTDKHDARGIAQLVRTNFFKEVKVKSMTSHQVRTLLGERAQLVGMRTALKNQIRGALKTHGFVVSHSVEKGFKAKVNGIIKDSQTLAKMIAPLLRVLEAVEREVQELDKLFQEYAENNATCRNLMTIPGIGAITSVAFTTAVDDPKRFGKSRSVGAYFGLTNRRDQSGERDIAGRISKRGDNLVRGYLYEAAGVMLTRTKSWSALKSWGLRIAKRSCMNKAKIAVARKLAVIMHQMWLTGEAFRWSETEQAAA

SEQ ID NO: 327176 - protein, 324 aa, unidentified
MSNVLGIDVGKAEIIVALLVDDKCIGKESFVNNDKGFKSLTKWLKQKKVFTLKVCMEATGNYSNNIAEFLYDNGHEVHVVNPVCIKSFAKSKLIRTKTDAVDALIIAQYANITELIPYQPKSAAFKELKALHRCLDDLKGQCVQISNHLEHKEHVPKSVTSTWKKLLKDFKNEIKNIENSLDELFENNPELKQHRENLQTIPGIGKTTATSILAESPDLSSFKSPRQYAAYAGLVPKHRTSGSSIRGKARLSKLGSSKLRKALYLPAVVAKNHNPILKAFSDKLKSKGKHNMVIIAAIMRKLLHLCFAIIKTNTPFNSNFISKN

SEQ ID NO: 327177 - protein, 333 aa, unidentified
MNTGVNVGIDVSKATLDVALGGNGELLQVANDEDGIKELLIRLGELAPTLVVLEATGGYESLVAGAIAGQGMNVAVVNPRQVRDFAKATGVLAKTDGIDARVLARFAEAVRPEPRPLPTAEMKELEELLSRRRQLVDMLTMEKNRLGIAATERMKKAIRKHIDWLEEALRRANDDIDQAIRKSPAWREQEDLLRSVPGIGPVTARTMLAELPELGTLNRKKIAALVGVAPLNRDSGTMKGTRSCWGGRAHIRQVLYMAAITAVRFNPVIRRTYAALRTRGKKPKVAIVACMRKLLTILTAMVRDGRRWSPDLSPTLSMLPHGEGEGILLCERA

SEQ ID NO: 327178 - protein, 347 aa, unidentified
MLHAGLDLSRKKLDVCLLSDQGEHLDQFAVPPDVDSLRRLARRIEEVHRQPVCAVIESMTGARIVHDTLEQQGWSVEIADAQKVKGLAPLACKTDKIDSKVLAVLSHRDLVPAIWLPDPSVREERELARFRLHLVKHKSALKCRIHSTLINFGKPCPVTDLFGLEGRRLLQRLQVPEPWRGNITASIELIDDLERQIVEINRRLKEGHAEHPYVPLLLTVPGIGWVLAFTIAAEIGEIERFPSPEKLAGYTGLCPRVNQSGEKDRRGPLTKHGPTYLRWALLEATMHALRHPAYAERYQRTKRRLGKQRGAKVAQVDLARRLAHAIWHMLSRKEKFAPRGAAFRLAA

SEQ ID NO: 327179 - protein, 332 aa, unidentified
MNMHSQGRVADGIERPNAGIDVSKQHLDVCCGEHEQRWNNDATGWSELAAALKAWQVDLVVVEATAGLERGLVCALQAAGVQVARVNPRQARDFAKSLGVLAKTDRIDARCLRDFASVLARHPQRERYITPVADQHREALQALMVRRRQLLDMQVAETQRLASASARAARSIGVVIKTLQRQLERIDRDIDDLMDQHFKPQRKLLEGVKGVGTGTALALLAALPELGTLGRRAISKLVGVAPLADDSGQRKGKRRIWGGRAHVRSALYMATLSAMRYNPAIAPVYQRLIAAGKPKKVAMVACMRKLLVILNAMLRDGAAWDSTKSLAQAIHL

SEQ ID NO: 327180 - protein, 348 aa, unidentified
MDTTPFLATPNAFVGLDVSKDTLDVCLVIESKRHEKQFANDAPGHRQLLRWSHSLAKDGSCHFCLEATGPYSQSVALFLMEKEQLVSVINPARIRFFGLAQNQGNKTDKADARLIADYCRMQCPPPWRVAAQEVRLLQEMVRRLHALSDLAAQEKNRMQAPGQSKAVLASSKRVVTALEKELLRLKREVRAHVKAHEELQRDSKLLQSIPGIGEITSWDILAEMPDVQEFDSAQSVAAYAGLAPREQRSGSSVRKQTQLSKRGNSRLRKAFYFPAVSAMTWNPLVKAHYERLREKGKPKMVALAACMRKLLMICYGVLKHQKPFDAQWLSQPATHPSSTQNDLLILSN

SEQ ID NO: 327181 - protein, 356 aa, unidentified
MAEGSWVGLDVHARSVVAGVLDAGSGELRSRRAPTVVAETVAWLGELPAPVRVAYEAGPTGYGLARACAQAGIACTVAAPSRIPRAAADKVKTDRRDAERLARLLRLGELVPVHVPEPYEEAARDLVRAREDARGDLMRARHRLSKLLLRHGLVYDSSAWTGAHDAWLRRQSFPSRPLALAFEECYGAVVQTKSRRDALDQAIAELALEPPFAEVVGRLCCLRGVSTLTALALTVEIGDWTRFRPQSLGPFLGLVPSEGSSGEHRRQGAITKTGNSHARRLLVEAAWHHRRPLRASATLERRRQGQPAAVRARADQSCRRLHARWQALERRGKRRTIIAVAVARELTGHCWALATM

SEQ ID NO: 327182 - protein, 388 aa, unidentified
MLPVINALEVQKGKPAMKKNITELENPRRRVARKNKQRELTIGVDLGDKASRYCVLDREGNVLFERSTATTKRGLAQAFANMGASRIAMEVGTHSPWVKRLLESWNHEVIVANAHRVRLITESTRKDDRLDARKLARLARVDPELLSPIRHRSEGAQAHLVMIRARAALVEARTKLVNSARGVTKSFGERLESCDPDQMRVKCLVRLPSSLQSALQPLVTAVESLTRQIHEYDNQIAQIARREYPETARLRQVTGVGELIALMYVLTLEDPQRFRRSRDVGGYLGLRPKRRDSGASRPQLRITKEGDVYLRMLLVQGAQYILGWHGVDTDLRRWGLKLAARGGKNAKKRAVIAVARKLAVLLHRLWITGERYEALRQNQAASSLPVAV

SEQ ID NO: 327183 - protein, 482 aa, unidentified
MAKRKMSTFERLRSGKMNREERKEWQQRLYAEDAGLEVVHPDAAGIDVGNASHFVAVPPDRDERPVREFGSWTADLRRMAEWLKQCGIRTVAMQSTGVYWVAMQEVLEGEGFEVYLVNARGTKNLPGRKSDVQECQWLMKLHSYGLLRNSFHPPEQIRAVRTIWRQRDRLVKEAGREVQQMQKALTTMNVQLANAISDLSGVTGQAIIRAILQGQRDPHQLAKLRDRRIAASETEIAHSLEGNWREDILFELQQVVDAYDFHQQQIAACDVQLQRYLSALPMRSRPGGGEPSRAEAPSEKSKKPRKHKLPKNQPVFDLAAELQRTMGVDMTAIDGIDVMTTQVILSELGPDLSASFPSEDHFASWLELAPRRDVSGGKVIRHISRKSNNRVANALRMAAQSLWRSHTYLGARYRHLRARLGGQKAVKAMARYLACLVYRLLTKGRAYVDRGAAHFENKRTERELLALQRKAAEFGMQLTAVS

SEQ ID NO: 327184 - protein, 358 aa, unidentified
MEDSTTMTQPLVQTLGIDLGDRRSSYCLVAMSGEILEEGQVATTRPSLTGFFQGQQPCRIVLEACGHVHWIAQLASAAGHEVVVANPRELRLISQGGRKSDRNDARTLARLGRIDAELLRPVKLRGADCRASRALLHARDQLVRTRAKLVSFVRGQVKCFGGRIPTCSTSAFRRKAVGHVPEPIQDVVAPLLEILEQLTKKIRDFDHQIERLCKQRHPQTGVLRQVRGVGPVLALAYAATIEDPARFTSSRTVGNYVGLAPGQYASGAKTPELRISKRGDRLTRRLLVNAAAYILGPFGPDCDLRRYGGRIARGGAQRDKARARIAVARKLACLLHHLWRTASVWNPNHALSMKPPTP

SEQ ID NO: 327185 - protein, 309 aa, unidentified
MEPLFVGIDVSKDRLDVALRPTEEVFVVDRNAAGLAALIERLRPLAPALIALEATGGFETVVAAALAAAGLPLVVINPAQVRAFARAIGQRAKTDAIDAAVIAHFAAATRPAPRPLPDEATRLLADLVTRRRQIIDMIGAERQRERRAPRRLKKSITRLLKALERELSSVDADIDDAVRGSAIWRETEDLLASVPGVGPVIARTLIAELPELGRLDRKKIAALAGLAPFTRQSGQWRGKSFIGGGRTSVRAALFMGAMVARRHNPILKAFFERLVAAGKPRMVALIAVARKLLTILNAILRDQKPWQTA

SEQ ID NO: 327186 - protein, 370 aa, unidentified
MRIIGCDLHARQQTLAMLDTSTGEVVNLTLMHEGEKVREFYSQLPRPVLVGIEATGSMHWFLTLMDELGIECRVGNPAQIRAAEPRKQKHDRRDADLILKLLAENRFPAIWLPSKELLDLLALLLHRHQWVRMRTRVQNSLQAIALANGLRRGPSLWTYDGQAKIAFLPLMPHTAYRRNTLQTMYKNMESEIENLTKQVADQAGNHPGARRLMTHPGVGPVTALATEVFLGDPQRFADSKALASYVGIIPREYSSGAHQRLGGVTKQGSPLLRFLWGEAGAHAARRDPELKRFYRRKLVQKGLGKARVAVARKLGIRLWIMLRDEIDYQEFCRRGQRQQKTVRPVVGMPETGNGAKSHRQVDEATHLPES

SEQ ID NO: 327187 - protein, 426 aa, unidentified
MRVMYERVAGIDVHKDMIKVGVRTPGHRAWTRNSEVLEYRTFYGVLLTMAADLRQRGVTHVVMEASGVYTEPVYYALAGQGFEQVAVINPAHAKALKGHKTDARDCLRLAELFECGLLRGSYIPSQELKDLRDLTRYRAKTVQARTSEIQRLAKALESAGIKLDSVVSDLTGKSATLMIEALIDGERRGQILADLAIGRMRTARKLADLSQALTGRFTEHHAALCRLHRDRITLFNVAVDDLERRIAVKAAPYQRELELLKSVDGFGDAVAWAWLAEIGPAPHEYFASHEKLASWVTLCPGNYISAGKRAHGRTGTAGAYIKPMLVQAAWAAVKTEGRLQARYHKLVRRFGGPKNRGAVKKAILAIAHTLLKIAYQVLKSGQPYQDLGADFYTRRESPEQRRAYLLRQLEKLSPGCTITITPAEAA

SEQ ID NO: 327188 - protein, 359 aa, unidentified
MPATASLQVTRSGHIVIGVDTHKHVHVAAALDSVGGVLATMTIATDSGGFKQLLEWAVTFGQIIAFGIEGTGSYGAGLTSFIRRAGHRVVEVNRPDRRMRRLVGKSDTLDAENAARAVLAGFATAEPKTADGTVEMIRQLKVAHDTAVKNRSAAMITLKAMLIHAPEQLRNDMAKKTPIMLARHLAALRPTRLETPDDSIRHTLKSLARRWQHLDVEITELEAMIKDLVTRTAPQLIEPFGIGVDTAAEILIVVGDNPERIRSEAALAKLAGISPIPASSGMTSGRQRINHGGHRQLNAAIYRTVIVRMRFHQPTIDYVTRRTAEGLSKRDIIRCLKRYVIREVYHLVIPARNLPQITS

SEQ ID NO: 327189 - protein, 315 aa, unidentified
MTNRKKSKTIINVGVDVGKQFLDVWIYEKSLHFQEENNTSGIKRILKRLSHYQVERLVMEATGRYEFTLAQAAYSKGIPVCIVKPLLVRRYAGAINQLAKTDKIDAAVIAEFSAVVQPEITPQKSKNLIAIKDLVTRRRQLMNLRTQELNRIKIMGKALEVSCNRIIRCLDMEIKRMEKRLAKHVGEQAEWTEKQLVLKSAPGVGDTLIYTLLADLPELGSLNNKEIASLVGVAPINRDSGRLRGKRRIQGGRASIRTVLYMATLSATLCNPVIKAFYKKLVAQGKHKKVAITACMRKFITMLNTMVRDNCVWAY

SEQ ID NO: 327190 - protein, 316 aa, unidentified
MNASGVFVGIDVSKETLDVAVRPSGERWRTTNDERGITELVSRLRPMGATLVVMEATGGYETALALSLVEAKIAMRIVNPRQVRDFAKGKGLLAKTDSLDAAVLAEYGEIYRPEARVLLDEQAREMADLLSRRRQLIEMKTAENNRLEHARGQVRKEILAHLSWLSRRIKKIDEDLDKRIRNSPLYLDKRERLKSVPGVGNQTALSLILNLPELGTLNRKQIAALAGVAPFNKDSGRRRGKRSIWGGRAQVRAVLYMAAVVASRHNDVFRDFYAKLCAAGKPKKLALTACMRKLLTVLNAMAKNQTSWTPSLATAR

SEQ ID NO: 327191 - protein, 337 aa, unidentified
MNTTRNDVLGIDVSKKKLDLALLINGKLKAKVFDNTSAGHRALVTWLRDSKASLPTLHICMEATGVYYEAIATTLHTEGFKVSVVNPACIKGFGLGENIRNKNDEIDAALIARYCAAMSPDPWTPPPLEQRQLRAWTLRVQSLKDIRQQEANRIEAHIVAGLRDVAENVAEHIKWLDAEIRKLQDEIDDHIDRHPGLKNDAALLASIPGLGATTVARVLGHLGDIRRFKNAKALAAFLGLTPKQRTSGTSLKGRTMVSKTGSTSLRAALFMPSMVARRHNPILRQFAERLLANGMAKRAVISAVTHKLAHLIYGVIRTGKPFDANYLHKNLAIQDGI

SEQ ID NO: 327192 - protein, 354 aa, unidentified
MSEEKYIALDVHHATTVTSVVNAAGKELDGSIIATKARPILSYLEGFSGSLQVTFEEGTYAAWLYDLLEGRVAERLVCDPRHNALLKEGSKTDRNDARKLADLFRTGMLRAVYHGRQSLRPLQELVHSYEALVEDTTRAMNRIKALYRGRGIDCAGRGVYTQKQRGSWLEKLPAGATRLRAEWLHTQLDHTRSLRRQARKELLKESRKQQVSTRLREIPGFGPLRVARLIAWIQTPHRFRTRRQFWSYVGLGLVTFDSGEYQLVEGRIVRRARPAKIRGLNRNHQPRLKEIFKSAALSAIRQPGLFKDYYDARLAQGRDPARLRLTVARKLAALVLNLWKKGGHYRALAVPAQA

SEQ ID NO: 327193 - protein, 369 aa, unidentified
MLFQSFSTQKGALTVNSSKYVAMDVHTATISVAVRDAAGKLIMESVIETKSSTILQFIQGLRGDLYVTFEEGTWAAWLYDLLRPHVTNIVVCDPRRNALLNEGSKSDRIDARKLSELLRANLLRSVYHGENGLRTVKELSRAYLTIGKDLTRVMNRVKAIYRGWGIPCAGKSVYHPHHREEWLRKITQASVRRRAELYYEQLDVLVVLRKQARQELLAESKKHKAWKLLRSIPALGPIRVAVLMAIVQTPHRFRAKRPLWKYSGFGVVTHTSADHRYVNGQLERSKRPVSVRGLDPGHNHQLKYLFKSAAIQASTAKGPFQEFYEALVAKGMRPEMARLTLARKIAVITLTVWKKGAAFDAKYLKSQTA

SEQ ID NO: 327194 - protein, 452 aa, unidentified
MRASKLAKSKKMKLPKHLQHINPYAAGIDVGCRSHFVAVPEGSCEQPVREFSSFTDDLHQMADWLLRCGVTSVVMESTGIYWIPVFEILESRGLEVRLVNARHVKNVPGRKSDVLDCQWLQRLHSYGLLEGAFRPAEHVCTLRAYVRQRMTLVRYAASHIQHMQKALAQMNLQLANVVADITGATGMRIIRAVLDGERDPLVLARLRDRRCKNSEQTIARSLNGNFRPEHLFSLKQAVDLYEFYQGQIAECDRQILDQLTRFDAADPSDSGPDAEPPASLGEALQRMSGVDLTRIDGIDTNSALKIIAEIGIDMSRWKSAKNFASWLGLCPGTKVSGGKVLSAKSKPVANRAAAALRMAAFTLFKSKSALGAYLRRQRSRLGAPKAITATAHKLARLVYTMLKHGTAYVDAGQEYYEERYRTRVVQNLKRQAQKLGFSLVKIAGLQPQNANS

SEQ ID NO: 327195 - protein, 343 aa, unidentified
MKITRVGVDLAKIVFQVHGVGHSGHAVWKRQLKRSIWLRMLVEKLEPGCEIGMEACSGAHHWARELKSRGFDVKLIPPQFVKPYVKSQKNDATDAEAICEAMSRPGMRFVGTKTLEQQDIQALHRVRSALIGQRTAQANQIRGLVAEYGLVAPKQLGPLRKAIPDWLEEAENGLTDRFRALLHGLWNAFLHLDERIAELDQEIDVIANTHPDTKRLKQLQGVGPLVATALVARFGDGSHFHRGRQAAASVGLTPRCHGTGGKNRLMGITKQGDPYLRGILIHGARSAVSHAHRKEDRLSRWATELKERSHMNVAAVALANKTVRVAWAMLRNGTDYEPELAVA

SEQ ID NO: 327196 - protein, 357 aa, unidentified
MLSSNVKYIGLDVHKEAIAIAVLNGAGKLVMESIVETKSSTVLDFLHGLRGELHVTLEEGTWAAWLYDVLKPHVREIVVCNPRRNALLKEGSKSDKIDARKLAELLRAGLLRAVYHGENGLQTLRELARCYLTISKDLKRVKNRLKALYHSWGICCTGKQVYAARHREQWLSKIAQVGVHRRAALFYQQLDGLLVLRNTARGELLAESRKHQAVKILRQIPSIGPLRAALLLALMQTPHRFRSKRQLWTYSGLAVVTHDSAQHRYVDGQLQRSRKPQQIRGLNQNYNHAMKEIFKSTALNASRCAGPLQDFYARLLARGIKPDMARLTLPRKIAAITLALWKKGGSFDAEHLKSQAA

SEQ ID NO: 327197 - protein, 411 aa, unidentified
MLEVKVEKCAGIDVGKKFLAVWVLIGLANQKPVGEVRRFGTSVKELERLRAWLLESGCTEAVMESTGSYWKPVFNILEGSLKIILANAEQVKALRGKKTDPNDSRWLASLLRHGLVQGSFIPPRDIRELRDLTRRRRRLVGDGAAERNRVQKVLEDANVKIGNVLSDVFGTSGQAMLEALLENKRSAAEIAELGHWSLAPKIPQIVEALEGHRMSDHHRFMIRQSLRHMRNIEEMIEELDKEIAVRLKPYQQQMKLACTVPGIKPTAAASILAETGMDMSPEGPFPDCHHLASWATVCPGNNESAGKRKSGRTRQGNRWLRATLTQTAWAGAADKKSLFQMRYQRLKLRRGGQRAVIAIAHAQLIAIYWALRNGTPYPEQVQRLQEDRREAQIRHHLQRLTKLGYEPNMHG

SEQ ID NO: 327198 - protein, 365 aa, unidentified
MIVIGTDTHKKTHTCAAVDALTAAAHGELTAPARKGSFGKLLVWARALDCERVWAIEDCRHVSGAFERFLVARGERVVRVAPKHMAGARRSERERGKSDSIDAFSVARAALKEGIENLPGAHLDGVALDIRLLVDHREDLVVARGQEQQRLRWHLHDLWPELEIPTGALDTSKWLGKASRRLARAEQSTRVRVGRELVRQTAARTTRIRELESELATLVASYAPQLLAERGCGPLTAAKLIGEIAGADRFATDAKLARTSGSAPIPASSGNTNRHRLDRGGNRQLNCALHRLALNKAHWDPETAAYLERRQAEGNSRKEALRCLKRHLARRVWKLLQSRRPHQDAQPQMPISIYCNLPNSGFTLT

SEQ ID NO: 327199 - protein, 361 aa, unidentified
MNSTPLIAFDQHAATTVAAVLLPGQQRPALHSLTSDTPTILRFVKRLQRQGAVQCCYEAGPCGFELQRALTQQGIPCDVIAPALIPRRPGDRIKTDRRDAGQLAVLYRAGALTAIHIPTEQEEAARDLLRCREDIRADLLRARHRLSKFLLRHGRRFTATKTAWSKRHQAWLRAQTWPLPALDQTHRAYLRAVDEIVARLHDVEHDLRALLALEPLRDRVQRLRCFRGIDDLTALTIAAELGDARRFASAPRTMAFVGLIPSEHSSGTKRAQGGITKTGNAHLRRVLVESAWHYRHHPFVGDTLRARQRGAPAAIIAQAWTAQQRLHRRYARFAARGKPKQHIVTAIARELTGFVWAALTH

SEQ ID NO: 327200 - protein, 343 aa, unidentified
MKVTTVGLDLAKNIFHVVCFDERFKELRKRMLRRHQVLLFFANIPACCIGMEACASSHFWGRELKKLGHEVKLIPPQHVKAYLRGNKNDYNDARAIAEAATRPGISGVAVKSVEEQDMQALHRMRSQCLRDRTALTNSTRGLLSEYGIVLPKGIASLRKRIPELLEDADNGLSILFRNLLARRYEQLVELDGHIAFYTDKLERLGQQDEACQRLQTAPGFGPIVASAFRGAIGNGRAYSKGRDVAASLGLVPRQHSTGGKNVLLGISKRGDQYLRSLLVHGARAVVIQAARKEDRLSLWLNRIHKERGLNKAVVAMANKMARIGWAILRYNTSYNPLSAVVAC

SEQ ID NO: 327201 - protein, 354 aa, unidentified
MSRSDDTTVFPSCTIGLDLGDRSHAWCALDAAGQVVGRGTIGATPDAVGALSTAHPGARVILEAGTHSRWVSRQLTAAGHTVVIANPSKCYQGRRRQRNDRRDAEFLARQGRADVMLLHPITHRGPTTDAPLALLRARDQLVAARTQLINTARGLVKPTGTRLPACSAESFGRQAAAHVPAPLRAVVGPLLETVMHLTTQIRAYDRQITHQLLPQYPVAQRLAAELQGVGPLTALAVVLLIDDPTRFRASRDVGAYFGLVPRLDESGAATPQLRITKTGDALGRKLLVSAAHYILHRGPDTALRRHGEALMQRGGPNARKRAVIAVARKLVVLLHRLWGTGAAYDPTRGLAAAA

SEQ ID NO: 327202 - protein, 424 aa, unidentified
MSRRPRRNHTPTFKIPWGVDSDRYSGRVRLLTPTLEATMQTVADRPEAPTAIRTDLGAIFVSMELSRSTWLITSLSPGGGEKMSKQMVRGGDVAGLLERFSRLREKTRARTGKVFPFVVIQEAGLDGFWIDRALQNEGIESHVVDPASIATSRRRRRAKTDGIDGEALVRALLAYKRGEPRVCAMVKAPTPEEEDRRRLCRERKVLIVERVRHVNRVKGLLFSQGISGYEPLRRDRRERLDTLQTGDGRRLPDHLKAQVRRELDRLELLLEQIKAVEAERDVLLAAQRVAAPAAMLLDIKGIGPEFAAILWSEGLFRHFDNRRQVASYAGLAPTPWQSGSIDREQGVSKAGNPRLRTTLIQLAWLWLRHQPQSALALWFEERVKRNGGRLKKTTIVALARKLLVALWKYVTAGVVIEGVVMKRA

SEQ ID NO: 327203 - protein, 395 aa, unidentified
MFIVGIDVAKRSHEVCMITSDGQTVQRPFSIRNNCTGYNLMLEKIRKHTNIKSQIVFAMESTAHYWLALFTRLRKDGYHVILLNPIQTSAMRDMFIRKIKTDAKDSFIIAELIRFGRYAESNVAQDRLLALKELCRNRFYLVDMAGDLKRKLIALIDRVFPEYEAQFDTIFCKSSVAVLKKYPTPQKFSNAHLDKLTELLWNSSNGHFGEWKARELKELARNSFGVEDCDGAYSTLILLMLDQIQSLSGKADALEKEISRLFQSFDTTVTTIPGVGPIIGAVILSEVGDISRFSSADKLAAYIGVDPSVNQSGEFQAAHAHMSKRGSPYLRRCIWMASQVAVQRDPMFRAYYEKKAAEGLKYMTIIGHVTRKMTAVIFAILRDHKVYEPVLPTAA

SEQ ID NO: 327204 - protein, 364 aa, unidentified
MTTLERLSTAVEVVLGVDTHLDFHVAVALDQLGRRLGTLSVPTTTTGYRALVCWARGFGSLRSAGIEGTGSYGAGLARHLKAKDIEVLEVERPKRRHLRRSGKSDPIDAEAAARAVLSGEAAGKPKSGDGQAEMIRAFRAARCSAVKSRIQATNQLRSLVVTAPDELRNRLRELSTTVLVTEALRLRPGDRPSSPVEATKFALRSIARRYKTLSKEIAELDSQLDRLVAKVAPDLLAVPAVGTNHAATLLAVAGDNPERLRSEASFASLCGVAPIPASSGKTVRYRLNRGGDRDANRALHLICVVRMRELRTKEYVARRTAEGKTKREIMRCLKRYIAREVYRVLVPIVSPSPSGSKKETTSPT

SEQ ID NO: 327205 - protein, 370 aa, unidentified
MGNRSMFVGLDVHKETIDVSIAEGDRQGEVRHYGVIASDLEPLDKVVRALRAPDRRLHFVYEAGPCGFGIHRHLTSHGEDCVVVSPSMIPKRSGDRIKTDRRDSQMLARLHRAGELRAIYIPEAGDEAMRDLVRAREDAVVVGPQAKYRLKAFLLRQGRRYPGREGWTLPYRRWLTDLSFPSAPQHIALQEYRDAIAETETRIDRLTEQLRQLAPTWRWAPVVAALQALRGVSFVTAVALVAELGDLTRFRHPRELMAYLGLVPSEYSSGPSVRRGGITKAGNPHVRRLLAEAAWAYQGIPRIGRQHAYRQEALPKVVCDIAWKAQLRLTARFKRLVARGKAKPKVATAIARELSGFVWAIAREVSPTPR

SEQ ID NO: 327206 - protein, 286 aa, unidentified
MDFESFGEWQVRQALYPDGHNSLIATMKKLRPKCIIMEATGVYYFDLAVALVEAGLPVAVIPPKSTKNFANIKLQNSKTDSIDAALLAEYGMRMEPRLWTPPDQHRQALRSLGRQINRLTGSQTQAKNRLHAMKAAQSTPTLLVEDEQEAIEMLGRRIERLKQAAMTLLRQSPELKRLYRHFCAAKGIAQATAPAFLAELRVLPDHLKFAHRSAVVPGWIYACTSLEAAFIRPRISKAGNAHIRSALYMPAMSAVRFDPNAKAFYETLVARRKTKLQAQVAVMRNT

SEQ ID NO: 327207 - protein, 342 aa, unidentified
MQITTIGLDIAKNVFQVHGIDATEKVVVRKQLRRGQVLAFFKALAPCLIGMEACATAHYWARELTKLGHQVRLMPAKDVKAYVKRNKNDAADAEAICEAVRRPTMRFVPVKSAEQQARLMQHRARDLLMRQRTQLINALRAHLAELGIAAAQGREGIKELLAIVAQDGDTRLPVDAHASLIVLAAQLQAVQTMIGSIEKRIVAQHRSSEENKRLQTIPGIGVLGASTIMAVVPDPKVFRSGRDFAAWIGIVPREDSTGGKQKLGPISKQGDRYLRRILVVGACAVLRRARQQPEKYPWLTQLLARRPFKVVAVALANKMARIAWALLAKGGTYRAPALAAAA

SEQ ID NO: 327208 - protein, 429 aa, unidentified
MKNSVRSRPVLAKGRAVVGIDVGKRKHAATALTPQGEVTAQLASFPNTRQGVERLEKAVLRKAGGPGKVLIGMEATGHYWMCLYHELTRRGYACVVLNPLQTNARSSARIRKTRTDKIDSGTIARLILSGEARATRVPDPKTTELRLLVRHHRRLIHTAGDMERYAHTLVDRVFPEYADVFCKVFLPSSQKLIRQIGLAPHKLVEHAAEVRELLRRAGRGRIASETIDQLLEAAQQSIGTRQAEDLAEAQLRSIFDYLEGLQQQIADIEQQLNQRAEQLDSPLFSLGLSGPLVAAIHAESDPIGDFPRPEQYVAYTGLDPSLHESGDTIQRRGKISKRGSPVLRHMLYLAAFVVYRRHNCFRRIYCKHRNRGKTHRNALVIVARRLARVIWRLLTDGRPFSPRPPKPASPPVKPRPTARSTRKAVCARA

SEQ ID NO: 327209 - protein, 352 aa, unidentified
MITIGVDFHKRTSSYKVLDENGQHLKKCKLPNDRDTIREFLQSFDGPKQLAMEATRSWGLYYDCTYDLVDKFHLGHPKKMKAITQSEIKNDTKDAELIARLTYAGFLPKAHISTITIRQLRSLLRFRHFMVNHRRSVRNQVQTLIDRNLWPSERPQSFKNIFCKRGLLWLGTLALPERERFIMDQCIQTYHELSKKISDMETFLSTQTVDLPGLEYLRTTPGFRSGKVNAFVVLVETSDISRFPKARAFAHYAGLIPREFSSGDKHRNGRLIKEANMHLRTALIESTLMAIRVDKGLRAYYQQVKLRNGSGAAIIATARKLSYAVYHVLKEQRSYIPEAFSASGRLSSIGCR

SEQ ID NO: 327210 - protein, 388 aa, unidentified
MHIVTDRPHAPTAIRTDLGAIFISLELSRSTWLITSLSPGGGEKMSKHTVRSGDVAGLWARFSQLKDKVQVRTGQAVPIIVIQEAGLDGFWIHRLLQDKRVESYVVDPASIATSRRRRRAKTDKIDGEALVRALLAYKRGEPRVCAMVRAPTPQEEDRRRICRERKTLTAERVEHVNRIKGLLFAQGITDYEPLSRKRRERLEELRTGDGRPLPEHLKAQIGRELDRLELTLQQIKSVETERDAMLSPSDEGTRAPGAMLQNLKGIGAEFAGVLWSEGLFRSFSNRRQVAAYAGLAPTPWRSGSVAHEQGVSKAGNPRLRTTMIQLAWLWVRHQPRSILTLWFHQRVELNGGRVRKVLIVALARKLLIAFWKYVTTGVVLEGAETTAS

SEQ ID NO: 327211 - protein, 320 aa, unidentified
MMAQNDLVVVGIDVAKDKVDACIRSLSLRQTFPSTPQGQRKLVGWLRKNQVNKAVMEASGGYERTWAKVLREAGIEVRIVDPKRVRSFALSAGRLAKNDTIDAEMIAWFAETFSDAPGQKHDAAHEELQTLVKARLSLINLRMRLVSQSEHAAPGLVQKAHAHILKSLASEIAKLEAAICAKIKSMPDFAERAEIIESVPGFAETSSANLVAGMPELGQVSDEIAAALIGVAPYDDDSGKRRGERHIKGGRRWVRNAIYMPCVGAATLNNPVLKAYYQRLLAKGKEPKVAIIACMRKLIVILNTMLARRQKWDPSRYARS

SEQ ID NO: 327212 - protein, 318 aa, unidentified
MDNQGNLIDQRRLPNDAKPDYVAQLPESTFAVLEATGNWSYMYDVLEEGTDKVVLTHPKRVKAIAAARIKTDKIDATILAHLARVDLLPTAYAPPVAIRELRDLVRHRSKLVRERTRHKNRIHTILSRYNLHSPSTDLFGRKGRAFLDKVKNQLSATHQLMLDNYLSLIDALNERIKSVNQVIRSWVKNDSRTKLLTSMPGVGIYSAAVIMAEIGEISRFIGPKQLCSYAGLVPSTRSSDAHVRHGRITKEGSPWLRWIMVSAAQRAPCASPRLALFHKRILQQHGKKTARVALARQMLTIVYYMLLRNTPYQERQLG

SEQ ID NO: 327213 - protein, 351 aa, unidentified
MTVTIVETRAEIRAITGGVDTHADVHVAAALDPIGGLLGVREFPATTAGYARLLDWLAGFGTVCLIGIEGTGSYGAGLARHVTAVGIRVVEVDRSDRQDRRRQGKSDPLDAVSAARAAQSGRARGAPKGRDGAVEAIRALMVARRSAAGERTRTINQARALVLTGPDDLRARFARHTPAALITGLASLRPRPGDIAGHATRVALRELGRRAVFPDGQLERPGKLIDPLVTAHAPGLLALYGIGPRTAALLLIAAGDHPGRLRSEAAWAHLCGAAPIPASSGKVTRHRLNPGGDRQANHALWRIVFTRLGSDPATRAYAERRTAEGKSKAEIIRCLKRYVAREVYPHLRRAG

SEQ ID NO: 327214 - protein, 414 aa, unidentified
MDTIYARVAGLDVHQKFTTVGVRCRLETGKLFAEVRTFGTMTRDLLALADYLEALGVTHVAMESTGVLWKPVWNILEGRFTLLLVNPRRVKQVPGRKLDVSDAEWIAHLLQCGLLQGSFVPKRELRELRDLTRCRAQLVSEQTRVANRVHKVLEDANIKLGAVASDILGKSGRAMLWALNRGERDPDKLADLALGRLRAKIPELKLALEGHFREHHQFLVEHLLGHLDDLERRIEEISQRIAEHLPSILDDERLRRLDAIAGVNRTTIENVVAEIGVDMSQFPDEHHLSSWAGICPGNEESAGKRLRNRTTRKNRWLRRAITEAAWAAGRTKNSYLGALYRRLAPQRGKNRALIAIGHSLLVIFYHMLKYDVEYQDLGVDYFDKREPERLRNYLVKRLQLLGYQVCLTPQTDAA

SEQ ID NO: 327215 - protein, 420 aa, unidentified
MPECDFAAFIGLDWGDQTHAVCLSADGKRVGMELPQRAEDIDAWVADLRQRFGGRQIAICLEQSRGALVYALLKYEFLVLFPINPKQLASYRDAFVPCGPKDDPTDAELLCQFVEQHHQRLRAWRPDDSSTRTLRLLTEDRRHWVDERTALKNRLRQRLKEYFPLALEVASEDLDTGWFLELLKKYPSHAELRRANPKTLARLFPKRGRVAEDSGEDSRVTLVRSSSPLVTDQAVILTHRLDVLWIVRMILQLNDTVAEYDREIAHHMAQHCDAELFQSFPAAGPAMAPRLAAAFGTDRERFNSAQEMQQFSGIAPVVKRSGKSCLIIRRLARPKFVHQTFHEYADHSRKKSVWAGAYYRMLKARGMGHHCALRSLAFKWQRIMYRCWQTRTLYDEGRHLQQLRRRQSPLLAYLPKTESA

SEQ ID NO: 327216 - protein, 308 aa, unidentified
MYDSTTTVAVGLDVHARSIRLAAVRADELLEERTLPYDEEAVERLLRRWPLVRCCSEAGPTGFGLYRHLVDRGIDCAVVAPGLVPQRPGDRVKTDPRDARKLARLLAGGLLEPIHVPSPELEAARDLVRAREDARHDRMRDRHRLSKFCLRHGRLLPTSSWTVVRRRWLGEQHFEHAAEQITFETYLHALDLVDARIEALEQAIRKTAEQAPWRELVLRMRCLRGIDTLTALALVAEIGDFSRFRSAEEFRAFVGLVPSESSSGAHRRQGSITKVGNSPACSSRPPGTRAGGRRSATNSPAASVAKTP

SEQ ID NO: 327217 - protein, 372 aa, unidentified
MAMEKCKVSKMRRKDMNSMVAGIDLGDSESLATVLSPLGDVVKTFSFKMSDEGLVLLAENVPRDARIAFEATMMAYPFSRSLRSLGYSDITVAHPTELAWIVRSKRKNDKIDSLKIAKLHLVGMLPESHLLGKEEQMRRDLLVQRVKIGQEMGRIKASVIGYLKREGVYDTLPRASDNFSLARRKAMASLRFNDERDLVMASMLERLELLERQSLRFEERIKAMVKESDDVKLLMTIPGVDYYLASLICSYIGDIERFPDSDHLASFFGIIPESKDSSRVRRRGKMSKDGPSIGRWALSIMVDTVMKANPRIREYYQHHKRRMGSGALAHVKAMRKLLRMVDHMLRTGQHWRWEDQELTGRKVSKLEGGGDA

SEQ ID NO: 327218 - protein, 453 aa, unidentified
MSQYRLRSKELKVSELQKQLQHVNLNAAGIDVGSDRHLVAVPEGRDEVAVREFGAFTADLHALANWLSKCGVTTVAMESTGVYWIPVFELLERLGFEVKLVDARRVKNVSGRKSDVLDCQWLQQLHTYGLLAGAFRPSDEVCVLRGFMRQREMLVQASSMHIQHMQKALQQMNLLLHNVVTDITGMTGMKIIKAMIAGERNPHVLAKHRDNRCRSSAATIAKSLVGNYREEHLFALKQAVELYETYQAKVRECELAIAHYLSTQLNRTEAEPPASERTIRARDCMRGEVDMRVQLFKLTGVDLFSISGFGADTLLTLAGEVGFDMSAWKTEKHFTSWLSLCPGTNKSGGRVLTGKTKRSANRAAAAFRIAASCVAKSKTALGAFYRRIKARAGAPKAITATARKLAVLYYTMLKNGSSYVEVGQAAYEQRYRQRRFSAMQKQALAMGYQLVPA

SEQ ID NO: 327219 - protein, 404 aa, unidentified
MYNAVGIDVSKGKSTIAVLQPGGTVIRKPFDVSHTSQNLNELADYLSSLDGTTKIVMECTGRYHEPMIKALSEAGLFVSIVNPHLIKNFGNNSLRKVKSDPADARKIARYTLDNWTELRQYSGMDNTRTQLKTLNSQFSFFMKQKVAAKANLIALLDNTYPGVNKLFDSPTREDGSEKWVDYAYSFWHADCVRKIGLKAFTERYKSFCKKHHYIFQQDKPEKLFNASKELVAVFPKEKTYKLLIQQSIQQLNLASEHVERLRREMNELASTLPEYSTVMGIYGVGKTYGPQLIAEIGDVSRFTHREALTAFAGVDPGVDESGQHKSKSNRASKVGSARLRKTLFQIMTTLLQNAPEADPVYRFLDKKRSQGKPYYVYMTAGANKFLRIYYGKVKECLRNLEQTE

SEQ ID NO: 327220 - protein, 345 aa, unidentified
MQVITIGLDLAKNVFQVHGVDAAGTAVIRKALRRAHVLPFFAELPPCLIGAEACSSANYWARELMKLGHTVKLMPPSYVKPYVKRGKTDAADAEAICEAVRRPTMRFVAVKSPDQQAVLMLHRVRALLMRQRTMAVNALRGHLAEFGIVAGQGAKNLRELIERILAEGPDRLEFPRLARIALDPLIMQLNDLQTRVRAIEIELLAWHRTSAASRRLETIPGVGFITATAIAATVTDPTHFKSSRQFAAWLGLTPKQNSSGGKERLGGISKMGDRYLRTLLVVGATSVMRYARGKAAVSAVWINRLLAKKPARLVSVALANKTARIAWALLIEQEDYRAPKMSAAA

SEQ ID NO: 327221 - protein, 431 aa, unidentified
MTWRGVSMSDSAMMDLAAAIGIDWADQHHDVSLQEIGSPKVEYSRIEHTPEALTEWLARLRQRFRGRSIGVAVETSRGPLIHALLEHEFIVLYPVNPKSLQRYREAFAPSGAKDDVPDADLLRDMLVKHGERLRPWQPDDEPTRALRRLVQSRRKTVDMRTQLTQQLRAALKEYFPQALSWVGEDLGSPLACDFLLKWPTLEAVQRARLETVRKFYHAHRCRRSDLIERRLDEIRNATPLTRDRAILESSVLLVQMLARQLQALNPSIAQFEKEIERRFAVHEDAELFRSLPGSGRALAPRLLAAFGSNRERFAAASDLQQHSGIAPVTERSGKSCHTHWRFSAPKFVRQTFHEFAHQSILKCAWARAYYDKQIERGSGHHAAVRSLAFKWIRVIWRCWQDRTLYDDARYMQALVQRDSPLAARLAAAAER

SEQ ID NO: 327222 - protein, 363 aa, unidentified
MTSISSPTTRVVVGGVDTHGQTHHVAVIDGIGRQLGDREFPASPAGYRALAVWLGGHGTLEAVGVEGTGTYGAALARHLRVIGVKVVEVDRPDRKSRRARGKSDPLDAYAAARAVLSGSAAVVPKLRDGRVEAIRALRVARSSAVKARSQATNQIKALIVTGPPELREQLRHLRTPKIIAICARLRPGQQLGDPEQAAKTALRRLARRHQLLSEEITEADHEIAQLVGEVAPELLTLLGVGPEVAGQLLTSAGDNPDRITSEAAFAHLCGVAPVPASSGRVHRHRLNRGGDRHANKALYVVVINRLRYDPRSRAYAERRTQEGLSKPEIIRCLKRYVAREIYNVLVRLRSAAEKPNLSALASA

SEQ ID NO: 327223 - protein, 478 aa, unidentified
MSKVTSPKGKAQKAGTVKSKAPKPSVVHMAVVRPNAAGIDIGDTLHAVAVPPDRDKEPVRQFGAFTCDLEAIVKWLKECGITSVAMESTGVYWKPLYGLLIINGFEVCLVNARHTKNVNGRKTDMSDAAWIQQLHSCGLLKSSFLPDDQTETIRTLVRQRKALLQESNRSIQRIQKNFELMNIKIHTVIRDIMGKTGKAIIEAIIQGEREARNFLPLIDGRIQASEVDIEKSLEGNWRSECLFLVKQCYKQYQELQVHIIECEKQIEEMLQQMAAAKDEGVIEAGSGKVEGNKDKWEPKTVKKKSKNAPEYDVRKYLRQIYEVDVLEIFGISETTALEILSETGTDLSRWPTANHFVSWLNLCPNNKITGGKLVSSTVMKKLPNAAAQAFRAAANGVRRSDNWLGDYFRRMRSKGGHKFAITATARKQALIYYKMVREKEAFKVVDIEVYKEKQRQSKIQYLEKRLTQLRNASQTAAA

SEQ ID NO: 327224 - protein, 439 aa, unidentified
MELTAEYGFFVGIDWATEAHQVTVVDPRGNVLNERSVPHSGAAITELIDWLIARADGDTGRIAVAIEVPRGALVEMLYERGIAVYSINPKQLDRLRDRHTVAGAKDDRLDAYVLGDSLRTDLPLFRRVKIDDPVSIQLREFSRLHDDLREELSRLTNRLRDQLYRFFPQMLRLCPAANEPWFWDLVKRVPSPARAAVLRPATIRAVLQKHRIRRLTAEDVLTQLRTPPVRVAPGTLEAARGHIEMLLPRLQLVHAQQQANDKRLQGLLEKLGSVEADDQGQKHEHRDAAIILSMPGIGIHVAATMLGEAAQALAERDYDALRTHSGQAPVTRRSGKRKLVLRRRACNSALADALYHAARVHVQRDPAANALYAAHRQQGASHGRALRSIGDRMLRILVAMLRTRTLYDPDRIGRTRSQPADPSSQAADLIVHVPAGIAA

SEQ ID NO: 327225 - protein, 364 aa, unidentified
MSKTIAGLDVHSKKTFWVIQDSEGQVLAEFECPTTREALIRTVRERKLPIGTRVGMEAGSQARWIVHTLTAAGMAAEVLAPQEVRAKAFRRGQKSDRRDAFEICDGLRRDQFVARVWTPPAEICQLRQILSRRRHFISIRTAQINAVKGLLKTVCDIPTPSFLNSDVAWERLISRLGDSELGVSVELHHEMWLVARAHVQRLDAQLRSALQPFADVAALLQTAPGVGTITAATFIATIGVPERFPSSAHLASYIGLTPSTYDSGRRERHGAITKEGSPALRTALCEAAQQARRPTNPLNPYFLKIKAQSGYKKAVVAVAHRLARILYQMWKHEASFDVKRLNVRYQPTTRAWTSYYRIGRASRA

SEQ ID NO: 327226 - protein, 420 aa, unidentified
MKVVYPICCGIDVHKTFLVATIITSQGITPHYSKKRFSTFNNSILQFKQWLIDNNCFDVCMESTGKYWVPVYNFLEDTIRITIANPKWVRAVKGNKDDAKDSKWIGDLFRLGLVPGSYIPDKQIRILREYTRYRSKLVACKSSEKNRFQNAFTTCNVALDAVVSDMFGKSAIAITDYLISADTFNPEYCTSLLQRSLKKKADVVVESIEGYQMTQEQKARIVLVRSHLEYITQCIAELDERLNKMTQPYGNAINLLCTIIGVDRQSAITIISEIGTDMSQFSNSKRLCCWAGLTPSNNESAGKKKSVRITRAGVYLKPALVQVAHAAVKSNKFPYYKIKYERIYKRRGKKRAIIAIARMILTAIYHMFTTGDSFNPCDLYKIDMPQELKDKQKEKAVKEAVKFLIAQGIIKDSDIIFPSA

SEQ ID NO: 327227 - protein, 353 aa, unidentified
MSRIADAAMAVTGGVDTHAEVNVAAVVDQVGRVLGTEQFPTTAAGHRMVLAWLRRHGDLVKVGVEGTGSYGTGLARYLAGQGVEVVEVIRPNRQARRRRGKSDTADAVAAALAALNGEAAGRPKTHDGAVESIRMLRVARRGAVKARTQAGNQLRDLIVTAPDPLHAKLAPLPTSQRVDTAARFRGGGLSDPTEAAKAAMNTVARRHQALTAEIAQLDAALAALVTDAAPPRLLAKRGVAIQVAGALLATLGDNPTRLATEASFAALCGVSPVDASSGKQVRHRLNRGGDRQANSALWRIVMVRMAYDPRTKDYVARRTKEGKTTKEIMRCLKRYVAREVYKALVDHPDRRAA

SEQ ID NO: 327228 - protein, 319 aa, unidentified
MSKLTLDVNCAELNIHIKITNGSAGFRLFLKWCKESGIDLKKSIVAMEYTGGYEYKLMQFCEAKKIQYSRIPGLAIKNSLGIIRGKNDKVDARRIAQYTNEKHKSITPANPINPTIVGLRQFLSFRKRLVRESAGYKATMKERKEMYTVKNNDTLVRIMNKKIKENNKLVKQLEIEMQALIQTDQKILTNYNIVTSIRGIGNVNALMTIAYTENFTCFKNARSYAVYVGVVPFDHSSGTSLHGRKRVSNMANKELKQELNQAARVAIEWNKDLKLYAENKRKDKPYKVVLNNVKFKLILRMFSLVKRGEFYVDNYQKVA

SEQ ID NO: 327229 - protein, 339 aa, unidentified
MDVGDKDNQACGLNAAGKIVWERRIANTVAGLGGVFKSLPPCRVVIEAGGHARWITELIEGFGHEVKVVNPRKMRRIYENENKSDVVDARELADAGLCRWDRLPLAYLRKKEDQEKLSVLKSRDLMVRSRTGMVNLVRSLLKHEGVRVPKCGPEAFPKRAAGLVPEGLQVAIEPLLKEIAALTERVRELDKWIEATAKNDPGVQSLLQVQGVGPVTSAAYVWTMSDPERFQKSRRVGSYLGLRPKRDQSGETDKQLPITKAGNAYIRRLLVSCAQYIVGRHGKDCDLRRWGLKLAERGGKRAKRKAVVAVARKLAVLLHHLWITGEEYEPVHSRDRAAA

SEQ ID NO: 327230 - protein, 354 aa, unidentified
MGRKASTTWDSIAAEYRKGVRIWIGVDVHTKRYSVAAFSETGVLHSFVAPADDRGLVEQIIASGVKVETLVYEAGLTGFGLYRTCQAAGIPAMVVSANRIPRPATQSAKTDKIDCIALARYASMGLLKGITVPTVEQEATRSIIRRRQAVSRELAKTKVMIKSFLTCHSLPVPDGLKTWNAESRLELEAIVMQPGLRFTLDSLLRQLRQFEEEKKLLEQTVKTTIPPKGDDVLQSVPGVGPIISATFRAELLSPDRFECSEKLTSFLGLAPVVSRSGESKGKSRLVPCGQGALRSMLVEAAWVLSAKEKWAKEYYSKIRRHSGLFQKAIIALARKLAIILWCLWRENRPYRSEQ

SEQ ID NO: 327231 - protein, 472 aa, unidentified
MSKPRSLHQASRTTAKGHGRKKKKRTEEAVAKLPVLRPDAAGIDVGAEELWVAVPEDRDERPVRCFATFTNSVKVMIVWLQQCGIQTVAMESTGVLWIPVYQMLEAAGIEVCLVNARHYQNVAGKRTDVQDCQWLQFLHSVGLLRASFRPEQAVCAVRVLVRQREQLVQMRSQHVQHMHKSLDQMNLKLHYVISDVVGASGQRIVRSILAGERNPEVLAKLRERTIQATEEEIRESLVGDYREELLFALGQSFAMWEEYNRRVNDVEVEIEKYTAKLETKVELTVVAKLGKKRGKGRRCKPQTRHLANMRDLCHQKFGVDVCQITGMKRGGIAEVLIAELGPDLSAFRSASAFAAWLGLCPNHEISGGKILSRKTKKIKQPVAVAFRLAGQSLERGNHYLNRWYRSMKGRMGAPKAITAAAHRLARIFYYMVTRQVEFDEGVFAKNEKRMEERMRRNLEKRAAQLGFKLVAA

SEQ ID NO: 327232 - protein, 378 aa, unidentified
MRFYNQPHRFYCGVDLHARTMYLCILDQAGAVVLHQEVSAEPTAFLEAIAPFRDGLVVACECLFCWYWLADLCQAENIAFVLGHALYMKAIHGGKSADDRIDSQKIAQLVRGGNLPIAYVYPKGLRETRDLLRRRMYLVHKRAEVVAHVVNTNSQYNLPSFGKKLIYARNRQALKITDRFADASVRKSIELNLRLLDALDDLLGDVELYLERTVKLDDADTFYRLRSIPGVGKILALVFLYEIHDIHRFASEGMFLSYARLIRPRKTSAGKVKGGGGAKIGNAHLKWAFSEAACLLARESDQAKRFLARQQKKHGKPKALGILAARLGRAVYQMLRQKKAFDPKRFWNGEPGVTPAQLHKAAVQRPRRAKGSSCVLEA

SEQ ID NO: 327233 - protein, 473 aa, unidentified
MARAARRPGARQYPKRRSSRGRSAPFEQMNLNAAGIDVGATEHWVAVPEDRDEELVRRFGAFTADLYVLAEWLRQCQIETVVMESTGVYWITLFEVLEERGFDVKLVDAHYARQVPGRKTDVKDCQWLQELHTYGLLRGAFRPEDQICVLRSYLRQRSMLVAMASRAVQHMQKALEQMNLKLTEVVSDINGKTGMEIIHAILAGERDPQRLASHRDRRCKHDQATIAKALEGHWRAEHLFALQQALEQYAFLQQQLQACEQQIEACLQTFVTHVEVEPPQPTPACKRRARQRQAPSFDVHQYLDAMTGVDLTQIDGIDALTALKVISEIGLDMTRWPTGKHFASWLGLCPGNKLSGGKRYRMRSKPTANRAASALRLAAQGLVNSHSALGAYYRRMRARLGAPKAITATAHKLARLVYSLLRYGTAYVDAGQQAYEQKYRDRVLTNLQRKARVLGYQLVHVEDTGRVQAAATL

SEQ ID NO: 327234 - protein, 443 aa, unidentified
MSTFVVPPAETAFAAFAAMDWGTKEHVVASVPAAGGRIELSKLKNTPEAVELWAASLRQQFAGALVAVAIEQKRGAVIFMLSKYDHLILYPVPPTMSASYRHAFFPSGAKDDNGDTLLLLDLLRHHRDRLSPLQQDTPDTRLLRFLTEDRRNLVEQRVSVVQQFTACVAQFFPQLRTWFGPLDTPLPQAVLERWPTLQQLQRAHPGTLKRFLAEHRSWDNDRIAELIRQIYAAVPATSDEVVVEACGRKVTACVAQLRALQEQIVAYEKRIGALTAQHPDAPIFSSLPGAGAALVPRLIAAIGTDRNQWAHAADLQRFSGIAPIVVRSGNSSRIAIRRACPKFVRQTFHEFAAHSIRFCPWAKMLYERHLRPDKKNHHAAVRAVAFTWIRIVYRCWINRELYDERIFLAAQQRRNSPFTPANASQAGVRFQKQAGFQKLTAAN

SEQ ID NO: 327235 - protein, 355 aa, unidentified
METAYDGRQVVGMDLHRRRSVLVRMTEDGRRLGVARITNSPAELRREIAKAGKSPRVVLEGTYGWYWAADTLAAAGAEVHLAHPLGVKAFTCRRVKNDERDAADLADLLRMGRLPEAWIAPPEVRELRELTRYRCRLVGLRTSCRNQVHGVLGKLGIPPACTDIFGAAGSAWLDQLGLPQPYAGKVTSLRQLAGELTTEITMLSEVIADLLAGHRGYQVIQQLPGIGPVLAAVIVAEIGEVSRFHTAAQLCSWAGLTPRHRESDTKITRGHITKQGSRLLRWALIEAIQHAPAGSLPGAVKQRIIARRGKQAKNIAKAAAARRLLTLVCYGMRDGQIRCLPATAGSPPPTAPQAA

SEQ ID NO: 327236 - protein, 341 aa, unidentified
MVDVRVIGLDIAKSVFQLHGLDGAGAIVLQKRLTRARLLPFFERLPACLVGIEACATSHYWAREIARLGHEVKLMPAQYVKPYVKRQKNDMADAEAIAEAVTRPNMRFVAAKGPDDQSAMMLHKVRLMLNRQVVMLSNAIRAHMAEFGIVAPIGRGGVDRLLAVIEDIADQRIPAEARRCLQTLTVQLGLVKRQVLDSDRQLLALTRSSELGRRLMEIPGIGPLVASALVACVPDPSIFRCGRNMAAWIGLVPRQNSSGGKQRLGSITKEGNRYLRQMLFTGAMAVIRRAMQSTRRPWLARLLERRKPKIAAMALANKNARIAWAMMMTGDHYREATAIAA

SEQ ID NO: 327237 - protein, 370 aa, unidentified
MLDTTTFVGLDVHARSIKAVSLDVMTGEVRCATFGYEAGAVAEWVRSVDPKAKCVYESGVTGFDLQKRLSGLGVDCVVGAVSKMIKPSADRRRKNDRNDAEFLARMLSVGNVVEVWVPDDECEAARDLTRALEDARDDLSRSKQRLSKFLLRHGLAFDERTPTGRRKGNWTRAHWSWIESIRFAEGADNDVLAYYVDAVRRAAEEKARLEGLVEAEARKPRWRRRVDSLRCLKGVDTATAADLVFEAGEFSRFRNARSFAAWVGLTPSEHSSGESDRRGAITKAGNKHLRKALVEAAWHYLTCSGRPKDLAKGQAPDRVARRHAAKGVRRLVERREALLARGVHGNKANVATARELACWVWAVGLMAEEA

SEQ ID NO: 327238 - protein, 407 aa, unidentified
MNAVGIDISKGKSTVAALRPMGEVALLPQEFLHTGVGLEQMAYAILALGEDTRVVMEATGRYHEPVAAALHEYGIYVCVLNPLYIKQSGGGSIRKVKTDKADALKIAKYGLDNWVDLREYTPMDTIRQQLKLCSRQYNLYMKTVVSLQNNLISLTDKTFPGVNELFSSPERADGHQKWVDFVMTFWHCDCICRASEKAFTERYQKWCKRKGYHFSAEKALDIYAGSCGHFTTLPKNENTKLLIVTAAQQLLAGKTTLATLRAEMTRLASQLPEYETVCAMYGVGKITAAQLMAEIGDVRRFPRRSSIVGFAGVDPGVDESGKHSAKSVPTTKRGSPHLRKTLYQIICTYLKKSPADEPVYQFLDKKRAEGKPYFVYMTAAQNKFLRIYYARVKECLEAFDTEPAKQS

SEQ ID NO: 327239 - protein, 345 aa, unidentified
MQIKSIGIDLGKTTFHLVALGSRFQVVIRKKFSRTQRLEYRANLPSSLIGMEAGVGSHFLGRALGEQGHEVRLIPAQFVRPFVKSNKNDYRDAEAIAEAVERENMRFVPIKTEDQLDLQALHRVRDRLVARRTSVINQIRAFLLERGICFRKGPASLRQQMPEILENADAKLSPAMRRLLDFLWQEGKGLQLQIESLNTELEQIASSDPSCVRLQQIPGVGPLVSTAVVSAIGNGAAFKKGREFAAWLGLVPRQWSTGGKAQLLGISKRGNPYLRKMFIHGARAAVLRVKREGSSLGMWMSGLETRAARNVVIVATANKLARISWAVLASGNDYQPLHKAAIFSN

SEQ ID NO: 327240 - protein, 388 aa, unidentified
MPQSNDLSRSLAAFDQDRTLIAVIEMSQSNWLVAGLVPGLERRPLKKLSPDEDALLKLVQRWRNEAAQAGREITRIVVAYEAGRDGFWLARWLRRRGIEAYVIHPSSVAVSREHRRAKTDRLDTELLMRAVLGWLRGEKRHCSMAAIPTIEDEDAKRPSREHEKLVGDRTRLVNRMKAMLARFGIRTFKPTLRKAADRLDGLRTAEGTPLPENTRAELRRDMMRLRMVREQIKEIEQERLRKLTVAPAEKGPPMMVRFIARIIGIGIETADMLVSEILSRGLRDSKAVARYAGLTGAPDESGRRRREKGLAKAGNARVRRGMIQLAWRFLIFQKDSALAQWYRARTADAHGATRKRMIVALARKLLIALWRMATTGEIPEGISLRAAP

SEQ ID NO: 327241 - protein, 346 aa, unidentified
MMIIGCDFHPSWQQISWLDTESGDCGERKLVHASGDAKKFYQQLALPVLIGMEATGNSQWFVELIEDLGHEIWIGDAAQIRASYVRKQKTDKRDAAHILKLVVQGRFPRLWTPDREQRDLRQLVLHRHKLVEIRSRVKNELQHLSLNKGMQRKGKLWSQAGQKLLRELPLKPWAACRREDLLGLLAMLNQQVGQLDIAVQHAAEENPQARLLMTQPGVGPNTALAYVLTLGDVSRFPRGKQVASYLGLIPREHSSGGKQKLGVITKQGNRMLRSLLVEAAQIAVRFDPGMKKQYLHRCHQKPKGVAKVATARKLAVRLYWMLRTNVAYPEIVRIESSPRVPLVGAS

SEQ ID NO: 327242 - protein, 351 aa, unidentified
MEKYISFDSHKHYTLAEREDVETFEIKQERIRHERGAIRDYLRDCSRGTAVAVEASGSYYWIVDEIEEAGCNPMLVHPRKAKLMMGMINKTDKLDVHGLNRLQRNQTLPTVWIPPAELRDLRELTRTRIVLVQQRTRLKNRVSATLTKYGLLVKGCSDVFGVKGQEELKKLMKQLPHETQCVSQMLLEQTNYLTVQILVLEKRIEELVKMTPEMQRLMTLPGIGKILSSTIMLEIGTIERFSDAERLASYSGTTPRVISSGDKTRYGHLRKDVNQYLKWAYSEAANTMAANHLRCPDRHVSMLYKKVRHRKGHAVAVGAVARHLAEATYYVLSRKQTYRDPKLRQCSTREA

SEQ ID NO: 327243 - protein, 392 aa, unidentified
MEIYVGIDVAKETHWACALDARAQVLLDRAVDNDQAAIERLVADLRGLGGEVVVGLDITGSLARFLEAILLAKGLRLVHVPGIAVNRAGQGFSGGESKSDPRDARTIAELVRTRDLRPILPDDETAIALRLKVTRRRELSDDQTRRISRMRQLLGAIHPGLERRLDLTAKGPLVLVTRYVTPTEIRRAGLKRLMAHLKRTPHLHAIEALAQRALEAAEGQSIAVPGEASFADMIRELAAEALRVREAIARIDRDLEALLERHPDGALIRSLPGMGAVLSAKRIANIGTIERFHSADALASAAGLTPIIRQSGKSRNWRRAFGGDKALKRVFFHSAFCAVSTRDPLSKAFYDRKRREGKHHTQAIIALACRRVTVLWTMLRTRQTFDPTQRAA

SEQ ID NO: 327244 - protein, 360 aa, unidentified
MKQITRGESRREAVRVGVDLAKRVIQVHAVDALGRVLTSRTLGRDRFIEWCTRLPAGCIVAMEASSSAHHWARKLAAIGLDARIISAQLVEPYRLEGASGKNDANDAAAICEAASRPSMRFIPVKSIEQQSMLCVHRLREGLKQDRTACINRIRGLLAEFGLVFAQGPRELQLILSDVLEDAGNELGTLARLTLQRAQAQWRELDEHLAWCDERINARGRDNVEVKQAATLIGIGPVTASAAVATVGDFKQFKNGAQFGAWIGLTPRQRSSGGKSNLGSITKRGDTYLRTLLIQGAKSAVMTAQRRHDKISSWALALRERSGWQKAVVALANKNARILWAVMTRGDVFDPNHLSVKPTGG

SEQ ID NO: 327245 - protein, 326 aa, unidentified
MSRIQEKKTITTATSPFIVIGIDVSKDQLDVFVSPAGNHHSFKNDSGGVAELVKVCRDHDADLVVLEATGRYHRMAHETLHEAGVKTAVANPARSRNFARSVGRLAKTDRIDAQVLAEYGERVRPPESTPPSKLQAKIAEITVARRQIVDEMKILKQQQTQTLDELVIAQVEARISLCQRHCKDLEQLLAELIEEDDGIRRRHEILKSIPGIGLTTSATLISELNELGGANAKQIASLSGVAPMNRDSGSFRGKRKIGGGRKPVRDVMYMAAVVAIRWNKDMAAFYQRLKKAGKPFKVAITAVMRKLLILANTLLSENRLWSETPP

SEQ ID NO: 327246 - protein, 351 aa, unidentified
MIGIVDADGTRLRHRRLACDLEEVIAFLNPYKPFLDRVAVESTFNWYWLVDGLKAAGFPVVLANPAKIDQYEGIKHADDKNDAYFLAELLRLGILPTGYIYDPESRPVRDLFRRRMGLMRLRTTLLLSSKSLHHRTTGHSLAVGQLKALSPADLAAFYSHPANRLTAEIQKELIEALNQCIRRIEKMVASEALKKPYYKRLQTLPGIGVILGLVISMEVGEIERFAEPGRFASYCRTVDSNRVSNGKKKGSNNEKCGNKYLAWAFVEAAHAARRYDAHCRRWFDRKSAKKGTTIATKALACKLAKAAWHVMAEAVDYDPAKMFPELAAGRIEQISGRQTSASKGVGPEPED

SEQ ID NO: 327247 - protein, 387 aa, unidentified
MPVAAQRSEAPTTIQTDLGAIFVSLELSQSKWLITSLSPGGGEKMSKHAVAAGDVAGLLARFAELKRKARARSGRCFPIIVIQEAGLDGFWIHRVLEIEGIESHVVDPASIATSRRRRRAKTNRIDGEALVRALLAYQRGEPRVCAMVRVPTPEEEDRRRLSRERQALTNERVQHVNRIKGLLFSQGVFDYEPLRRDRRKQLEERKTGDGRPLPAHLKAQIGRELDRLELLLKQIKVIEAARDAMLAATQVVSPAPAMLLAVKGIGSEFAAVLWSEGLSRHFDNRRQVAAYAGLAPTPWQSGSVNHDQGVSKSGNPRLRTTMIQMAWLWVRHQPHAALTLWFRDRVKQNGGRLKKTTIVALARKLLVALWKYVNAGVVIEGAIIKTV

SEQ ID NO: 327248 - protein, 341 aa, unidentified
MGEITTIGLDIAKSVFQVHGADAAGGVVLRKKLPRSRVLAFFEAQPRCVVAMEACAGAHHWGRELARLGHEVRLIPPAYVKPFVKRQKNDEADAEAICEAAQRPTMRFVPVKSREQQASGMTFRARDLLVRQRTQVINAIRGHFAEYGWVAPKGVCHVERLIERLRAPEADLPEAARAGLEVLIEVLADLDRRVAGLDAEVAKRARTDKTARRLMTIPGVGPISAVAITALAPGAEAFRCGRDFAAWLGLTPVQRSTGGKQKLGQISKMGDRTLRRLLVIGASAVIKQAIRRGAAPGSWLAQMLARKPRMLVAVALANKMARTIWALLAKGGVYKAPAPAA

SEQ ID NO: 327249 - protein, 421 aa, unidentified
MKITCVGIDVSDGHSTISAYAWGDVMLMKPQDVPHTVDALHGLADEIGRLPGEVRVVMEHTGRCWLPIAGVLREAGLFVSAVNPKLIRDFGDNKLRSLKTDKADSRKIARYGLRYWNELQPYAPTETTRQKLLEFSRQLDNSNKLLTAQKNNLQAIVSVTFPGVRKLFTSPAREDGRIKWVDFVCDFYHCDRVRKLGAAAFTECYRAWCKRKGYNFTKYGCAKIYALACNCVPSLSCDRDTKLLINEVARQLTAISVAVEVFRAKIYDLASTLPEFGCVMAMFGCGKTTGPQLMAEIGDPTRFRDRVVDGRRIKGKKQLAQFAGVAPGNNQSGSYEQQSVKASKKGSANLRRTLFQIISTHLKKMPDNPIYHFLDRKRVEGKEYFVYMTAASNRFLQRYYAQVRDYLAAQPVDPPSPSIAA

SEQ ID NO: 327250 - protein, 389 aa, unidentified
MLLDHRSDGLTAIRTQFGAIFVSLELSRSNWLVTSLSPGKGEKMSRHSIAAGNVAELLTLFAELRRKTEVRTGQSHPIITIQEAGLDGFWLHRVLQQQGIESHVVDPASIATPRRRRRAKTDRLDGEALLRALLAYKRGEPRVCAMVVAPSPEEEDRRRLCRERRTLIEERITHVNRIKGLLFAQGICDYAPIRRDRRARLEALRTGDGRELPSHLKAQIGRELDRIELLLGQIKAVEAAQDALLAAARKPASQEAAPDPVTMLLALKGMGANFAAVLWSEAFYRQFANRRQVAAYAGLAATPWQSGGIRHEQGVSKAGNPRLRTTMIQLAWLWIRHQPQSALTRWFKERSQQGRKRAIVALARKLLVALWKYVTQGVVIEGAVMKPAA

SEQ ID NO: 327251 - protein, 339 aa, unidentified
MKVTTLGIDLAKNIFRSHGVDGRGTVALRRQVTRRQLLALLANLPSCLVGMEACAGAHYWAREIGKLGHTVRLMSPHFVTPYRKSQKNDGNDAAAICEAVGRPSMRFVPVKSAAQQDVQALHRIRFQLIKWRTALANEIRGLLAEYGIVIARGIGPLRRQLPLILEDGEDRLSGLFREMLGEMAERFKLIDQRIRQYDLKVEHVFRQDERCQRLARVEGVGSLIATALVAAVGNAHDFKSGRELSAWLGLVPRQHSSGGRNVLLGISKRGDRYLRTLLIHGARAAVRVVERRRDHRSVAINRLKLRQGPNVAAVALVNHNARVLWALLTRGEEYRPRCA

SEQ ID NO: 327252 - protein, 471 aa, unidentified
MKQRNAIGIDPDSQGFVCAYVRRSDTNVTNKGYLATDSDLKCFLKWVKGEKDVVVAIEGSNGLSKPIEKALRESGIVFYSFKAADTDKFRKAVLGQNKNNQKDAESVARYAMALEAQGKLENYRRVWFADMELQLLTRRYGSLAKQLTAEGNRLWKLLRYACPDLYLALSGKNPEVECGQKTVKSQGILNLLISTPDVGQWKSLSNEQILEAMGGCDYKGRRELIEELRKVMGSFQPAPDPMALLLSSSANQIQRLKEEQLHLVRMLEKLTAGNAAVQALREMRGIGVITAATMIAEIIDIRRFVREDSLACYCGLGMREHSTGRTANMVPTELFNHRLKDAFMKAARNVVFYNPDSHIAGYNRNLMKGGMSQLEAMRRVARALVRVIYNKLSALLVTEGTVDAQSTDEQRRGESGMASGITRSGQSHTSDIPPSSPYNDGATGIKRVKSGDARPRKRRPARRKRTSKTNT

SEQ ID NO: 327253 - protein, 341 aa, unidentified
MKQNVCTVGIDLAKKIFHLVGTDITGKIVWRKRLTRHALVPFLAQLPPVTIGMEACGGAHYWARQFHQHGHTVKLMAPQFVKPYVKSNKNDMRDAEAIAEAVTRPTMRFVPLKAVDQQDIQALHRVRERLIGERTALINEVHGLMLEYGIVLPKGVAKFRQAVVEKLEAEKDKLTALSQELFWKLVKEFAALEDQITFYQEKLETLATTHPECQRLMTIPGVGPITATALVAAVGDVGVFKNGRQFAAWLGLVPKQHSTGGQSLLLGISKRGDSYVRKLLMHGARATLRWVKLHTDKRSQWIRGLLGRRGWNRTAVAVANKNARIVWALLSRGGVYGAPVS

SEQ ID NO: 327254 - protein, 340 aa, unidentified
MGYYVGLDVSLKSTHICVLDGERLVIWRGVSDTQIAMIAEHLARWSKQIVLVGLETGSLTPWLYHGLSDLGLPMVCMDARRASDALKARAEKTDKADARALAEMLASGWYSAVHVKSLESHQLKALLGARDQLVRVKRQLYGQVRGLLRPFGIKISQRVGAKSFDEAVRMACNKEDGLSIAVGALLDTLANVASQIAVLDKQVRTLAQKKKACWHLMSAPGVGPITALAFTAAIEDPHRFGSNRDVGAYLGLTPKRYQSGERDVSLSISRQGDEMVRHYLYEAANCLLTTVTGASALKSWGLKMVRRCGAKRARTAVARKLAVLLLRLWKQESHFEAQSA

SEQ ID NO: 327255 - protein, 406 aa, unidentified
MLVYIGIDWSETKHDVVILNEAGAALERLVLPHTPEGLCQLETARQRLGLKPEECLVGIETAHHLVIDFLWAHGYTQVYVIPPNVVKSSRSRYRQSGARDDQSDAYVIADVTRTDRHRLALWRPDGLLTRQLRAAVSLREHLQRARVRCCNRLRAVLLRYYPAATQVFKHLDAQITLAFIQAYPTPQAASALSFAAFKTFAQQHHYPRPAGLRTNFARLQASQPEATPDTIQVYQGEAVCLAALLLSVVQAQLDVERDVGELFARHPERALFASLPGAGDWLAPALLAKFGDDRQRFPTAASVQALAGTCPVTESSNKRRWVHFRRACDREFRHIAQQWARCSLKESTWAVAYYERIRPHCHSESHAQRCLANRWLAIAWKCWQSQQAYDEALHLQNRAKKLANRK

SEQ ID NO: 327256 - protein, 346 aa, unidentified
MKILKQVVGIDVAMDELVSKFGFLNQELNIKFKSDEVFKNTEKGFVKLINWTEKHLSAETEVLFVMEATGVYHEKLAHWLHKKSKKVSIVLPNKISNYARTLDIKTVTDKTAAEAITRFGLERNLDTWEPARPVFSKIKQLTREREQIVAERTVIKNQLHAENSEAFPNHNSLKRLNKRLKLLNEQEKEIKKEISQKIREDKKVQDHVNNITTIPGVGELTAAIVLAETNGFELIRNKKQLTSYAGLDVREKLSGISVKGKPSISKKGNRYLRKAVHLPALTAVKHCEQYKRTYAGLVGRHGIKMKALVAIQRKLLELMYILYKTESVFDPIYEEKRKALKTYQNL

SEQ ID NO: 327257 - protein, 332 aa, unidentified
MNYELFVGIDISKLTIDAVAFTAETFKAPTHCIFNNNYDGFTEMLEWLAEYGITDDKILFCCEHTGIYICPITAFMDVKGLSLWVENGLHIKRSIGIKRGKSDKADALSIANYAFSNRFNARIYHFPSVTASKLRHLLAHREQLVRHQTSFKCTCSELKGFDKENALYCIADSQEMLAIYSERIKKVDAELSIVIEEDQELNVKFRLVQSVHGIGKQTALFILIYTEGFASFSDYRKFASYCGVAPFPYSSGTSIRGRNRVSSLANKKLKSLLTMCALNTIKKDNEFKRYYDRKKAEGKNSMCVLNVIKNKLLSRVFAAVKRGTPYHDEIAA

SEQ ID NO: 327258 - protein, 370 aa, unidentified
MKKDNAKKSPRRKEANRQSDRVTIGMDLGDETSRYCVLDDEGEVMAERSVATTKKGMLQAFGAMERCRIALEVGTHSPWINRLQTKLGHEVIVANARQVKLISASSRKDDRLDAQMLARLARVDPKLLSPIRHRSEEAQADLNLIRVRAALVDGRTALVNAARGFSKASGERLPKCDTDQMDVERMAELPVELREVLKPLIEQVESMTEKIRECDKKLEQIARDKYPETKLLRQVKGVGTLIALTFVLTLEDKDRFAKSRDVGCYVGLRPKRSESGESQPQLRITKEGDVYLRKLLVQGAHYILGYRGPDTDLRRWGLKLAERGGKNARKRAIVAVARKLGVLMHHLWATGEVYEPLHNAQETASRKKAA

SEQ ID NO: 327259 - protein, 393 aa, unidentified
MIYVGIDVAKSKHDCFITNSDGEILRDAFTIQNSKIGFLELYETIRSFEPNPSSQNIRIGLEATGHYSNNLIDFLLAKNLNPVVLNPLSTNLFRKGQSLRKTKTDKSDARFITMMLITEDIKPYSPVSYHISELKSLTRHRFRLVQERTRFKISYSRILDIVFPELQGVVWATTQKSMLFMLLELPNTKAIGQCHLTRLTGLLEKNSHGRYNRNKATQIRELARNSIGSNSPALAFELQQIIRSILFLQDEIALLDKQIKSVVQEMDSPIMSIPGISYTLAAMILAEVGDVERFESPAKLLAFAGLEPSTYQSGNFTASHATMVKRGSKYLRWAVLNAARLVCMRDSTFKAYRDRKQLEGKHYFVASSHTAKKLIRVIFYMLKNNQQFVAQSA

SEQ ID NO: 327260 - protein, 405 aa, unidentified
MFEIQDVGVFLGLDVGKSAHHGHGLTPAGKKVFDKPLPNSEPKLRAVFDKLAAKFGTVLVVVDQPASIGALPLTVARDAGCRVAYLPGLAMRRIADLYPGEAKTDAKDAAVIADAARTMPHTLRSLELTDEITAELTVLVGFDQDLAAEATRTSNRIRGLLTQFHPSLERVLGPRLDHQAVTWLLERYGSPSALRKAGRRRLVELIRPKAPRMAQRLIDDVFDALDEQTVVVPGTGTLDIVIPSLAASLAAVHTQRRAMEAQINTLLEAHPLSPVLTSMPGVGVRTAAVLLVTVGDGTSFPTAAHLASYAGLAPTTKSSGTSIHGEHAPRGGNRQLKRAMFLSAFACMNADPASRAYYDKQRARGKTHTQALLRLARQRTSVLFAMLRDGTFYESRTPKAVELAA

SEQ ID NO: 327261 - protein, 355 aa, unidentified
MQSYNISFKGQNIYVGIDVHLRTWTITVLAETGYKKTFTQPADSKALFEHLKKNYPEGIYHAVYESGFCGYSSCYELRDYGVDCIIAHAADVPTSQKERLSKTDSVDSVKLARELRNGSLKAIYIPPKERLGDRDLLRTRQTFMKDQCRVKSRIKHLLHTNGVSYPEQFRQSQSHWTRAFINWLLNDVKLLSPMRLALDFLIEELLGLRGRILKINRAIRYLTKTEAYCKMYGLLIGIPGIGMITAMTILTEVVSPDRFSSQKKFIAYIGLIPTMNSSGDTTPDGKITPRGNQKIRRMLIESAWTTIRYDRELSAAFGYYCKMMKKNEAIIRVAKKLANRVWHVFKYNDEYKECN

SEQ ID NO: 327262 - protein, 343 aa, unidentified
MQDTLYDHYIAIDWSINNMAIARMTKKSNKITAVDVPSDIEDLQAYLKNLRGTKILAIEETTTSQWLYAELKEYVDRILICDPNRNKLLNEGPKTDTIDATKLVQLLKAGLMKEVYHSTDKFLYLRRVVSGYEDLVKSGVRLKNQRYALLRACGKRGKEKIGSTIDSQGEQFVLDCLDRQIEAYEKEKQCYENEFERLARKNPEIKHQKSLPGIGTINAVKIVARVVTPHRFSDKGRYLSYTGLIKLEKTSGGRSYGKRSPRYSRQLKCVYKSGVLAAIAGNNPINDYYDYLIQENGYPEHNARHKACRRLAILSLGVFKSGRKYQPYRRDHVKNNKEGRSGL

SEQ ID NO: 327263 - protein, 350 aa, unidentified
MRIESKQLLPAWNGIDVAKETFDSALYMPVEPGQAPRDIMSLPKKTFARTLEGVKEFHDWSFQVRDKAGLEGGNMRIVMEATGRYSKELAGWLNAEMPFTRPVIEDPRAVKDFIKSLKLRNKTDRIDAGALARYGAERMPEPSEDMPEEYQYLRELTRQREALKDQLTAARARLTEMGEFKKMIKIQQAVIKSMEQAVAKMELEIKRCINDSEELRKSLKYAVTVPGVALIVSATVLGECGPLYRHTSRQLGSYSGIAPQIRQSGTSVCGSRISKRGSGNLRRVLYMASIAAIEHNPEMEMIYNRLIAKGKKPLQARCAVMRKLLILIRAVVVNETEYDKNFAKKSILKT

SEQ ID NO: 327264 - protein, 425 aa, unidentified
MNYKQNEKINQVKESTLVVGIDIGSTTQYARAFDWRGIELGKVFTFSNSREGFEAFKAWMQHLQDKYRKSDVIVGIEPTGHYWFDLGAYLEDEGILLVMVNPYAVKQTKELDDNSQSKNDRKDPKVIAKLVTEGRYSAPYTPDGVYADLRIMVTNRKRLIREMTQIKNRFARWFAIYFPEYTDVFGDYEAQSSMLLLKKVCTPEAIVELGAEKINQIWRDAKLRAVGMKRATTLCETAKRSIGLKKGSSAARYEMKLLLEDYEYKKAQLDAVMEEIEKLCRKIPESEQMLAIKGIGVITVAGFLAEVGDVRRFESPRQIQKLAGLSLRENSSGKHKGQTTISKRGRSNLRAVLFNAAIPLIATNPEFKSLHEYYTTRGNNPLKKKQSVIAISCKLIRVFYAILANGVTYDAQKMLSDIHRQPQAA

SEQ ID NO: 327265 - protein, 410 aa, unidentified
MGGWAKISPLSSPLWITLEEALAFQEGQKKQGKSQSFGYNFVAHKIQPKERRLAMDKRSKLDFTGQPVYIGLDVHKKSWGVSIFTNHGEYKSFSQTPRAETLVKYLQHHFPGAQYHSVYEAGYCGFWIHDQLREKGIQNIVANPADIPTQDKERRNKRDRVDCRKLARGLRSGDIKGIYTPPRWKLEDRSLIRTRLSMGRKQGRCKNQIKSMLLFYGVEIPEQREMGHWSRRFIRWIEGIRMERASGDVALQIHIEELCHLRQIIAKLNRTILALSRTEEYKGWVSLLRTVPGISTLTAMIVLLELGEINRFPSLDQLCTYVGLIPDIQGSGEKEHVGGMTQRGHSYLRWLLVEASWVAVRKDPAMMEAFHEYCKRMKKSKAIIRIARKLLNRIRYVLKNKAEYVPCVIE

SEQ ID NO: 327266 - protein, 421 aa, unidentified
MEGEQSHYRWYVGIDWSAASYEVCVVDRQAQVVARKTIAHSGTGIAEFVDWLEKLCEGKPETVAVAIETPRGALVESLVERSMAVFAINPKQLDRFRDRYTVAGAKDDSRDAFVLGDSLRTDEHCFHRVRLEEAAIIRMRELSRLEANLQQDAHRLNNQLWEQLHRYYPQMLALSKAADEPWLWDLIELAPRPAEGRKLELARVQGLLGSHRIRRIAAEKVLEELKKPALRLAPGAEEAASEHVLLLLPRLRLAQEQRKQVDKRMQQLLEQMKAAKPEGAEQREHSDVEILLSLPGVGRVVPATVLAEASGPLQQRDYHAIRTYGGIAPVTRQSGKKKVVSMRYGCNLRLRNAFYHWARTSTQKDAAAQKHYAALRKRGHSHGRALRGVADRWLAVLISMLKAGTLYDPERRGKGEATKTR

SEQ ID NO: 327267 - protein, 422 aa, unidentified
MLEETPEHEEIIERIAALDIGKAELVCCVRVPGGPGKSRRMQEVKTDKTMTRSLLVMIERLCELRVTRVIMEATSDYWKPPFYLLEAAGFETWLVNAKDVKHLPGRPKTDKLDSVWLCKVAERQMIRPSFVPPPPIRMLRDLTRYRSDLVAVRTAEKQRVEKLLEDAQIKLSVVATDIFGVSGRDMMAALIAGQRDPKALAQFARGRMPGKLAALQEAFTGRFNDHHAFLLSKMLARIDQISADIAELDARIEDQIAPFAAAVARLDEIDGVGPTTAHVIIAEVGLDMSRFPTPAHLCSWARFAPGVKESAGRKKGNGATGHGNRYLAAVLGEAAVSAGRTDTFLGERYRRIARRRGKKKAIVAVGRSILVIVWHLLSDPDAAYRDLGSGFYDTHLNTSAKRRNHIRQLEALGYKVTLEPAA

SEQ ID NO: 327268 - protein, 356 aa, unidentified
MRKMQDYIVKGKKVFVGLEDSKRSWKLTVRSERMVVHEPTMPTVYENLVNYLKGRYPGCEIKLMYEAGFGGFWLHDRLEADGIDCIVTPPSKVTDEKVNKVKVDRKDARRLAKTLENEDYKSCFVPDKELREDRQISRALVAVQKDITAWMNRVRKFFDFHGLNGLFPSGEWKISDYKRSRKVQLSEPLQVTLGIYFSIIDSLNNHKKALKRRLYALRNKDRYRKTFELFESAPGVGWLTAIRLVLEWGDRIKERFKTGKQIACFTGLTSSEYSTGEEVRRGRITGQSRGFIRQWLVQCAWAAIRKDPVLLEKYNRVWRNSSSKKKAIVAVARKLAVRLWRLAVMDQPYCIGLVET

SEQ ID NO: 327269 - protein, 361 aa, unidentified
MRRQITNPRKGTAKRQAAHKITIGIDIGDRWSHYCILDEEGQVVEEGRFRTIASSVGKHFQDVPVARIAIEAGTHSIWISEQLAQYGHEVIVANVTELHAIVRNIRKSDQVDAEKLARYARLDPKILRPITHRSVKAQQELTVIRARDVLVRLRTAAVNAVRGLVKPCGVRLPSSSTSCFAKRCRAVLSEALLRALSPLLEQIEQLSEQIKHYDRTILEMSRLSHPETQALQTVHGVGPVTALTYVLTLDDPHRFERSRDVGCYLGLRPRRDQSGGHDPQLGITKAGNVYLRKLLVECANYILGPHGKDSSLRRWGLQLAGQGGKNARKRAIVAVARKLAVLLHHLWVTKSSYVPFYEAAA

SEQ ID NO: 327270 - protein, 339 aa, unidentified
MNKVSTVGLDIAKKVFQVHGVDAAGVVKVRRSLRRSQVLRWFAKLAPCLIGLEACATSHYWGRELRKLGHEVRLIPPAYAKAYVRRNKNDAADAAAICEAVSRPGMRFVAIKTEAQQAIGGVHKVRALLLKQRIMLINHLRGLMAEFGLVVATGPQHVGELLAILADPEEGGVAEPLRGALLGMTEVLRGLERRIEAIDRQVVAWGRSNTTYRHLITIPGYGPILASAVAALVTDPTTFRSGRDFSASLGLVPRQEGTGGKVKLGPISKRGNGYLRRLLVNGAMSVLGSKRARQDPWIAKLLASKPRKLAAVAVANKLARIGWAIMMRQEDFRTQPAAA

SEQ ID NO: 327271 - protein, 335 aa, unidentified
MEIRYYIGIDVSKATLDWAVFDGKTTVLQTQSPNSEKGIKTVLRLLKELPDFSVQFSIICLEHTGIYNAVVLQQLVAASFPVWLESSLQIKQAGGLQRGKSDQIDAQRIAEYAFRFRDCIRIWQPPRQLLKDLTNLSALRQRLLLVRSQLQQPIDEQAGFVEAKQHKELIKYCRASLKSINSDLEKVNQQMAKLIENDQHLKELFTLMTSIPGVGSATATEVILATDEFKAITDPKKLACHAGVAPFEHRSGTSVRGKTRVSQHARKRLKSLFHLAAMSAIRSKGEIKDYYVRKVAEGKNKMLVLNAVRNKIIHRIYAVVRRGEKYDKNYINTLA

SEQ ID NO: 327272 - protein, 356 aa, unidentified
MKQTVQPDFTGQNIYVGMDVHKKSWTVSIFSEHHEHKTFTQPPNAQSLVGYLKRTFPGATYHAVYEAGFCGYWIYDSLHQQGVDSMVVNPADVPTTDKQSRGKNDKIDSRKLGKNLRSHDLQPIYIPCTMQREDRSLVRTRHGMVCKQTRCKNQITSLLAFYGVFLPPEMETKRWSRRFINWLESIQLEHTSGTIALKTLIEELLHLRKLIAGLTRQIVLLSRTYDYAEAVWLLRTIPGISTLTAMILLTEIGDISRFKNLDTLASYAGLIPDTKSSGEEEHITNITMRRNPMLRAILVESSWVAVRKDPALMLAFNKLCRRLKKTNAIIHIARKLLNRIRFVLKNRQPYVLAIVA

SEQ ID NO: 327273 - protein, 396 aa, unidentified
MTMTPQVQSNVSTSDLHISLELSLETWKIGFADRLGRNPRLRDVPAGDFQLLRTEIRRAKKHFQLPEECPVYSIYEAGRDGFWIHRVLISLGIENMIIDSASLETTRRKRNPKTDRIDARKLVSALMRYRTGDKTACRVIRIPDHVAEDARHLQRELKTLKAEKTQHTNRIGSLLATQGVSKSINARFVETLDATHTGDGRPLGDELRERLKREFRRLQLAVEQIRELQQQQAKILRQAEKDHTQVARHAQLAQQLMMLGGIGPVSSWTLSAEVFAWRDIANRRQLGALAGLTPTPYNSGSGEREQGISKSGRGDLRSLMIEIAWGWVRWQPDSELTKWYQRRFVDNKRSRKQGIVALARKLLTALGKYIREGEIPAGARLKKGPLRHTYMPSLSA

SEQ ID NO: 327274 - protein, 445 aa, unidentified
MARKAKKQHLKIIHPRCAGIDIGSREHWVAVDPERCEDSVRCFTTFTDDLHRLADWLKSQEVEVVAMEATGVYWMPLYEVLDARGFNVQLVNSRATRQVSGRKSDVLDCQWIWQLMSHGLLKGAFRPGDAVCALRSFVRQRAGKAQEQSRCIAHMQKALTQMNLQLDNVVSDLMGKTGTAILRAIVAGERDPQKLAQLRDRRLRADEATVARSLHGNWRKEHLFALTQALAHYDFLNEQIGACDQQISQALATLPTLSEAEAPKPVKPLRSRHRTATQQKELHQALHAVMGVHLCAIPTLGVDTVLVLAGEIGADLSRFPSEGHFCSWLAVAPPTNISGGKTLPGQKPKVFNRTGQALRQAAVNARRSESYIGACHRARLARMDSAKAIKATAHQLARLIYAMLTKGQAYVEKGIEAYEALSKDRQLRALQRKASKFGLILSEAA

SEQ ID NO: 327275 - protein, 333 aa, unidentified
MQTAKKIVGIDVGKDWLDVCLPDGRKEHIRNTRSCRTKLIKKAAKLGAIVCFEATGPYEEPLADECLARSVKAVRLDAWGTRKFAESQGRLEKTDAIDCEMIRDYAASLKDEKLHFIKPRSEAQKRLKKSVRTRKNLLKARAIIANQFEDDLDPETARHLRSALNSLDKNIAKVEAECDAAIASDERLRELDRRFREVKGVGPCLSRIVLAQCPDIGDFNSKSIAKMCGNAPINHESCTIKYKAKPRRGRSDLKKALYMAAVSASRNNHILREFYQRLVANGKPRKVALTAVSRRIAILINTIAKHPDFKPAQDPKASAKAGGAKRGRPRKVK

SEQ ID NO: 327276 - protein, 339 aa, unidentified
MNSMAVGVDIAKTVFQVHYIDQETGEIVNKQIKRAKFLEFFANRAPCLVGMEACGGAHHWARQLTKMGHQVKLMPAEFVKAFNIRNKNDAADAQAIWRAVQQPSKPVAVKTEMQQAVLALHRMREQLVKFRTMQINALRGLLTEYGEVMGKGRTALDKAIPEVLARVAERLPAVLIDTMREQWNGLTALDEQIAGIERRMREWKKDDPAVKAISEIPGVGLLTATAAVAMMGDPKAFRSGREFAAWAGLVPRQTGSGGKINLHGISKMGDTYLRKLLIYGARSMLTHAKEPGPWIDQISKRRPPNVVTVALANKMARTIWALLAHNRPYQKDHLSVKSA

SEQ ID NO: 327277 - protein, 332 aa, unidentified
MSAPLIPVGIDVSKAILHVAILFPERSKPLYQTFDNSEAGYAGLQGWLEEQGVTSAHVCLEATSIYGHGVATALHQQGHRFSIVNPVRIHGYAKSQLKRTKADRPNATLIAQFCRDLKPGAWQPVTADIEALQAYTRRLDALTHMLSQEKNRLDISPEALKPDIEAHITFLEDQVKALKKQFRTHIGSHESLQTQAALLDSIVGIGPDTAARLLAEIGDIKAFGSARQLAAYAGLTPQEHTSGTSVQGKTRLCKIGNARLRKALYFSAIAFLRCAPELQPWRERLVAAGKTKMAIIGAAMHKLIRIVYGVLSSGQLYDPEKLKPQKSAKVIP

SEQ ID NO: 327278 - protein, 420 aa, unidentified
MRNAGIHANSLLEVRRMYNAVGIDVSKGKSTVAVLQPGGTVIRKPFDVSHTSQNLNELADYLSSLDGTTKIVMECTGRYHEPMIKALSEAGLFVSIVNPHLIKNFGNNSLRKVKSDPADARKIARYTLDNWTELRQYSGMDNTRTQLKTLNSQFSFFMKQKVAAKANLIALLDNTYPGVNKLFDSPTREDGSEKWVDYSYSFWHADCVRKIGLKAFTERYMSFCKKHHYIFQQDKPEKLFNASKELVAVFPKEKTYKLLIQQSIQQLNLASEHVERLRREMNELASTLPEYSTVMGIYGVGKTYGPQLIAEIGDVSRFTHREALTAFAGVDPGVDESGQHKSKSNRASKVGSARLRKTLFQIMTTLLQNAPEADPVYCFLNKKRSQGKPYYVYITAGANKFLRIYYGKVKDCLRNLEQTE

SEQ ID NO: 327279 - protein, 270 aa, unidentified
MEQVIGIDLAKRVFQLHIASPLGKMMKNTVVSRDKLTAFLAQQPPSKIVMEACGSANYWSRQFKRFGHEVKQISPQYVAPFRMGSKNDKNDAVAIVEADRRPGMRYVPEKTQEQPDIQCLHRVRQRLMKNRTALINQIRGLGLEYGIAIPESAHKVEQCLPDHLENAENDLTPLSRELFQELLLELKEQQQRLMELNKRLDHLNAQQEDIRRLLTLPGIGPLGASALMVALGDSKDFKNGRHFASYLGLVPREHSSGGKVRLLGITKRGG

SEQ ID NO: 327280 - protein, 366 aa, unidentified
MQSAGGDEADEGFQVSSDREVAFEVVEPPDRAAGGPFPVEEVQPRWCPAGLPAPDQGSVLGELVPYGRRRAAADGVDAHIERSRAVLDRQFIAGPGGYAAALAWARQEAGEAGLAWAIEGTRHYGLGLARYLTAAGEHAGEIDASKHAGKRRNGKSDALDAVRAAREMLARPVAAQMRAAGDREALRLLMCDRDNAVASAKTARTLLTSVIVTAPATVREQLRHLSRDRRATVCASLTSPPGADRQTRVLYQTLARLGQRITTLARTAADLQKQISALVEDMTPGLVAAEAGLGALTAAQLLLSYSHHGRIRSEAAFGMLPGTAPVPVSSGRTDRHRLNRLGDRQLNRALQVIAVARMRSHPPTQA

SEQ ID NO: 327281 - protein, 313 aa, unidentified
MIPVRVYLGADIAKDQIVLACRDLTTLPPTIPNDPAGHRLLVKKLVATSVPVHVVCEATGPYHRAFLAALHAAGVAVSVINPRCARDFARAHNRLAKTDAIDAATLADYGRCCQPPPTPRPEPSLTELQALVARRSQLVEDRARETNRTEGVGLRRIQTSLRRHVRYLDREIETLDQAIAALIETTPLLQAKAQLLRAVKGVGSVTIAVLLADLPELGSCNKNQVAALAGLAPFNRDSGAWRGTRSIRGGRDAVRRILYMAALSAARTNPVLKPVYQRLRANGKAHKVALVAVMRKLLIHLNSLLKSSPPCPA

SEQ ID NO: 327282 - protein, 403 aa, unidentified
MNAVGIDVSKGKSTVSICRPGDDVILKPRDFRHTQSDINSLIGIIKGLDGESKVCMEHTGRYYEPVATWLYDAGLFVSAVNPILIRQFGDDSLRTPKTDKADAKKISRYTLDRWAKLKQYGPMDKKRNQLKTMNRQFGFYMDQKTAMKNNLIALLDQTFPDANTFFDSPARSDGSQKWVDFVYTYWHVDCVRGRSLVAFTEHYKNWCKRKGYLFNAAKAETIYNSSADLIAVFPKDANTKMLIHQAVAMLNTASETVETLRQEMDKTASMLPEYPVVMAMNGVGPTLGPQLMAEIGDVTRFEKRGSLTAFAGVDPGKNDSGKHEQKSVHTSKKGSPHLRKTLFQIMDSLIKRSPADDPVYAFMDKKRSEGKPYYVYMTAGANKFLRIYYGRVKEYLACLQESE

SEQ ID NO: 327283 - protein, 344 aa, unidentified
MAIVGGLDIHRRQITYDYLDSDTGEARRGRIQPAGRAELRAWLARFVGKQADFAFEGTTGWRFVAEEVTGAGFGAHLAEPADTRALRGPKRRAKTDRADARHLRDLLLAGTLPESWIPPAHLADLRTRVRLRKALLDERTAWRQRIHAVLFHHGLPERRGLLSAEGRAWLARVELPGAARDAVDLALRMIDRLDAELDPLDAQLLRFARRQPGCRALMRRYGVGALTAAAILAELGDARRFASSRRAVRFTGLDVTVAESDGKRTRGRLSRQGPPVLRWALYEAAICAARPGSPDHAYWLAVKDRRGAKRATLSVARKLAREAYHTLRELGDQALRPVSLQPLA

SEQ ID NO: 327284 - protein, 342 aa, unidentified
MKEVSIVGLDLAKRVFQVHAASADGGFVLRKKLSRVHVMAFFQRLPSCTVAMEACATAHYWAREIGKLGHEVRLLPPAYVKPFVKRQKNDAADAEAIVEAAIRPSMRFVAPKTEKQQAACMVFRTRDLFVRQRTQLINALRAHLAEHGVIAPQGIANLAALVGIVDDDNNGLKRVVVETARLYLEQIDLLSSRIGNLEKAIKSEARQSDNTARLMSMPGMGPITAMAIEAFAPTMTAFRKGRDFAAWLGLVPRQHSSGGKQVLGRTSKMGQRDIRRLLIIGAMTVIRWACRKAPPENSWLGKMLSRKPRMLVAIALANKMARSVWAMMTKNEEFKVSALASA

SEQ ID NO: 327285 - protein, 395 aa, unidentified
MTIAVYDHAPKPPASLDHETTITAVVELSKKTWLVGGHVPGFERRPLKRTEEHAAGLLRILTTWRNRAEQAGRTIGRIVVAFEAGRDGFWLARSLRRTGIEAYVIHPSSIPVPRGARVKTDRIDTGMLLRAFSAWLRGEPDACRMVAIPTREEEDLRRPSRERAELVTERTRLRNRIKALLTLHGLSEVNPNTPATCRKLAQLRTAEGEPLPPNACAELERLFERFALVKKQIKVIEAAYGRPVAENVRVAGERDLAAQAQRFFQQLVTVTGMGAATAALLVAEVFMRSFADRRALARFVGLTGTPDESGSRRRDRGLMKAGSARVRHVMIQLAWRMLYHQPNATLVQWYRDRVAKANGAGRKTFIVALARKLLIALWRFGQTGEVPEGMRLATV

SEQ ID NO: 327286 - protein, 338 aa, unidentified
MKLYGAIDLHSNNNVTVLIDEQDQVVYQKRLPNDLPLIAQQLSGYRDALQGIVVESTYNWYWLVDGLMDQGHKVHLANTAAIQQYEGLKYTDDHSDARWLAHILRLGVLPQGYIYPKDERAVRDLLRKRSQLVHQRTANLLSIQNLVTRNTGSSISSNRIKALDTETVDVLLPNQDLALAVKANLAMIKCADGQIDILERTVTDRIKLRAEFGFLKTVPGIGQILALTIMLETGDIKRFSTVGDYASYCRCVGSQKLSNGKKKGSGNTKNGNKYLAWAFVEAANFAIRYSPRIKSFYQRKMAKSKRVVALKAVAHKVCRACYYIMKDRVPFDVTKAFA

SEQ ID NO: 327287 - protein, 390 aa, unidentified
MPQISAGIDIAKEVHWITAIDDAGTVLIDHALDNDPAAIAALIDELAALDGAVRVGFDVIGGIVGLAEAMLAASGCTLLHVPGLAVNRARQGTVGGENKSDPRDARTIADQVRSRPDLRVIETAAQIDIELRLLVGRRRDLVQAQTQRIARMRDLLTGIFPAFERALDLTTKGPLHLLTRYVTPAELRRAGAKRLARHLQASRGGAAICAQALACARAQTIVVPGEAMTATLIRELAQEALATRTRLGELDRDLKERLARHPDAALIQSLPGMGAILTAELIAEAGNLSRFRSPDALAAAAGIAPVLRQSGKTRFLRRPTGGNKSLKRVFYQAAFCSLASPDSRAFYDRKRREGKRHHQAVIALARRRVNVLWAMLHTHQPFQTGFKNAA

SEQ ID NO: 327288 - protein, 323 aa, unidentified
MSPVVGIDVAKRSFDLAIDLANGKYRTKAKLPNDPKGFQVLQTWLQTHAQADSWIVMEATGTYHEALAEFVYGLGYRVCVLNPAQMALYARSQLTRVKTDPSDAKLIASYGQRHAAQLRPWQPDPPALKRLKALVRRRDDLLQMLQMERNRLDVAALVVRDSLLENIGQLQARIAQIERAIDDQIDQDPTLRGQRELLVSIDGIASTSAALMLAELGNVERFAHASAVTAFAGLNPRLQESGKRQGQVCISRTGSPRLRAGLFLPALVAMTHNPVVRALKLRMRERGKANKQIICAAMRKLLHIAYGVLKSRTPFDPQKTLAC

SEQ ID NO: 327289 - protein, 403 aa, unidentified
MNAVGIDVSKGKSMVTILRPFGEIVSSPFEIKHTSSDIHSLIKLIHSIEGESRVVMEHTGRYYEALAHQLSAADLFVSAVNPKLVKDFNNDSLRKIKSDKADSVKIARYALDKWQSLEPYSITDELRAQLKVMNRQFHFYVKQKTAMKNNLIGLIDQTYPNANTYFNSPTRSDGSQKWVDFVSTYWHVDCIRKMSLNAFVEHYQNWCKRKKYAFNKSKAEEIYTKTKELVPVFPKNEITKHIIRQAIDQLNSTSVTVETIRTLMNETASKLPEYSIVMQFKGIGPSLGPQLMAEIGDVTRFTHKGALTAFAGVDPGVNESGSYAQKSVPTSKRGSSNLRKTLFQVMDVLIKTMPQDDPVYQFMDRKRTQGKSYYVYMTAGANKFLRIYYGRVKEYLSVLPDPS

SEQ ID NO: 327290 - protein, 403 aa, unidentified
MNMNAVGIDVSKGKSMVAILRPYGEIVSSPFEIKHTSSNIQSLIERINSIEGNSRIVMEHTGRYYEPLARQLSLAGLFVTAVNPKLIKDFGNNSLRKVKSDKADAIKIARYTLDNWIDLKQYSLMDEIRNQLKTMNRQFGFYMKHKTAMKNNLIGILDQTYPGVNTFFDSPAREDGSQKWVDFATAYWHVDCVRKLSLNAFIDHYQKWCKRRKYNFSKDKAEEIYGAAKELVPVLPKDDLTKLIVKQAIEQLNTASRTVEELRTLMNETASKLPEYPVVMEMKGVGPSLGPQLMAEIGDVTRFTHKGAITAFAGVDPGVNESGTYEQKSVPTSKRGSSSLRKTLFQVMDCLVKTKPQDDPVYAFIDKKRAQGKPYYVYMTAGANKFLRIYYGRVKEYLMSLPE

SEQ ID NO: 327291 - protein, 345 aa, unidentified
MVETRLELCVTGGVDTHLDNHVAAALDPLGGLHGTRSFPADPGGYRELLDWLGSFGPIELVGVEGTGSYGAGLARFLRREGVAVVEVDRPNRQARHRHGKSDSVDAVAAAEAARSGRAQGAGKHADGPVEAIRALQVVKRSCREERIRTKNQLRHLAFCAPDEIREATKGLSRHRLADEAARWRPRPGGDPVLFATRFAMATLGRRVAALETEAKRVDELLVPLARAAAPSLLQVFGVGPDTAATLLVAAGDNPGRIRNEAAWAHLCGVAPIPASSGKTNRRRLNRGGNRQANHALYTVAVTRMHYDQRTRSYVQRHLESGRAKPEIIRNLKRYIAREVYRHLPH

SEQ ID NO: 327292 - protein, 356 aa, unidentified
MKTTIGVDLHKSSLNTVVLDEHGQIKERREIATKCRRQIAEYFGSYGLEAQVAVESVGFYQWFWDLVRPQVGALHLADPAGVRAHAGRKAKTDRNDALLLATLLRDQRLPMAYVPREPIRALREMVRHRHSVARALAGERRSLRWLALKNNLPGPDVLTSPKAQKWLLSVETKLSPVHRMAARQRLDHIIALERDVWDCERAITEMAEADEGLMRQVQLIETVPGIGRITAVTVISETGDITRFNNIDQLSAYAGLAPTVSQSGQSVHHGHISKQGPPTLRWVLQQAAWVAIRTSPRARSIYARISKRAGSKKAATALARKLLSYCWSVCRKNTPFRWPGEENPEKPNAPGDDYAI

SEQ ID NO: 327293 - protein, 412 aa, unidentified
MLKIVYPICCGMDVHKSFVVACIATTNDHGVTNYKSKRFSTFTGDLRRCADWLSENNCKDVCMESTGKYWIPIYNILESTCNIVLAHPKYVKAIRGKKTDKRDAKWIADIFKHDLVSGSFIPPADIRQLRDLVRYHWKLTNFNVGEKNRAQNCLTVSNIKLDDVFSDVFGKAASAITTRLLESNEPFDVKPYLTKNIKKPIEQIQAAVDGEMCAEQAEKLRIIRSHMDSLELCKLNLESLILSTAEKYIPQLNLVMTAPGIQSFAAIGIISEIGVDMSVFPTSKHLCSWAGLTPQNNESAGKKKTTRISRAGAYIKPLLVQCALCAIRTKQFPEVRNRYLALKKRRGHKKAIIAIARMLLTAIYNILKWNEVYNSELYRKADRPPAHREVSVEEAVFILQRQGYLVTAPAVT

SEQ ID NO: 327294 - protein, 356 aa, unidentified
MTSSTKYIGMDVHKESISIAVRNAVGKVVMESVIETKASMILEFIDGLRGDVHVTFEEGTWAAWLYGLLKPHVRKLVVCDPRRNALLQEGNQNDRVDARKLAELLQNNQLRAVYHEDHGLRALKELVRSYLTITKDLSRVMTRVRAIYRSWAIPCTGKQVYASRHRAEWLGKIQEPGVRRRAELCYQQLDALRVLRQEVRRELLTESKKHKAWKRLCEIPAIGPIRAAVLLGILQTAHRFRTKRQLWTYSGLGIEVHSSADHHVVKGQLERKKKHIEIRGLNGNCNHDLKNLFKGAAVLASTKPGPFEEFYSALLVKGMRPEMARLTLARKIATIVLMVWKRGVCFDPNHLKPQTA

SEQ ID NO: 327295 - protein, 465 aa, unidentified
MKSKTSKPKKRKQKISIEEGWETVNPHAAGIDIGAKEHFACVPPGSTPNNVRSFGTFTADLEALANWLQECGVTTVAMEATGVYWIPVFQILERRGLQVLLANARQTKNVAGRKSDVQDCQWIQRLHTYGLLQGSFRPADAYCVVRTYLRYRDELVSARSTQCQHMQKALQQMNLQLTQVLSDVSGVSGLAILGAIIQGERDPVKLSQLVDRRVRATPAAIQKALAGDYRPEHLFVLGQAFALYHTYEEKIQVCDQEIAHAVTQLPDQVDLSRQPLPARKEGRKPYLDRMAGQDMREALYRKTGVDLTAIEGIGALTSLVLFTEVGADVSRFPTEKHFCSWLGLCPDNRISGGKVLSSRTRRVVNRATDALRMAATTLERSPSALGGFFRRLKARLGAAEAVTATAHKLARIIHRLIKHGEAYVRQGLEAYEKQFQARKLRALQKTAKTLGFEHIATQTLPSGVS

SEQ ID NO: 327296 - protein, 353 aa, unidentified
MENLSTLTIGCDLGDRNSDLCVLDEAGDVVKTLRFSSTRNRFTKVFSAFPASRVVIEVGCHSPWVSRLLEAQGHQVIVANPRKVALIYQDVRKSDRTDAELLARLGRVDPQLLSPIQHRGEAMQRVRTLLRARAQLVQVRTQLITSVRSLVKSFSGERLPSCSAASFHNKAAESMTEALRPMLCPMVASIETLTTQIKVLDARIEYCSRVEYPEAMLLRQVSGVGPVTALAFVATLDDPHRFKRSRQVGAFLGLCPRRDQSGNSDKQLGISKCGDPYLRKLLVQCAHQILGRFRPDTDLRRWGLAKAEHGGKNAKKRTIVALARKLAVLLHALWVGQTEYVPIGYRQPTRRAA

SEQ ID NO: 327297 - protein, 420 aa, unidentified
MDVVLERCAGIDIGKDEVVACVRTPVAGGRGRHKDTRSFRSFVGDLEAMADWFTAAGVTEVAMEATGSYWKPVWDVLEERAFELKLVNAHHLRILPGRKSDVLDAEWIAELLEHGLLRGSFVPPRVIRELRDLTRYRKRLVQTHTQESQRIQKTLEDEGIKLDSVASHVMGVSGRAMLRALIAGERDPEALAELAKGKLRKKIPELRRALQGRFGDHHALLIGMSLDHIDHLEATMARLDDQIDTLFATNTNEAGIPFGQARDHLDTIPGVAKRAAEAIIAEIGVDMARFPNAGHLASWAGMAPGNNITGGKRGSGRTTNGDVWLGEILNQCAWSAARTRDTYLSAQFWRLARRIGKKKAAVAVGHSILVICWHLITNDTDYHDLGGDYFTRRNDPDRHRDRLIEQLHHLGYRVTLDRVA

SEQ ID NO: 327298 - protein, 324 aa, unidentified
MNLPPLGLDVAKLKFNACLMRAVGKLRHKVFPNNPDGFTQLCDWLKKQGVTRVQACMEATGTYGDSLAAYLHEQDHLVSIVNPAAIKAYAQSHLSRTKTDRVDAALIARFCVERKPPAWHPPAREVQELQALVRRLESLVEMRTAEENRLSSGISVGAVRESVEELIVHLSEQIKRTGALIREHIDNHPDLKRQRELLDSIPGIGETTAAALLAEVPDFSQYKSARQVAAYAGLVPRERQSGSSVRGRTRLSKIGNARLRRALYFPAITALRCSPFFQAWAEGLRQRGKCKMSVIAAAMRKLIHLAYGVLKTGKPFDPEWGKIA

SEQ ID NO: 327299 - protein, 370 aa, unidentified
MLDTTTFVGLDVHARSIKAVSLDVMTGEVRCATFGYDAGAVAEWVRSVDPKARCVYESGVTGFDLQKRLSGLGVDCVVGAVSKMIKPSADRRRKNDRNDAEFLARMLSVGNVVEVWVPDDECEAARDLTRALEDARDDLSRAKQRLSKFLLRHGLAFDERTPTGRRKGNWTRAHWSWIESIRFAEGADNDVLAYYVDAVRRAAEEKARLEGLVEAEARKPRWRRRVDSLRCLKGVDTATAADLVFEAGEFSRFGNARSFAAWVGLTPSEHSSGESDRRGAITKAGNKHLRKALVEAAWHYLTCSGRPKGLAKGQAPDRGARRHAAKGVRRLVERREALLARGVHGNKANVATARELACWVWAVGLMAEEA

SEQ ID NO: 327300 - protein, 391 aa, unidentified
MICVGIDIAKDKHDCCILDSDGTVRADCFTIPNNMDGFKQLLQTIRNCTKKSDKIKVGLEATGHYSYNILGFLLDYGLPTYVINPLHTNLYRKSLSLRKTKTDRVDARTIATMLLSDVDLKSYTDIAYHNEELKSLTRYRFEKVRERAKLKQSVSRLVTILFPELEKLVPSLHGASVYALLSEYPGAKQISEVHLTKLTNLLVTASKGHYGKEKATLIRETARASIGSVMPAKSLELKHTIKLIQELASEIDEIEDSIQKIIDELNPPILSIPGMGVNSAAVILAEIGDFSNFSSPDKILAYAGCSPSTYQSGKLTNCYAHMEKRGSRYLRHALYNATKYVCYWNPVFAEYLAKKRAEGKHYNVALSHAMKKLVRLIYALQKSGKTYLTAA

SEQ ID NO: 327301 - protein, 420 aa, unidentified
MTPDQKAAFARTFPVHIGVDTGKRFHVLVARGPDGLRRKPLKVLVNRAGFERSDAELQALFPDTARSRMLIGLEFAGHHGFTFAHFLASRGYPIVNVLPAHTKRTKELEDNSPLKTDAKDGGVICKLVGDGTFVRFPFLESPYAELRVLVSYRNRLAVEAKRFKNRLQGLLDLAWPEFVAQFSTLAKHTPIGLLERWPLPQDLLAAHKATVRAYARKISKGKFVAERFERLYESAQQTLALPQATSERRMEIQGTLARWRLVRKQMVEAEARISELLARLPSAQALLTVPEVSAVCAATILAEFGTPGDYQHPRQVLKLAGMNLVEKSSGSSQGRRRQSKRGRPMLRRQLFLLAGRWCQRRGLYRSYYEALLARNGGLKTKAVCAIARKLVPLLLAVLQRGEPFDQVRWQAARHPPALAH

SEQ ID NO: 327302 - protein, 355 aa, unidentified
MLYLGIDQHARQITISLRDESGDVLEARQVSTQPERINAFFEQLTRGRLRKGELFVAVLEVCGFNDWLIRMLKDYRCHKVILIQPYDRKKRKTDRRDAAALSELLWVNRDRLLDGKPVRGLRQVDIASTSDQENRRLTTLRKEIGQARTRLINKVRHMLRRHNMQWEMPTKTFPTQAATAWLKKITLPAIDRLEMNYLLVDLQHVEQRVKELEETIAQRCGASEDAVLLSSMPGVGCFTATGLTSRVGRGERFPRAHSLANYWGLTPGCRNSGENNQRLGSITKAGSGMARWLLAQVARNALQKDARLRQWFKRIRRRRGASIARVAAMRKLATIIWHMLSKRKTYTECRALAAA

SEQ ID NO: 327303 - protein, 377 aa, unidentified
MIAAIRSDVSVNESIVYVAFELGQKEWKLALTAGFQVKPWLRTVAGGDLAAVERVVQAARQRFGLSPVARVVSCYEAGRDGFWIHRALATLGIENRVVDSASIEVNRRARRTKTDRIDALKLVMMLVRVCCGEPRVFAEVRVPSEQAEAARHRSRERTALVQEQTRLRNQIGSWLATCGCRVTARMRQQAAWWTGVRDWADAPLPAPVQARIARAEARLAIVAEQITTIAGQQATTVQQAEPGSPLARLVQLKGVATTSASVLVDEGVLWRAFQNRRQIGGLLGFAPAKYDSGESSRDQGITRAGNRRLQSVMVQLAWGWVHWQRQSALTRWYQERFGRGKRARRIGIVALARKLLIALWRYAAAGVLPAGAVLKGV

SEQ ID NO: 327304 - protein, 338 aa, unidentified
MTYGAIDLHTRYSQIRIIDDEGQVIGERRITTEATRFVAAFDNHGPMRILLETGTESEWVAQVLEAAGHQVIVADPNYAPMYGEIRRKVKTDRRDVAALAEANRRGWYRATHRVSAAQRAQRQELRSRRLLVQMRSGTITLIRALLRQSGFRLASGSSRCVSRRLTQLTLPPGLVATIAPLQRMVETLTSEIAGVDAHLASRAAADPVVRRLQTVPGVGPVVALTFRAFVDEVSRFTQAGQVSAAIGLVPREDSSAERRHRGHITKAGPRELRSLLVQAAWACWRSTASGTLRAWVERVAARRGKRIAVVALARRLSRILYALWRDETVFAPATVAAA

SEQ ID NO: 327305 - protein, 360 aa, unidentified
MIVIGIDPHMKTHTAVALDAATGRTLAERTVTCSDAGHDELLTWARALPGDRYFAIEDCRHVSGRLERHLLPRGEGVVRVPPKMMAGARHSARSWGKSDPIDAECVARAALREPSLPEASLTGPEHDVRLLADHRDTLVYERRRIQKRLRWNCHDLEISLVLPPRVLDRYVWLERLENALQALPESVRRRIALDQLVRCRELTKEIRSLEREIAARMQQLAPELLQIPGCSAISAAQLVGQTAGASRFSGEAAFAMHVGVAPLPASSGQTNRHRLNRCGNRGLNSTIHMIAVTQARMHPPAIAYMQRKQQSGMSYREALRCLKRQLARVVFKTMLRTERSAAAGRVVTGRFRAEEVAVAV

SEQ ID NO: 327306 - protein, 360 aa, unidentified
MDLHKRTSTFCVKDYDGNGIMEKKILTDRAQVTEFIRSLPSDDISVAVEPVSQWYVFADLLQNLGCEVHLAHPLKVKAIASARIKTDSIDASVLCALLRSNLLPEAYFSPKEVRSWKEVVRHRASLMNLRTQTKNKVHAILHKQALIHQFTNLFGVAGTRWLEHLDLPVPFRQNLDEYLSVIAHLTLQIEAAEKRVTDVVKSDTHAELLTTIPGISFVSALTIMGEIGDVKRFPSAKKLMGYAGIVPSTYSSGDKARHGRITKTGSKWLRYVMIEVAQHQQMCKKTPGFGSYYLSLKKRKGTNPATVATARKLLAVIWRILTDKRPFAVTPPDRHGEVSTNRVEAPKGLAANLSSPVSVS

SEQ ID NO: 327307 - protein, 361 aa, unidentified
MLMRGTKDKEHAMAEALRIAFVGIDIGKNSFHVVGLDGRGAIVLRQKWSRGQVEARFANIPPCLIGMEACVGAHHLSRRLQRLGHDARLMPARYVRPYSKGQKNDFRDAEAIAEAVQRPTMKFVATKTADQLDLQGLHRVRERLVSQRTGIINQIRAFLLERGVAVRQGLRFLRAELPDILAAPSDALSPRMVRIIEDLAGDWRRLDERVERLSKEIEAIARRDAGCERLISVPGIGPIISSAMVAAIGAGDVFSKGRDFAAWLGLVPKQISTGDRTILGKISKRGNRYLRVLFVQAAWVVLIKPQSWERHGLKSWIEAARKRLHRNVLAIALANKLARIAWSVLAHGRSFEANKLAAAAT

SEQ ID NO: 327308 - protein, 366 aa, unidentified
MSQDSVVAKIKTVGLDLGDRFSQVCGLLEDGTIGVEDKVASRKEALRLYFRRFTSLRVVCEVGTFSLWVKPLLESLGHEVLVANPRKLRALYASGNKSDVIDARMLARVGRMDPTLLGAIHHRSLETQADLAVLRARALLVRARTKLVNHVRGAVKSMGERLPKCSTAHVSKLPLSDFPESIRPALAPLQIALASITEQIEACDRRIVSLCRDRYIETALPMQVPGVGPVTSLCFLLTLETPERFQKSRMVGAYLGMTPRQHSSGARDPELPITKAGDRMLRTLLIQSAHYILGPFGPDSDLRRFGKHLLEGGGKTGKKKAITAVARKLAVLLHRLWFTGEEYDPLRVSRRRERTLQKSASAMATR

SEQ ID NO: 327309 - protein, 389 aa, unidentified
MTSSLHIDTPAACTKHDTMFVGFELGKAKWKLGIVLPGGGKLSQYTVAGGDAEAALRLIAKARQKAEKKAGSSVRIVSCYEAGYDGFWLHRWLEGRGIENRVLDAASVQVNRRARRAKTDRLDLERLMSALIRHDWGDRLACRVVHVPSVAQEDDRRLGRERDRLVKERVGHVNRIKGLLHGQGVRDALPRAKTFCAWLAEVRTGCGHNLPPHLMAELKREHGRLLLVEEQIAEIEAQAVAARQAAVPAPMASKINQLIELKSLGPVSSQTLVGEVFFRDFKNRRQVGGYFGLTGTPFDSGGSRREQGISKAGNTRARTTAIELAWLWRRHQPGSALSRWFEERVGDQKGRVRRIAIVALARKLMVALWRFLEHGLVPEGAILRAAAHA

SEQ ID NO: 327310 - protein, 316 aa, unidentified
MTISKKKAFIGIDVSKASLDVWDSQSQKHLTVENSKAGLQKLIKALPNPSESTIVIEATGVYHRLAHIALTQAGFPVSVINPYRSRKFADALGMLAKTDKVDAKVLALYGERIVPKTSLPPSEEVAQLKELVQARRQLVEAKKSALNQAKNTELQCLEDLSCEHIALLERQIEAVEAEARKVIQSCPKLTRKAEIMASVKGVGPVLTATLLSDMEELGQLEAREVGSLCGVVPFNRDSGSFRGKRQIKGGRFYVRSMLYMAAQSARRHNGDLRIVYDRLVGKGKPKKVALVAVMRKLAILINRLIMENRTWEEKYT

SEQ ID NO: 327311 - protein, 347 aa, unidentified
MRKIAYLSMDVHARNCVLGDMDGNGKFRGNHSFITCENNIIKALKAVKAKRKYLVMEAGPLSNWAAQVANDHVTEAIICDPRENALIYKSSKKRDKVDTKKLCRLLRLGEFKEVYRPENDQRAIFKAAVQHYLDLRDQLAALKKKIKAMYRQWGVIDVFTDSVYSTSGRDKFLNRVKHHPIYLQLKRLYDLMDHTAAIKLAAEKSMISLGRNYPEIKEFKKMSGMGPIGAHTFDAYIQTPHRFAKTSRLWRYCRLGVTDCTSDGKPLGYKRVDKSGVSELKALSYRAFLSAIKGDNEIKRFYLNSLQRTHNRKHARLNTQRKILSVMLSIWKKGKAYRPELFLDPSI

SEQ ID NO: 327312 - protein, 341 aa, unidentified
MQITTIGLDIAKNVFQVHGIDAAENVIVRKQLRRGQIIAFFEALAPCLVGMEACATSHHWARELTKLGHEVRLMPAKDVKAYVKRNKNDAADAEAICEAVRRPTMRFVRIKSAEQQGQLMLHRARDLLMRQRTQLINALRAHLAEVGITAAQGREGIKELLAIIAQDEGSRLPVDAHASLTVLAAQLQPVQTTIGSIEKRIVAQHRSNEASKRLETIPGIGVIGATTITAVVTDPKAFRSGRDFAAWIGIVPRQDSTGGKQKLGPISKQGDQYLRRILIVGAHSVLRRARQQPQKYPWLTQLLARRPFKVVAVALANKMARIAWALLARGGTYRAPQLVAV

SEQ ID NO: 327313 - protein, 327 aa, unidentified
MYVCILSQDGEVVLHRNMQASPDALLKAIAPYRDHIVIAVECIFTWYWLADLCAQEGLPFVLGHALSMKAIHGGKAKNDKIDSQKIAVLLRGGMLPQAYVYPAAMRATRDLLRRRLHLTRKRAELLAHIQNTNSQYNLPEIGKKLAYKANRDGVAERFPDPAVQKSVDVDLALIDYYDRLLNDVELTIVQTAKQHNAQTLYRLQSVPGIGKILSLVLLYEIHEITRFPRVQDFVSYCRLVKCAKESAGKRYGTAGAKIGNAYLKWAFSEAAVLFLRNNPAGQKYLARLEHKHGKGKALTILAHKLARAVYYMLKRDTVFDMQKFLNG

SEQ ID NO: 327314 - protein, 446 aa, unidentified
MTEEETISWFVGVDWGSERHQVCLLDARGTTVGEREFPHSGEGLAELGDWLLSMASVASTVAVAIEVPHGPVVDALIDRGFVVYAINPKQLDRLRDRFSVAGAKDDRRDAYVQADGLRTDRRLFRRLQVADPRLIELRAWSRLAQELRAERVRLSNRVRHQLWRYYPQMLKLTDDLAAPWFLELWAIASTPAKAGRLRKSTVERLLKQHRIRRMEAETVLRILREPAIKVAEGVAEAASIHMRSLVARLRIVNRELREAERKLDEVCTAISEIEQTSGEGLQRRDVAILRSMPGIGRINLGTLLSEASGPLSRRDYEGLRTLSGAAPVTKRSGKSLIVVRRYAAHVRLRDTVYHWARVATQRDPKCRTQYTALRKRGHSHGRALRGVADRLLPWPVSFCSDRRYLIRPLADLPHNGPIIQSASNPRVAGGHGEVSSFGLSARFFAL

SEQ ID NO: 327315 - protein, 327 aa, unidentified
MHPSTWIGIDIAKLDFVAAQRSQTDFETQCFPMTEEGFRAFQQWLPQAAPLGIVFEATGPYWLPLAHWLDAVEPPIPYACINPRLLRKFAEASPERSKTDVIDAALLVHFAETFPPALKPPKSRRSRALRALWRHHLELQTLLDRARDRQEKALTDPELPTQLATRLQSLLDTLKAELNLVEREAQDLVQQDSQMRQTYQLLLSIPGIGPKTALTLMAEYGPQLLQANPKQLTRYAGLEPILFESGSSVRKRPRISKQGNWRLRRALYMAALVGVRWNPILKTFYERKLQQGLAKKSALVAAMRKLLHLVYGVLLHQKPFNPHPEET

SEQ ID NO: 327316 - protein, 375 aa, unidentified
MATIARLGIDTSKSLFQLHGVDEREEAVLRKQVRRGQFLGFVAKLAPTKIGVEACGASHYWARQLQALGHEVVLLPPQHVKPYVGRNKNDKIDAAAICEAMSRPRVRERFVAVKSAEQSAAQMLLGTRDGLLHRRTQLSNTIRGHAAEFGLVTPKGLAHIKPLLERIAADQTVPALAKELFATLGEEFAELAPRIAQLDKKLKAFQRSNELCRRLVEVPAVGPVIASSMVVKIGNPAAFRSGRRCAAWLGLTPKDHSTAGKMRHGGITRAGDEGLRAALVSGATAYIQQVKRGRTRPSPWLAQLLKRKPEKLAAVALANKTARIAWKLMVSGERYDRARAEAREGLGATQHQGSTPSPSLHPHTADQGASTMTVA

SEQ ID NO: 327317 - protein, 428 aa, unidentified
MDGQEHSRLKDFRQLKKEIRGSKEYLIVGIDIAKDRHHAFFGAATGKTLLKRLVFENTHEGFDTLLIQTEAVKLQHGLTKTVFGLEPTADYHKPLGEFLIQGNHRVVLVSGVGVKRNRELLDGRWDKHDTKDSANVADLISQGKCLFYDHPPLPIRELRALVSLKRRLKKQEHGVKTRIRNHLLAQYFPELDRSYGQSESDGLSIVRWCLNPSVLAAMDYEHFARLVAPHTRSLAQQERLRSIWRKARESIGCEAGEALAFEATVMVEELQRIREPIHATEQKIEEICLQFPEYRYLLTIPGFGPDVSSKVLAAIGNPVRFTTGAQVLKMAGFDLSANRSGKSSDAATPVLSKKGKADLRYALYQAALIASIRNKHFIVYYTNKLRGREKEKGIKTKMRVKLAAKLLIIAWTLMKKKEAFNPEYRTIE

SEQ ID NO: 327318 - protein, 429 aa, unidentified
MNYTQNEKIAQVKETTLVVGIDVGSEIHYARAFDWRGYEYSKKAFKFSNTEAGFTDFMTWMLTIKNAFKKKEILTGMEPTGHYWFNLGKYLMDNEINPVLVNPHHVKKSKELDDNSQTKNDYKDPKVIAGLINKGRYSYPYLPEGVYADLRTASNMRFQIQSDLTRLSNRIQRWLSIYFPEHKEVYGSFNAVSSLMILKEAALPEDIISLGSEAINQIWRDAKVRAVGMKRAKELVAAAERSIGNKDGLIAARMEIMILVEEYETKQKKLEDIMDLIEALCQQIPMTEKLLEINGVGIKTVSGFVAEVGDISRFNNPKQLQKLAGLALVEDSSGKHKGRTKISKRGRKRLRYLLFEVSMSLVSKNPEFRELHHYYTTRSENPLKKMQSLMAIGCKVIRIFYAILTKGVDYDGQKMLSDIKRPANHMQAA

SEQ ID NO: 327319 - protein, 445 aa, unidentified
MQPKGFLGIDVSKGYADFLLLDEHKGVLEEGFQLDDTLAGRQQLTILIQEWFSKGMKALYCGVESTGGYENNWYSLLKNVSKQMNVQVVRLNARAVKAVSEASLKRTITDAVSAYNIGSYLISFPEKITYTQVEAGQNNAFKEGRQHYSYIRMQIKQKVQLNNQLEKLLYQHFGEILLYCRHGIPGWLLRMLTRYPCAEAVLKAGIRNLCDIKGISAAKAQALIKKSNQSVQKINRQIQHVIAVTAKEILHKEQLIHREKAILIPQYQHAEEVKIVDSIKGIAVESAVLIMLEIEDISRFERSKKMTAYFGVHPTFKQSGDGTWGSHMSKKGRGEIRAVLYMAALSGIRCNPILKQLYARMRTKGMKHYQAMGVVMHKLLRIIYGVLKNKTNFDPRIDEENTRKATEKQKEQNSSEQKKYRYQIESAEAPISRRAAQKRKKQIAS

SEQ ID NO: 327320 - protein, 370 aa, unidentified
MQQSSTLYVGLDVHKDSIAVAYVAQDHGAEVVSLGNIGTRQCDIDKLIRRLQSKSPPLVFVYEAGPCGYWLYRYLTKKGQVCWVVAPSLIPQKPGDRVKTNRRDAIKLARLMRSGDLTPVYVPQVEDEAIRDLCRAREDAIHDLKAAKFRLKAFLLRQDIRYTGRATWNSAHLRWLSEVVCPTPAQQIVFQEYVRAVTEQTERLERLEQELKDQVQTWRLVPVVEALQALRGVQFTVAVTTVAELGDLTRFENPRQLMNSLGLTPSEYSTGERRRQGGITKTGNSQARRALVEGAWAYRYPAKVSRHLQLRLEKVPKPIQDISWKAQIRLCKRYRQLSARGKNVNQVVVAIARELSAFMWAIAQEVPLTL

SEQ ID NO: 327321 - protein, 354 aa, unidentified
MTMLAGTIDFVIGVDTHRDTHSAAAVDPTGGVVAQTTLVADAFGYRRLLAFAREHAPARRVWAIEGTGSFGAGLTTHLLERGEWVVEIDRPARPARRNGAKTDGLDAVRAAREALAREHLAAPRRRGDREAMRVLLATRHGAVVARTKAICQLKALIVGAPEALRDQLRRHPTDEQLARGARLRTGPAQSVEHRATVRALRATARRALFLEAEAADLESQLEELVVAACPALLELPGVGVVTAAQVIVSWSHAGRLRSEAAFAMLGGAAPIEASSGKVTRHRLNRGGDRQLNRALHTIVLSRLQHHPTTKAYAARRTAEGKSPREIKRCLKRTVARQLFRALEADAKNKASMDA

SEQ ID NO: 327322 - protein, 398 aa, unidentified
MITCGVDPSRGSLAISLVKDRKEIDYFEVKNDGQGHAQFLYRLKKHMPMPGVYIEGHGDFAKRFALFCDSNNVALYEINPLKARRLKESITVEKSDHIDARVAALMPFNNEDMHKMRISLRAEGLKKMAREYERISSDSASYKNRLHAHLNQNYGQLYKRFFKKFSNCALHFFIEYSDPGKLYSATVSEIHEVLRRSGSRYYIGKNGLKKAKEIKNIISKECPESYKYYTEATSGIIGAAAGIIMQLELQKDRLNRDISKYTEKYYPGYMEKFKEKFSSIGVIQLAQLLGELGPVSKYKNDGHLAAYAGQVSKTMQSADQTKNVRRKGYNRSLARVVHGIALNNTMQNCCFHEYYKEKKKRFAKKLRALKSVKRVVCKIIFETLKEIEEVKKRGKYAA

SEQ ID NO: 327323 - protein, 483 aa, unidentified
MKPKQVESNKKASCRPTPNRWHKMNHKQRREMLRKIQSEDLSLEVVHPDAAGIDIGNESHYVAVPCARDRQPVRRFGCTTAELKAMGDWLKQCKIQTIAMQSTGVYWVSVYDILEEAGFEVYLVNANETKNLPGRKSDVQESQWLMKLHTYGLLRNSFRPSQEIRTMRTYWRQRNDLVRAAGRHIQRMQKALTQMNIQLANVLSDVSGMTGQAIVNAILAGERDPYQLAALRNWRVKASEEEIARSLEGNWQEEHLFVLQQEQDGYQFCLKQMAECDQRLQQYLRQQEDRSQGASLPEEKRKERLRKKKKGNTPQFDLRTELFRMTGTDLTQIDGIDVTTTMTILSEAGWDMSKWKTEHHFVSWLRLCPDNRISGGKIIGKGRLPTNNRVTNALRMAASTLRLSNTYLGAQFRRLRTKLGAPVAIKAMAAKLARLVYRMLRYGMAFIDRGAEFYESQHRNLQINYLKRKAATLGFQIIEAPAA

SEQ ID NO: 327324 - protein, 478 aa, unidentified
MESSVVMRKPAEILDADHELVIERVCAIDVAKASGMVCTRLPQTGAAGRRVSRVWEVVATTRAITELADHLVAVGIEQVTVESTSDYWRIWFYLLEARGLAVQLVNARDVKNLPGRPKTDKLDAVWLAKLTEKGLLRPSFVPPAQIRVLRDYTRLRVDLTRERTRHWQRLEKLLEDALIKVSSVASKLDTRSVRDMLEALIAGDRDPRQLAELARGRMKTKRAALVEALSGRFDEHHAEIARMLLDQIDGLSAAIEKLTTRAELLLQTLLAARADDQQTSGASGAVPAPGASDPRQALAATSVPADGTLADGGGDGLSTSQRLDEIAGIGPLAAQVIIAEIGLEMSRFPTAGHLVSWAKLCPRTIQSGATRRGGAAGKGNPYLKGVLGEAAAAAAKTNTFLGERYRRLVKRRGKLKALVAIARSILVIVWHLLSDPTARFYDLGPDYHTHRIDTTRKIRNHVSGLTALGFRVTLEPAA

SEQ ID NO: 327325 - protein, 391 aa, unidentified
MATEQRVVIGMDPHKRSVTIEVMTADEGVLAGARFGTDVHGFKAMTEFVKEWPDRVWAIEGCNGIGRHVAMRLIADGQDVVDVPPKLSARARVFSTGQGRKTDATDAHSVALVGTRMTGLRPVVADDQLEVLRMLADRRRSLGEEHTRKISQLHALLLELLPGGAKKSLSAAQAKALLAKVRPRDLVGMTRRRLAAELVGDLEQIYARKKAADKELKALVAATSTGLLDLHGIGPSGAARLLVEVGDITRFPDRNHFASWTGTAPIDASSGDHVRHRLSRGGNRQINRTLHSSATVQLRNPTDGRTYFDRKKADGKSSNEAMRCLKRRLSDAVYRVMVDDLAKTMRTDPGGQLGNDSDSSATGSQPNASSSDKPLPGPVEQQPRTPIPAAS

SEQ ID NO: 327326 - protein, 343 aa, unidentified
MKYYAGLDVSTQETAVCVVDADGGIIAEKKVATDPDEIGGYLASLGIELERVGLESGPCSPWLYQALVLGKLPAVCICARHASATLKAQNVKTDKNDARGIAHIMRTGWYRLSHVKSDESQKTRVLINTRKTLLGQRYEIENQIRGTLKVFGFKVGPVAASQFESRIRGLLELQSTLHSYVEPLLSIRRHLMAECRELDRRIQKMVKQDELCQRLMTVPGVGVLTALLFKCTIDDPRRFKKSADVGVHLGLTPRKYASGEVDYNGRITKSGDPMMRSCLYEAASAVMRRNARNTALKEWGGRIAKRSCRKSAFVAVSRKLAVLMHRMWIDGTEFREQPDVAAA

SEQ ID NO: 327327 - protein, 465 aa, unidentified
MAKKRNNKSKDSKRHRQSLKTIQPNSAGIDLGSREHWVAVPPSKDGTPNVERFGTTTPELLRLADWLKEQQIVTVAMESTGVYWIPIFEILDSRGFEVLLANARQISHVPGRKTDILDCQWLQLLHACGLVRGSFRPSDNICQLRALIRERNKMVQQRSDWIRRIQKNLDQMNVCVHHAVSDITGVTGMAIIRAIVDGERDPHALARLRDSRCRKSEKQIAEELTGNWRPEHLFNLRQALKVYDQLCAVITDYDSEILTYIAMLQPQDATDTSAPPPASKTKAKNISKRGQEPLRQALYDLSGFDLTSIDGIGVDTATVIVSELGLDFTAFPDESHFVSYLRLAPNLSISAGKKVPSKFKATTCTRVSTALRMAALTLRNSNTALGAFYRRVSWRKGASVAVFATARKLAQLIYRLVRYGQAYVDAGAQAYETRYNQRRLISYTKALNKMGYNVEPLSTGEAIRT

SEQ ID NO: 327328 - protein, 352 aa, unidentified
MKKHSYVGMDCGDCFHEICVLNAEGQVTQRKRLANTREALGAFFSGMAPARVALEAGTHSGWISRQLENLGHKVVVAQPRAVRAIWDRDRKNDVSDAELLARLLRADPELLCPVRHRGEAAQIDLLMIKARDGLVQTRTKLINQVRGLAKSLGHRLPASDARTFAGKARAELPELLQPALTPLLDLVGEISERIRAYDRQIEQTAKERYPQTEALRQVSGVGALTALAYVLTVDDPKRFQRSREVGPYLGLTPRQDQSGKMDKQLRITKSGDRYLRRLLVGSAQYVMGPFGPPCGLRSFGQRLAARGGKSAKKRAVVAVARKLAVLLHRLWVSRQTYDPQRGMKLGETGVAA

SEQ ID NO: 327329 - protein, 323 aa, unidentified
MSQPNLQCMGIDVAKLSLDIATTDTIEPFTVGNDEDGFAVITDKLKHTKINLILMEATGGLEAAIACKLQSEGYDVVVINPRQARDFARSMGYLAKTDKLDAAMLAQLALVIDRHPDRSRYIRHLPDEARAVLAAMVVRRRQLNHMLVAERNRLYPSHPQSRKSIDNIIDALQNELDRINEQMKQHMTAFFQEQARLIGSVKGVGDITVASLIAELPEQGKLNRREISALTGVAPLNRDSGKMRGKRTTFGGRAGVRATLNMAALVATQFNPAIKLFYQRFLAAGKPKKLALVACMRKLITILNTMLRKGEEWNASFQSQVIS

SEQ ID NO: 327330 - protein, 428 aa, unidentified
MNYNTQNAKIASITEKTLIVGIDVGSETHYARAFNWRNYEYSKKPFAFSNDEAGFSSFKDWMDDIAEKHGMKVVIPGMEPTGHYWLNLGAYLQEQGMKPVHVNPHHVKKSKELDDNNPNKNDRKDPKTIAALVNEGRFSYPYIPTGIYAEIRSLSNLRLQTQEEITRIKNRIARWFSIYFPEIKDVYRNPDSVSGLMILKEAPLPQDIVKLGVDGINKIWRDAKLRAAGLKRAKTLVTAAEHSIGSQEAPDSARIELKNLLNDYEIYKNREEDLMSLTEEKLSEIPHIDKLLEIKGVGLKTVSGFVAEVGDITRFDNPKQLQKLAGYAIVECSSGKHKGESHISYRGRKRLRYVLYEAAISLIARNEEFKEVHRYYRTRKENPLKKMQSVIAVACKVLRIFYTILTKGVTYDGAKMMQDIKRPQMLAA

SEQ ID NO: 327331 - protein, 407 aa, unidentified
MRITCGIDWAEAHHDVALVDQDGTVVARERIGTGVEGFTRVVELIAEHGGSPAGTPVAIETDKNLLVVGLAGAGFTVYPINPRAVARYRERHSQAGGKSDPGDAAVLANVLRTDRHMHRSLPLISEQALAIKALARQHQEAIWAMNQTISRLRSVLLEFYPQAIKAFPHLKHHAATTVLAAASSPGAGQKLTRRRVEALLHRCGRRNDTQLVDQILANLKMPALRQPDRVEAALALTVEGLVAIVAAMRASVEQLEAELGREFETHPLAPVLRSAPGLGAILAARVLAEVGDDPDRFTTANGLRAFAGTAPVTRASGRSHYVKARKVRNKRLGDACHWWAFAALSWSPGARAHYDRRRAAGEHHNAALRNLANKLIARMWWCIANDQPWDEHAAWPAFHSTEKPAAA

SEQ ID NO: 327332 - protein, 351 aa, unidentified
MEIVVGLDLHRSQITFRTVDLRTGEVQRGKIYPGAREAVREWLERFEPDSDAHFALEGTTGWRFVVEEIERGGFTAHLADPAELSTLRGPKRRAKTDHADCELMVNLLLEGRLPESWIPPAHILELRTLVRLRKTLVDQRIEWQQRLQAQVFHQGVVPGLHLLREEDRRRLLKMQMSAAGRQTMQTGLLMVDAFDSQLQPLGTQLVGLAKTQPGCRALEHNLFGVGWLTSVAILSELGDCRRFHSADQAVRASGLDITVYESNGKRPGGHLARQGPQVLRWALFEAALCAARKSSPDHDYYVKVKDRIDHNRACLSVARKICRRACHILKDLGDAAMAPPEPSASHGPKAA

SEQ ID NO: 327333 - protein, 552 aa, unidentified
MVETVEQSKNQNAKKNQWNQAPNKARWKAVISELSASKDHFIEYLKWWDPDRTADLLSHEFYCGIDVHKKSWRAAIFGLDSDHFTDPIFGPVCEFEVNSQGRTALLEMLTHFRVKRVLMEVSGVYTYPIYDLLCSQTLLPDLQVYVMNPRQIPRDLNMIRKTDKTDAMRLARLASRSELLTTCYLENKEHRSVRTTMRFIKKKIEEKNRYENRLKGFLSGLGFVVDFSLGSQATVQFLKAWLDSRFDLLADFVDDLRNRGEEGLINAMGGYEILHDEFGFVSLNRNDRYVLGNYLSEVVLIHSQLETLKATSFNIMYNHPVYGDLYTRLLDVPGIGELNASIICSESGSFRRFPSVRKYQAYCGLAPTIMQSGETVRHGRSYKMSNRRLFFAYKQSAMAIVNMVKRVSPEKLDVQVPLYAYAKRLVDSNMVYLKAVHKVAAKLNRIVFSMAIRGHRYSDWYTPNVPVRQDERDEQLMRRLNRMKKEMSYLKGRTRRTLEKRYAIIPKAMQEALDQLETYSNNVVSILKRLEVQAQFETSILSLQEKLAIRNG

SEQ ID NO: 327334 - protein, 364 aa, unidentified
MSTITLGVDLAKSVFSVCEVDGSGHVLRRLDFKRDAFAAWLAQVPAGTVVAMEACSGAHHWARRCIEHGLQPRLMAAQLVKPYRLSQRSKNDRNDAEAIATAARQGNMRFVPVKDLDQQARLSWHRVREGYKAESLAIGNRLRGLLAEFGIVVATSDMALRRVLGDLDQAALPGEFKELLRGLEAHWIEVRKALDACDARIDVHAREDARCVRLRAIIGIGPITADAMVASLGSAKDFKNGRQMSAWLGLVPTQHSSGGRARLGEISCRGDAYLRTLVIQGARSSLQRAKAVSVEKSTPEQIWIRQLACRMCFGKVLVAIANKHARQLWAMLAHDQTYDADAWLKHPMVQRPAGKHAITVAAMA

SEQ ID NO: 327335 - protein, 343 aa, unidentified
MQIVRIGLDLAKYVFDVHGVDVHGKIVVRKTLRRAAVSTFFANLPPCLVGMEASNGAHYWARVLTDLGHQVRLISPQFVTPYVKSNKNDRNDAEAICEAVGRPTMRFVPAKSSEQLAIQAVHRIRHRLVATRVRLVNQIRGLLSEHGIVIARDISRLRRALAEIAGNSGDGLNDLVRMLIREVQVELIELDRRIAFYDRQVRELYRNSELCQRLGKIEGIGPVTATALIAAVGDRTCFKNGRQFAAWLGLVPKQRSSGGRTQLFGISKRGDRYLRTLMIHGARAALAKAGGKQDPRSRWLGNLRERRHPNVVAVALANKNARIVWAMLASDKFYEPKLSVQAA

SEQ ID NO: 327336 - protein, 365 aa, unidentified
MEEKKKAEARFVGIDLGKRAYEVAIVGKGGKVAMSNGKTFVAGRQKLYQKLRPSDKVALEAGNMAFIIAKEIEAAVGCTVYVLNPSHLALIYGSMKKTDKEDSLKLAHILEDYKEERLPLVPVPSDKEMGRRKILASYRRAQQSRNREINQLHGLFVAQGITTKVRSDLCEHESRMEAIRELKGTEREEAEYLLAILKLAEQRIEALEKQMKEESAGDEVIQRLQNTPGVGPKTSFAYVAHVAADRFENAHQVSNFLGLVPRVYMSGDTVRYGRITKRGNGYLRALLVQAAWAVTNSRNGGKLKERYEYMTKEKSISKKKAIVAIARRLAEELYVLMRDGTTHESRPFMGNKKGVEKLAQEAIGA

SEQ ID NO: 327337 - protein, 343 aa, unidentified
MEKRYIGIDLHRNGFTCCLRLENGRSYLSQWRLEDLPRFVKKLRASDELAMEITGNARLLYDAVAPQVARVLVVDTYQFRVISRSVKKTDSNDARLLALYLSKGLLPEVRMKDKQHGQLASLTQTRDTLVKLRTTLKNKINNILSARGMNLPKEALSSEKQLNEIVALPLDALVQVELRVIVEQIRSLNKSIAELEKTIAEEASKLEGHKSLISIKGIGQVTSAVLLSVIGDVSDFPDESRLASYFGIVPRVSNSNETEHSGHIHKRGSKLGRTALIQSALIAVKYSPYLRNFYERVKARRGAGKAIIALARKFLGIVYRTLKNQWVFEDFPNFVLAEPAETV

SEQ ID NO: 327338 - protein, 429 aa, unidentified
MHYTQNQKLEQVTEKTLVIGVDIGSENHYARAFNYRGIEYSPKAFKFSNNAKGFEAFCGWMQGHVLMNGAKKVIVGFEPTGHYWYNLADYLKTQGIMFVMVAPQHVKHSKELDDNTQRKDDHKDPKVIAKLVTEGRYIIPYVPEGIYAELRTGYVRYCELTETKVRLENRITRWFDIYFPEYREVYKNPGAKTGMMVLRIAPLPADVIKLGAEGINQLWRSVKVKAAGMKRAETLVAAAKRSTGRAGKDAVRRDLWQMLEEYELVTRHLAQMQVMLEELVAQIDGAERLLRIKGIGFITVAGFFAEVGDLSRFTDPKQIQKLAGLSVVTPDSSGKHNGQSEISRRGRKRLRMILFRAAMSMVKSNKEMKGLHEYYTTREQNPLKKMQSLMAIAGKIIRVFYGIMKNGTEYDPVKLLTDIKRPENGKNAA

SEQ ID NO: 327339 - protein, 424 aa, unidentified
MKYTQNERILQITEKTLIVGIDVGSEKHYARAFNFRGVEFGKLLIFENNAQGFVKLMEWAGKIANTSGFTDVTLGMEPTGHYWFNLAENTMKSGARIVLVNPHHVKKSKELDDNNPSKTDRKDPKTIAMLVKDGRYMEPYIPEGIYKELRTAMDSRWHLLKELSAIKNRISRWIYVYYPEFTTVFKDWEGKAALLILNECPTPKRIIEKGIDGIIAIWKKHKMRAVGRKRAVKLLETAKNSIGTSEGLVSGENDLMILLEDYERKMQQYERTMALIESLAMQIPGFEKMLGIKGIGLITAAGFVAEIGDISRFNHPKQIQKLAGLSLKENSSGKHKGETTICKRGRKRLRYYLTFGIMPLLSKNEEFRELHKYYTTRKNRPLKKMQSLVALSNKLIRIFYAILTKNIAYDSQKMMNDIKRPEAA

SEQ ID NO: 327340 - protein, 400 aa, unidentified
MNTRQARIRVGVDAGKGHHWAVAVNADGETLFSTKVINDETQILAMIDTARVKACEVRWAVDISGRASALLLALLIAHGQQVVYVPGRTVNRMTGAYRGEGKTDAKDALVIADQARMRRDFASIETPPELVSTLQLLTGYRRDLIADRVRLINRLRDLLVGICPALERAFDYSAAKGPVVMLTEYQTPTALRRIGVKRLTTWLERRKVRGADTVAAKAVGAAQSQTTALPGEPRAARLVRDLAHQLLVLDERIKDNDREIRETFRTDERAEIIESMPGMGPILGAEFVAIVGDLSGYRDAGRLASHAGLAPVPRDSGRRTGNYHRPKRYNRRLRWLFYMSAQSSMMRPGPSRDYCLKKRAEGLLHTQALLALARRRVNVLWAMLRDKRLFTSAPPVTQAP

SEQ ID NO: 327341 - protein, 378 aa, unidentified
MFNLPIFVGLDYHQKSIQVCVMNQKRQILANVTVENDPDAVHQVVAPFGSNVSVAIEASTGVANFAEILIHRFQWSVELAHPGYVARMKQTPDKSDWTDAKLLADLTRVGYIPRVWLAPEHIRDLRELVRHRHGLVEQRKQAKLRLRAALRNHRIICPHSPWTVKGKNWLLDPENIPPSSSLQHMLKDDYDIIEFFDRKIANATETMMEKTFDDPVMKQLLRQSGVGFITAVTMRALIGHFDRFRTGKQLAHFCAICPRNNSSAGKTTTGGLIKAGDALLRQVLIEAAHRLIRHDDYWSDMASRLRAQGKKTCVIVAAVANRWIRKLFYQMVKSSSSDSEASGFLRHRQESTFLKEILSDAAAHRLATPESSVQTVLP

SEQ ID NO: 327342 - protein, 344 aa, unidentified
MNNIDYIGFDIHKKTISFCAKAQDGTILEEGTIPALRNKLLAWAKARPRPWVGAMEATLFTGWIYDLLKPLAQTLKVAHPPMLKAIAAAKKKNDKVDARMIADLLRCNLLPECYMAPVPIRNLRRMLRYRNLVVRQATRMKNRIAGLLMETGTPYNKERLHGKAYFSELLGSLQEVPGSVVELLQLSRGQVEFFATIQRRLLKELKEHPELNQRVMRLQSIPSVGEILALSWALEVGEVDRLRSIAQAVSYCGLTSAQHSSAGKEQRGPISKQRNRHLQTILIEAAKLAPRHNPQLAAVHQRELQRGNRNRATLAVARKLVAYLMVVDKSGQPFQMRASGKEAA

SEQ ID NO: 327343 - protein, 348 aa, unidentified
METIGLDLHKRESQLAIQAEDGTITERRIVTSQQRFTAVLGHRPRARILLEASTESEWVACHLEALGHEVIVADPNYAPMYATRSRRVKTDKRDARTLMDACGQGTYRRAHRLSAPRRHLRAELAVRDALVRTRTRYVALAKALVRRDGLRVPSSTAERVGDRVQALALPAPLAAELAPLLTLLPSLNATIAAADHQLSALEQTDPIVALLMTAPGVGAVTASALVATLDDITRFPSAHQCEAYLGLVPGERSSGEQRRIGPITKAGNRRTRWLLVEAAWRILRAKDPESAALRAWTLRIAARRGKPIAVVALARRLAGIVYAMWRDGVPYDGRKIRAPHHARGAQAG

SEQ ID NO: 327344 - protein, 342 aa, unidentified
MSVMIGIDPHKGSHTAVVVNPDEVVIDETRVKATADQLVELQEWASGYKDRCWAVESARGLGYLVSQQLVAAGEQVIDVPAMMAARVRLLGSGKSQKNDPNDARSVAIAALRHPGLMLVRSDDHTRVLGLLAKRHRDVARLKNKAACRLHALLMELTPGGLASEMTVTKANALLESVAVADEMTRQRVVIATELVDDIGRFDAQMRASKKRIRVAVAASGTSLCDIRGVGPIGAAIILGSVGDIGRFPSPGHFASYNATAPIDASSGERKRHRLNPRGNRKLNHALHIAAVTQLRYPNEGRDYYDKKLAEGKTSKEAIRALKRRISDVVYRHLVADARHHIT

SEQ ID NO: 327345 - protein, 340 aa, unidentified
MSKRSILVQETIYCGIDVSAKSLTVAIQRVHQPVEQRSFPNASVGHKALIVWLRKAKSPVRVLLEATGIYSLDLAFALDAAEGIEVAVLNPRVANRFAQTIRRSKTDAADAEVLAEYAHRMPFTVWVAPSPGSMRLRTIVRHVESLSVQSAQNQNRLHAAHGSASTPGCIVQDLKRSVASLDLHIHKLRREAMALVRQDDLLRKRFELLVSIPGIAQVSAMQLLAELSTLPSDLTVREWVAHSGLDPAHEISGSSVRKASRISRAGNRHLRRALYMPALVASRCDPHAKAFFENLLARNKARLQALIAVARKLLHAIYGIFRSGLKYEGTKLFPRISLPQ

SEQ ID NO: 327346 - protein, 371 aa, unidentified
MPDVSSNAPADVRLWVSLDVHKLSIVAAVLSPAGGQPEVQQIETTRAAIRRFIDRLGGGEGLAVCYEAGPGGFALLRVLGELGVACDVVAPSLIPVRAGDRIKTDRRDAKKLVRLYRGGQLSYVQPPTPETEGLRDLMRCRDDLRRARTAARHRVGKQLLRHGRIYRDGKSQWTKMHRAWIARQRLDDELAQTALEQMLIHLDGLDRQLDQLDCDLEQVARGERWAATVEILTRFRGISTRTALGLIAEIGDFARFGHPRELCAWLGIVPSEYSSGQQRHRGHITKTGNHHARRLLIEAAWSYRHRPRRPDRGPEPDARAWQAQTRLHRRYHHLTEHGKRSTVATVAVARELAGFLWAAVTHQPFVLEAAA

SEQ ID NO: 327347 - protein, 410 aa, unidentified
MSNALLVGIDVSLNDNKVRILHPDGTSLSKFVVSNSVPGAKTLSQRVTGIAEKNNLDSIVIGLESTSVYGDPLVYFLKQDASVNRFNTKIHVLNPTQVNKFKLMYPDLPKTDDIDAWVIAEHLRFGRINKEVYMDDRYKALQKLTRARFHTVQNLAREKNWFLNNLFLKFSSLAQEKIFSDRFGATSSSIIEEFFSVDDISYMPIEELVEFITNKGKGRFEDPEGVAAAVQKAARSSYRLPKTVTDSVNQVLAVSFSAMKAYKEQLKIFDKAIEEQVKLIPNPLTSIKGIGPVYSAGIVAEIGDIHRFKDQAALAKFAGIAWTKHQSGNFTAAHTHLIKFGNRYLRYYLMEATNKVRLHDHELKRFYDLKYSQTPKTPHKRALALTARKFVRLVYALLHSNRLYTPPKGE

SEQ ID NO: 327348 - protein, 415 aa, unidentified
MDRLIERCGMLDIHKSQITACVRVPDSAGGRRQEIREFVTTTSGLLTLADWLGSWAVTVVGMEATGVYWRPVFYLLEDQFDCRLYNARHLRHVPGRKSDVQDAEWGCQLVEHGLVRSSFVPERPVRELRDLVRYRKAKIQERTREVQRVEKTLQDAGIKLSSVASEVLGKSARKMLDALISGTNDPALLAELAKGTLRKKIPALREALQGRFTGHHALLIGQMLAHIDFLDETIATLSERIEELTRPFSRELELLDTIPGVDKRAAELLLAEIGPDMSRFPSDAHLASWAGMCPGQHQSAGKKQSAATRKGSKWLRGTLTECAKGIVRTKGTYLSARYHRIKSRRGHAKATIATGHKILTAAYHVLQQGIPYNELGEEFFYRRDTEATERYRRRLVKQLERLGHQVTLEPMPEPA

SEQ ID NO: 327349 - protein, 393 aa, unidentified
MICVGIDVAKDKHDCVILNSEEKILAGVFTIPNNADGFDTLLQKIRSCTSSDDKIKVGLEATGHYSYNILGFLINQGLPTYVINPLHTNLYRKSMSLRKTKTDRVDAKTIATMLMSNVDLKSYTDTAYHNEELKSLTRYRFDKVRERAQLKQSVSRLVTILFPELEKLVPTLHMSSIYALLIEFPGAKQITEAHLTHLKSLLKDASKGRYGRDMATEIRDAAKHSIGSVMPAKSLELRHTIRLIRELDSEIEDIEAAIEAIMEELQSPITTIPGMGFRMGAMILAEIGDFARFDSPDKILAYAGMSPSTYQSGQLSLAGTYSHMEKRGSRYLRYALYNATKYVCHWDPGFAAYLAKKRAEGKHYNVALSHAAKKLVRLIYAMEKSRQPYKRAA

SEQ ID NO: 327350 - protein, 351 aa, unidentified
MTRYIGLDAHSESCTLAVMGPSGRRLKHERLETSAQLLKQFVKNVAKPRHLCMEEGNLSGWLYEELEPLVDELVVVIPDKNGANKSDLIDAFKLADELRRDAISRTVYKDPGCFRALREATRAHYTTQKDKVRAKGRIHALCRGCGKRDQGSLLYDPDSRLDALMQLPEHLRRRAALYAEQLDGLTDCVKQAERWLHEQAERAPIVKRLATAPGIGIIRASYIVSVVMTPHRFRTSRQFWSYCGLAVVTRSSSDWTRDRRGNWQRSNTQQTRGLNRNRHPLLKNVFKGAAMAVAGMPDHPLGQAYQRLLDKTKPNLARLTIARRLAAAVLAMWKKGQDYDPSKHSSNSNDM

SEQ ID NO: 327351 - protein, 423 aa, unidentified
MKTVYPICCGVDVHKKFFVATLITTEELLPKYQKRRFSTFNSQILAFKQWLLENNCSDVCMESTGKYWIPVYNLLEDSINVTVANPKWVKTIKGNKDDVKDSKWIGDLFRIGLVPGSFIPPKEIRVLREFTRYRSKLVGCKSGEKNRYQNVFTVCNVALDAVVSNMFGVSALSVTDYIVNSDTFDPEHCASLLKHTLKKKAGEVVESIDGFQMTDAQKQRARMVKEHYDFLETHIGRLDAAIDALAEPFESAVTLLCTMPGIDRRAAISIISEIGVDMAQFGSSKRLCRWAGLTPGNNESAGKKHSVHIMRAGIYIKPMLVQAAWAAVKSTKSPYYNLKYIAISKRRGKKRAVIAIARMMLTAAFHMLATGEVWNPSDLQQVDMPPELREKQLRHDLDRAAKFLVANGVVAPDAIQIPVSTTG

SEQ ID NO: 327352 - protein, 325 aa, unidentified
MNQVSQHVLGIDVSKATFDVALVHHRQVHHKQFANQARGFRALQAWLAKHTAAPIHACMEATGKYGEALAEFLHAHGIMVSVVNPLRIKAFARSELSRTKTDKQDAAVIARFCVAMRPGSWQPAPPEIQQLKAYTRRLDALTALAQQEHNRLEGEKGFVEDDIRQHVEELQIRIHRLQKVIAEHLKQHPTLCQQQALLLSIPGIGERTVAQILSICGSIHQFSHAKQLAAFCGLSPRTHQSGSSVKGRGRLSKMGHASLRKALFFPALVAMKFNPQLKAMRERLLAAGKPKMVVVGAVMRKLLHQIYGVLKSGVPFRPERATGAS

SEQ ID NO: 327353 - protein, 451 aa, unidentified
MAKRAEKRERRSMVLQPDAAGIDIGAEEIFVAVPPDRDEESTRRFSSFTRDLHALADWLGRCRIQTVAMESTGVYWIPLFQILEERGFKVYLVNAHYLKSVPGRKSDVSDCQWIQYLHSVGLLRASFRPPDAICAIRTLWRHRGSLLEMAAEHILHMQKALSQMNLQLHHVLCDITGTSGQAILDAILSGKRDPVELAQLCHSRVKSPRDKVAQALVGDYRPEHLFTLKQSLAGYRYYQKLILELDQETARLMQALPSATEHPMPPRTKATAYHRQGNDPQFDLRSELYRIAGVDLTDIPGVSAATAQVILTEIGTDVSRFRHASAFASWLGLCPEKRVSGGKMLSCKTRKVKHRAATALRMGANSLCRAKGYFGEFFRRMRAKLGTAQAITATAHKIARILYHVLLTKEPYAETIFHRYDEQAQRRAEMRLRKQAAHLGFQLLPITTTGK

SEQ ID NO: 327354 - protein, 384 aa, unidentified
MDRATNSTAAADRLFCAVELSKNSWLLGIQFPDRQKASVYPLKGGDSEGLMAKLVAACDRWTKVSGKKPSIILCYEAGYDAFWLARFLRARGIECLVVDSASMQVNRRSRRAKTDRIDLGKLLRALIAWCAGERHVWSVVRIPSVDEEDLRRSHRERSRLITERTAHINRIKGLLFAQGIRGINVKARYRTLRVDKLVTGEGRPLPPRLAQEITREIDRLGLVQQQIAAIEQERDESPTTCKETEKKRAQLLLLKGIGPTGSAVMAREVYYRQFSNRRQVAGFLGLATSPYDSGQMERSQGISRAGSGPVRATMIQMAWLWIKHQPKSAIAQWFVQRTEGQNGRIKRIMIVAVARKLAIALWRYLEQGLVPQGATLMRLTSTVR

SEQ ID NO: 327355 - protein, 308 aa, unidentified
MTAVGIDVGKEGLDVAIDGVSGVARFRNDSTGRRALLRQLLSLDSPLIVVEATGGYEDPLLDACGDAGLRIARINPRQSRDFARATGELAKTDAIDAKLLCLFARLFGDRLRIHQPPPLWQRELRDWLRRRGQVVITLQAQKQQADVAPPSVRKLIARTVAALQRELDAIELAMKAIVNDNVSSALRSTKGMGPMFQATSLAMLPELGTLTRQQIAKLVGVAPMNRDSGQTLGKRRIRGGRAPVRVALYMATLSAVRWDPVMKAHYRQLRERGKVAKVALVACMRKLLTIANARRRDELRQSAEIAPA

SEQ ID NO: 327356 - protein, 351 aa, unidentified
MIVLGADMHKRSHTIAAVGSTTGELLGERTVQVGIRGFGALLVWARGLDGERIWALEDCRHVSGSFERFLIERGERVLRVPTRLMADARRGGRERGKSDSIDAIAVARAALREGLTKLPAAQLEGPELDLRLLVDHRERLVRQRVALNNTLQWHLHDLWPELTLPASALFSTKWSTRIGRRLARTEQSTRVRIARDELRRLRELTQTIKSLEAEITALVASIAPQLLSEPGFGPLTAAKLVGEIAGASRFSSDAKLARSAGLAPIPVSSGKTNRHRLDRGGNRQINAAIHRVAVTRARCDPETQIYITRKTAEGKTNREAIRCLKRHLARRIWHLLQPPTPSTEQPSSSTP

SEQ ID NO: 327357 - protein, 449 aa, unidentified
MMEPQEIEDGEYEQILERVAAVDVAKASGMVCTRVPREDQPGKRRTRVWQVDAATSAILELADHLVGEGIEKVTLESTSDYWRIWFYLLESAGLSVQLVRAQDVKQAPGRPKSDKLDAVWLAKLTERGMLRPSFVPPVEIRQLRDYTRLRTDLTRERTRHYCRLEKLLEDALIKVSAVASKLDTLSVRDMLEALIGGERDPQVLAGLARGRMRAKHDRLVQALTGKFDDHHAELAQMLLDQVDALSAQIGKLTTRIEELIAAIPAAQGVDADGTTGPTAGLGARAPVLPAVDRLDEVTGIGREAAQAIVAEVGLHMSVFPTPAHLVSWAKISPRTVQSGARSRAGRTGKGNPYLKGILGEAAAAAGKTDTFLGERYRRLARRRGKLKALVAVARSILVIVWHLLADRTTRYHDLGAGYYTSRIDKNRKTRNHIRQLEALGYTVTLAQAA

SEQ ID NO: 327358 - protein, 338 aa, unidentified
MKDIKYFIGLDVHKERTSYCVRDKLGNILTEAETATLYSELEPRLKPYLASSLIALEASTSYYTLYQTFLKKGYHIKVANTIQLRQLIAKNDKLDAQRLSEMLRLGTLPCSYIPEEKIQHLRSMIQMRHALMQEKVRCNNRIQAFLDRNGVIMPPVKAFSKKWKHALMQHLGTGTASMELRYEYNHYVYLEKTNEQADQEIIGYTKTYWKLEYNLLRSITGFGVLLPCYVIAFVHPIERFLSNRKLRRYAGVIPLSKESGDTTSPGRIPKTTSKALLRWALIQAANTIGKTNTRLGRYYRRKKNQKKKSGIAKIAVASTLVDIIYKVLTTKKPYVASC

SEQ ID NO: 327359 - protein, 354 aa, unidentified
MKIIGIDLHKKTISVCVMNQERKVLQRKSLNCADPDAIVRFFQDQGEFEAVVEATASYEWLWQLLEPLAQRLVLAHPKKLRVIAESKNKSDKLDAQVLAEFLALNMVPEAYRPTLRQRQHRALIRQRCFVQKNVTRVRNKIRRVLSDYNADRLDLFTKAGLPYLLQAKKKLSEADRFVLNQLLAQWHYHRKQFQAVGRQVKAFAQKASTKEKEIRAVLGSMPSVGPTTIEVVLSEIGDIQRFRSNKRVVAYAGLAPGHRESAGHKKDLGITKQGSGLLRWVLIQTAWRMVRCTLRWRWVYENLKKRRGSKRAIVAVARRLLTVMAALWRTGQHYRLDSGGPEPAKAAPTLAGAK

SEQ ID NO: 327360 - protein, 350 aa, unidentified
MLIIGCDYHPGFQQIAFVDTETGECGERRLTHREEAEQFYRKLQERSLRVRVGMEASGHARWFERFLRELQFELWIGDAAEIRTRRVRKQKTDRQDAQLLLRLMVEDRFPRIWVADAENRDLRQLLWHRHRLVQMRTRVMNQLHVVALNEGLRRKKALWRPAGRNQLESLKLAPWASRRRQDLLDLLDQLTPKIQELTRALEEEVEKRPVTRRLMTHPGVGPLTALAFELVIGTAERFHCGKQIASYVGLVPSEESSGDRRRLGHISKQGNSLLRFLLVEAAQVTVRSHPQWRSQFFHLAMRRGRKIAKVAMARKLAVQLYWMWRRGWSHEEMKKLGSHAGEPGNRHGVH

SEQ ID NO: 327361 - protein, 412 aa, unidentified
MLEFKNLVFVGIDPHKEEHVAVMIDHWGEVFFELVFPNQPSGFETLLEHVDAHTPDGKTAVFGIEDTGGLGRSCAQWLTLQDQLVKGVNPIMSSDRRRKHPHRSKNDMIDAVAVARVLITDFDQLPEVTVDDYYHALRQITNRRSHLVRTRTRCKNQLHKLLHDNYPEYKKFFSDPFGATALAFWSKYPHPNLLRGVGSKRLASFLSKTAKNMSGSKAELILSMVDKQQVLTIDAKMNIIVIRQIIEQLRQIDGHIAEMEQLMTEALEQSDTQLETMPGVGTVTAISILARVGPSKRFSSADKLARHAGIAPVDNSSGRTRRHQRSKSGDRQLNAAIHRIALSQISVSNNGTPKCPVAYNYYQQKISEGKSKLSALTCLKRRLCDIIYAMLRDKTCYVPRPSPCFKPTSIVA

SEQ ID NO: 327362 - protein, 444 aa, unidentified
MVCSGMILIREVADAPVIMGISKPADLKSPCGEVKIVNPLFVGIDVSSRSNVAYLMKPDGSKHSSFSVQNNLGGAKLLSERIVSALNSMRLSDVVIGLEATSIYGNNLVYALREDGSLGQFQRKIHVLNPKQVKKFKEAYPDLPKNDFVDAFVIADHLRFGRIAKEVYMDDYRYQALRTLTRARFDVIQNLTREKQRFANYLFLKCSGIAQEKGIQNTSATTIALMEHFETVDDLANADLDELTDFIAQAGRGRFADPDVVAKVIQTAAKGSYRLPKTVNDTVNQAMSVSIASMRALKEQAKVLDKAIEQQFEIIPNTLTSIPGIGKVYSAGIIAEIGDIHRFASQASVAKFAGLVWTQHQSGEFEAEHSRMIKSGNRYLRYYPLEAANSVRRCDSEFRRYYDLKFNEVNKYQHKRALALTARKLVRLVFRLLKDNRLYIPPEN

SEQ ID NO: 327363 - protein, 342 aa, unidentified
MNVTTIGLDIAKSVFHLVGAEARGKPVLKKRLRRKKVLEYFANLTPCVIGIEACGGAQYWARELRGLGHDARLINPKYVKRFLCGNKNDYNDAAALCEAVVHPKTRLVPVKTPAQQDLQALQRIRQGAMQQRTAWVNRARGLLGEYGIVMPKGIGAFRRRVPELLEDDEKGLSGLFRELLAQLYAQVRALDEQVAEYDRRLAQLARADETCQRLVELPGFGPVIATAVSASVGDGRAYHNGRHLSASLGLVPRQHGTGGKVRLLGITKRGDKSLRAQVIHGARSVVHHAGNKDDALSRWINRIRAESGTNVAAVALANKLVRIAWVIVRRGERYRPALAARA

SEQ ID NO: 327364 - protein, 352 aa, unidentified
MAGVMIGVDPHKASHTAVAISGAEEPLGELRVRACAVQAERLLAWAAAWPERTWAVEGAGGLGHLLAQQLLSAGERVLDVQPKLGARVRLLATGNVNKNDPNDARSVAVAALRSPGVREARPDDHAAVLKVWSKRRRDLASSRTQVVCRLHAVLCELVPGGVGKKIIAAHAARLLDSITPPDAVAAARWELAAALIEDLRRIDAQLGETRQKLDTAVRASGTSLTGLFGVGPVIAATIIGEVRDVSRFKNRDRFAAYNGTAPIEVSSGQRKVNRLSRRGNRRLNHAIHMAAVTQVRQKHSEGRAYYDKKLAEGKTRKEALRALKRQVSDAVFTRLQIDAQRTQAQVRDPGGQ

SEQ ID NO: 327365 - protein, 346 aa, unidentified
MKKRSAKGEVKVLGIDLAKQSFQLHGVDESGQTVLRKKLTRNKLSAFVANLPPCVIGLEACGGAHHWARVFKEFGHTVKMMAPQFVKPYVKSNKNDSVDAEAICEAVQRPNMRFVPEKSIEQQDMQSLHRIRSQLVDRRTAQSNQIRGLLLEYGIIVPQGIHHVRNQLPLILEAADNGLSDLSREFLHELYEELVHLNERIDALEKKLLRLSAQNEDCQRLLTIPGVGLLSATALVAAVGDVSNFKNGRELAAWLGLVPRQHSTGGKATLMGISKRGDCYLRTLLIHGGRTVVRVAHRHQDRRSRWVSELEQRRGKNISAVAVANKNARIAWALLSKKTTYQATAA

SEQ ID NO: 327366 - protein, 325 aa, unidentified
MPLSIGIDVSKSKFDAALMTAQGKYRSKVFDNNAPGFQELLEWIDTNVSEGRANAQVCMEATGVYHEALANFLFDSQVKVFVANPLRVKRFAEGEGVRNKTDKGDAKVLARFVVHNKLDLWEAPSKGVRELQALVIRLESLQAMRHAELNRLDVAHPSICDSIAAVVAALDAQIEAVRLLIKKTIDDDPDLKQRHDLLETIPGLGATTIPSLLAYIGRPERFRTVKALIAYAGLTPAIKQSGTSLDKRQGLHPMGHPALRKALFYPAMTAGRYNPIVAAFWRRLKAQNKPGKVIVVACMHKLLAIAYGVLKSKRPFDASLAPKGA

SEQ ID NO: 327367 - protein, 333 aa, unidentified
MHVACALDQLGRHLATLEVATTLRGYRELLAWAQRLGEVQGFGVEGTGCYGAGLARFLSAHGQVVLEVNRPDRQARRRRGKSDPVDAEAAARAVLAGQATAIPKAGDHLVEMVRCLRVARASAAKARTQAANALRALVVTAPAELRELLRELPAGRLASTAARLRPGPIVTTAAATKLALRQLGQRYQALEAELAAVDAELDRLTALAAPGLRRLCGIGPEIAGALLVASGDNPERLHSEAAFAMLCGASPIPASSGKTVRHRLNRGGNRQANTALYRIVVVRLRWHQPTRDYMARRTKEGLSKREIIRCLKRYVAREVFAALQAPTALTATT

SEQ ID NO: 327368 - protein, 407 aa, unidentified
MNAVGIDVSKGKSMVAALRPMGEVAFLPQEFLHTEVGLEQMAYAIIALGEDTRVIMEATGRYHEPVAAALHEYGIYVCVLNPLFIKQSGGGSIRKVKTDKADAMKIAKYGLDNWVDLREYTPMDTIRQQLKLCSRQYNLYMKTVVSLQNNLISLTDKTFPGVNELFTSPERADGHQKWVDFVMTFWHCDCICRVSEKAFTERYQKWCKRKGYHFRAEKALDIYASSCGHFTTLPKNDNTKLLITTAAQQLLTGKMTLAALRAEMTRIASQLPEYETVCAMYGVGETTAAQLMAEIGDVRRFPRRSSIVGFAGVDPGIDESGKHSAKSVPTTKRGSPHLRKTLYQIVCTYLKKSPADEPVYQFLDKKRAEGKPYLVYMTAAQNKFLRIYYARVKECLEAFDSQTAEQK

SEQ ID NO: 327369 - protein, 361 aa, unidentified
MTGMMTYAGLDVHARSTHAAAIDVSTGELLRARFGPGVEEPVAWLQGLPGPVRACYEAGPTGFGLYRAAVAAGVAVEVIAPGKTPRGPSDRVKTDRKDAELLARLLLAGSLTTVVVPPVEVEAARELMRSHDACRRDLMTARHRVSKMLLRHGRVYPESSTWTVAHRRWLSAQQFQETASELVFADLIASVDGLTARKSAIAERLSRLAEDEQWWPTVARLRCFRGVDTLTAFALHLELGGDWQRFKRANALSAWLGLTPSLHQSGESSHQGSITKTGSGFARRLLVESAWHYGRDPRIGVTLQNRQQGQPDHVLQIANRAQQRLHRVYHRMRGRGKAHNVIVVACARELSCFLWAAATAD

SEQ ID NO: 327370 - protein, 379 aa, unidentified
MDRAITDTPAETILHGALELSKNSWLLALQFPDRVQPSLYPIGGGDTVGLMAKLTAARDRWAKMSGKAPSIMLCYEAGYDAFWLARFLKARGIECLVVDAASMQVNRRARRAKTDRIDVGMLLRALIAWGQGDRHVWSVVRVPSVDEEDLRRSHRERDRLVRERTAHINRIKGLLFGQGIRGINVKTKYKTLQIDKLVTGDGCPLPPRLASEITREIARLALIQEQIATLERERDHAPTPCKATEKKRLQLMCLTGIGPAIAAVMTREVYYRQFDNRRQVAGFLGLATSPHDSGDVERSQGISRAGRGQVRGTMIQAAWLWLKHQPKSAITRWFVQRTAGQSGRIRRIMIVAVARKLAIALWRFLEQGLVPQGAMLANR

SEQ ID NO: 327371 - protein, 397 aa, unidentified
MYIVGIDIAKRKHEAAVIDGEGTVIIKPFSFTNNCSGYNRLLAMLTRAKLPLDEVSFAMEATGHYWLALFTRLQKESFRVQVINPVQTNSIRSFYIRQAKTDPRDALLIAEVIRFGHFSESTLHPENIYELRELCRGRHAIVSMQADVKRKVVALLDQVFPEYETAFTNLFGDTSMAILQTCPTPKELSEMRLEELCHLIEVSSHKRFRMAKAQELQELARNSFGFAMAGDVFSTMIRLYAKHLDFLKQQVREMDRKIAEIMDTLDTPITTITGIGPTLGAYILSEIGDISRFPSAAKLAAYAGIDPTMRQSGEYNGVRNRMSKRGSPYLRHAIWLAASSAVLHDPALKLYFQKKRDEGKPYMASVGHACRKMVSIIYAVMRDNKAYTPCIPNEISA

SEQ ID NO: 327372 - protein, 405 aa, unidentified
MPVEKSWRGKHERALGRKSRRIECAPLHYRALREDRTLSNVQKLHLAKQVTQALFYINLLTEGTQTMEEIKVVWCGMDVSKDEFYAALDLPGEDGNKITVAGLKAERFKRTEKGLNRFWNWVDKNSKDYTVRFVMESTGYLSRQLFNWMKEQRADAQVSIHNARYIANFIKSLNLPHKTDKSDAQAIARFGSERTPTPRQRVAKHWDELKEYQRQRAALIKIRVELENRSPSLFFGETNTINDNTIAAIKLQIKKIDKVIRAHVNEHQDIRKEIHFMCTVPGVQFISACAIIAELGSMTQYSAKQLSAMSGLAPRIRSSGSSLNQSFMGRCGSTRLRQILYLDSIQSVAKIPSLNSLYERLVQRGKCKMSARCACMRKLLIILRAVVVTSTNYDEKLLKNSYQVA

SEQ ID NO: 327373 - protein, 426 aa, unidentified
MADTNDATTDVHWLAIDVARYWNAVLIETAAGNRHRFKMANSAADFDRLVEFVKSLGGRCRAGLEPTGDYHRPIAHRLLQAGVEVVSISSVAQARYREAIFNSWDKNDPKDASVILEMVKQGRFQTYVDPMIAGYHDLQELSKTYYQVSRARTKVQHSIINHHLPLYFPEMHKYWSCSRSEWWTRFMLEFPTPAHIRRLACSEFVQEAWDLVGRKVNKQGKLEEIWAMAGRSAGLPHAPDSLAVETFCLTLKHFQQLTELRAQIEDRAEQVLMANTDYVHLKTLPGVGPITALTVLAEAGDLRRFPHHRQFLKYCGFDLAKHQSGLQRGRERLSKRGNARLRLAFWTAGQVAVRLRENSFKDKYERYIRADPGNADLKRKALTAVAAKMARVAYGMIKTNQPYRQFFEQGLPSGSIPFNNAVGAPA

SEQ ID NO: 327374 - protein, 351 aa, unidentified
MPHKLNSGIAVIGIDIGKNSFHVVGHDKRGAILLRQKWSRGQVEARLANLPPCLIGMEACVGAHHLSRKLQMLGHDARLMSAKYVRPYSKGQKNDFRDAEAITEAVQRPTMKFVATKTTEQLDLQALHRVRERLVSQRTGIINQIRAFLLERGVAVRQGLRFLRAELPRILAAPCDALSPRMLRVVEDLAGDWRRLDERIEGLSSEIEALARQDKSCERLMTVPGIGPIISSAMVAAIGTGDAFSKGRDFGAWLGLVPKQISTGDRTILGSISKRGNRYLRALFVQAAWVVLVKVGPKHWERYGLKSWIEAAKKRLHHNVLAVALANKLARIAWSVLAHGRTFATSKIQAA

SEQ ID NO: 327375 - protein, 364 aa, unidentified
MTVVGIDAHKDWHTLVAVDEVGKRLAELTVPARAKGHQKILTWLTQFADVQVAVEDCRHLTRRLEADLLDAGHKVVRVHTRLMAGMRRSGRQPGKSDPIDAEAVARVALREDDLPTAELPGPTRDMKLLSDHRRSLVARRTALQAKVRWFLHEIDPDLHVPSRGLRRYQLLEELLGFLAERQGVIVEIARDLLEDITSLTRRINDIERRLDKLVRASHSALLEVPGLGALGASMIIGETAGAGRFTNKDAYARFNGTAPIPVWSGNKVRVRLSRGGNRRINTALHMAAVTQIRLGKEGSAYYDKLIARGKTKTEAIRLLRRRLSDRVFSAMRVDERHDTNAVVNRAGSEDNVTGPIVAELRSAA

SEQ ID NO: 327376 - protein, 363 aa, unidentified
MNYVGVDLHKRYSVLCAVDERGRKLREARIEGNAASGFAQFFESLEGPSKAVLEACWNWGLTHDLLEEIDCVEEVVLAHPLKTRLIADAQIKTDRLDARAMATLLRGDLVARAHVPRKETRARKNLLRQRLYWARLRTMLRNRIHALLDRQRDLELPHCSDIFGVRGLGFLRRLELPEPDGTLLREALTLHDLIAQQMKAQEKRIAAEFHLEPMHARLLSVPGVGPTLAAVLAAEIDQIERFPSADKLCGYAGVVPTTHSSGGKVHHGRLLPSCNKWLRWALVEASWVAIGCSPYFGALYRQQRARGKKANTAITIVARRMCRILFQLLKERRDFEKRTEVAHTYPVPGCSGYRLTAVSTVRP

SEQ ID NO: 327377 - protein, 346 aa, unidentified
MKIIGCDFHPSFQQIAVFETETGEITEHKLVNGNGEAERFYRSLAVPSLIGIEACGNSHWFIDLLGRLGHEVRVGDAAKIRASYVRKQKTDRRDAGHILTLLLENRFPKLWTPSRQERDQRQLLIHRHKLVQIRTRIKNSLQHLALNQGVQKKQKLWSKPGQKVLIQLPLEGWTAVRRQDCRELLAQLDQRIARLDKAAEQAADAHPQASLLLQQKGVGPITALAFALTIGDVSRFEHSNQVASYLGLIPSEHTSSNKRRLGSITKQGNSFLRMLLVEAAQSVTRLDPQFHKHYVHLCRNKPKAVAKVAAARKLAVRLYWVLRTDQNSQKAVPIESSPRVPLVGAS

SEQ ID NO: 327378 - protein, 426 aa, unidentified
MNVVNSAEEPRFAAFVAIDWGDSKHVWSLQSADADRRERGEIEHNPEAVGAWVTMLGARFGSQPIAVAVEQSRGPLVFMLGKYEQLHIYPIHPRAASQFRAALFPSGAKDDPGDAELLLDLLVHHRQRLRRLNPDTAQTRLVQHLVEGRRKLVNEKTRQSNRLTAQLKLYFPQVLDWFDKIDSPLVADLLKRWPTLEALQKARPATLRSFFTQHNCRSLELIQQRLDLIRQALPAVRDQALIEAATAMTKVLVDLIATLREGIACFDRQIAQAVAVHPDFAIFDSFPGAGPALAPRLLAAFGAQRDRYQSAADLQTFSGIAPVTERSGKSEWVHVRWACPRFLRQTFHEWAAHSIGFCAWAAAYYRLQRERGKDHHAAVRALAFKWIRIAFCCWKDGVPYDDARYVRSLRRRGSPLIALLDKPVVP

SEQ ID NO: 327379 - protein, 404 aa, unidentified
MKGPILSIDVSKGKSDYQAFKDLNVKYTGSRSIKHNKEGFDEIVNLVREMEKKLETEVCVVYETTGVYHRVLKKVLEDNNIKQFIINPLLSAKTRKNDSLRSPKTDKLDPKSIAKTYYSHSLHNSHKQETIYHELRELSRYYEDILVHIRKDKVAFRAQLDIVFPGYDTLYDDLYGPVALAIIEKYPHPEMLQKKKINTVSKVIQSKTCHRQAVSDTMADKAIEYSKTIYSGCDKDDIEVLILQRFIKKLNEDMAEAERTIGEMIKLAQELPDFNIIKSIPGIGDNLAARIIAELGDMTRFKKKNELVAFAGLDPRISESGQNDGDHMHITKKGNKRLRCLLYLAVTCSIRLKRDDNSIKDFYIKKKQQSNPMCSKAAKTACASKLVRIIYSMCKTGELYQYNK

SEQ ID NO: 327380 - protein, 343 aa, unidentified
MQVVTTVGLDIAKSVFQVHGVDAAGQVVIRRQLKRRYVLAFFEKLPACLVGIEACASSHHWSRELKTLGHTVRLMPPAYVRPYVKRQKNDTADAEAICEAVTRANMRFVATKTPVQQSCLTLHRTRHLFIRQQTAVINVIRAHLAEFGIVAPVGRKGIETLLDVVANPTDKRVPVIARACLAALGAQLRRLKEQILEFDRMIMAWHRSNEASKRLDAIPGVGPVLATALVASIADPKAFRSGRNFSAWIGLVPKQHSSGGKDRLGNISKQGDRYLRSLFMAGALAVIRYAKIHGTTHRPWLTALLARRPTKVAAIALANKMARMVWAMMTRGERYKDPIALAA

SEQ ID NO: 327381 - protein, 382 aa, unidentified
MRTVALDLGARRVDYCEIAEGGVVERGVLKGLSGLEGHLGPGTPPARVAFEACREGWYVAERLIEWGHEPVMVDTTRVKQLGIGQHGRKNDRIDAETLAIALASGRIPQAHILSPARQKLRLELAVRRSLVATRAEYVTSVRGIVRARGASIPGCRTSDFLDKLQQIGLDEQAQQLVEPLRASLEVLNRQIAEVDLRIEGLCEEEPVIRRLMTVPCIGSVVAAAFVSVIDDAGRFRNAHQVESYLGLVPSEDSTGGRRRLGGISKAGNSYLRSLLVEVSWVLLSKKQSDPLGRWARQIARRRGHRIAIVALARRLAGVLWAVWRDGTVYDPQRLGLKSAEGVSRHAQQREFQAQALRAAAKKATERMRLARRTLEQGRTTTT

SEQ ID NO: 327382 - protein, 397 aa, unidentified
MYIVGIDIAKRKHEAAVIDGEGAVIIKPFSFTNNCSGYNRLLAMLAKAKLPLDEVSFAMEATGHYWLALFTRLQKEGFRVQVINPVQTNSIRSFYIRQAKTDPRDALLIAEVIRFGHFSESTLHPENIYELRELCRGRHAIVSMQADVKRKVVALLDQVFPEYETAFTNMFSDTSMAILQTCPTPKELSEMPLEELCHLIEVSSHKRFRMAKARELQELACNSFGFAMAGDVFSTMIRLYAKHLDFLKQQVREMDRKIAEIMETLDTPITTITGIGPTLGAYILSEIGDISRFSSAAKLAAYAGIDPTMRQSGEYNGVRNRMSKRGSPYLRHAIWLAASSAVLHDPALKLYFQKKRDEGKPYMASVGHACRKMVSIIYAVMRDNKTYTPHIPNEISA

SEQ ID NO: 327383 - protein, 391 aa, unidentified
MILVGIDVAKDKHDCCIMTSEGEVLFKSFTIANNMDGFNQLYEKILFVTDNLDKVKIGLEATGHYSYNILGYLLDKGLTPFVINPLHTNLYRKSLSLRKTKTDKVDSRTIASMLMSDVSLKPYSDTLYHNEELKSLTRYRFDKVQQRARLKTSISRLVTILFPELEKLVPTLHMKSVYSLLYEFPSAKAISKTHLTKLTNLLYASSKGHYGKEKAISIREVAINSIGSYMPAKSLELRHTIKLIEELTSEIDEIEQEIKSIIDKLNSPILTIPGIGYSLGAQIIAEIGDFKNFDSPDKILAFAGLSPSTYQSGKLYSSNAKMEKRGSRYLRSALFNAAVCVCRLEPTFALYLAKKRAEGKHYYVALSHAIKKLVRLIFHLEKTGEHYVALT

SEQ ID NO: 327384 - protein, 412 aa, unidentified
MNAVGIDVSKGKSMVSVMRPLGEVVSKPFTVRHTGSELKELADCLKSLDGETRVIMEHTGRYYEPVAQFLHDAGLYVSAVNPKLIKDYGNNSLRKVKTDKADSKKIAKYGLDNWVELRQYASMDTIRYQLKTLNRQCNLYTKTKTMMKNNLIALLDQTYPGVNALFDSPVREDGTQKWVDFVAPFWHVDCVRGMSLTAFTERYRKWCKRHGYHFSSDKAAEIHAGAKEQIAVMPKDDLTKRLIRQAIDSLNAVSKTVEQLKAEMLKLSAQLPEYPVVMEMRGVGDSLGPQLMAEIGDVTRFARRSSITSFAGVDPGADQSGGHEAKSVPTSKSGPPELRKALFLVMDCLLKTMPQDDPVYQFMDKKRAEGKPYLVYMTAGANKFLRIYYGRVKEYLAKLEESSDPVSYQQYV

SEQ ID NO: 327385 - protein, 390 aa, unidentified
MALFVGIDVAKDKFDACGIGEEGEKIFSLAATMDRKGFEKLIVHFKGNHSLLLGLESTACYHITLFSYLTAKGYKVVIINPLLISNFVKLQLRKTKTDKKDALTIARFLMLRKEALENQTFSADLMEVRDLARRRERLTDQVTRLKGNMKRILSVTFPELEHITGVFTKSILQLLTRFPSADALRKTDVDTVAAIVVPRSWGRKSRAWVETLMATASSSVGLSSPAKELILKQDASLLLYVEEQIKETTKLLISVCNDRVNEDIEILTSIKGIGKTTAMNFLIEMGGDVNLFDNDKKLIAAAGLDPSTYQSGKYEGASRISKRGNKHLRRVIWLMAKSTVFSNALFRAYFYKRRREGLPYKKAVLATAHKLIRVMFSMLVHQQCFTEGGK

SEQ ID NO: 327386 - protein, 366 aa, unidentified
MTDIIASDHPPRRVIIGVDTHKHVHVAVALDTFGVRLDDRSFPAHSDGYAKLVEWADGVGRVEAFGIEGTGSYGAGLTSVVRRAGHRVIEVNRGDRRSRRANGKSDTLDAEAAARSVVAGTALAVPKTADGEVEMLRQVKIARDTAVKVRTSAMITLKQLVVNAPAELREQLEPLADKALLDRCAGLRPGAIADTMASAKHVLRAMAKRWLALHAEITEHDRILNDLTAQTAPSLRDGFGIGPDTAAELLIIFGDNPERVRSEAGFAKLCGACPIPASSGMTSGRHRLYRGGHRQANAALYRSVIVRMRFHQPTMDYVARRTADGLPKKEIIRCLKRNLAREVYQRVMTDVRARNGAEPARVLSTS

SEQ ID NO: 327387 - protein, 425 aa, unidentified
MRVKEITQAINLENVMDVCVDVHQERLYAVARVDGAEYEDDFRNRNEEIQRRLAEFKEVAAQHGRSSVRVVCEPTGCYDQKLLRTARRMGCLTAIVNVECVGKYRVIETNDANKTDIKDPRVIASLAGEGRTLKHRQLPEDYLVLRKLGVMYEDEDARLVQLRSLIHQVMAELFCDYHFECRFLYKISGKALVEKYSCNPYRIVKTGYKRFFKAMKSLSPRIRTATVERLWSQAQSSVLNEMPQAYIEILEIRFLQLWDDYWQCCQRKDGIAEQMIGIVDRLRERDPHIPEPTKGVITAKNLARLLAETGPLNDFQHWRQLLKYAGLNIRMRESGKYKGQNRISKKGRPLLRKILQQIVLPVISQDRLYAEFFKAKKKGGSVPGNKVITAIARQFLRKLFGWYQAGTAFDQERYFTCLSEYKKAA

SEQ ID NO: 327388 - protein, 350 aa, unidentified
MSYLGVDLHTNSFTVCRRTKQGKDSIRTFQIIRIADFCKTLRKRDLLAVEATGNTAWFVSQVRDRVKKVTVVNPFQFEVIRRSVKKTDKNDSRTLALYLSKDMLPEARMKTKENAQLHSLATTRDKLVKQRTALINKIHNVLNSYGIKFKKESLGSEKGLKSVWVYEWDVIVGIELEVLVEQIRSLNKSIKMLDKEMTDHGQKLKGHKSLTSIKGIAGRSATVLLTVIGDVNDFADENKLASYFGIVPRVSDSNETVRHGRITKHGSKLGRTTLVQCTLVAKRYSPYLRQYYERVKSHRGSGKAIIATARKFLGIIYNTLKNDWIFEDFPNFVLASSCVKNNKNWSRLLT

SEQ ID NO: 327389 - protein, 373 aa, unidentified
MPKYSTAFGMDVHLRSTTVCALDADTGEAVTRRFPGNPWGEIAGWMDGFPGPSLAAYESGYLGFAPQRELAGLGVECVVAAVSKIPRSAADSASKNDRNDAARMAKAILAHDISPVWVPSPEVEGIRDLAGAYDGATARLATAKQRLLAFLAKRGFVYGGTTPAGNPRKYWTYDFLRWLDKVRPEDDGGVRTLAALRNEVEAAAEARADLLSEYRAAVDASPIAAEVAALQSIKGCAFALAAAFSAEVGDFTRFRSGRQVTAYFGLAPSQRSSGDSVRLGGVSGAGNALVRKLAVEGSWCYAAARHQPKLMPRDTGVPLEIRMHGRKGSERLLRRREEMLARGMPAAKANAATAAELVRWLWALGMMCREGAE

SEQ ID NO: 327390 - protein, 309 aa, unidentified
MALASVMGIDVAKATLDVAVLDQPVRTVANDAAGIRALVHALAADAPTLIVLEATGGYETALVAALAVAGLPVAVVNPRRVRDFAKALGILAKTDRIDAQVLARFAADMRPTPRPLPDETHAELRALVARRTQLVDMRTAELNRLPGARPAVQRSVREHVTWLDRRIKDTDREIMRLIQASPVWRLRDQILQSTPGIGPQTSARLLVSLGELGDLTSKQLAALVGVAPFNRDSGRRAGPRTTWGGRAPVRTALYMATLVATRHNPVIKAFYQRLRAAGKPAKVALVAAMRKLLTILNAMIKQQRTWSPA

SEQ ID NO: 327391 - protein, 427 aa, unidentified
MPYHIAGIDVHKKMLAVAVADVEVEGDFHFERLKVGTSPVQLRALAEWLVEREVEEVVMESTAQYWRPVWEALERSWKPKRRMRTDANPVSGTLHLAQAQSNRAAGGRKRDFPDAERLVKRLGAQELTLSFVPDAEQRLWRTVMRRKHQITRNRVQLHNRLESLLEEAHIKISRVVSDLLGTSARRMLHAVGDGETDPAALAALADQRLRATPEQLRDVFGACADLHPVYRRLLKLTRDELRMIEDHLAHLDQQMAQLLAHHHAAVQRLAEVPGLGVDSAQQIIAEVGAGAATFPSAKQLASWMGACPGNEESAGVNYSHRCPRGNRQMRRVLNQAANAAVKAKGTIFAIVYRRLVPRLGHAQAIGAIAHRLCRLIWKILHQGIRYEERGPAVSAEAKKVRTRKMIRELRTLGYRVELLPAPSKNPA

SEQ ID NO: 327392 - protein, 391 aa, unidentified
MIYIGIDVAKDKHDCFITNSDSEVLFKAFTIFNNLDGFNDLYQKIESVMDDVTKVKVGLEATGHYSYNLLGYLIDKGLPTYVINPLHTNLYRKSLSLRQTKTDKVDARTIASMLMSDVNLKSYSDTSYHNEELKSLTRYRFDKVKERAKLKTSVSRLVCILFPELEKLVPTLHMASVYALLSEFPSAKHVATAHLTRLTNLLSESSKGRYCKDTAITFRDAARASIGSNMPAKSLELKHTIKLIQELDSEIDEIENEIKIIMDEINSPILSIPGINYRMGAMIIAEICDFNRFDSPDKILAYAGFSPSTYQSGQLDGAYAHMEKRGSRYLRYALYNATKYVCHWDPTFAAYLAKKRAEGKHYNVAISHAVKKLVRVIYHLEKTKQQYIKAA

SEQ ID NO: 327393 - protein, 377 aa, unidentified
MSRIRFIGLDVHADTIAVAVAEPDGEVRSLGTIPNRLESVRKLVARLGPATQLKACYEAGPCGYVLYWQLTALGVACEVVAPTLVPVKAGDRVKTDRRDAAKLARCYRAGDLTAVWVPDADHEALRDLVRAREDARQDQHRARHRLSKFLLRRGQRPPQDVKKGWTLKYMTWIKEQVHFDQPALEATLLDYVHEVDHMAARIERLEKAIGEAIQKAPPAMRAVVEALQALRGVAQITAVTVVAELGTVSRFDSPRQLMGYSGLVSSEFSSGNRIQRGSITKTGNAHLRRVIIESAWSYQYRPWIGGHLLKRQQGLDQEVKDIAWKAQWRLHTRYKKLAAAGKKKPQIVTAVGRELLGFIWAIAVKTEAKFQPQRKAA

SEQ ID NO: 327394 - protein, 383 aa, unidentified
MKKTKGTPRNEDNTKDKVLHLAFELGHSKWKLVSSDGGKMRSKGIAARNLEQVQEEIEAAKVRFKLRGDVRIVSCYEAGRDGFWLHRYLLSCGIENLVVDSSSIEVNRRKRRAKTDRIDGRKLLNMLMRYHAGERRHWSVVNVPSEEAEEARHLHREMEVLKVERNMHRNRIKSLLIQQGIAFSNPSSRKFLIELDSLRTWDGQELPKDFKTRIVREHERLRMVEEQIYLLNKERERRIKSGDKPSYRQVAQLMSLRGIGMQSSWKFVMEFFAWRNFKNRRQVGALSGLTPTPYDSGASRREQGISKAGNKRIRTLAVEIAWMWLRFQPQSKLSRWYMKRFAGGGSRMRRIGIVAMARRLLIDLWRYLQHGVIPEGAITAHAI

SEQ ID NO: 327395 - protein, 319 aa, unidentified
MGKEIYVGIDVSKGTLDVAVHGDKQHWSFANDEAGITKIVSKLKQLNPALVVLEATGGFEVALAADLGVAKIPTAVVNPRQIRDFAKSVGMLAKTDILDARIIARFAATVQPTPHPIPGIEAQELGAITARRRQIVNMITAEKNRLSTASKTVKPRIRAHINWLEKELNDVNRNLRQKVTDSSMWREKDELMQSVPGVGPNLSITILAELPELGTLNRKQIAALVGVAPLNRDSGTLRGKRTIWGGRATVRTALYMAALSAKRHNPVIRRFYERLLADGKAKKVALTACMHKLLTILNAMLKYHTSWNFGVTQILGPCH

SEQ ID NO: 327396 - protein, 310 aa, unidentified
MTQPYYVGLDVAKRQLDLATCPVSAPARFAHDEAGLSALVGHVQALAPALVVLEATGGYEADVAAALALAGLPVAVVNPRQVRDFAKAIGRLAKTDALDADVLARFAAHVRPEPRALPDAAQQDLTALVARRRQLVEMLTAERHRLALARDRVKRDVQTHIHFLEQRLKATNTDLRDCVQASPVWRAQDDLLQSVPGIGPTTAATLIADLPELGRLSRHQLAALVGVAPLNRDSGPRRGPRVTWGGRAVVRAPLYMATRVATRCNPVIRAFYQRLRAAGKPPKVALVAAMHKLLTILNAMVKAQRPWQPA

SEQ ID NO: 327397 - protein, 470 aa, unidentified
MSHRRLVGIDLGIATAHTVRVLDGEGMIVAKRKAWPTAESLTAVETAALAGCPEGTRLEVVIEPTGPAWLPVAVFFTARGHKVFRVSSQKAADLRRFLSRHAKSNGIDADTLARLPLFDPAGLAPLVLPGADRAALDRRVRATDRLTRQGADHKRRIKDLARQLLPLSPLTGELGAADLAVLERYANPHALLRLGPARLTAVITKASYGHQGAERARQWLDAARAALELYGGHPAVDLAGLAAEVATEIRLLRATSAELAIHAAQRETCYRAVDPAQLARSLPGLADVGGPALAACMGDPARFRTGKQFRSYTGLTPKASETGQTDRKGQPMSKAGSSLLRTTLVRAADNARRQDPQLARIYHQQMTERGKDHLGALCAAAASLAERAWTVMHRGTPYVICDTHGRPVTAAAAKAIIAERWTVPAEVRARRRSKKKGKAPQKVLQGQHARGDLPQHTTSPQHERPVKRRP

SEQ ID NO: 327398 - protein, 459 aa, unidentified
MESYLGIDVSKGYSDFALLDKNKRPLEEVFQLDDTRSGHSKLKELLQQFISAHKITELCCGIESTGGFENNWYSALIEMSKSMPVKVARLNPSGVKKNIEAGLKRNITDALSAGYIAEYLVSQAGKVVYSEQDTRYASFRDMQTCLTLQKKQNTQLINELKMLLYSSFPEMARFCKDSIPYWVLEMLVIYPVPACIVKLKPEQLARIRHITFEKAENIIQKAKTSIASRPDATREFIIKSLAGQILQKQGAIKGFKDFLAANCTGPEVDLLQTIKGVGAYSAASIMVEIEDIKRFPSPKHLVSYFGLHPELKDSGDKKKVAHISKKGRPAIRATLYMCAQTAVVYDPHLKQIYHKHRNKGKNHKQAIGVIMHKLLRVVWGMLTSNEPYDKQVDLKNQAKNIKTQTTKETTETNKKRRFLPHDQAAPISSQQNKKRKAHLESQVGNAERMRDHLNAPEQK

SEQ ID NO: 327399 - protein, 377 aa, unidentified
MAEITRALIARVGVDLAKTVIQVHAVDKAGRRVVSRALKRDQFLGWCTQLPSGCLVAMEACSGAHAWGRRLRAMGLDARLIAANFVSPYRMEGKSGKNDMTDAAAVCEAASRPTMRFVPIKTPEQQGVMALHRVREGLKEERTACINRIRGVLAEFDLVFGKSPKVLRAVLPDVVEDASNELSGRARLVVQRAFEHWRELDEHLRWCDRQIGEHVRSSVEARRAAKITGIGELGASALTASVSDFRQFKSGAQFGAWMGIVPRQNSSGGKIGLGRITKRGDDYLRTLLIQGAKSAVMSAAKRDDPTSRWLQALVERVGWQKACVAMANKNARILWAVMTREQAFEPGHVSDKPAAKCAKPAGGQAQDAVARPVASVA

SEQ ID NO: 327400 - protein, 366 aa, unidentified
MKKTSTILVNGNMIFKGHRLTIGLDLGDRWSFYCVLDEAGQVILEQKLPTTPEAMKQTFESIPRSLIALETGTHSPWVSRLLRELGHEALVAHAQKVQLISKSNRKDDRHDARTLARLARIDPELLGPVRHRSAKAQIHLTVIRARAELVSARTALVNAARGLAKSYGERLRKCGTQQVSRELAAALSVELREVIEPLLREIESLNERIKEYDARMEKIARESYPQVELLKQVKGVGTQIALTYILTLEDPHRFPKSREVGCFLGLRPGRRDSGESQPQMHISKEGDPYLRTMLVQGAHYILGPFGEDSDLRRWGLKLAARGGKSAKKRAVVAVARKLAVLLHRLWVSGEVYEPLHNSHQAMRAAA

SEQ ID NO: 327401 - protein, 341 aa, unidentified
MQAVTTIGLDIAKSVFQVHDATGNVVIRRQLKRRYVLAFFQKLAPCVVGIEACATSHHWSRELKALGHTVRLMPPAYVKPYVKRQKNDAADAEAICEAVTRTNMRFVETKTPEQQSCLMLHRTRHLFIRQQTAVINAIRAHLAEFGIAARVGRHGVKDLLHVVADSSDRRLPEVARACLAALGVQLRMLKAQVLAFDRRIMAWHRSNETSKRLDEIPGVGPALATALVASVADPKAFRSARHFSAWVGLVPKQHSSRGKDRLGSISKQGDRYLRSLFTAGVLAVIRYAKIHGTKHRPWLTALLARRPTKVAAIALANKIARMAWAMMAKGERYKEPAALAA

SEQ ID NO: 327402 - protein, 320 aa, unidentified
MSASSVVVGIDVAKAHVDVSVLGAKFDAQRFDNQAEALSALTAALMPLDVALVVMEATGGYETELACALQAAGLPVAVVNPRQARDFAKSMGRLAKTDTVDARMLAEFAAVLLRRDDLARFLRPLADPQQQWLAALVTRRRQLLAMLLSERQRLQITPKGLHPSIEAIVAAIKAQLDEIEGQMVGHVREHFDELDRLLQSASGIGPVASATLIAELPELGRLNRREIAALVGIAPMANDSGSSKGRRRIQGGRFDVRRVLYMAALTASRRNPVVKAFYERLIAAGKLPKVALVACMRKLLTTLNAMVRTNKPWDNSFHGA

SEQ ID NO: 327403 - protein, 369 aa, unidentified
MDDITYVGLDVHKATVCVAVAESGRGGEIRQVGVFENRPEILCKMAARLGKGGRRLSLCYEAGPCGYGLHRLLTGCGHSCIVVAPSLIPIKSGDRVKTDRRDAMMLAKLHRAGELTAIWIPDAAHEAIRDLVRARATAGQVLSKARQHLQGFLLRHDRIYRGVRAWTLAYRRWLTTVRFEHPAQQIVLQDYIHAVEDAEARRDRLTRQIEEMLPSWSMAPVVTALQAMRGVALVVAVTVVAEVGDFRRFANARQLMAYLGLVPSEHSSGSTIRRGGITKAGNALARRVLIEGAWTYRMTARVSRKLHDRLEPLSAAIRDIAWKAQVRLCARYRRLAAAGKPKVVVTTAIAREMVGFIWAIARIAQPALA

SEQ ID NO: 327404 - protein, 343 aa, unidentified
MQTIATIGLDIAKSVFQVHGVEATGQVVVRRQLKRRHVLEFFAKLPPCLIGIEACASSHYWARELQAVGHIVRLIPPAYVKPYVKRQKNDAADAEAICEAVTRPNMRFVPIKTLEQQGCLVLHRTRHLLVRQQTATINSIRAHLAEFGIVAPVGRRGVEHLLEVIADANDTRVPEVARACVATLGVQLRQLKAQILEFDRRILAWHRSSEASRRLNHIPGVGPLLATALVASIADPKVFRSGRDFSAWIGLVPKQNSSGGKDKLGNISKRGDRYLRTLFTAGALAVIRYAKIHGTKHRPWLVALLVRRPTKVAAIALANKLARIAWALMTKGSRYRQPAALRV

SEQ ID NO: 327405 - protein, 367 aa, unidentified
MTESKPSATVHVGLDVHAASIRLAAVSADELLDERTLPHDPEAVARALSCWPRVRCCYEAGPTGYGLARHLRARGIACDVVAPGLVPVRPGDRVKTDPRDARKLARLHAGGLLEAITVPSEQVEALRDLVRAREDARIDRMRDRHRMSKFLLRHGLRMPNKSWGATRRKWLGSLTFEYAHQQQAFQTYLHALDLVDRRIEALERDLDAAAKDGPWRELVARLRCLRGIDTLTALGLVGEIGTDWSRFQTAEQFMSYVGLVPSECSSGQSRRQGSITKAGNSHVRRLLVEAAWHQRQHPRVGAALAARQRGQDPLVLERAWRAQQRLHRRWSRMAARGKPHQKIVVATARELAGFVWAIATDQPIRST

SEQ ID NO: 327406 - protein, 402 aa, unidentified
MNAVGIDVSKGKSMVAIMRPFGEIVSAPFEIKHTASDIHSLVELINSVEGESRIVMEHTGRYYEALAHQLSEANLFVSAINPKLIKDFDNDSLRKVKSDKADAVKIARYALDKWQNLKQYNVMDELRNQLKTMNRQFGFYMKHKTAMKNNLIGILDQTYPGVNTYFDSPARSDGSQKWVDFASTYWHVDCVRKMSLNAFIVHYQNWCKRKKYNFSQSKAEEIYGKAKELVPVLPKDDITKLIIKQAVNQLNSASTTVESLRTLMNETASKLPEYPIVMAMKGVGASLGPQLMAEIGDVSRFTHKGAITAFAGVDPGVNESGSYEQKSVPTSKRGSSDLRKTLFQVMDVLIKTHPQDDPVYQFLDKKRAQGKPYYVYMTAGANKFLRIYYGRVKEYLSSLPES

SEQ ID NO: 327407 - protein, 369 aa, unidentified
MRQTVSSWVRETVGELGSPHHVPQEPEQLSGPPSPNHARKGQQGRRSLKERMYVGIDIAKATMDLCVYETGQRWTLPNDEEGIGQAISCLVPLKPALAVLEATGGFEAPLAGALAVARIPVAVVNPRQVRDFAKATGRLAKTDAIDAWVIAHFAASICPEPRYLEDAQSQELGAILARRRQVLEMVTAEKNRLGMARSQLVRQRIEAHISWLKEEIGDLDGKLRRSIEESPIWREKDNLLQSAKGVGPVLSVTLLAELPELGRLNRKEIAALAGVAPFNRDSGSMRGKRTIWGGRAAARAALYMGTLAAIRSNPAIRPFYQRLCAAGKAKKVAITACMRKLLTILNAMLRDGRKWHDPIPKPKIMLSPS

SEQ ID NO: 327408 - protein, 371 aa, unidentified
MKHNSIFIGMDVHKNSIDIAIAESGRTGQVRHYGKINGTLAALNKTVGKLVGKGDRPHFVYEAGPCGYQIYRHLTARGFDCAVVAPSMIPKQSGNRIKNDRRDSLMLARLHRAGELTAVYVPLAEDEAIRDLSRAREDAKSDEKRSKQRLLAFLLRSGHRYSGRSPWSQAHMRWLADIKMAHLSQQIVLQEYIDTINQCTLRLQRLTEQIRQLLPQWRLFPVVQALQSLRGVSLIVAVTTVAEIGDFKRFQNPEELMGFLGLVPSDKSSGEKIKHGSITKAGNSHVRRMLVEAAWAYRFRARLSRALLKRQEDLPQPICEIAWKAQLRLCARYRHFWAKGKVKPVIVTAIARELCGFIWAIAIKTDIPVAV

SEQ ID NO: 327409 - protein, 358 aa, unidentified
MTVVGIDVSKGKSMVAAMKPGGELVAAPYEVRHSDIELSRLALDVLCMEPDTRVVMEATGRYHEPVAALLHSEGIFVSILNPLLIKQSGAGSLRKVKSDPKDALKIAKYGLDNWSTLREYTPTEAIRQQLKLCERQCDLYSKNIVMLTNNLISLSDKTFPGVNELFSSPEKADGHLKWVDFYRTFWHCDCINRMSPDAFGERYKKWCKKKGYHFSADATNALYAASCGLYTTLPRDNNAKLLVTVAADQLIALRENQSKLEAEMLNLCKQLPEYETVMAMYGVGKSTGPHLMAELGDIRRFPHRSSIVAFAGVDPGVVGSGKMQLSSVATSKRGSPQLRKALFQTQKRGGLPVLRQKA

SEQ ID NO: 327410 - protein, 410 aa, unidentified
MLFIGDDWAEAHHDIEVEDDSGRVLARRRLPEGLAGITTLHELVAEHLDPTAEPDQVQLGIETERGPWVQALLAAGYGVFAINPLQVARYRERHSPSGAKSDAADAHLLAEIVRLDRAHHRRIAGDSEIAEHLKIATRAHQTMIWSRVRQVNTLRSLLREYYPAALAAFGTDLASRDALAVLTVAPSPELGRRLSQSRIETLLRRAGRQRNVSTTAVKIRAALRSEQLAARPGVIGAYTASASALLAVLTAMAARAEVLAGQVEQGFGQHPDAEIYRSQPGLGDILGARVLAEFGDDPGRYADAKARKNYSGMSPITKASGTKRVVLARFARNRRLGDALFLQAFAALNNSPGARTFYDRQRARGATHYQALRTLANRLVGILHGCLRTHTLYDEHLAWHTEPDKLSPAA

SEQ ID NO: 327411 - protein, 366 aa, unidentified
MQKISIMRRSGNRILKKRQLTIGLDLGDRFSSYCVLDEAGKILLEHKLPTTPEAMEQTFGRMARSRIAMETGTHSPWVSRLLTALGHEVIVAHAQNVRLIVKSRRKDDRLDARTLARLARVDPELLSPVQHRSAQAQLHLTEIRARAGLVSARTALVNAARGLVKSYGERLRKCGTQQVRREITSGLSAGLREALEPLLREVESLSERIQEYDRRIEKMATETYPETALLKQVKGVGNLIATTYVLTLEDPHRFRKSRDAGCFVGLQPGRRNSGESEPQMHISKEGDEYLRTLLVQGAHYILGPFGEDSDLRRWGQKLAARGGKNAKKRAVVAVARKLAVLLHRLWVSGEVYEPLRNNQKSMSTAA

SEQ ID NO: 327412 - protein, 346 aa, unidentified
MQNDTLVAVDIAKEVFEVGVSDCPGRVTLRKRLLRNRFAAFFTQRPQATVVMEACGTAHYWARRLEELGHVVVLLPPQYVRPYVVRNKTDRTDVDALLEASRNQQIRPVPIKTLTQQVIASLHRLRSGWLADRVRSINTLRGLLRELGFFIPEGRRHVLPEAWEIIHDHHRGLPDALRPGLAALCEEIASLSTRIEDVETQLEALARQIPTIARLRSVPGIGLLSATALYAFIGHPARFPSGRHLASFLGLTPREYSTGLRRRLGRISKRGDSYLRLLLIHGARSVLYHAKRMKDRDRLRSWALRLEQKVGHNKAAVALANKLSRITWAVWKHDRSFEPLPEPQAA

SEQ ID NO: 327413 - protein, 352 aa, unidentified
MTNINISGVIIGVDTHKSTHVAVAIDANGSRLAAFSAPATIKGYSALEDWASALGTITSFGIEGTGSYGAGLSRHLLAHGHKVIEVTRPNRQLRYQHGKSDSLDAEGAARSVLAGQATAKPKTQSGSVEMIRHLKIARDTAVKCRSQAMVTLKTLIINAPASLRDALDQISGKITLIRYIATFRPGAITSTIASAKTALRALAQRWLTLHEEIQSHDKALEQLVASRAPTLLASHGIATMTAAEMLILVGDDPTRIRSEAALAKLCGVCPIPASSGKTNRFRLNRGGNRQANAALYRVAIVRMRNHQPTLAYVSKRKKEGKSNREIIRCLKRYIAREIFTNLCRPEIPPATG

SEQ ID NO: 327414 - protein, 354 aa, unidentified
MQIHTIGIDLGKTVFHLVGLNLRGEVVVRRKCSRTQLLQFTANTQADLIGMEACAGAHFLGRALREQGHEVRIIPAQYVKPYVKTNKSDFIDAEAIGEAVARPTMRFVPIKTDDQLDMQSLHRVRERWVIRRTAVVNQIRGLLLERGITLRQGRRHLEAALPGILEDATTRLSGALRMLISQLKHELEELANFIGEADGVMERTSRENESCRRLLAVPGIGPVTATALIAAIGNGAAFRKGREFSAWVSMVPRESSTGGKQKLLGISKRGNPYLRKLFIQGARALMLRGTKQSPGLRTWIENIAMRKHHNVAAVALANKMARIAWVVLARGEAYRPFLLTESEPNLHSLQMKPA

SEQ ID NO: 327415 - protein, 317 aa, unidentified
MGREKPSVGIDVSKAVLDVSLHPGGKSWQVEHDPVGINALAQELVALEPAVVVVEATGGLETALAVALGAVGLPVTVVNPRQVRDFARATGRLAKTDKLDAQVLAQFGAAVQPPVRPLPDEARLELRALVTRRQQLLVMITAEKNRMRRTTPGVRQRIEVNIKWLQAQLKELDRDQGDFLRSSPLWREEAELLRSVPGVGPIVTATLIARLPELGSINGKEVAALVGVAPFNRDSGTLRGKRTVWGGRGPLRTALYMATLSATRHNPVLRDFYQRLCAAGKPKKVALTACLRKLLVILNSMIKHRRPWNPELYLRNS

SEQ ID NO: 327416 - protein, 316 aa, unidentified
MEAAACIGIDVSKASLEVAFGSGGVVRSVANASVALESLTAELLELKPELVVMEASGGYERLAAALMWEAGLKVVIANPRQVRQFCEGMGQHAKNDRLDAKMIALWAEHKRPEVRPLPDAQARELSELLARRRQLLEMLVAERQRLARVLSRPLRKELGVSSRSLERRLQKLEHEIAQRIGKSDLWQQTRQLLESVPGVSKVTSFRLIAELPELGTVDHRRLASLTGLAPFVRQSGKWRGQSIISGGRAAVRSALYMAAVSASRWNPALQPFYQRLLKRGAPRKKALIAVARKLLVILNAIVRDRTPWRSPCPAPL

SEQ ID NO: 327417 - protein, 423 aa, unidentified
MTRISRISETTLVIGADIAKHQHVARAFNYRGIEFGRRCLFQNDENGLLNLLAWTEAIKQEHGFTDVLLGVEPTGHYWFPLFHFLKQRGIEVVLVNPHHVRKSKELDDNLPTKNDIKDAKVVAKLVLDGRYTQPKLPEGVYADLRVLMNQRDRLCGDLHRVKGRIHNWLDRFFPEYRQVFKDWEGKASLVTLKQFPLPQDIVAAGEAAIVATWKQHDVKRAVGAKRAELLCRKARKSIGLTEGAAAARYELAMYLEQYAMLCSQIEQLMELVAQLVEQIPGAAHMMSIPCIGLITVAGFLAEVGDLSSYDHSRQIVRHAGLSLRENSSGLHKGKTTISKRGRYRLRALLFRAALTMVARNPEFRALHLYFTTRQDNPLKKKQSIIAICNKLIRVLFELGRKQKNHDAGKVLGPHRAAQLQAAA

SEQ ID NO: 327418 - protein, 423 aa, unidentified
MKYALVRVLPEVPPGGVCAGIDWASADHAVCVVDLAGRVRDRFTAVHDRAGIAGLIARLRENQAGEVAIERGDGVLVDALLAAGLTVVVIGSRQVKNLRSRYGSSGAKDDRFDAFVLADTLRTDRARLRPLVPDSPATLALRAAVRARRDLVAHRVSACNQLRAHLQVAFPGAVGLFSELDSPLSLAFLAAFPGQQAAARLDEQALAAWLATVPRRGNTAPAGVLAARLAAAPRGAAGADAAQAAVTAELAAATAGLAGRVRALEAEIAAQLAAHPDQHIFTSLPRAGTLRAARLLAETGDCRARYPDPWSLAGLAGVAPVTRRSGTYISHEFRWNVNRQLRDAICDFADGSRHASPWAATVYAAARDRGKDHPHAVRITARAWVLIIWRCWQDGTSYDPAKHRALQDILTRQAAAGTPQPHR

SEQ ID NO: 327419 - protein, 450 aa, unidentified
MMSFEDSAIRIMGDSLPERFCAWGTMKVNELMSKEHIEIAAFVGLDWADQKHVVTLQESGSDRRQRFTLDHTPEALQGWIQSLRDRFGGRPVAIAVEQKRGALIYALMHVEFLHLYPVNPVTVAKMREAFYPSGAKDDPSDADLLLDILMSHRRHLRVWTPDDALTRSIQLLTEDRRRVVDERTALTNQLTAALKTYFPQALDWFGDLHTARACAFLQRWPSLQQLKQASPSSIRKFYKAQRYRGDDKREQLLANIKNAQPLTQDSAVLLSGSMKVHTLVQQIPLLTEAIERYDQKIAALFDQHDDSTLFGSFPGAGSALAPRLLAAFGSNRDRFEFASDVQELSGIAPVTEKSGEGIWIHWRLACSKFLRQTFHEFAGCSIVQSDWARACYDQLRKRGKSHHAALRALAFKWIRIMFRCWKNRTPYDEAVYCNSLKLRRSPLAAELPAT

SEQ ID NO: 327420 - protein, 347 aa, unidentified
MFYSGIDLHKDNSFITTINDAGELVQQERVANVPEALLAYFARLGSEHQAVVESTSGWYWLNDLLEDHGIDLVLAHAKYLKAISYAKVKTDKVDSHTLATLLRMKLIPQAHKISRELRDIRDVMRGRLRFVQRRTRCIVSVHSIARKFNCDDLIAIEQQTIPDVLPEPYRLQMQLLYQHIALLHEHILTLEQSLHGVLIPNDDIQRLLWVPGIGKTTAFTIYLEIDGIERFSSDKHFVSYCRLVPGAHNSNRTLRQKSGSKDGNKYLRMAFSDCAVRAIQYYPEIRAFYTRMLRRTNERVARAIVAKELARIVYYILKNKSNYRGFKGQPISRVKALQWPRLASPYA

SEQ ID NO: 327421 - protein, 349 aa, unidentified
MRFYTKTHTHYCGIDLHAKTMYLCILDQSGQILLHQNLKSRPEDFLAATQPYRNDLVVAAECMFTWYWLADLCRKEGIEFVLGHALYMKAIHGGKAKNDKVDAFKIATLLRGGNLPQAYVYPPEMRATRDLLRRRLHLVRRRGNLLAHIQNSHHQYNLAPPQAKIAYKANREGVAEAFAEPDARKSMEVDFTLIEHYDALIRDLELHLERRARQHNPQDYHRLRSVPGIGKILALTILYEIHDIDRFDRVQDFLSYTRLVKCDHSSAGKKLGTGGAKIGNVHLKWAFSEAAALFLRNNPEGQKHLRRVAGRHGKAKALSILAAKLGRAVYFMLRQERAFDMRRFLARNN

SEQ ID NO: 327422 - protein, 318 aa, unidentified
MSKILIGVDIAKKKFDVASLNDGKYKHKTFTNDEHGYAAFIIWIAHLFINDKPMICMESTGAYSIPLADFMVNKGYPVSVINPAKINAFAKSELSRAKTDKADAKLIARYASIMQPPLWTPPPENIRKLQALVRRVEHLLEMIQMERNRLETAEVTVVDSINAVLATLETELDATRKVICEHISNDPDLKPRRDLLITIPGIADASIAHLLVVLSEHHGFVNAKQVVAFAGLAPALRQSGQWSGKTHIAKSGDPALRKALYMPALSAWQHNPAIREFCKRLKANGKNGKAIVCAAMRKLIHLSFAILKSGQPFDPSFA

SEQ ID NO: 327423 - protein, 411 aa, unidentified
MKRFAGIDIGSERHVVAVVDEHGAVLLKPTPFGEEAAGYRRLMELLGSPQGCLVAMEATGHYWRNLFAYLIAEGFTVALLNPVRTRRFAEEELERTKTDAVDALGIARFAAQKDPPASQLAEEGLDELREVVRLRERLLQDFGDRVRQLHRALDLSFPEFTRYVRSLDSELATTILTHYPTAAAFRTVSVKKLAGLRYDGRHRVGEELAHELLAAARISVGRHQSEPYRLRIRYACEDIVMLRRRLHQLKADIEQRLERHQVGKLLTTIEGIGPQTAACIIAELGDPARFGSVKALASYVGVIPRLRQSGKRRLSGRRMLPLGNTRLRRALWMPTLSAIRVNPWLRAYYLRLRGAGKRPKVALIAAMHKLLAAIFSVARRQQPFVASLVSPPATIVAGGAVVDPAAGLTAR

SEQ ID NO: 327424 - protein, 314 aa, unidentified
MILSLRYIGIDVSKYSLDIFDEAIGVAESIANAPRPIAEQLARWQCGNVFVVFEATGVYDRELASQLHQAGIRFARVNPARARDFARAGGRLAKTDAIDARVLAAFARTMTPSADPASEPTRKSLALLAKRRDQLVNMRAQEKNRRSESADDVSIESVTRLLDFLTNEIKAIELKIKTLINDTPQIAEQARLMRSAPGIGPVACMQLIAQMPELGRLGPKKLAALAGLAPFNADSGKYRGKRVISGGRKRVRDALYMAALNAVRRANSLKTFYQRLRDAGKPPKLALIAVARKLLTILNAMLRDYKIYQPACPT

SEQ ID NO: 327425 - protein, 343 aa, unidentified
MQVNTIGVDLAKNVFQVHGVDNAGKVVISRQLRRKQVIDFFSKIPPCLVGMEACGTAHHWAREVSKLGHTVRLMPPSYVKGYVKRSKNDAADAAAICEAVTRPSMRFVPIKSADQQALLMLHRTRDLLIRQRTQLINALRAHLAEFGLVAETGREGLAQLAAIITDESNREALPSAMKQALQAIVDQLAALELQTGALDRAIHAHHRANDMSCRLETVPGIGVIGATAIASTVTDPNGFKSGRDFAAWVGLVPRQHSTGGKERLGGISKQGDRYLRRLLVIGATAVVHHARRHPQKHPWIIRLLARKPAKLVAVAVANKMARIAWAIMAKGGYYRAPELAAAA

SEQ ID NO: 327426 - protein, 367 aa, unidentified
MDHTIYVGLDVHATSITAAIVHEHDQHAEVVELPSDLMKVRRLFRRLADKGPVRACYEASGAGFVLHRVLARDGFHCEVIAPSLIPRKPGDHRKTDRLDAIMLARLYRSGHLTAVHVPTEDHEALRRLLRLRTTYHRYCTATMHRISGILRNHGFVFTEGRSTWTKKHRHWLTALRQSLAGPLQTALAIELEHLQYLEAQQRALDSELERFAVSHQYRTQVEALCCLRGVKALSALTLLCEIDDIRRFTSPRALMAYFGLVPCEHSSGDREHRGPITKAGNIHVRRLLVEAAWNNRHRAGPELPLTRRRQGQPPAVVAIALKAQHRLYKKFWHLDQRKHRHIAITAVARELCGFVWAVLQQVQPGQY

SEQ ID NO: 327427 - protein, 339 aa, unidentified
MALYAGMDLHSRNTYVGILDHELKRVFQKRIKNELPLILSTLEPFREQLQGIVVESTYNWYWLVDGLMDVGYEGIHLANPCAVKQYEGLKYTDDRHDAFWLAHLFVLGILPEGYIYPKEERPVRDLLRKRGSLVRQRTAHIHSVRSLIERQTALRLSCKEIKKLEVRDVEEILGEESLILSARANVAAISFLTHHIRVIQKAVKNKVKLRKPFEYLRTVPGIGEVLALTIMLEVGDISRFPTVGQFASYARCVPTERISNGKSKGRGNRKNGNRYLSWAFVEASHFARRHNAKFGRYYQRKAAKTNKIIATKALCNKLARICYYIMRDQVPFREEAIFC

SEQ ID NO: 327428 - protein, 346 aa, unidentified
MNSVGIDLHRRRSHIAVIDEEGTEVLSRRITNDPATFLELLAEIDGESEIALEATYGWEWLADLLQGAGYELHLAHPLRTKAIASARVKTDSVDARTLAQLLRADLLPEAYVAPRELRDLRDLLRHRIALTQMRSALKNRVHAMLARHGVQHGHSDLFGRVGTAFLDELALREPPRRRLDSVLSLIADFDREIEAATREIDRRARRDERVEVLTQIRGVGPYTAMLVIAEVGDVARFASARKLCAWAGLTPTVRSSDGRARLGHITRQGSRPLRWAMVEAAQKAPLGGGPLRETFERIARRRGRKIAKVAVARKIATLCFYGLRDGEIRCLARPRRPSALKVMATS

SEQ ID NO: 327429 - protein, 345 aa, unidentified
MIIGCDFHPSWQQIAWLESETGETGERKLVHASGDARAFYEQLGAPAWIGMEATGNSQWFIELVQDLGHEIWIGDAAQIRASYVRKQKTDKRDAAHILKLVVEGRFPRLWTPNREQRDLRQLVLHRHKLVEIRSRVKNELQHLSLNKGMQRKAKLWSQAGQQLLRELPLKPWAACRREDLLGLLTLLNQQIGTLDQAVQQVADQHPQAKLLMTQPGVGPNTALAFVLTIGDVSRFPRSQQVASYVGLIPREESSGGRQKLGAISKQGNRLLRSLLVEAAQIAVRYDPGLRKQYLHRCHQKPKGVAKVAAARKLAVRLYWMLRTGKPYPEIVRIESSPRVALVGAS

SEQ ID NO: 327430 - protein, 426 aa, unidentified
MVQWKFKEQTMIKRNINNTNGNLDGDSHVQESARKASPKSKKRTGETQESRCCRSTQSSRAPAIELGAIWRRRWKVQWEGLTVGLDIGDRYSFYCVLNEQAEVHERGKCRTTEKDLRAVFSKFPAETRVALEASTQSGWISRLLEEIGLDVLVGQPRKMPQIYKSVKKNDRVDAEKLARQARLDPNEMGPIRHRSAEMQMDLAVIRSRDALVAVRTKLINTVRCLVKGTGERLPTCSAESFAKRVQGLIPEGAQAAVGPLVEMIGSMSLQIRHYDDQIERLAEKKYSQTKLLRQVKGVGPVTSLAFVLTLADPYRFEHSRDVGPYLGLVPRQDESGDSKPQLRITKAGDCYLRRLLVTSAQYVMGPFGPDCDLRRKGLELCARGGKNARKRAVVAIARRLAVLLHKLWVNGEVYEPVRDNGVVAVT

SEQ ID NO: 327431 - protein, 416 aa, unidentified
MKKGQNTRGYERYMALDIHREYILVGAWNEEKEWVLTPRRVSIEKFPEWAKKNIREGDIVVLETTTNVWVVYDIVVSLASRVLVANAAEVGEIAGARVKTDKEDIKRLLKLLVGGIVPEVWVPPMEVRELRAFVSYRHRLVKTSTMIRNRLQSLLHKHNLMLSEAGLLDQAWWEEQKNISPLEKMQIRQELVLLQEVEKLKAKVDQELERQSTGSMWGKQALQIMQLPGIGFVVAMTVLSAIGDISRFESAKQLVGYAGIGAGVHDSGKTHKEKKITKKGRRELRWAMVEAAWRAVRMSPFWKEEYEKHLKRMRKPNQVIVVIARKLLIAIWHVLSKEETDIHATEEDLAYKMLLLSWSLKEETRRGLTYKQFAKYALMKLGVETDITRFVRKKVPRRLAPREEVLARLTELGLSA

SEQ ID NO: 327432 - protein, 414 aa, unidentified
MSYRERERVARSGEVRVAQDVNARRVAVRSIAQMTCRELPGAGMGPTPDNMNNTIKVEWPSHEGTRSEFNPSKAVIKLGIDMHQEHYVVVAQEGGGNPKPAQRFRPGAFLGWAAKLRQKEGAEVHAVYEACGFGFGLQRQLAALGIACHVVCPQKLDERNKRVKTDGLDAKALCLKLDRFVEGNREALAVVRVPSEEEEQLRAVHRQREQLVKTRKRLEAQGRSLMVNHGIEPVQSWWKRRTFAVLVVPPWMKELLNNSQPLLLALEEKIRALTVQLQAAASPGQPRGLGLMTSVVIDREIGNWHRFVNRRQVGSYTGLCSGEYSSGQTRLQTCVTKHGNPRLRAALVELAWRLVRFQPEYKPVVKWRRVLAKGALATGAARKKAIVAVARQLAVDLWRIRTGRLNPEQLGLSI

SEQ ID NO: 327433 - protein, 345 aa, unidentified
MSKNTVIGIDLAKTSFAVIELGRGGDVKRRKTFRRDGLKRFLAKHEPATVALEACGSAHYWGRWLEAHGHEPVLLPPQHVKGYLRGQKNDYNDAQAIAEACLHGAIRPVAVKSIEQQDEQAFHAIRRSLKVESTRLVNQMRGLLAEYGLTVPKSVSAFRRRVPELLEDAENDLSARFRMLLNRQWRRLQALLEEQVWYDEQLQQQAKEDDTCRRLTGIPGVGPVVASAVKSWMGDGNQFRRGRDASAALGLVPKQYSTGGKQSLYGITKRGDAYLRSLVVHGARAVVRTAKNKQDALSQWALAVEARRGHNRAVVAVANKIIRMAWVVVARQENYRPAESQMAVA

SEQ ID NO: 327434 - protein, 343 aa, unidentified
MQIHSVGIDLGKTTFHLVALSAAGKVLLRKKFTQKQLIAFTANMQTNLIGMEACSGAHFLGRVLRDQGHDVKLIPAQFVKPFVKSNKNDFLDAEAIAEAVDRQNMRFVPIKTDDQLDLQGMHRVRDRLVARRTSGINQLRAFLLERGMVFAKTPFKLKQAMPEILENADANLTPRMRNLVSMLWSEWKDLEQQIVAMNGEVEQIASSDPACQRLRQIPGIGPLVATAIVAAIGNGAAFKKGREFSSWLGLVPRQHSTGGKARLFGISKRGNSYLRKLLVHGARSAVLIVKRERSPFGPWLDSLEQRAPVKVVITAAANKLARVAWAVLSSGEEYRAPTTATAA

SEQ ID NO: 327435 - protein, 339 aa, unidentified
MKLYVGSDLHGKSNLIGIIDGEGKKVYKKNLPNDPEVILGELSPFKSEIIGVVVESTYNWYWLVDLLMDHGYPVHLANPAAIQKYTGLKYADDEHDAFWLAEMLRLGILPEGYIYPKEDRPIRDLLRKRGHLVRLRTSLILSLQGIIARNCDVRLSVNKVKARRTDHVGPLLEGNEDLALAGRVSKESIDFLGENIRKVEGVVERRVELREPYRYLLSIPGVGKVLSLTVMLETGPISRFPKVGNYASYCRKIRSRWLTDGKLKGRGNSKNGNKYLAWAFSEAAEFARRYDEDARTFYNRKKQKTNFMVAHNALAHKLARAAYYVMRDQVPFNSAKLFG

SEQ ID NO: 327436 - protein, 405 aa, unidentified
MEVVYERCCGVDVHKKMIMTCLRTGKRREIREFGTSTKALREMATWLESASCQIVALESTGSYWKPIYNVLEALGLDVMVVNAQHMKAVPGRKTDAKDAEWIADLLQYGLLKASYIPHKEQRELREVSRYRKNLIQERAREINRLEKVLEGANIKLTSVLKKLTGTSARHLMEGALTDSITDESIEDMLYGSAKQKSSEILESMDGVLSPVQKKLVRAILDHIDDMTLRISDMDNIINREMQQYEEAIGALDEIPGIGPESAQTILAEIGLNMDRFPTAAHLASWAGLSPGNNENAGKRKSGKTCKSNKTLKTTLVQCATAAVRRKGTFFRAQYDRLTVRRGANRAKVAVAHSMIIAIWHMLKFHQSYKDLGGDYYNKFNTEHKIAAYLKKLLELGWQLPVPIAV

SEQ ID NO: 327437 - protein, 444 aa, unidentified
MSSNACQLKAEPDFVALVAIDWAVQKHVWSLQASTSQLRERGEIVHTPEAVEAWISGLRARFGEGPIAVAVEQSRGALVFLLSKYAGLHLYPIHPRTAAQFRAALFPSGAKDDPEDADLLLDLLLHHRERLRRLDPDTEQTRTLQMLVEERRKMVNEKTRQSNRLTAKLKLYFPQLLDWFDQVDSELVGALLQRWPTLEALQRRRPGTLRQFLHRHNCRSQERIQQRLEQIHQAIPATRDPAVIRSSVAAVRLLVQLIRSLREGIATLDEEIQQLTETQPDFALFDSFPGAGKVLVPRLIAALGSQRDRFSSAAEIQSFSGIAPVLERSGKSQWTHFRWACPKFVRQTFHEWAGHSIAWSAWARAYYEQLKAQGKNHHAAVRALAFKWIRILFRCWKDRTAYSEQLYQTSLQQRRRRNQHTAGTLLKTRCETCGGHPTLTLLPS

SEQ ID NO: 327438 - protein, 339 aa, unidentified
MKYVGVDLHKKTISVCVVGQAREVLVSRRLFCDDEEGIGRFFAGLGPFAVVVEATASYEWFVRLVEPLASRVVLAHPGKLRVIAESTRKSDKLDARVLAEFLALDMIPTAHRPTPRVRAHRSLVRHRQHLQQRITATKTQLRRILSDYNADRPDLFTRIGRLALAGMELTPTDRFRCDELSDLLDFLQLRLEQANQRLRQFAGEGTDPEQESRRLLRSIPGVGEVTSEVVLAELGDVRRFRSAKQAVAYAGLAPGQRESAGKRKDLAIEKKGSRLLRWVLVESAWQVVRYDARWRGVFEALAKRTGKKKAITAVARRLLSVMVALLKSGRPYAATVPTA

SEQ ID NO: 327439 - protein, 426 aa, unidentified
MKVMHERVAGIDVHKDMIKVGIRTPGHRAWARASEVLEYRTFFGVLLTMAADLRKRGVTHVVMEASGVYTEPVYYALAGQGFEQVAVINPAHARALKGHKTDARDCLRLAELFECGLLRGSYIPCQELKDLRDLTRYRAKTVQARTSEIQRLAKALESAGIKLDSVVSDLTGKSATLMIEGLIDGERRGQVLADLAIGRMRTAGKLADLSRALAGRFTEHHAGLCRLHLDRIALFDAAVGDLEARIAVRAAPYQRELDLLISIPGFGDAVAQAWLAEIGPAPHQYFASHEKLASWATLCPGNHVSAGKRKHGKTGDAGTYIKPMLVQAAWSAIKVKGRLQARYHRLVRRLGGPKNPAAVKKAILAIAHTLLKIAYQVLRSGKPYQDPGPDFYTQRESPDQRRAYLLRQLEKLSPGCTITITPVEAA

SEQ ID NO: 327440 - protein, 462 aa, unidentified
MKHTREKKHQEKHPERESLPLITPNAAGIDIGSSEHWVAVPEDRDENPVRSFGCFTADLHAMARWLKKCGVTTVAMESTGVYWIPVYQILEAYGFEVKLVNARHVKNVPGRKSDVSDCQWLQRLHTYGLLSASFRPENEICVLRSYWRHRDNLVRYASSHILHMQKALTEMNLQLHRVIADITGVTGMRIIRAIIAGERNREKLALMRTPGVKSTSEEIAKALEGDYREEHLFVLKQAVELYDFYHDQIDACDKEIEICLSRFDTKVDLESHPLPALKKGKKKSKNGPLADLRAHLYRMTGVDFTQIDGLDVLTVQTIVSETGLSPDAFPTMKHFTSWLALCPDNRITGGKVKSTRTKKAANRAAMAFRIAAQSLANSNTALGGFYRRIRARLGAPKAIIATAHKLARIFYTLWKTHKQYVDLGARHYEERYKDRIVRSMKKRLHDLGYMVTIEPTATAATL

SEQ ID NO: 327441 - protein, 343 aa, unidentified
MQTTTTVGLDIAKSVFQVHGIDADGNVVVRRQLKRRYVLTFFQKLPPCLVGIEACASSHYWSRELQALGHTVRLMPPAYVKPYVKRHKNDAADAEAICEAVTRRNMRFVPTKTPEQQSCLTLHRTRHLFIRQQTAIINSIRAHLAEFGIVAPVGRRGVERLLEVVADANETRLPEVARACVAALGTQLLALKAQILAFDRRIMAWHRSNETSKRLDAIPGVGPALATAVVASIGDPKAFRSGRDFSAWIGLVPKQNSSGGKDKLGSISKQGDRYLRSLFTAGALAVIRYAKLHGTKHRPWLTALLARRPTKVAAIALANKIARMAWAMMTKGERYKEPVALAA

SEQ ID NO: 327442 - protein, 344 aa, unidentified
MNIATIGIDLAKNVFQLHGVDGRGKVVLRRQIHRGQMRGLFVNLPPCLIGMEACASAHFWARTLESYGHTVRLIAPHFVKPYLKTHKTDATDAEAICEAVSRPNMRFVPIKSIEQQSALSLQRVRQGFVRARTAQACQIRGLLGEFGLVIPRGIANLKQVPKLLQVAGKELPAPFCRLIERLLAHLKELDRQTRELEEQIVDWHERSEPSRRLAKIPGIGPITASALVASISDVRSFKSGRELAAWVGLVPRQHSSGGKPTLLGISKRGDRYLRTLLVHGARSVIVRVLKRDDEKGGWLKRLLERRHVNVATVALAHKTVRTVWAMLAHDREYCPNYRSMPVAA

SEQ ID NO: 327443 - protein, 489 aa, unidentified
MVNVKTGLLTSSSYHELVYKMMYNGFLLFMERREDLLLPGLLNPYYSLSHAFPNHDKLIGSLNPCYDGGLVGEASALCFSQIMTGGVKNMNKTSFSGFLGIDISKDKFDAHCIDMNGEKQFYLSCSMDRTGFEKLVSCLESLSIPKESLLIGMESTACYHMNLFSFLLAGGYVAIIINPLLISNFVKMQLRKTKTDKKDASVIAQFLLMHVDTLAQRSISPHISDLRDLSRQRESLLSQMTALKCDMKRILTITFPELEKVTGVFTKSILKLLCRFPSAHAIVQADPAEITQLLIDHSMGKNSSKAAEIIIKAAHSSIGTTSPAREVILKQKAEVLIHLDGHLKELTAVMVELCRSGMGDDVDIMTSMRGIGEKTATNFLVEMGGDIRRFKDHKKLIATAGIDPAIYQSGKHYGQGRITKRGNRHLRRVIWLMTIRVIQFNECFRNYYKKRIQDGLPFKKAVLATAHKLLRVIFAMLTQKTFFSYEVKS

SEQ ID NO: 327444 - protein, 366 aa, unidentified
MKKISTVQVFGKEILKEQKLTIGVDLGDRWSFYCVLEEAGKIILEQKVPTTPEAMKQTFSRIPQSRIALETGTHSPWVSRLLTELGHEVIVAHAQKVQLITKSNRKDDRHDARTLARLARIDPELLGPIRHRSVQAQIHLTVIRARAELVSARTALVNAARGLVKSYGQRLPKCGTQQVGRELAAALSSELREVLEPLLKEIESLNEGIQEYDARMEKIAQEVYPEVSLLKQVKGVGTQIALTYVLTIEDPHRFLKSREVGCFLGLKPGRRNSGESEPQKRISKEGDRYLRTMMVQGAHYILGPFGADSDLRRWGLKLAERGGKNAKKRAVVAVARKLAVLLHRLWVSGEVYEPLRNSQKTMRAVA

SEQ ID NO: 327445 - protein, 391 aa, unidentified
MVCVGIDVAKDKHDCCILDSDGTVRADCFTIPNNMDGFKQLLQTIRDCTKKSDKIKVGLEATGHYSYNILGFLLDNGLPTYVINPLHTNLYRKSLSLRKTKTDRVDARTIATMLLSDVDLKSYTDIAYHNEDLKSLTRYRFDKVQERAKLKQSVSRLATILFPELEQLVSSIHGTSIYALLGEYPGAKQISEVHLTKLTNLLTTASKGRYGKEKAIQIREAARTSIGSVMPAKSLELKHTIKLIQELASEINEIEDSIQKIIDELNPPILSIPGMGVNSAAVILAEIGDFSNFSSPDKILAYAGCSPSTYQSGKLTNCYAHMEKRGSRYLRHALYNATKYVCYWNPVFAEYLAKKRAEGKHYNVALSHAMKKLVRLIYALQKSGKAYLAAA

SEQ ID NO: 327446 - protein, 460 aa, unidentified
MEADRCVPKSRVESRGPSEPLRIVHPEAAGIDIGSQKHYVAVRPDRDSEPVRCFGCLTPDLQAMAQWLQRCSVTTVAMESTGVYWIAVMQVLEESGLEVYLVDARQAKNMPGRKTDVKDCQWLQQLHTHGMLTRAFRPADAICVLRSYWRHRKDLVEMAAMQIQLMQKSLEQMNLQLHKVLSDITGVTGTQILKAIIHGQRDPVVLARMRHPLVASSEETIAKALTGDWRPEHLFTLRQAMELYEVYQQKIEACDQEIEKYMQSLEARGDPKDAPPEDLRKRRKNQVHFDLRGQLHRLTGADLTAIDGIDAMTAQSVVSESGIDMSRFATEKHYSSWLGLCPNHPITGGKVRRRRTRKVRNRAAAALRVAAQSLHKSKTALGAFYRRMRARLGPAKATTATAHKLAVLIYRTLKYGLKYVDQGQQAYERQYQQRTLQTLIKRAKQLGYAMVNLCSGEVVS

SEQ ID NO: 327447 - protein, 373 aa, unidentified
MNYTTVYVGMDVHKETFTLCCYTNEKEKAEYPQKVNGHYSKVLNYINAMRKHYGDDAVFVCGYEAGCLGFTLYHQLTEHNVDCIILAPTTMLKEQGKKKVKTDKRDAMLIARCLAHKDYSPVHIPTDIDEQVKEFIRMRDDHKLALKKIKQQIVAFCLRHDYRYTEGKSNWTEKHLQWLRSLEPDGVYAEILEEYLLTYEYLTSKLEMLESRIKELAELDEYKDSVQKLRCFIGIDTITALSLVVEVGDFHRFATAGHFMSYIGLTPGEDSSGENQERLGITKAGNRHLRKLLSESSQCFSRGKVGAKSVALKKRQQGNPPAVIEYADKANIRLRKRFYHLVINKGKHRNIAIIAVSRELAGFIWGMMTEQFV

SEQ ID NO: 327448 - protein, 347 aa, unidentified
MLADQVDHVIGVDTHRDEHVLAVVAAPTGAVVAQRSVAATSRGYAQAFQFVAEHAPAARVWAVEGAGHYGAGLARHLGDRGEAVLEAARGSRGERRLQGKVDKLDAIRAARTVLSTETLALPREGQRREAPRLLMVARRSAVDVRREALVQLRSVIVTAPDELREELRGLPVGRLLERCSRFRRSTSRTPDAQATAIVLRTLARRVRAATEEAAELQTEIIAHVRALAPRLLDEPGVDPIVAAQVIVSWSHEGRVRSEAVARLAGVAPIPASSGLTTRYRLSRGGDRQLNRALHPVILHRCLHDPAARDYIARRVAEGKTRRDATRLLKHYLARHLYRVLNQEPTMT

SEQ ID NO: 327449 - protein, 413 aa, unidentified
MGNRTAEVELHYERCCGLDVHKELIVACFRNGTKNTVMEFGATSKELQKLAEWLISVDCEMAVMESTGSYWKPVYNILELLGLDVMVSNAREVKNLPGRKTDVNDAEWMARLLAQGLLRPSFIPDRPQRELREVTRYRKSLIEERAREINRLGKMLEGANIKLTSVVDDVLGKTSRALLEAAIAGKPITGITIEGMLKGKIKGKAALLVDAMDGVLSKTQRLLIKAVLDHIDDMTRRISDLDDIIRGEMEKYDEAIRRLDTVPGIGPDSAQTILAEIGLDMSQFPTAGHLAVWAGVCPGNNISAGKRKGSSARKGNQTLKTTLVQCAQSATNTKGTFFKAQYDRLVVRRGKNRAKMAVAHSIIIAIWHMLKYESDFIELGGDYYTKFNPEKKINMYLKKLAELGWVPPVPAVA

SEQ ID NO: 327450 - protein, 356 aa, unidentified
MPVYIAVDFHARQQTISYLTTEDGEIHRLRLEHRPDDPRHENVRVFYSQFEGEVIVGLESGGYSRWFEDMLEDLGHEVWVGDAKQIRLLAVRKQKNDRLDANHILDLMTTKRFPRLVRRSRYSCEILRQMGYRHKLVKMRTMGKNSLRAIAMGHGLTVRSPLHSEKGRIRFESLNLSTMEAVQAAGLIDLIERLTKEIERVEEWLAEQAAEDQKVSLLRTQHGIGLLSSLAVVHTLEPVDRFASARQITAYVGMDPVENSSADRRHIGSISKAGSKLLRFLLGEAAQVAIKKDTELKNFFCRVQKRRNTPKAIVAVAHKLLIRSFIMLRDQIDADEFYRRGLEARSSRAARRRSRA

SEQ ID NO: 327451 - protein, 341 aa, unidentified
MTFYAALDVSLEKTAVCVMGREGSIVRELEVATCPEALACCLAKIAPAFELVGLEAGPMSEWLVRGLAKRGVAAVLMETRQVRAALSSMRTKSDRNDARGMAHLLRMGWFRPVHLKATDTREHRTRLAARDALVRRVRDLENSMRGLLRGYGLRVPLKTRGGWDRAIRGLIEGHLGLTGIFEPLLLARAALREQLAVLDKQVRETARTDPICKRLMTAPGVGAIVALTFRCAVDDPRRFTSSRSIGAFFGLTPRRYQSGETDRVGGISRAGDPAARAALFEAAHVIMTRVAKWSALKSWAVRVVQRRGAKRGKVALARKLAVVLHRMWVSETDFRYATKQA

SEQ ID NO: 327452 - protein, 351 aa, unidentified
MRTSQNTAETINTIGIDVGKNTFHLVGLDKRGAIVLQQKVTRHQLGRRLSNISRCLIGMETCSGTHFIARQLAALGHDVRLIPAQYVKPFLKGHKNDYRDAEAIVEAVQRPTMHFVSIKTPEQMDLLALHRVRSRLVRQRTGVANQIRGFLLERGITVRQGFMPLRKALPEILSSKSDALSPRMINLIGELIQDWRRLDERIASVSTEIEAMAKRDESCQRLMSVPGVGPIVSSAVVAAIGNGTGFKQGRDFAAWLGLIPKQESTGDRTILGKISKRGNKYVRTLFVQAAHVVLERRPRTARQGLWPWIEQASKRLHRNMLAIALANKLARIAWAVLARGHAYQPRIIANA

SEQ ID NO: 327453 - protein, 379 aa, unidentified
MQSIKTWAGIDVSAKTLAVCRWRDGNQNEQEFSNDAAGHRELLKWLGRQTRVCIEATGVYHLQLALMLRANGAEVMVVNPRVAKDFARAMSNRSKTDEVDAWTLLEYLRRMEFQAWEAPSGAVLELRELGRRLSELTRVSVEEKNRLHAKQVAAISAAVVTDVKQHIAQIGKRIKQIEKAAYEVVHHNDDLREQYGVLIAGRGIGKRSAILLLTELAVLDPTMTVRQLVAYAGLDPREYESGTSVHKPARISKIGNARLRAILYMNALSAIRHDRGARLFYARLVARGKKRMQAVVAVMRKLLHGIWIVLQRRVVFDNSVLFAASLAQAESSDSAVAANQPEPGQNHPKGRSEAEELRQQLESAPAEATRLRRKRSKAA

SEQ ID NO: 327454 - protein, 369 aa, unidentified
MKKHSKKANEKGRRSANQGQPEVTIGIDVGDQYSHFCILDGAGEIVKRGRVSSTQAGLEKEFGKIPSGRIALETGTHCHWMSEVLSQLGHEVIVADARELKSISGSRRKNDPRDAEQLARLARVDVRLLHPVMMRKRKTQQDRSVLRARDLLVASRTQLICAIRGMVKADGSRLADCSAESFPEQVGQSIPEGMRRALAPLLETLDVLNEKIRYYDELVTHIAEEEYPETCLLKQVPGVGPVTALYFRLVIEEAQRFQHSRDVGSYLGLVPKQQDSGESTPELRISKAGDEGARRLLVNCAHYVLGPFGPDTDVRRWGLRLAARGGKNAKKRAIVAVARKLAVLLHRLLVTGEVYEPLRNSQAAERAAA

SEQ ID NO: 327455 - protein, 392 aa, unidentified
MYIVGIDIGKNHHEASIVSPKGKQIGRSLRFATTHKGADSLMSFIFKNIGNSPCVFGMEATGHYWYPIYSFLKAKGYTIYVINPIQSDSLRKMYIRQTKNDSIDSFLIAEVIRFGQFGTTSMADENILAMRQLCRYRDSVISSRTEIKLRIGTIMEQIFPEYEKQFSSLWVSTSMGILEKYLTPENIENAPIDELFEIIKDKSHNRLTRAKAISIKEAAADTFGIKIAQDAFSFQLKQLIDRMNFLDKQIEALDCQILEYYEKFDCYLHTIPGIGMIAAATILAEIGDINRFKSSSALVAFAGIDPTVRQSGEFSSTHNHMSKRGSPYLRHAIFLAATTCSFHNSPLNAYYKKKRDQGKHHLTATGAVARKLTSVIYAVLWDSKPYEPKSFC

SEQ ID NO: 327456 - protein, 409 aa, unidentified
MQVVHEVCCGLDVHKKGVTACVLWASGRRRQTRAFGTFTRELLELGDWLRACGVTHVAMESTGVYWKPVWNLLEGLFEVLLVNAQHIKAVPGRKTDQKDSEWIADLLQHGLLRASFVPPTPIRELRDLTRYRASLAQEINRIANRIQKVLEDANIKLASVATDTLGASGRAMLEAMVKGEQDSQRLAEMAQGKLRNKIPELQEALQGRVSRHHRFLLRELLDHLYFVESKMQRVEQEVAERLGPFQSEVARLCTIPGVDRVTAWGLLAEIGLSMKQFPDAQHLASWAGLCPGSHESAGKRKSGKIRKGSLWLRRCLCQGAWAVSTKKNNYLSALYRRLAARRGSKRATIAVAHKLLVIAYHILRDGTCYSDLGADYFDRLNPEGLRRRLTKRLEGLGFKVTLEPLAQVA

SEQ ID NO: 327457 - protein, 368 aa, unidentified
MNKRTYVGLDVHARSVKGCAIDRETGEILRQSLAANDAGIAEWISGLPGPVRVVYEAGPTGFGLARLLAAAGVECLVAAPSKLQRPSGDRVKTDARDAEHLARLALLGQITPVRVPGPAQEAARDLVRAREDVRSDLMRARHRISKLLLRHGLVYSGGHAWTDAHHTWLHRQRFDDPALEAAYEAGLEMAELTLDRRNRLDAKITAMAATEPYAPVVRALMCLRGISVLTAFGLAVEIGDWTRFTGSTIGAYLGLVPSEHTSGASRSQGAITKTGNTHARRLLVEAAWHHRRPYNNASRDMRSRWDAADEASRVRGHQGNHRLHHKWEQFEARHKRRVIANVAVARELAGWCWSLAAAVQQEQPWTDE

SEQ ID NO: 327458 - protein, 344 aa, unidentified
MSIVKTVAVTGGVDTHADSHAAAALDGIGGLLGVSEFPVTPAGYAQLLGWLQSFGTVCLVGIEGTGSYGAGLARHICAAGIRVAGVDRSDRQDRRRAGKSDPLDAVSAARAALSGRASAAPRGRDGQVEAIRALMVAKRTARAQRTQTINQARALIITGPDDIRTRFTGQTPAELAAELAALRPRPGSMVRYHTLLSLRELGRRAQYLDGQRTRPDQLITPLVTARAPGLLSLFGVGPDTAAMLLIAAGDHPGRLCSEAAWAHLCAAAPIPASSGKVARHRLNRGGDRQANHALWRIVITRMGSHPPTRAYVARRSKEGLSKPEIIRCLKRYAARETYRHLRPS

SEQ ID NO: 327459 - protein, 339 aa, unidentified
MEHQQQYVGIDLHRRRSVIVRMNDAGEVLDISKIDNDPLALSMVIAEAGPDPEVALEACYGWYWAADLLQIDGARVHLVHPLGLHWDTRRVKNDVKDATELANRLRRNDLPEAWIAPPEVRDLRELVRYRAKLVAVRTSVKAQVHAVMAKLGIIPPLPDMFTTAGQQLLDEMAFPGNYGLRVESLRDRLELYERELALAEREIHRQLKDHTGYRTIQVLHGVGPISAAIYVAEIGDVSRFPTARHLCSWAGMTPKLHESDTKSHRGRITKQGSTIVRWAAIEAVARYHGGELIAPAYRRIAERRGPMIARVAAARKLLTLIYYGLRDGEIRCVAQQEAA

SEQ ID NO: 327460 - protein, 415 aa, unidentified
MSAVSPPLSISRYVALDIHRTYLVVGAVDAQQTVVLTPRRFGFAAFARWAQEHLTKDDAVVLEATSNAWQFHDQLKPLVGSVTVAHPLAVTLIASAQVKTDARDTIKLARLLAAHVVPTVWVPPPHVRELRGLVSHRKRLVQQRTQARNRLHGVLHRHNLTPPDGKIFGPEQRAWWKQLDLSAVEKLRVQHDLTLLDSLDPLVAEAEAELRRLSTTDAWVAHVPFLVQLPGVGVLTAMFLLSAIGNISRFPSAKQLVGYAGLGARVHDSGQTHRGGGITKEGRRDLRGAIVEAAWVAVKTHPHWKTQFERLSQRSGKPKAIVAIARKLLVAVWHGLTEQVADVHADDEAVARKLMVWMSRAGMGQRQRGRRVQLLRELLDRLELGADLLSVRFAGQSYQLPPSSTPAGAQRPDST

SEQ ID NO: 327461 - protein, 346 aa, unidentified
MNFYTQQHKFYCGIDLHARKMYVCILDEQGEIREHRNMDTDREVFLKTIAPFREDIVVAVECMFAWYWIADLCQKEGIAFVLGHALYMKAIHGGKAKNDKIDSKKIAVLLRGGMIPMSYVYPEKMRATRDLMRRRNHLMRKRAELLAHIQNTNSQYNLDESFGCIAVPSKRGDIVGSFDDPAVRKSMEVNPTVIETYDTMLADLERTILKLAQYHDPVSYALLQSVYGIGRIGALTILYEIEDIRRFPRVQDFVSYSRLVKCAHESNGKKYGTGGSKIGNAHLKWAFSEAAVLFLRGNEPAKKYYERLTRKHGKGKALSILAHKLGRAVYFILKNKEAFDQEKFLR

SEQ ID NO: 327462 - protein, 408 aa, unidentified
MAEQPLPAVFVGLDVGKSDHHAVAVTSTGKTVYDKALPNDETRLRAILEELAAEHGPVLMVVDQPATIGALPVAVAEATDQVEVAYLPGLAMRRIADLHPGTAKTDARDALIIAEAARTMPHTLRDIRVDEAQIAELAVLAGFDDDLAAQITATSNRLRGMLTQIHPALERVLGPRVTHPAVADLLTRYPTPAKLAAAGRGHVRARLKKHAPRLAEALTEEIFDALGQQSVVVAGTEAAATVVPILAGQLAALIHQRATVATQVEALVEAHPLSAVLTSMPGVGVRTAARILTEVVGKDFRDAGHLASYAGIAPVTRRSGTSIRGEHAAKGGNKRLKRALFLSAFASLNHPPSRAYYDRKRAQGKRHNQAVIALARRRTDVLFAMLRDGTLYQDPTEPRDPSPVALAA

SEQ ID NO: 327463 - protein, 350 aa, unidentified
MLIIGCDFHSRFQQVAMVDTETGELIERRLEHGKGEAKKFYAELHPPVRVGMEATGYAQWFERMLAGLGHELWVGDAAEIRAAMVRKQKTDSRDALHILDLLLANRFPRIWIPSPAERDLRQLLRHRHKMVCLRTSLRNQLHALAMGQGVYWKRKLWTAGGRTELDALGLDPWASRRRRELLAILDQLDPSLAELDRAVGKEAEQRPAARCLMEQPGVGPVTALMFVLTIGPVERFRTSKQVVSYLGLNPRESSSGGRQRLGSISKQGNSMARFLLVEAAQTASRNDEELRRDYQRLKFRRGTAVAKVAIARKLAVRLYWKLRKHSSTVPPARMQGSSEHPVVGESLSSN

SEQ ID NO: 327464 - protein, 395 aa, unidentified
MEFLKYGLGIDMAMEKFDACVSIIDKQQHVMIRAQCSFNNNKKGFEAFILWVTKNTKLAIPAVYLMEATGIYYEQLAWFLHNKNCSVSVVLPNKAKKYKEALGLKSKNDRIDAKGLAQMACEQNNTTWKPLTSNIYLLRLITRQIQNVSDQSTVLNNQLHALEYGMYRDKDIEKMYARQLDLLQKNKKSLQLRVEQIVESDEILKKKFKNIGKIKGLGLQNLAVIVAETNGFTAFENIAQLVSYAGYDVVENQSGKRSGKTKISKKGNNHIRRCLHFPAFNMIKYEVVPFKNLYERVYANNKIKMKAYTAVQKKLLEFIFVLWKKDEAFDPNYQDKKSRDVEPVPSFASVPQEPSTAYDNKEKELKLTGQKITPAITRVTQDKHPSKYRRMPSFA

SEQ ID NO: 327465 - protein, 379 aa, unidentified
MRKHTTVKKIQQALTKTKKKRIREMAANKRLTIGLDLGDRTICYCILDEAGEVVNEGQLPTTRTGLNSLFEKMPSSRVALEVGTHSQWVSRQIAGLGHEVIVANPHKVKLITQSVRKNDRIDAQKLARLARVDPELLSPIRHRGAEAQADLAVIRARAALVESRTGLINCARGLVKPLGERLRKCDADQVEEALAAPLSEQAKVVIGPLLASVEAISEQIRGYEEKIEEIAKRYPEMVLLKQVYGVGTVIALTYLLTLEDAERFQHSRDVGAFLGMQPRQRDSGDSQPQLGISKTGDRLLRSYLVQAAHCNLRKGAPDSDLRAWGLSKLGAGGKRAKRRALVAMARKLAVLLHRLWVTGEVYDPLYNHKREQAAQAAAA

SEQ ID NO: 327466 - protein, 391 aa, unidentified
MALYFVGIDISKYKHDCCIISATSQQIVSRFSFRNDHDGFDLLADSLHSIADPQDIRIGFESTAHYALNLELFLENAHHSFMEVNPALIAQYKKSTTLRRTKTDSVDCELIAKWLMTVEYKPHPIGFYHSYSLKSLTRLRDRLVRQRSLYLVKLTNVLDHTFPEFKPFFGNRFGKTALYLLEHFGSAPKMARMNSISYDNLRRISRGKFSPQRFFELKELAANTVGVSNSIFDVELNCLLDLLRNISDNIAELERQIFELIEEIHPHFMSIPGIGPISAAVIYAEYGDISNFSSPAQMLAFAGLEPSVNDSGTESHGGRMVKRGSSQLRYALLNCCFPLIQYDMTFAQYYAKKRREGKPHRVALTHVAKKLVRVIFALERGEMDYDPKAIH

SEQ ID NO: 327467 - protein, 388 aa, unidentified
MEARLVDTTSTARHDALARCLIAIELSKASWVVGVQTPLNNRTSQYRLTAGDWESLLKLIERIRRQVDRELGRPVEMISCYEAGYDGFWLHRLLEAHGVRNYVLDPASLLVNRRARRAKTDRIDVERMLRALGRYLRGEPDACSVVRVPSVEEEDARRLHRERHRLIQERVQHVNRIKGLCATQGIYDYEPLRSDRKVQLDGLRTGDRRTLPARLKAEIIRELQRLEQVLKMIAEIEAERDAIVTEVAPSHPNADKIKALAALRSIGAEFATKLVGEVFYRSFDNRRQLGSYVGVAPSPFSSGATDRDQGISKAGNPTARSTAIELGWMWLRYQPDSALSIWFRHRVGDRKGRVRRIAIVALARKLLVALWRYLETGLVPAGAVFKTR

SEQ ID NO: 327468 - protein, 424 aa, unidentified
MNLTQNERLKQVTSDTLIVGVDVGSQTHFCRAFDWRGFELSRRVFKFSNTGMGFLTFLRWTEELMNKTEMKKVIVGCEPTGCYWLTFQKFLQEHGVQLVTVNPFTVNRSMELDDNSPEKSDLKDPKTIALLVKDGRYSTSYLPSGVYAEIREASVCRDQIMKQHVRLSNQIQGWLQKYFPEYFECYADWDSSSGLMLLKEAPLPRDILKLGAGGINQIWRNGKVRAAGIKRAQALLEAAQNSVGLEGGEAARLEIWVLVNDYILKEEQLKRLDGYLEEKVKEVPNVEKLLAIKGVGLSTVIGFVAEVGDIGRFTDPKQIQKLAGLEIVKKSSGKKKGQPRISKRGRRKLRRTMYESARALINWNPAFQDVFLYYRNRGKNPLGGMQAKIAVACKAIRIFYVVLKTGCEFDEERFRRDIIRPEAA

SEQ ID NO: 327469 - protein, 340 aa, unidentified
MEKRYIGIDLHRNRFTCCIRLENERTYVTEWELEDLGKFVRKLRPTDEIAVEITSNTRLFYDAVGPHVARVVVVNTNQFKVICQSVKKTDPHDARALALYLSKNMLPEVRMKDKEHGQLASLTQTRDTLVKLRTALKNKINNILSARGLNLAKEALSSEKKLDEVLSLPFDEIVRIELRVIVEQIRSLNKSIAELETTIGEEGSKLEGHKGLSSIKGIGKITGAILLSVIGDVNDFADEGRLASYFGIVPRVSNSNETERSGCIHKRGTKLGRTALVQSALIAANYSPYLKRFYEQVKARRGAGKAIIALARKFLGIIYRTLKNKWVFEDFPNFVLAEAS

SEQ ID NO: 327470 - protein, 350 aa, unidentified
MKKIVKQVLGIDVAKNELVVCLGRMFDDWTPELYGYKTFANSAKGFATLILWVKKNTDEAMPVRFTMEATGVYHESFAYFLNDNGYEVSIVLPNKISNYVRTLEIKTITDKTASEAIARFGLERKLDLWQKPRNIFKKLRQITRERGQIVEERTTVKNQLHAEQVEAEPNKSSVKRIQERIKMLNKQEKEIRTEIAALIKEDKEIATLVLLICSIPGIGLLTAATILAETNGFELIRNKRQLTSYAGFDIIEKQSGISVKGKTRISKRGNKYLRKVMHLPALVAIKHDERFKAIFVRTVSKHGIKMKAAVAVQRKLLEMTFTIFKSQSKYDKNYLKTIEEQTIETIQDAA

SEQ ID NO: 327471 - protein, 318 aa, unidentified
MSKSTLMSAGIDTGKYKLDAAIDGRPDRLQLNNEQPGHASLAAWLQKHGVERVAIEASGGYERPVVAYLRAQGFNVILFQPKQVRAYAMFRLQRAKNDTIDAALIAACTAAVKTLHAPPDPRFAALAERLTFIEQIEEDIARSKTRREGFQTAELKAEVEAEISRLKKRRTLELKLLAKSLRASADLAKRLDLLVSVPGIGERTALALLIRMPELGTLSREQAAALAGLAPFDDDSGNRKGSRHIEGGRPRLRKSLYAAALPAAFKWNKALVDLYGRLKAAGKPHKLALVACARKLLIFANTVLARGSKWTDDLPARN

SEQ ID NO: 327472 - protein, 339 aa, unidentified
MKYTPVGVDIAKHVIQIHFINEHTGEVVDKQLRRQDFLTFFGNREPCLIGMEACGGSQHWARELTKLGHKVRLLQARFVKAFVMGNKNDVMDARAIWMAVQQPGKEIAVKTEEQQSVLVLHRTRMQLVKFRTAQINALHGTLLEFGETIHKGRAAMEREFPEALERMKERLPPYLIMVLENQYNRLNELDLLIEDIEKQLTSVARQNETCKRLLDIPGVGPLIATAAVATMGEASAFKSGREFAAYVGLVPKQTGSGGKVRLLGISKRGDTYLRTLFIHGARAVALVAKEPGPWITELKKRRPASVAIVAMANKLARTVWAITAHDRKYDRNHVSIRPY

SEQ ID NO: 327473 - protein, 359 aa, unidentified
MSSISPPGPLSKIIIGVDTHKHVHVAVVLDDDGQRLGDLRVPVDSIGYQELDSWAQSFGRIIAYGIEGTGSYGANLTSYLRRQGRKVVEVNRGDRRARRANGKSDTLDAELAARSVIAGTSTAVPKSADGTVEMIRKIKVARDIACKNRTSAIISLKTVIVNTPQELKEQLDSLGDKALIQRCSGFRPGTVDDPISAAKHTLRALARRWEFLNAEVKDHDAVITKLTTSLSPTLCDGFGIGPDTAAEILIVFGDNPDRVRSEAAFAKLCGVAPIPASSGMTTRHRLAWNGHRQANAALYRTAIVRMQHHQPTKDYVAKRTAEGLSKRDIIRCLKRFIAREVYGRVMTDFRARTALSAAA

SEQ ID NO: 327474 - protein, 355 aa, unidentified
MSGEKYIGLDVHQATISVAVVDSRGKVVMESILETKASTLLEFFSGLRGSLFVTFEEGTWAAWLYDLLKPHVSEVLVCNPRKIPLLKQGNKSDKIDARKLAERLRLHDLKPVYHGETGIRMLRELARSYLTVVKDLSRVMNRLKALYRSWAIPCAGRDVYYTRHRNQWLEKIPEAGTRRRAEQLYQQLDMLQHLRQQARRELLAESRKHAITAKLRQIPSLGPIRSALAVALIQTPHRFRSKRQLWTYSGLGLETRDSGEYHYVRGQVRRRKKQATIRGLNKDYNHDLKGLFKGAATRASVQPGPFQEFYQRSLAKGIKPTMVRLTLARKIAAITLTLWKKGEDFDIKKLNSQAA

SEQ ID NO: 327475 - protein, 389 aa, unidentified
MKIFVGIDIAKLNHFAAAISSDGEILIEPFKFTNDADGFQLLVSKLESFDKNSIIIGLESTAHYGDNLVRYLVAEFYQVCVLNPIKTCQMRKNNVRKTKTDKVDTFVIAKTLMMQDVLRFITFFDLDMMDLKALGRFRQKTIKQRTRLKIQLTTYVDQVFPEIQYFFKSGLHQNAVYALLKEAPSPKEIASMHMTHLANLLKVNSHGHFTKEQAKELRVLAQKSVGANDSAISIQITQTIQQIELLDSQLEKIEAEMTDIMKFNDSVIMTIPGIGYINGGMILGEIGDIHRFSNPNKLLAFAGLDPSVYQSGNFQAKTTRMSKRGSRVLRYALVNAAWNVVRNNATFKAYYDAKRAEGRSHYNALGHCAGKLVRVIWKMLTDKVEFNLE

SEQ ID NO: 327476 - protein, 379 aa, unidentified
MRTVCGLDVHKDSIFVCILNENGILFQDKIGVLTPDLERLVDTLHEHGAAEVCMESTSIYWMPVWRILEPYFSLKLVNPYFIKQLPGKKSDIKDAEWIATCLLKDLILGSYVPEDRIQQLRQYDRRIFDLNKDIVYKLTKLDAALQRCNIRISNYVSTTDGKSYHKVVEKIAGGTTDPKVLADLIHGRIMNRVGKDVITASLTGVITQTDIDVIRQIRDEVTLAQKHRKECLDNMEELCNKWFPDQMKNLQTVPGVSLRSATSIIAELGTDMSSFEDAAHLVSWSGLKPRNDESAGKIKSRKITHGNKFLRKTLIECTWAAAKTRGCFYNTFSYHQTVVRRKNKMKVQVAIARKMLTAIWFILHDNVPYRDYTPDIVAE

SEQ ID NO: 327477 - protein, 407 aa, unidentified
MFVGIDVAKDSLVACAMDDQGEDIFHSYSVENNRPGCLKLINLIADNANLLQPDIIKIGMEATNVFWEHCYRLIKNHEQLNSNFKLQLYTVNPKVVSNFKKAYTDLPKNDNVDAWVIADRIRFGRVENSSSPEALYRALRQITRHKFKLAQHIKAEKARALNLVFLKFSDFTKKSPFGTFTKASMALLENYTLREIVNTDIHELAEFLHQNSNNRLGGSTPIEKIITALKKAARNSYRLKPEIDQAITQTLSMTFDNIRFYQSQNKRLKRVLKRQLKAIPQTLITVDGIGPVLTAGIISEIGDINRFDKETNLASYAGLTWTEHQSGSFTAEETHLTKKGNKYLRYYLVEAANSLRVHNDRYKSYYYKKYNEVPKHKHKRALVLTARKFVRLVFALLSKGEIYQPRR

SEQ ID NO: 327478 - protein, 405 aa, unidentified
MEIFVGIDWAEAHHDICVLDEPGTVLAKRRIAEGLEGVGQLHTLLADQAVEPSQVVIGIETDRGLLVGALLAAGYQVYAINPLAASRYRERHVTSGAKSDPGDAKVLADLVRTDRHNHRPVAGDSELAASLQVLARAHQNLIWSRQRLVNQLRNNLREYYPAALAAFGTELAHPIALGVLEAAPTPAMGRTLSQSKLAAILRRAGRERGVEAKAAAIQAQLRAPQLAAPALVGEAYGKTVASTVRILRGVNAELASLEAELAPSFEKHPDAEIYRSLPGLGIVLGARVLSEFGDDRTRFAHPKARKNYAGSSPITKASGTRRVVLARMARNRRLADACHQWAFCALTSSAGARGYYRVLRQRGKTHHQALRALANRLVGILHGCLDHHQTYREEIAWPGLLTVAA

SEQ ID NO: 327479 - protein, 352 aa, unidentified
MNYVGIDWAYGRAAWCAKTESGEIKGEGLIPADEDGLARLVLELGTEVKGCVEMMSGAVWVRDQLELAGWQMEVAHARKVRDVAPLACKTDKVDARVLAELCRRDLVPALWVPSEEDRAIRELLRRRAHLIKSRTSHRNRIFGLLTQFGLRISLKRLREPDASELLTRRGVPAVWRVSIASHLEEIDHLDRLVASIDREIGPIASADPRAKLLATIPGVGPLIGLTFASEIGDVSRFSAPSKLVGYAGLAPRVSQSGERSATGRLSKAGSRTLRWAAVEAANQAWRSSNPFHEHYLRVAARHGKNPAKSAVARKLLITSWHMLSRGQVFQPRRPSGAENTTAAASSLRFLAA

SEQ ID NO: 327480 - protein, 369 aa, unidentified
MKKQTKTNPSVVLTSTAAVVSGFTIGLDLGDRSHYVCVLDATGQIIHEGPMLNDRAALALLLTQYPAATVALEAGTHSPWISRYLTGLGATVIVANPRKLHAISLNERKCDRRDAVMLARLARADAALLHPLQHGSAQAQHDLLGLKLRDSLVRTRVNLINTVRFTLKSLGHGVSNPSSEAFHKSILTEVPADCLPVVAPVLAVLTLLTEQIKTLERDLVARSKKEYPVTQRLQQIAGVGPLTALCFVLKIGEPTRFGRSRDVGPYLGLCPRRDQSGGTDKQLRISKCGDGLLRRLLVSAAHYILGPFGPACALRAYGQHLVGTSAREKKRAVVAVARKLAVLLLSLWKHGTDYEPRVPAAPALVLTPA

SEQ ID NO: 327481 - protein, 434 aa, unidentified
MEEVTDEPLYRDRVCGIDIGKAELYATIRVPSDKDPARRMSETRCFPATRRGVLALADWLRCWQVPALVMEATSDYWKGPFYRLEAEGFECVLADARQVKNLPGRPKRDPSDSSWLAQCFERGSVRPCFVADPEFRIIRLHTRYRRDLTEDRTREKNRAEKLLESAAIKLSSVVTDLHGVTGRDIMDHLIAGERNPKVLAQLARGRARRKISDLEQALDGAEFFTPEHAALLQTMLARIDQINAKISELDAVIEQLLAPWEEQLQQAESMPGWGRRSAQDVLAETGPDMTRFATGGHLASWGGRIPLDKQSGKRHGQGRHKKGNKYIGAATGETAVAAGKTQTREGARYRKLARTRGKNKACVALGNTQLKVYHKLLSSPGMRYQDLGPDYYENRAATRRKIDYHVREIEALGLEVTLCRKPGPTGPGEDQAAA

SEQ ID NO: 327482 - protein, 338 aa, unidentified
MALYCGIDLHSRDCWMAILDDGLKVVREAKVGNNLEAILEILEPYREDLAGIAVESTFNWYWLVDGLDECGYQMHLVNTWAVKQWEGLKYSDDRHDARWLAHLLALQILPEGYIYPKQERSARDLLRRRAFLVRKRTSFLLAMRGAFECRTGLRTTSREVKQWTVEEVEAYLEDPAEALGITCLLEPMKTLDGQITIIEKEALTRARLRDEFAPLQTVWGIGKILALTMMYEVGEISRFKKVGNFASYCRLVKTARLSAGKRKGSGNARNGNPYLSWAFSEAAHFAVRYHPEAKKYFQRKRSKTNGIIAIRALAHKLARASYYVMKDQVDFDSERVFG

SEQ ID NO: 327483 - protein, 345 aa, unidentified
MSEPYDGRQIVGLDLHRNRTVMVRTTEQGERLEAVRFTNDREMLAGQIAKAGPDPRVVVEATYGWYWAVDVLLASGAEVHLAHPLGVKGFAYRRVKNDVRDAADLADLLRMNRLPEAWIAPPAVRELRELVRHRHKLVHMASSVKAQVHAVLGKNGIAVTVSDLFGVAGSKQLRTTKLPEVFRARIDSQLRVLGALEAEVDRFDKMIHKQLREDRGYRLIQRIDGVGPVLAAVFVAELGDVSRFVDATRVCSWTGLTPRHRESDTTVHRGSITKQGSRLVRWAAIEAVQHTPKNSPLRATYERIVERRGAKAKNIAKVAVARKLLTLVYYGLRDGEIRCLDQHAA

SEQ ID NO: 327484 - protein, 387 aa, unidentified
MESVTSSTAVATAVRANDITLFASLELSKSKWVVTINSPGSEKFSKHIVEGGDGAGLLDLLCRWRAKAEQRYRVPVKAVVIQEAGLDGFWIHRLLLAEGIESHVVDAASIAAPRRHRRVKTDAIDGETLLRTLMAWARGERRVCSMVRAPSPEDEDRRRLTRERGTLLKERIQHTNRIKGLLGGQGVRDYNPLRRDRFERLEALRTGDGRELPAMLKAEIRRELDRIVLVTAQLDAVERARDALIRTDAEERINPAALLLKLKGLGPEFASLLWLESLFRNFDNRRQVAAYGGLAPSPWQSGGVERDQGISKSGNRRLRKTMIELAWFWLRHQPDSALSRWFRARVGGAKGRIRRIAIVALARKLLVALWRYVTQGVVPEGVVFKAA

SEQ ID NO: 327485 - protein, 349 aa, unidentified
MYIGVDTHKTQHVLVALDAQGRSLGARSCANTPEGWAHGLAWARSWEGRVWGIENSGSLGKGFAQSLLVQGEGTVHEVSPHRTAQYRRRGRTQDKTDETDALAIARLLLAEGDTLPLVQRDDLSTELRLLSDHRDNLLAEKTRLINQLHGQMLQVDPLYKEKSGRLTAARGVAYCRGLALPQDDRLVRTRLLIVHQLAEQILRLDTEVAEITAELAARVQESQTPILALRGVGTVVAARIVGEIGVVPRLPSAAALAALAGVSPVAVSSGGRGGYRLNRGGNRQLNRAIHIIALTQRRCDPRGQAYYLKKRAEGKTPRAALRCLKRRLVDVLFRAFRSREAVLTRCAAA

SEQ ID NO: 327486 - protein, 367 aa, unidentified
MKKVSTVAAKASRNCSQPTLTIGLDLGDRNSWYCVVDEAGQIQLEQRVRTTAKALREVFGTMPRSRMALEIGTHSPWISRLLNELGHEVMVANARKVRLIGESRKKDDRLDAQTLARLARIDPKLLYPVKHRSAQAQADLAVIRARAGLVRARTGLVNRARGLAKSYGEPLRGCNVRNMNPEKAESLSAELQVALEPLLNAIEGLSERIQEYNERIERLAAESYPQVELLKQIKGVGTLIALTFLLTLEDPHRFGKSRDVGGYLGLQPGRRNSGQSEPQMHISKEGDPYLRTLLVQGAQHILGPFGIDCDLRRWGLKLAERGGRNGKKRAIVATARKLAVLLHHLWVSGEVYEPLHNSSRMTVAAAA

SEQ ID NO: 327487 - protein, 419 aa, unidentified
MSKDNVEIAAFVGLDWADQKHAITLQESGSDQRHRLTLEHTPEALHNWIQSLRDRFGGRPVAIAVEQKRGALIYALMHVEFLHLYPVNPVTVAKMREAFYPSGAKADASDADLLLDILISHRRHLRVWTPDDALTRSIQLLTEDRRHVVDERTALTNQLTAALKMYFPQALDWFGDLHTARACAFLQRWPSLQQLKQATPSSIRKFYRAQGYRGEDKLDQLLANIKKAQALTQDSAVLLSCSMKVDILVKQIPLLTDAIESYDRKIAALFDQHDDSTLFGSFPGAGPALAPRLLAAFGANRGRFEFASEMQELSGIAPVTEKSGEGIWIHWRLACSKFLRQTFHEFAGCSIHQSDWARTCYDEQRKRGKPHHAALRALAFKWIRIMFRCWKDRKPYDESVYCNSLKTRRSPLADALPAT

SEQ ID NO: 327488 - protein, 352 aa, unidentified
MALPTLPHPQVLVTLGVDTHADSHVAAALDQAGRPLGTRTISSTPGGYAALLGWARRFGTVDRIGVEGTGSYGAGLARWLRAHGQLVIEVDRPDRAARRRQGKADDLDAHAAARAVQAGTATSQPKAGDGAVEMIRSLRLARRSAVKARTQAANQLKALLVTAPDGLRAQLRRLSPAELVTTAARLRAATKPATPTEAAKLALRSIARRWLLLTQEITALDTQLERLVAMAAPALVAVNGVGTETAAVLLVAAGDNPERLRSEAAFAHLCGVAPIPASSGKTTRHRLNRGGNREANWALYLIAVGRMAWHGPTHAYVERRTKEGKSKAEIIRCLKRHIARELYGILVSRPAT

SEQ ID NO: 327489 - protein, 317 aa, unidentified
MSMTDRAVFVGIDVSKAQLDVAVRPEDRFAAPNDETGIARIVDRLRSAGPTLIVLEATGGLELPLAGALAAAGLPVVVVNPRQIRDFAKATGRWAKTDALDAAVLAHFAEAIRPTPRALPDEQTQALSALLTRRRQLLEMLAAEKNRLSQASSPVRKSVRAHLAWLQRALTQVDRDLAHAIQQSPVWQEKEALLRTVPGVGPVLATTVLAELPELGTLTHKQIAALVGVAPLNRDSGTLRGKRTVWGGRAPVRTALYMAALVATRFNPVIAVFYHRLRQAGKAKMVALVACMHKLLTILNAMLKHRTPWHPTPGASR

SEQ ID NO: 327490 - protein, 363 aa, unidentified
MMMNTTSPKTIGVDLHKTSLTATVLDASGVVLESKDIPTKCRRQIADYFASHGPDVQVAVESVGFYHWFWDTVKPKVRKLHLADPAGVRACAGRRTKTDRNDSLLLAQLLRDNRLPMAYVPDEPIRALRELCRHRHRLSRQLALARRHLRWIALKNNLPGPDTFTSDRAQKWLLSQDAKLNAVHRLSGRQFVDQITSLERQLSDSEAALKDTVAAHVDLAPTLALIQSVPGIGFITAITIVCECGDITRFDCIDELSAYAGLCPRVTQSGESAHHGHISKQGPPQLRWVLQQAAWVAIRTDPQARRIYARIAKRAGSKKAATALGRKLLSYAWSVCRQGRPFVWPNTQNNTGTTPGPVWSHDI

SEQ ID NO: 327491 - protein, 352 aa, unidentified
MIVLGADTHKSSHTIAAVDTSTGQVLGDKTVAVGARGFAALVLWARGLDGERVWALEDCRHVSGALERFLICRGERVVRVSTRLMAGTRRSSRERGKSDQIDAVSVARAALAAGIETLPTAALAGPELDIRLLVDHRERLVRTRVALNNTLQWNLHDLWPELTLPGGALFSKKWTTKIARRLARAEQTMRVRIARDELRRMRELTQAIKALQAEITVLVTEIAPQLVAEPGCGPLTAAKLVGEIAGAERFTSDAKLARAAGIAPIPASSGRTDRHRLDRGGNRQINAAIHRMAVTRARCDPETQDYIARKKTEGKTQRDAIRCLKRHLARRIWHLLQPPTPGHETTLSTSIS

SEQ ID NO: 327492 - protein, 394 aa, unidentified
MKLVGIDVGKNSHHFCVMNKETGEFNVAPSSFSNNKEGFDFLINSLKTYSKKSILIGMEDTGHYHVALLKFLLSNGYTVALINPKTTDLTRKMEGGITKNDKLDTITICDVLDTPERKKQYRITKVDRFDLYEQRQLTRHHHNLKEELNVYCNRLQKSIDLVFPEFNTLFSSKYSIVYMNLLKTFGSAEAIASTDIRTIRKCFEIKGRGNRISLTPEKLKECAKNSIGISSEVETIQIKHLVSQITLIKEQIAEIDKKIEEFSITNNSPILSIPGISHFSGTSILAELGDIGNYSKPSQIIKFAGVAPYHYESSQYNAQHTGITKKGSKYLRKTLYQIILTVINNNPVFKKYYLLKISQGKGHRCAQGHCIRKLLRIIYHLLETGQSFDPALLR

SEQ ID NO: 327493 - protein, 359 aa, unidentified
MSVYVGIDVHRRRSQVAVVNQVGGVLANRSVPDGAEPVLGVIGGLPAGTPAAFEAAFGWGWLLELLEDYGFAPHLVHPLQCKAIASARLKNDTVDAAIMAQLLRADLLPEAWIAPPQVRQLRALLRHRIQLVRLRALLRNRIHAVLAGHGQDRPGGCGSGPGRQRLAALVLPAAHGEVIEDDLALIDALPQLIGRLDGEIRQRARSGPRVKALTQLPGAGPFTALVLRAEIGDISRFASARTLAAWAGLTPTVRGSDRTVRHGHISKQGPVWARWVWCEAAQTAKRHPDFAASYQAIAKRRGKKIATTAIARKLLTRAYHLLTGAPITTPPAATTPAPASARRQAKAEVASPGRARITA

SEQ ID NO: 327494 - protein, 369 aa, unidentified
MNTTTFVGLDVHARSIKAVALDAMTGEVRSATFGYDAAAVAEWVGSLDPAAKCVYESGVTGFDLQKKLTALGVDCVVGAVSKMIKPSADRKRKNDRNDAEFLARMLSVGNVVEVWVPDDECEAARDLVRALDDAREDLKRCKQRLSKFLLRHGLVFSETNAKGQRKKNWTAAHWAWIRSIEFPEKADDDVLAYYIDAARQAMENKKRLEKLVEAEASKPRWKKRVDSLRCLKGVDTMTAADIVFEAGEFSRFKSARSFAAWLGLTPSEHSSGESVRQGGITKAGNKHLRRVLVESAWHYLGCSPHSKDLAKGQAPDPGARRHAAKGVRRLVGRRAAMLERGVHKNKANVATARELACWCWAIGCMVESA

SEQ ID NO: 327495 - protein, 456 aa, unidentified
MAEHASKKRDRKIRQLNPNAAGIDIGSQKHYVAVPADRDNEPVRSFGCLTPDLHQMAKWLKSCRIETIAMESTGVYWVPVVAVLESYGFDVKLVDAYKVKNVPGRKTDVKDCQWLAELHRFGLLSGAFRPDKQIQVLRSYWRHRSTLIEACSTQIHLMQKALEQMNIQLHKVITDITGVTGMKIICSIIAGERNAVRLAGMKHPLVKSSTETIAKALTGEYRQEHLFTLKQALEIYDVYQNKIAECDRRIEEYMKTFEHKAEANDLDSKPGKNNRTKRRKNQPNFDLRTRLFEMTGVDLTQIDGIETMTAQTVISECGFDMSVFPTEKHFTSWLGLCPNNQITGGKVRKRSTRKVQNRAARALRLAAQSLHSSKSALGAFYRRMRARLGAPKAITATAHKLAKLVYRMLKHGMDYVDSGQKYYENQYRERVIKNLTKRVREMGYAVVCTNTGLLVS

SEQ ID NO: 327496 - protein, 441 aa, unidentified
MKKKRLPKSLEKMNLNAAGIDIGSTEHYVAVPEDRAEKNFRVFQTFTSDLYELGNWLKECKITTVAMESTGVYWIPLFQILEEMGFEVYLVNAHHVKNVPGRKTDVKDCQWLQELHTYGLLRASFQPESVIRQLRVIMRQRDMLIRYSSSHIQHIQKTLTLMNIKLSNVISDITGETGMGIIRDIVRGEHNPEELIKNCRRGLKNSTDIIKKSLEGNYTEEHIFLLNQNLELYDFYKKKIEACEKEINKLLSSISFNNCSNISSKDGNIQKLDDFTTNDYLKKITGVDLLAVKGFNTNSLLAIISEVGLDMSRWKTVKHFTSWLGLSPNNKISGGKILHSGTKKTKSYASKVFRLCAQSLSKSNSYLGGFYRRLKSRLGAPKANVATARKLSIIFYTMLKNGVEYNDLGCDYFDERHKERSIKNLKKRAESLGFSIVECSA

SEQ ID NO: 327497 - protein, 467 aa, unidentified
MSQVSDLSRSLVPFDQNITLTVVVELSEASWLVAGLIPGVDRQPVKKQEPEPVALLRLLERWRVEAVRAGRTIGRIALAFEAGRDGFWLARWLQARDIEVHVVHSTSVAVSREHRRAKTDRLDTAMLMRVFLGWLRGERGHCRMVAIPTLEQEDAKRPSRERESLVGERTRIVNRMKAALARLGIRGFKPTLRKAPQRLDALRTPEEVSIPPNTLDEIRRDMVRLAVVREQIDVIERARLARLEQAPAAGPHAMVRLLARVIGVGLETADMLVQEVLSRNLRDRRAVARYVGLTGSPDESGRRRREKGLAKAGNARVRRGLIQLAWRFLRFQRDSTLAQWYRARTGGPKGARKTTMIVALARKLLIALWRMVTIGEIPATAWSSRGGSTVRSLAAEAIDCFMVRVRYESNRIQGRGAMLCAQWQAPLGLLAQWPDRANARLTLAVDRPRPFGQAQAVRDSRKRRLRA

SEQ ID NO: 327498 - protein, 321 aa, unidentified
MKMALFQVFVGIDVSRDWLDVHILPFRRRLRVANTPTGWQELAAGLAAHPQASVALEASGGYERGILHHLAAAGWQTHCVDPYKVRQFARAGGRRAKNDRIDAETIARYLATFTLQPASIDPLIERLCEHVTYRRQLVEERTAVANQARLLRDPRLRRLSRQRLARLDTLIQRLDQTLAAQIAGNPQLAAKAAVLQTVKGVGPTLAATLLGLLPELGTICRRKIAALVGLCPYDFDSGRFAGQRHIAGGRKHVRNALYMPTLTALRFDPAIKPFYQRCAEGRSDKKPAVIAAMRKLLTILNARMRDHIASLNNTQQDTQVA

SEQ ID NO: 327499 - protein, 474 aa, unidentified
MANRRKAPSNLNALPMLLQESVYIGVDIGKFKHVAGFISKTLLERHQHFEHCPAFVFEQSREGFRAFVERIRSYCPLEHCFIVMEQTGHYHRPLLHYLLELDIPVYVMHVQNRQGGILKTDKRDALGLANHLYNQLALGVQVENKLQVVRRAVPPSEAAAQLKGLMRHRYELAIEATQRKNKLTAICDELFPELTQVFKNPNLPTALDLREKFSTPHAVATASLIALREVRKKSYPSETQLLLLQQLAAQSIGTKNLARQRGLLLEQDLLIKEMRLIQEHIERLDLEIAQIVEHSREGQILLSIPPIYPMYAAAILATIGHIANFEDAGHLKAYFGWAPKRAQTGVSFDRASLTRGGSREMKKVMYLVAWNAVKSETEWASLYKRLVPRLCTYDERTQTYKGKGKAIGHVIGRLITLIYALLKQDDEMLSHLPPGTEPPEPILYDPDLHKSHRNGHYRPIRKEHATNHIVQVEP

SEQ ID NO: 327500 - protein, 410 aa, unidentified
MRRTSVELTQQCSMIGGVFMIYYVGIDLAKYHHECLIISQDGEVVSNAFTFDNNKQGFTSFLSVLSCLNASHQIRIGFEATGHYGTNLKNFLTNHGYDFMEIHPVLISRFSKASSLRKTKTDKIDVHLISSYLTTVEYKPYLTQSYHNTSLKSLTRSRDALVKERSLQLQRCTNLLDHIFPEFKPFFNQSLASATCQYLLINYSTPSKMSRMNQNSYDKMKSKLRRTISYVKFLKLRELAKNTVGVENPLLEFQLVNYITLYTTLDRLVAETETLIVHEFSKVPAHLQSIPGVGIISAASIYSEIENFNRFNHPDKLVAFCGLDPAFYQSGESAFTGKMVKRGSSYLRQYIMNSAQTVIIHNPTMYEFYLKKRHEGKQHRVALSHVAKKLLRVIFKLENDHINFDSTKMI

SEQ ID NO: 327501 - protein, 386 aa, unidentified
MPQPNDLSRSLVILEQDATLIAVIEMGQSSWLVAGIVPGVERSPLKKLAVDESALLKLLNRWREEAEKAGHRIERIAIAFEAGRDGFWLARWLRARGIEAHVIHASSVAVSREHRRAKTDRLDTELLKRAFLGWLRGERDHCKMVAIPTLAQEDAKRPNRERESLVGEQSRIVNRMKAALARLGIRGFNPKLKKAAERLDGLRTPEGEPIPPNTLAELKHDMERRRLVRSQIRDIEGTRLERLKQAPGDGPHVMVRLLARVIGVGVETADMLVQEVLSRNLRDRRAVARYGGLTGSPDESGKKRREKGLARSGNARVRRGMIQLAWRFLMFQKDSALAHWFYARTKNAPQTRKTMIVALARKLLIALWRLAREGAIPEGIVLRPAL

SEQ ID NO: 327502 - protein, 386 aa, unidentified
MSRNVRRGPGPSSTLITPDRAGNVVGVDPHKRTLTATVVDPRGGVLASEHFRVSGDGHRALEAWARQFGQIVRWGIEGASAWGRHTAIFLVSRGDDVRDVCPNRTGRQDRARQRGKSDTLDSERIARETLAHPLLPRAFKRSGDVAGPDEQTELLSVWWKARRSLLKSRQHLLSEAEALLGDLPIALIEQLPDRKAVRPRLAALAGVTRRRRFDPPTTLRLRLLGEYHAQIAKLDAQEKQVTRELRTLVDASPTTLEQLRGLSTVSVAELLVEVGDPRRFTEGGFARFNATAPLAASTAEGPGEPVRHRLNPGGNRRVNAILYRIAITQLRCEPRAQALYANARAHGHTKKEARRILKRHLSDVVYRRMIRDLPDHDTADPRLVAA

SEQ ID NO: 327503 - protein, 354 aa, unidentified
MKVTTIGLDLAKNVFQVHASDAHGAAVLRKQLRRAQLSEFFAQQPPCIVAMEACAGAHYWGRKLRALGHEVRLMAPQYVKPYVKSQKNDAADAAAICEAATRGHMRFVALKTVDQQSVLALHTVRSGFVKQRTALSNQIRGMLAEFGVVLPQGLSKLAQQLPVVLADQGNELTGVVRELVQMLQTQLAHLDELVARLERQIRVWASQDQAAKRLQQIPGIGPITASALAASVGDARQFEDGRQMAAWMGLVPRQHSSGGKSVLLGITKRGDKYLRTLLIHGARAALKAYQRNPAKMPQQLAHLLQRKHPNVVCVALASRNARVAWAMLSRREDYKGGPSVNLPALPSSPGLAPI

SEQ ID NO: 327504 - protein, 292 aa, unidentified
MAKVRSWVGLDVHAAQVVACVVDGESGEMTVHRLSGETAEVVAFCCGLPRPTRVAYEAGPTGYGLARAMEAATVGCVVAAPGKIERPAQDKIKTDVRDAERLVRLLMIDALHAVRVPTPEQEALRDLVRAREDVRVDLMRARQRLSKLLLRHDVRYDDTTSRWGERHRRWLAQIDLGQPGAQATLSDYVGAVEALELRRGTLEAAIAALVPDTPCAEAVARLRCLRGIDTLSAVGLAVEIGDFERFQRPGQLMAYVGLVPSEHSTGQTRRQGHITKSGSQHARRLLVEAAWH

SEQ ID NO: 327505 - protein, 408 aa, unidentified
MRSKLRYVGLDVHVDSIAVAVADDGGDAHSLGAIPNTPEAVRKLVARLGPKDRLRICYEAGLCGFVLYWQLHEMGVYCAVIAPSLIPQRSGERVKTDRLDALRLVRCFRAGELTAILVPTKEQEALRDLLRALNGAKRDQIRHMHQLAKFLIRQGRRKPKGAGLLSDKYLNWARAQQFEHTAHREVLTHYLLEFEHSTQRLLELTKTLDEVCAQLPKPTAALIAALQALRGVAKLLAVSLVSELGSLSRFRTPRQLMSYAGVVSREHSSGGTIRRGAITKSGNAHIRRMMVEAAWHYRHRPGLRHGLGKRQAGLSEEVRAIAWKAQLRLTRRYRQLAVRKPKPQVIVAVARELLGFIWAIGIQVEKESKLVLVVQPSAGANHIGQQSLRGRSRLKIARDAAPVRIGIS

SEQ ID NO: 327506 - protein, 346 aa, unidentified
MLIIGCDFHPGFQQVAIFDNQTKTVRFMRLKHPEEAAAFYRALPEPARVGMEAGGHSQWFERLLAELGHELWVGDPAQIRAAYVRKQKTDRHDAGHLLELLRQERFPRVWVPSAEERDLRQLLIHRHSRVRMRTQVKNQLQALALNQAVQRQHRLWTAAGRARLESLPLLPYAAARRTALLSTLDQLDQEVAALDRQVAAAAAARADAARLMTHPGVGPVTALATVLTLGPVTRFRRAKHVASYVGLVPGEHSSGGKQRLGHIHKQGSPFLRFLLVEAAQTAVRQDAAMKRQYVRLSLRRQRAIAKVAAARTLLVRMYCMLRRECDYPALVARMQASPSHPVTRSA

SEQ ID NO: 327507 - protein, 344 aa, unidentified
MENYAGIDVSLELSSVCVVDAQGKILKEAKVASEPDALVEFFERLGFAVKRIGLEAGPLSQWLHAGLKGAGLEAVLLETRHVKAALSAMTVKTDRKDARGIAQLIRMGWFQPVHAKSVGAQEIRALMIARKQLLGRLIDVELSIRGILRGFGLKVGPVTRRSFEARIRELVAGQATLERIASAMLSARSALKAEYGRLHKAVLAIVRDDAVCRRLMTVPGVGPLVAVTYKSAIDDPHRIVKSKAAGALFGLTPKKYQSGEKDVTGGITLAGDETVRTVLYEAANVLLSRITRFSKLKRWGMDVAKRRGSKRAKVALARKLAVILHRIWIDGTTYRWTDAGPIAA

SEQ ID NO: 327508 - protein, 379 aa, unidentified
MYRILKIGMDVHTTNYTLCALESKFGKEDQILANITVGPDHKNVLDFIRRIKEKMDPKGQDEIDVECGYEAGCLGYSLYHTLTAYKLKCTILAPTTMLSEQGPRIKTDRRDAALIAACLSNGGYHAVHIPTDEDNAVKEYIRMRDDHKVALKRIRQQIGALCLRYGSIYSGNCWTGVHLNWLRTLKLPEMIREVLNEYLATHDHLTATIDRLDKRIQEIAAQTQYREKVRKLECFLGIKTHTALSLIVNTGDFQRFRKGNIYAAYLGLAPGEHSSGESGGKRGITKAGNTHLRVLLTEAAEGICKGQIGRKSKVLLARQSGNPVEVIAYADKANIRLRSKYYRLIRHGKKRNVAVAAVARELACFVWGMMTDNIHGNAA

SEQ ID NO: 327509 - protein, 332 aa, unidentified
MAYDFVIGVDVGKYFHHACVLDPQGRQVLSKRINQHEGSLRKLFGQFLADNASVLVIVDQPNNIGRLTVAVAQDMGADVRYLPGLAMRQLSRIHVGNSKTDVRDAYVIAHAGLNLPDSLRSVDRVEDVFIQLKVLNGIDEDLARAYTRLINQMRSALVGTYPAFEHVLRGQMIHRKWILHLLAKYGGPTKIRRIGKTRLAAFARSHKARNPEPVIHAMLAAIHTQTVSIAGAEYPELSVAMSAKDALAKLAHRKEIEAQVLKLIQDIPQTEILLSMPGIGPRSAAQILMTVGDMSDLPDAAHLASYTGLSPRTNQSGTSIMPNSPNRAGNKN

SEQ ID NO: 327510 - protein, 363 aa, unidentified
MIVIGADTHKSTHALAAVDAGTGEVRGEREIAADDDGHRKALRWAHEIDPDVVWALEDCRHVSHHLERALVTSGERVVRVAPRLMGQTRRGEREAGKSDQIDARAVARAVLKDGVEKFPGAHLDEPAMEIRLLCDHREDQVAEINRLTNRLRWNLVILDPALEASIPPRKMDFAGQLDRVARRLRSMETSARVRIAKEQVRKIRELSRQARELKRELDTLVAAYRPELLAELGCSTITAAILIGQTAGAERFPTDAHFARMAGVAPIPASSGKHERHRLHRGGNRRLNRALHVIAITRGRWDPATRAYLQRKEAEGKTRMEALRCLKRQLARHFHRLLLKPPASPAPRTAIPINAAISVPCLT

SEQ ID NO: 327511 - protein, 448 aa, unidentified
MDKIKTKNEVVKRISQLMVINPSVAGIDVSDREMMVAWPTGPDQLEVRPFGCFTSDLHSIARALLGSGVTSVAMESTGVYWVPLFLLLQEYGLEVCLVNARHVKNVTGRKDDEGDAEWIQKLHSCGLLSASFQPDAMTRTLRGMVRHRKSLVGTSSTYINRMQKALELMNIKLHTVISDIDGKTGLLIIEAILAGERDAGVLADLRDGRIKAGREEIVRSLEGHWTTEHLFELRQCHHLYRTHREMIDECDREIEKQLMEQIASKNDGVLPDIPKVKRKVSGKHKVPFELTALLREILGVDVTEVFGISELSALSILSEVGTDMSKWKSERHFTSWLGLAPNTRISGGKVISSRIMKKRHHAGQAFRMAANGLYNSKSPLGDFYRRLRARSGAGKAVVATARKLAIIFYKMVGNQEAFNPKALADYQEKYRQKKINQLKKKLELLEAA

SEQ ID NO: 327512 - protein, 337 aa, unidentified
MLFCGIDLHSNNCLVVVSDDNDKVVYSKRLPNDLATICTVLSPYQQELFGVVVESTYNWYWLVDGLVAAGYSLHLANTTAIKQYDGLKHRGDESDARHLAHVLRLGLLPEGHIMPKADRAFRDLARRRMQLVGQRTSQIVSIETSMAQHMGATISGNSVKELTVDDIDAMPIGPTEALGMKANLAIMQALQVQIDGIETTLSKHCRRDKDYRLLCSVAGIGPILATVILLETGDIGRFADVGNYASYCRCVGSAHMSNGKKKGEGNTKNGNRFLAWAYVEAANFAIRYCEAARKFYQRKKSKRNGIVAIKAVAHKLARACFHMLKTGEKFSVERCFT

SEQ ID NO: 327513 - protein, 419 aa, unidentified
MSKSNIARQLAQVQPGTLHAGVDLALENNVVVVINEKAERLDHFSFPQDRGGYDYFLRRLEGLRQKYQASEVVVAMEPSNYFWKLLARELEEKKITYHLVNSYTVKKHREGDQLDRSKDDRRDAGQIAELSRNGKYTGTHLQKGAYEDLRLYATLYDQSVQAIRREKQVLWGLVGQVFPELSQVFKNLVGEMGQALLITGASAATIRQLSVEDFIAQVRSAYSGKRLFVSKLHRVHQLAVTSIGLTEGLGAFQLAIQVHLAELQTFQKQLKRVTTAMTACLATLPETPYLLSVKSMQAVSTAIFLAEVGDPKRYQSAAQWVKLAGIQPAPNISGKKQRSQTPMSRQGRARLRTMLYFTCLRMVRFDKHFAQIYAHLQRRQKNPLTKMQALGVLMNKLLHILWALIQNQTFYNPSFGQSI

SEQ ID NO: 327514 - protein, 345 aa, unidentified
MTTMNYIGLDVHKKTISYCVKDVSGRIQQEGKIRSTRRELDCWMKTLPQPWTVAMEATIFSGWIYDHLLPHATQIKVAHPLMLRAIAAAKKKNDQIDASKLADCLRCDFLPECHMMPRAIRDRRRTLRYRHLLVRQMVQMKNRVSGLLMETGVEYNKQRLHKVSYFRELLSANGEVPPSIRPLLKLSRETIERCQKTEYALVSSLQRDPVLADRIKRLRTVPGVGPITALTWALEIGDVSRFGSIKKAISYCGLCGDERSSADKAMRMPLSKQRNKHIQRALVEAAKLAPRQNHEMAVIYDQERQKGNSNRATLAVARKMVAYLLAVDRQQRDFVPAEERRTSAA

SEQ ID NO: 327515 - protein, 318 aa, unidentified
MNTKTNQNINVGVDTGKFQLDIYIRPLDIYFTVTNDEKGIKEAIKTIKKYKPERIVIEATGRLEMPFILACANANLPFTIANPVHVKRFAGAIGQRAKTDKLDAQLIAHYSEAIKPPLSKLKPETMQAMSDLVTRRNQLLVMQTMEKNRLQIMPKALAMTIKPVLTLFKNQIIKIEDKIVKLIESCPEYQAKNMILQSMTGIGKIAAASIISNLPELGYINAKQASALIGVAPINRESGRYKGKRKIQGGRPQVRTVLYMAMMSAMQSNPVFKATYQRLVAAGKPKKVAIIACIRKMIVILNSMLRDGVMWEAPMVKN

SEQ ID NO: 327516 - protein, 366 aa, unidentified
MKKTSTVQALKSEIFKEQKLTIGVDLGDCWSFYCVLDEAGQVILEQKLPTTPEAMKQTFGKIPRSLIALETGTHSPWVSRLLTLLGHEVIVAHAQKVQLITKSNRKDDRHDARTLARLARIDPALLGPVRHRSAQAQLHLTVIRARAELVSARTALVNAARGLVKSYGQRLPKCGTYQVSERLAEGLSAELREVLVPLFKEIESLNERIKEYDERMEKIAKEVYPEVSLLKQVKGVGTQIALTYVLTIEDPYRFPKSRQVGCFLGLRPGRRNSGESEPQKGISKEGDRYLRTMMVQGAHYILGPFGEDSDLRRWGRKLAERGGKNAKKRAVVAVARKLAVLLHRLWVGGEVYEPLRNSQKAMREVA

SEQ ID NO: 327517 - protein, 357 aa, unidentified
MKITTIGIDLAKNVFQVQGVDERGKAVLRKQVKRKDVVKFFANLERCLIGMEACGSSHYWARKLTELGHTVRLMAPQFVKPYVKTNKSDRNDAEAICEAVARPNMRFVPVKTGEQQAVLSVHRARQGFVKARTAQANQIRGLLAEFGIVIPQGIGHIAKRLPEILEDAENALPGMMRQLLQRLGENLKAMDRQVGELERQITLWHRDNEPSRTLEAIAGIGPITASAFVASVGDAKSFKNARQVPAWLGMVPRHEGTGGKVKLGRISKRGDVYLRTLLIHGARSVIRQFERKPDRADGWLKKLLARRNKNVAAVALAAKNARIAWALLAHDRTYQSDYVTKRTAVQSRSVELNEATV

SEQ ID NO: 327518 - protein, 421 aa, unidentified
MSDDRCRLGSDDVVIGLDLASAEHQAVVVTAAGKRLTRFRMPHTRAGLEELLRRTTPAALGRPGGARVFAFEATGHLWEAVAYVLRARGEPYVVVNPLATFRVREARQLSREKTDLTDAEQIAELCRTGLVTRTQLEARPYLALRRAWGEYARLREERARLKVLVAHQLYGLFPEFLRVWADLLQPGALAVLRTGLTHAAMAALPLTEFVAQARAHGAGHRLWRDTLAQVHRAAAQTMACPDGLDVLAREVQRAVARIDMLTAHMTAVAAEIDSMLAELEEVPSLRPIPGLGWTSVAGLLAPVGAITKYHHGRQLIKLAGTNPSRRDSGQTVGHGQRMSHRGRAGLREVLYLATISCLQHNPRIRAHDDRLIQRPDRPLPKMQALGACMNKLLLYAFAVMHRREAFQLDHDWPRTTMARVA

SEQ ID NO: 327519 - protein, 428 aa, unidentified
MRDNKPENRRRINISEASMGIDIGKYHHVAVAQNWDGRRLKPLIFENNILGFNSLLAAKEKVKEYFGVTNVRFALEPTGQYWLALAEWLERRNEEVRMVQPAHTHKAKELEDNSPCKHDIKDGGIIADLDRQGKSLRLIRPQGVFAELRHLTSYRQGLVRDINREINRLHGIMDLLFPELIGLFKNHIGKGLLELLKKTACPDKIAGLGEEVIGELLRRKTKGKLGAARAGLIVQTARISIGVKEGQQVLEMELKQIINRLEFVRQQLKEVESNMKGVLKGVPDIEILLSIPAIGEISLAAILGEIGDIKRYNSAEEIIKLAGLNLYEISSGQHQGVRRISKRGRPLLRQILYMASLRLIKAKGRFYDFYQRLTSKGKHKIPAIVAVMCKLVRVLFAMARNKQEYDNNKVSQKNPINGKRDGAKLILN

SEQ ID NO: 327520 - protein, 375 aa, unidentified
MTISPVAGIDVSKEYSDFCIFTPDRSVFSRGKVFHHPASMEKLCKQLSDVENAFNMKPVCIMESTAYYHRTLYRFLTNHGYLVIVLNALQSKAAADFNIRSANTDKVDAFKLATMYGMTKLKPSVMPGETIQELRDLCRNHNSLEEQLVMSEERLRAFVEQTLPGLVKVFSRIASRSSLMLLSTFASKQELNEAGFEKIAEIICKASRNVQIWSESKARMILTSINNGQEYISTPSHSAIIKSIAITILGIKEAIVENDNALELLFEQNESLMVDRTLLMTIPGIGKHTAAVLIGETGNFDGFRNHRQLAAYYGLDPKVNKSGTVNKKHLGLSKKGSSLVRKMLRMAVQNSIYRTKKGEAANPVLAEYFRLKTEN

SEQ ID NO: 327521 - protein, 392 aa, unidentified
MVVSVGIDVSKDKHDCFIVSSEGEVLADAFIIPNTMDGFHYLLQRIRHCTAPQDKIKVGLEATGHYSYNLLGFLLDNGLTTYVLNPLRTNLYRKSLSLRKTKTDRVDARTIASMLLSDAGLKPYTDTAYHNEELKSLTRYRFDKVKERAKLKSSIARLVCILFPELEKLVPSLHIASVYALLEAFPGAKQVANTHLTRLKALLETASNGHYKRDMALKIRNAAKNSIGSQMPAKSLELQHTIRLIRELDREIDEIEEQIQSIMDELHSPITTIPGLGFRMAAMILAEVGDFTRFDSPDKLLAYAGMSPSTYQSGQLKNCYPHMEKRGSRYLRYALYNATKYVCHWDPAFADYLAKKRAEGKHYNIAISHAAKKLVRLIFAMEKSRQPYCSAA

SEQ ID NO: 327522 - protein, 387 aa, unidentified
MRVAAHRAEAPSAICVDLGAIFVSLELSRSKWLITSLSPGGGEKMSKHIVAGGDVAGMLSCFAELKRKAQARTGRCLPIIVIQEAGLDGFWIHRVLQAEGIESHVVDPASIATSRRRRRAKTDKLDGEALLRALLAYKRGEPRVCAMLRAPTPEEEDRRRIVRERKALTNERIRHVNRIKGLLFGQGVSGYEPLRSDRRKRLEELKTGDGRSLSPNLKAQISRELDRIELLLTHIKDVEEARDTMLESAQAVAPAPKLLLKLKGIGPEFAAVLWSEGLSRHFDNRRQVAAYAGLAPTPWQSGIVDHEQGVSKSGNPRLRSTLIELSWLWVRHQPQSALTIWFKERMKQNGGRFKKSTIVALARKLLIAIWKYVNAGVVIEGAALKAA

SEQ ID NO: 327523 - protein, 304 aa, unidentified
MSSMTAIAERANLPELPEEARVVGIDTHKHTHHVAILDHLGRPVADRQFPTTSSGYSQLVDFIHDHGPIDQVGVEGTGSYGAGVARELAKSGLRVVEVTRQNRQARRLRGKSDPIDAHQAALAVLAGTDTSVPKSSNGHVESMRILMSERRSAAKARTQTMNQIHALLITAPDSVRADYRALAGDKLISTLARSRPPAVGGTGPVVVARQSLKRLAARHRMFQGEIDEIEKQLDTLIRLINPMLFSLNGVGPFTAATLLVAAGDNPERLASKASFAALAGVAPIPASSGQRRAMIRTCGWPSAG

SEQ ID NO: 327524 - protein, 377 aa, unidentified
MKRIKFVGLDVHAETIAVAVAEQEGEMRSLGVIPNREESVRKLVKKLGPVEQLRFCYEAGPTGYVLYWQLTKMGAACAVVAPTLVPVKAGDRVKTDRRDALKLARNYRAGELTAVWVPDAEHEALRDLVRAREAAKKDQLRARHRLSKFLLRHGRRPPVGVTPWTGMYLEWVKRDVHFAVKAQEATLLDYLHEVEHMTARITRLDDAIEEAVKVAPAKMRAVIEGLQALRGIAQISAVTIVAELGEVTRFSKARELMGYGGIVASENSSGERQRRGGITKTGNAHLRRVVVEAAWAYRHRPAIGFTLRKRQENLSEEVKEIAWKAQHRLHARYGKLMAKGKNKGVVVTAVGRELLGFIWAIGVQVEAQQKESLRQAA

SEQ ID NO: 327525 - protein, 328 aa, unidentified
MTMNPAPCVFNHIVAFDVAKESLAIHVLPADERQAIANKPKAIRKLLIAQIRRNAKLGLGPLLVVCEATGGYERHLLEICAELGIAAHKAHGSRVRNFAKYLGLIAKTDPIDARVLALFGLKTENLRLHTPLTPALTALIDLRARRDQVQAMLLAETGRLEHVRYAGVTRSLKEHIASLRKSLAALEAQIAAHIQANEALARKAALMRTLKCIGPGTVAALLAYMPELGALSRTQAASLAGVAPFDDRSGKLSLPSHIEAGRAAVRRALYMAALTATRHNRIMKSFAERLRRNGKCAKAVITAVMRKLIVTLNAMLRSEEPWRHAQTA

SEQ ID NO: 327526 - protein, 316 aa, unidentified
MTKTLTGTARFANTGEGYARLAGFAGKWEDRRWAVEGCRGAGRSLAQRLAADGGVVLDVPAKLAARVRVYSQGHGRKTDKDDAVSVGLAALDGSGISLVTADDVLAGLRLLSGRREELSALRTQAACRLHRLLAELIPGGMRRELTAGKAGALLARIRPGDEVAAIRLQLARGHLAGIRALDARLKMAAAQISALVAATGTTLTSLFGVGPVIAARILAETGDVSRFATRDKFAGCNGTAPIGVSSGDQVRRRLSRAGNRRTSHALPMMAVTQIRYPRHRRPPLLRAQARRGQDSQGSAALPQAAAFRPGLPAARA

SEQ ID NO: 327527 - protein, 365 aa, unidentified
MTSDRSLVSRRKTMSTPPRCSNLEESDRGRFIGVDLHRNCFTVCLIAENGREYISEYRLEEIDRFLGRLRETDEVAVEVTGNTRLFYDLVAPHVARVVVVNPSEFRVIRQSTKKTDKHDARALALFLSKNLLPEVRMKDKQHAELASLTQTRDALVKQRTALKNKVNNLLSSRGVNLKREALTSEKGLRAVLGMKFAPLMEFELEVLVEQIRAINTSVAKLESTIKQEGVKLPGHKNLKSIKGIGDLGATILLTVIGDVNDFANEGKLAAYFGIVPRVNNSNQTERSGRITKRGSKLGRTTLVQCALIAKRYSPYLARFYERIKTRRGTGKAIIALAKKFLGIIYNTLKENWVFVDFPNFELATE

SEQ ID NO: 327528 - protein, 372 aa, unidentified
MTSIIYIGMDVHTTNYTLCCYTVDSDDAFAVVNVKPDYHEILKYMERVRSTRGGNCDFICGYEAGCLGYSLYHQLAKHGVACIILAPSTMPQQKGKSIKTDKRDAKNIAKCLAFNLYSPVYVPTAEDDAIKEYIRMRDDVKADLKRTKQQIISFCTRHGFHYEGKSRWTQAYFKWLDSLVFENALYKETLQEYLALYYTLDEKIAVYDARIEELAHQKRYEENVRKLCCFKGVSTHTALPLLVEVGDFHRFRTAQHFSAYLGLVPGESSSGEKVIHTNITKAGNSHLRTLLVESANSYSRGVVGKKSKVMKDKQGGNSPEIIAYADKANERLHRKFYKIAIRSKKNVAKTAIARVLSCFVWGMMTNHISRAV

SEQ ID NO: 327529 - protein, 354 aa, unidentified
MNKGITADGGLTLGLDLGDRFTEGRVLDETGEVVEAFRVRTTESALSSRMASFPPSRVVLEVGTHSPWVSRVVASQGHEAIVANPRRVRLIAENDSKSDGVDAELLARLGRVDPSLLRPIVHRGVEAQRDRILIQARDGFVRARTQLVNQVRGFAKALGTRVPSSSTEAFPKRVRATTPMDLFPGLETLLETIEQLTATIRQLDREVERLCQERYSETELLRQVPGVGPITALYYVLTIEDPSRFAKSRSVGAYLGLRPKQRDSGEQQPQLRITKAGDALLRRLLVSAAHYILGPFGPDTDLRRAGLRMAERGGNAAKKRAIVAVARRLAVLLHRLWVTGEAYEPLRSEDAQAA

SEQ ID NO: 327530 - protein, 410 aa, unidentified
MEVLHPRCAGLDVHRDSVVACARLVRPGGVERHVETFGTTTSELERLARWLHGHAITHVAMEATGVYWKPVWAVLAEMFEPVLANAAHVKNVPGRKTDVSDAMWLADLLAHGLIRSSFVPPLAIQALRDLTRTRKQLTREKASHVQRIDKLLQAANLKLGSVLSDIMGESGRAILDASAGGESDPERLAGLVRARLRASRADLVEALRGRLAAHQRLLIGLHLGQVDAIDAAIARIDAELGDRLEPFRDAVARLTSIPGVGALSAAVIVAEIGLDMGRFPTAAHLISWAGLCPRHDESAGKRRSTRLRPGDPWLKTLLVQVAWCATRAKDTYLRALFGRLRARRGPRKAIVAVAASILTAIYWMLRRGVAYQDLGADHFERRDRARLAARLTRKLRELGFDVTLAEPAPA

SEQ ID NO: 327531 - protein, 367 aa, unidentified
MEKSSKVYVGMDVHKESIDVTLAEQSGEVRRLGQIGGDRGSLLKMARKLQSKGGERVFVYEAGPCGFWIYRELAALGERCMVVSPALVPKRAGEHVKTDRRDSERLASLARAGELEAIHVPDIRDEAIRDLVRGRDDAVIAQRRVRQQLKALLLRNDIRYVGRTSWTGAHRRWLSELKLPEPAQRIVFEEYVDAITVATGRIERLTRAIDTEVLTWRFAPVVAALQAMRGIQFVHAVTLIAELGDLTRFGSARQLMGYLGLVPREDSSGEHRRQGSITKAGNSYARRALIEAAWAYRHPARVTRIIATRQTGLPKTACDIAWRAQLRLSAKYRRLNARHLHHNKIVVALARELSGFVWAIGQCVKPQ

SEQ ID NO: 327532 - protein, 351 aa, unidentified
MKTKPTAQPKLYIGIDIHKRSWKVHCATDLFAGKSFAMPPNPEVLRDYVIKHFPDHKVTTAYEAGCCGYYAHRSFEAYGWTSLVVNPADIHRKGKERFTKTDKIDAQLISRELKDGRLDSIHIPDVEREQLRSLFRRRNDLVKDYRRIKSYIKMQLLFFGVAIPEEFDNAHWSHKFRDWIDEVAFAYPTARETLDSRMRSFRFIDQELRDVSTKMRAYCRKHYKKDYYLLRSIPGIGGIVACGIICELGDLRRFNSIKHLAGYVGLAPGIHQSGDNQRTTGITMRAHRLIRSYFIEASWQAIRTDPVMQAYYRKHLGKNVKSIIIKVARKLLSRTLAVIKTETPYEIGVIE

SEQ ID NO: 327533 - protein, 489 aa, unidentified
MTAVMIGVDPHKGSHTAVAVSTAEQPLGKLRVRASADQAGRLVEWAAKWPERTWAVEGAGGLGHLLAQQLVAAGELVLDVQPKLAARVRLLDAGDSNKNDPNDAASVAVAALRSRARRPVRADDHAEVLKVWSRRHRDLGRAKNQAACRLHAVLCELVPGGVPEEITAAQATRILGSAEPYGAAGQARLDLAAEILADMRRLNQQMLESKKKLASAVRASGTSLTEVFGVGPVVAATVIGDVADVSRFASRDHFAAYNGTAPIEVSSGNRKIYRLSRRGNRRINHAIHMAAITQIRHAHSDGRAYYEKKVAEGKTHKEALRSLKRRISDAIYARLRADARQAASSTNKGPGGQQGNDTKSSAAGSHPKHRLFGQATPEPDPRLRPATPASPIMPPEPASKKLRRSPCGFPLSAWRHPLKGEEFSDGRYTQEVRSGLPGGRGPAGPGNGQADRAGGPGPGDQRGNPGQLGQRRPAPPGRRGRVPERGRAG

SEQ ID NO: 327534 - protein, 404 aa, unidentified
MKIYHPYVLAIDLGKRKSVALLASRKRKILKKPWTFSRSFRDYQKLVEGLNPKDVLVGFEATAHYWLALHEFLTKKGFEVVVLNPLAVKSFRDTGIRGSKTDKLDAYLILRVLLFSDHIHPLKNLTESISELKNLSRWRGELAFSRASLITKLISILDQVFPEYERILSPKNLASLRLLKKYSTPDEIASLPLPKLTKILAQASRKKEKAEKWAKDLKMEASQTIGQRIGINAFSLEMKIVIERINQTAKQIKLMEKEIKRIFSGLPESKYLKSISGINDITGAVILSEIGDITKYIAKDGADNIVALAGLDAKLRQSGEYSGKTKMTKRGSPYLRCALYQSARVAYRYESMFKKIYEKQRAKHKPHMVCLGYVAKKLARIAYSVLVNKKTFDPQIYYQSSSID

SEQ ID NO: 327535 - protein, 361 aa, unidentified
MVYLGVDLHRKRSVVTALAEDGTVLLSRRIASRPEDFRRVFGELEPRSLSVTFEATYGWSWFADLLADAGIEAHMAHPLATKAIAAGRVKNDSVDARTLAHLLRTNLLPEAWIAPPLVRERRRLARTRTSLVRIRSRLQCQVHAILADHCVQPAVDSIFGAAGRRFLQTVELPAVDRGRVDAALRLMDAITAEVIALDKELRAAFAGDERIRRLTAIPGIGFLSAAVVLAEVGELGRFRSPDQLASWAGLTPTERSSDEHTRRGHISKQGSRWLRWVMVEAASRRFRDPALRRFEERIASRRGKKIARVALARRLLTLSFYALRDQEGCRAFPVRARASRQIRTGALAGSHGLPVGDGRAN

SEQ ID NO: 327536 - protein, 418 aa, unidentified
MIDDVQWFVGIDWATQSHRVCLLDIEGRHVNERDFAHGGAGLTELRDWLLEKTKAAPGQIAVAIETPHGPVVEMLLDHAFLVFAINPKQLDRFRDRFTVAGAKDDSRDARVLGGSLRTDRQAFRRLVVDDPLMIELREWSRIADELQQERTRLANRVRQQLWRYYPQAIELTDDVADDWFLALWQQVPTPATAAKASGKTITRILKDHRIRRLDAAGVLQTLRQTPLFVAPGTTEAACAHIRNLAARLHLVNQQIKQAHRTLDSLCAKLDVPAENPSGQNREQHDMTILRSWPGIGRIVLATLLTEATEPLRTRDYHALRALAGTAPVTRRSGKQCFVIRRLACNKRLQNAVHHWSRVAIQHDTAARRRYDALRRRGHGHARALRSVGDRLLYALCTTLERQTPYNPNCQTAQVTAGL

SEQ ID NO: 327537 - protein, 285 aa, unidentified
MSNTAAGHEELAGWLKARGVGRVGLEATGGYERAVRLALEAAGFEVVVHQPLEVRRFAQLKRRRAKNDRLDARLIAAATAQVEAVRAAQDPRLAELAERMTAYEQITDQIVELKTFLEHVTLKDIGSALRTQVRALEALKLRLASQILTAIKAHPDLLARYRLLVSLPGVGPIVAATLLIRMPELGGMRRGQAASLLGVAPFDRDSGQWKGLRFISGGRARPRRMLYLAALVAKRFDPGLRAFGETLKARGKPPKVVTVAVMRKLIEAANLVLQRGQPWVKAMPA

SEQ ID NO: 327538 - protein, 388 aa, unidentified
MNFEADKSEPLTAVHTDLGAIFVSLELSRSSWLITSLSPGGGEKMSKHSVPGGDFAGLMERFARLQEKARLRTGQSFRIIVVQEAGLDGFWIHRALQNEGIESHVVDAASIATSRRRRRAKTDKIDGETLVRALLAYKRGEPRVCAMIKVPTPGEEDRRHLCRERKALTAERVRHVNRIKGFLYSQGVSGYQPLRRDRRQRLEELQTGDGRTFPPHLKALVNRELDRLELLLKQIKTVEAARDALLAVEQTAKPASAAMLLDIRGIGPEFAAILWSEGLFRHFENRRQIAAYAGLAPTPWQSGAVDREQGVSKAGNPRLRTTLIQLAWLWLRNQPRSALSVWFHERVSRNGGRLRKTTIVALARKLLVALWKYVTAGVLIEGVTMKVA

SEQ ID NO: 327539 - protein, 392 aa, unidentified
MFYIGIDIAKRSHQAAVTDISGNIIVKPFNFKNTAAGFTQFLSVLETNSVSKDNCVIGLESTGHYWYPLYFFLVEQKFSVKVFNPIQTAAFREITIRKVKNDNLDSIMIADFTRFGRYSETYIPSENMLALKNLSRFRLSVCDICGSLKKRTIVLLDLVFPEYASVFCDMFGTTSKQLLEKYSTPDEFSEISTTKLANFILKASRGRNGREKAELIKTAAQNSIGISYAIDTFSFEIKQLIEQIEFMENQLSEIDAEMAKLLAESEYSVITTISGVGPTLGSIIVSEIGDIERFETSSKLVAYAGLDASVKQSGEFNSSQNKISKRGSPYLRRALWMAAFMSLQCDPALYDYYSRLRARGKSHRLATTAVARKLCIIVWAIMKSKKPYSPHI

SEQ ID NO: 327540 - protein, 416 aa, unidentified
MSLSVPGAVFYTGIDWAVETHAVCVMDVAGKVVARFTVAHSAEGLGQLAGKLAGLGEPGDMPVAIERPSGILVDALLQAGHPVVPVSPNAIKAWRESEVLSGAKSDAGDAEVIAEYLRLRQHRLRVAAPYAEETRALRVAVRTRDDVVDLRVAAVNQLGALLEAHWPGGKAIFADLESRIALEFLTRYPTAASAAQLTEDSIAAFCAEMGYSGRRPAAVLLGRLRSAPAGTAGEVLSTAVRDAVLALVAVVKTLNASIKDLARSATARLGEHPDGPIFTSLPRSGQINAAQVLAEWGDCRPAYDDPDSVAALAGVTPVTRQSGKHRGVEFRWACNKRFRKAITTFADNSRHASPWAAQIYTDARARGKDHPHAIRILARAWIRVIWPCWINSIPYDPGKHGAATRLARHTAEKLAA

SEQ ID NO: 327541 - protein, 356 aa, unidentified
MQTQVTKKIDFSGKELFIGLDVHKKSWSVTILVEGMEHRTFTQPSDPKALFNYLQKMFPGGTYYSAYEAGFCGYSIHRQLNSLGIKNIVINAADIPSSQKDHLEKRDPIDSRKIARGLGKGLLRAIHIFDRDMEELRSLNRTRFYLMRDLRRSKNRIKSFLQYYGESIPPEFDNNQWTLKFISWLKNVKMQTLSGQEAFSNLIHSYEYHREQILTLSRQIRLRIREYDNELYSLLKTISGIGPLTSSALITELGDINRFPHIDHLSSFVGLIPRVKQSGETSYSGGITFRCNEYLRTLLIEASWQAIRQDPALMQYYHEHLINNKGQKVIIKVARKLLNRIRYVMKNRQPYVTGVA

SEQ ID NO: 327542 - protein, 437 aa, unidentified
MPAVIGVDPHKHVLSAVALDGRGGVLGSWQGSATRPGIRALRSWAARHAPTALWAIEGSNFLGRRLAEALTEAGADVREVCPTRTADRRRLRPGRGKSDAVDAEAIARELLAHPDLPRAFRTSAGGGPDPARDALAVLVRTRHQVVDRHRRLLTEAEGLLTELPARLAERLPGGAKVGPRLAAAARLRRIGARPTDLRLRVLRTRVREERLLAAERDALEREIAALLVELGTSLPALFGLGPLGAADLVVEVGDPRRFRSADAFASYAGTAPIPASSGDERGRAAHHRLSRFGNRRVNSVLHVMAVTRLRTHPETQAFVARAAAGGKTTRDALRIVKHRLARLVWRTMMRDAAAPPPVGPDATTTGPDVDPSPPANQPADAPSHAQPVGRGGSRTTRSPLATSGAGCHPPGRSGAEEPRQGLDTPVGAEPLGRGAPP

SEQ ID NO: 327543 - protein, 334 aa, unidentified
MNNKFYCGIDVSKKKLDVMLLVQEKYHYKVVENSNDGVIFLQEWIKSKLEKDAFVHFCMEATNVYHELLAFTLLENKNYKVSVVNPRIVKSYAKSLVKTKNDKTDAKILAEFCKERNPKPFTPQTKERRELRDLSRLMDNLVELKIMQKVRLQTFNTEAAARVVKTTLKSIEDTITENEKEIKFYYDNFPELKKEYELLNSIPSFGKRVSNVLISEIYKDEYGLYNPKKLTAFFGLEVREMESGTSVWSKPRITKFGNPRVRNMLYMAALVAIRHNTKMSDFYLRLVNKGKPKKLALIAVARKLLVIACAILNSQKPYDENHISCYNKNSVKIA

SEQ ID NO: 327544 - protein, 470 aa, unidentified
MAVLFLGVDWGEAHHDLCLLDQDGSILAARRITDGLAGVGELHALVAAHTDEPAQVAVAIETDRGLLVGALLAAGYQVYAVNPQTVSRYRGRYGSSRAKSDRGDAKVLADLVRTDRHNHRQVAGDSPLAEAVKVLARAHQSLIWARQRHVNALRSALREFYPGAVAALGAQLAEPEALAVLKLAPTPEQGRRLTRSAVRRALVDAGRRRNLQARVVAVHDALAAPQLAAPELVWAAYREVVAALVATLCCLNEQVAALERQLAVRFAAHRDAAIIRSQPGLGVVLGARVLAEFGDDPHRYATAKGRKAFAGTAPVTRTSGLRRTVVARAACNQRLVDACYLWAFAALTASPGARRCYDGHRARGASHHQALRALGNRLVGILHGCLAHRVATRSRSPGRPLKRSPEQERGCRGVQPPGDTGHLDRPGTGGAAGAPMPRGQARWDDRARWLNGSGCRRRRHRTANEFGRMP

SEQ ID NO: 327545 - protein, 368 aa, unidentified
MSNYVTAIGLDVHARSIKACALNPMTGEVERASFGYDPASVAEWALGFESPKAVYESGVTGFHPCRALRALGLDCAVGAVSKMQRPAADRGRKTDRRDAEFLARLLATRNVVEVWVPDERTEAARDLSRALADARGDLQRAKQRMSKFLLRHGHVFDEPTPTGGRRGNWTRAYWRWADAIEFVEPDDAAAYEHYRDCVRRCEEARDALARRVAESAGRPEWKPAVDALRCVKGVDVATAFLLACEMGDPARFPSAPSFASWCGLAPSEHSSGETSSRGGITRAGNAHVRRALVESAWHVPMSSRDPKPLAPGQEVAPAVRRHATKCNRRLIERREAMAAAGKRPCVANCATAREMACWVWAIARMAAS

SEQ ID NO: 327546 - protein, 379 aa, unidentified
MDHAITDTPAETILHGALELSKNSWLLALQFPDRAQPSLYPIRGGDTVGLMAKLTAARDRWAKMSGKAPSIVLCYEAGYDAFWLARFLKARGIECLVVDAASMQVNRRARRAKTDRIDVGMLLRALIAWGQGDRHVWSVVRVPNVDEEDLRRSHRERDRLVRERTAHINRIKGLLFGQGIRGINVKSKYKTLQIDKLVTGDGRPLPPRLASEITREIARLALIQEQIATLERERDQAPTPCKTTEKKRLQLVSLNGIGPAIAAVMTREVYYRQFDNRRQVAGFLGLATSPHDSGDVERSQGISRAGRGQVRGTMIQAAWLWLKHQPKSAITRWFVQRTAGQSGRIRRIMIIAVARKLAIALWRFLEQGLVPQGAMLANR

SEQ ID NO: 327547 - protein, 353 aa, unidentified
MHTHQKSSDAVATIGIDIGKNTFHLVGLDKRGAIVLRIKVSRSQLERRLANVPRCLVGLEAGCGSHHIARQIRALGHDVRLIPAQYVKPFLKGHKNDYRDAEAIAEAVQRPTMNFVAIKTPEQSDLLSLHRVRSRLVGRRTAVINQIRGFLIERGITVRQGPGPLRKALPEILSSPTEVLSPRMVRLIADLSEDWRRLDERIDAVSAEIETLAENDGGCQRLMTVPGVGPIISSAMVAAIGNGGGFRQGRDFGAWLGLVPKQESTGDRTKLGKISKRGNRYLRTLFVQAAHVVLIRRPAAAMRGLWPWIERAAKRLAHRNLLAIALANKLARIAWAVLARGRDYEPRITINAA

SEQ ID NO: 327548 - protein, 474 aa, unidentified
MKKHKQAEAKTKSEAIKPLREQEPDCAGIDLGANEIWVAVPPDRDQKPVRQFGAFTRDLMAIVQWLVQLGVRSVAMESTGLYWIGLYQLLEEAGLKVCLVNARHVKNVPGRKSDVRDCQWLQYLHSVGLLLGSFRPTQAICASRSIYRYRQNLLSMAAQHVQHMQAALDQMNIKLHHVIDDLTGVTGQAIVAAILAGQRDPVQLAQLRDKRIKASEATIAKALEGDWRKEHLFVLAKAWGQYQEVQKQIQDCDQELWNYTRELETCTQVIKAAKVMRLKPELVGAEALTEPPTKKRLRRKTSKNQPEGPWQQELERFFGVDLTAIPGISVLTGLTLMTELGNDLRAFKTEHHFASWLCLCPDNETSAGKVLRRRTRRSQNRVRQALRMAASSLHHDKSSFGDKFRRLRARLSPAKAITAMAHQLARIIWTLITRQLPFDSRVFAYHEKAHQQRRLKRLAASARQMGYQLTPIAA

SEQ ID NO: 327549 - protein, 338 aa, unidentified
MNIVFLDIDLAKNVFQLCGLNQAGKPVYTKRTGRKELLQTLANIPACLIGIETSTGAFYWQREFEKLGHKVKVISPQYVKPFVRGQKNDGNDAQAIEVALMQPTMQFVPPKSPEQQDIQALHRARQRIVNHRTATVCQIRGQLLDRGIPIGSAVSRAHRAIPLIPEDAENGLSSRMRRTIAELYDLFNDLGRRIHFFDKEIETVFRQSEACQRIAKVKGIGPETATAVVAAIGKGTEFKNGRHFAAWLGLVPRQHLSGDRQVLMNMTKKGARHLRTLFIHGARAVVRVAMNNNDGHMNQWVNQLKERRGFNKTTVAVANKNARIIWSMLRNETGYQVV

SEQ ID NO: 327550 - protein, 454 aa, unidentified
MQKQDSYDYYVGIDCAQNKHDFAMKNNQDKFLIKKGHFSNTLQGYEKFLNTVLSKCLDKDKILFGMEVTGIYGTNLYESLKSDGYHVVMIFPDSVKNYRDYKRLNKTDKIDSACIAELLLNGDAQIVHAEKNGYTDLKAYIRRRNALKVTCTQETNRFLAKVCLYFPDLLKVFPSGRATLKAIFSIYPTPYSIIEADFNELVSVLQKASKNKFGVDKANELIHAARNSIVVRKSISDGELYNIHSLIDSIDSLESEIRHLEKIIDSKAEEFPAYHVLLTLTGCGKITAATIVAEIGDISRFHKASQIVSLAGLYGDNSKSGSSVNKRGKISKKGSRYLRHAIYMVAEFARRNNPIFKAYFTKKKNGDRTKHILAVNAVANKLCKVIYSLMKNQSTYIIQYRDLAKLSESTQNEFFQNAETDFSAKTRRKKYLYEDEYGELHEFVFKSIKTALIE

SEQ ID NO: 327551 - protein, 340 aa, unidentified
MNTMTLLGIDIGKHSFHLHGQDAKGHQVLRKKTNRGQLLSTLAQVPSCTVVMESCGGAHWLARQIGALGHEVKLIAPQYVKPFVKGNKNDFIDAEAICEAASRPAMRFCSIKTAEQQTLSALHRVRKSLIGQRTVATNQIHGFLLEFGISLPIGAAALHRVPALLDDPQHPVPLRLKGVVMRLHHQIQQLNDEIKDIESDLKQQLKEDDAGSRLQSIPGIGPITASAVLADVGDASNYRSGRDFAASLGLVPRQYSTGGKTVLLGISKRGDKHIRQLLVQGARSIMQHIDKREDALGPWVRELVTRRHSNVVACALANKLARIVWAVLAKGGQYDPHPNA

SEQ ID NO: 327552 - protein, 348 aa, unidentified
MLADQVDYVVGVDPHRDSHALAIVHVLSGVVVFETTIAASGQGYAEALQFVDAHAPGGRAFAVEGSGSFGAGLTRFLTSRGERVLEVSRLRRERRAGGKTDALDAVRAARSVLGEERPATPRAGGERQALQALVAAREGAVNAKCAGLAQIRDLLITTPEPLRNELRPLTQAPLLRRLAATRPEGRRDPELRGSMLALRSVARRVLQLQTEERELGRQIEALTRKLAPQLLDQPGVGPHAAAQLLLSWSHPGRIRSEAAFARLAGAAPIPASSGQTVRHRLDRSGDRKLNRALHMILITRKRAHPPTIAYIERRMHEGKTRREANRCLKRYLARSLYRLLEHGPPIAA

SEQ ID NO: 327553 - protein, 357 aa, unidentified
MRREFHAQFWERLGVRSPRPTRPSKHIFQLHGVNAAEVPLLRKKLRRKEMVTFFQKLAPTVIAIEACGASHHTARLLQSFGHTVKLIAPQLVKPYVKRSKNDAADAEALCEAMSRPTMRFVPVKTAEQQAALMLVGVRDRLIRNRTQLANAIRGHAAEFGPTAAKGMAHLVPLLERIEADESLPALARELFAIQAKEFVQLQAQIEEVDAKLTAWHRADECSRRLVKIPSIGPIGATLLRMKTPDPTQFESGRQFAAWIGLTPKDHSTAGKVRLGVITRAGDETLRSVLVVGATAVIRQAQRSGTASPWLAALLKRKSPKLAAVALANKTARIAWKMMLTGEEYIVKSTAAISAGAV

SEQ ID NO: 327554 - protein, 412 aa, unidentified
MKLFVGIDISLKDFKARMFDAEGEEIAKRIRCKNDDPGAESFVKYLIEICSAKNVDSLRIGLESTSVYGWHLQMHLAGEPSLVPFHPQVYVFNAKIVANFRKQYVDAPKDDWFDCLVIADRLRFGRLPESCQVDFRYLPLQRLTRFRHHLTQSITREKNYFLSNLFFKFSTICQDKVLSNTFGAASEAILTEFLSPEEIAARPLDQLIDILMEKGRSHFADPEATAKALKAAAGKAYRLHASLLEPVNLVLATSLQTIRTMEQQVKGIDKAIEKELSHFPNTLQSMPGIGPVCAAGMIAEIGDIHRFDNEKSLAKFTGLTWRKHQSGEFEGDDTPLTKTGNVYLRSYFVLAAECVRRNDPKFAEFYARKFKESTTHHHRRALVLTARKLVRVVDALLRSNQLYLPQGQRKAV

SEQ ID NO: 327555 - protein, 443 aa, unidentified
MGNSLPEGFQARETMQKDRLMSKDNVEIAAFVGLDWADQKHAVTLQESGSDQRHRFILDHTPEALQNWIQSLRDRFGGRPVAIAVEQKRGALIYALMHVEFLHLYPVNPVTAAKMREAFYPSGAKDDPNDADLLLDILISHRRHLRVWTPDDALTRSIQLLTEDRRRVVDERTALTNQLTAVLKTYFPQALDWFGDLHTARACAFLQRWPSLQQLKQASPSSIRKFHKAQGYRGDDKREQLVADIKKAQPLTQDSAVLLSGSMKVEMLVQQISLLTEAIERYDQKIAALFDQHDDSTLFGSFPGAGPALAPRLLAAFGSNRDRFEFASEMQELSGAAPVTEKSGEGIWIHWRLGCPKFLRQTFHEFAGYSIFKSDWARACYDQLRKRGKSHHAALRALAFKWIRIMFRCWKNRTPYDEALYCNSLKFRRSPLADALPAKKWLT

SEQ ID NO: 327556 - protein, 461 aa, unidentified
MKIRLGVDVACRAAHQVSCADEYGVMLWVGHRFRTDPDELEALWRKLPPDAAEVMVVMEPTRNAWVALAAWFRRHGAAVVMIPPEQSADLRAYYAKHAKTDRLDSKTLARLPLLHPEGLHREDTLGPGEMLKRAVKVRSGLVHRRTTSMARLDALLEILGPAWVAAIGSDMSLTALRFLARYGDPRTVKRLGPARLAEFFRRSSRGAWHHERADAVIEAAETTLRLWGADGLDFDALAADIAVEARLALAVSEEIKELDKRIAHAYERVDPDGIVRSAPGVGRIGAPQIAGRLGEATRFANLPAVRSFAGLVPRQDSSGIAARAGGPTKAGDACLREALFIAADHARKIDPTLAARYHRLITEGGKHHNSAVCTVAAVLLTRIAACLRAGRPYQLRDTDGTLITEQRGRQIVTDRYTIPAAVRASRRHLTSTTRTSRRNERAQKGVARRSEAPPVPEPACT

SEQ ID NO: 327557 - protein, 340 aa, unidentified
MVHVGVDLDKRSSQIAVLSEDGEIVQHRLANDAARLETFFADLPPRTPIAIEASGTWWWLVDLLEELGHQPVLSNPKQTKAIAAARLKNDRVDAERLALLLRGDLLPKVWIPPTALREARELIRHRIQLVWLRGVIRNRLQAMLARRNLQPTSGKSWLTQRGQRELQRLPLGETPSRIREDCGALLPTLDAQIRRLDAELVTRWGADARVRRLTTIPGIGPFIAIVLVLELGDIQRFASAKRVASYVGLTPRVRGSAGRVRAGHITKEGNRLLRWVLVLAATQAVRRPGPLRTWFHAVKKRRGKKVARVALARRLAEIVFHVWKQECDYFTVVRHGVVRG

SEQ ID NO: 327558 - protein, 403 aa, unidentified
MFYVGIDVAKEKHYVCILDDTRELACKPFWIHTDIVGLGTLVKTLANLSLSNDDFIIGVESTGAFSENLYEYITESDYRVVLLNSYQTAKYRDFSTIKKIKNDTIDAYVIAELLSTGKYKESYISNDDYQSLKVLGRLKKSLNDKIKSIKREISTVMAIVNPEITRVFPNIFSKTALETIKAYPTAVDISKATPKKLTKLFRHIKGNNFNEDKARFLIDLAQTSVYAGRARESRALMILTNIKILELLCQEQSAIESEIELLIYGKIDAIDSSIDNLKSIPGVSDKTISAILGECGDIKRFDSAKAFIGYLGLYPTQYQSGNHISIGRLAKRGIPIAKHALYMAAVSSVRHNDQLRKLFRDKVSAGKSKKEALIIISKKIATIIYSIFKYNKPYEPNRVFIPR

SEQ ID NO: 327559 - protein, 433 aa, unidentified
MKVMHERVAGIDVHKDMIKVAIRSPGEKPWTRRTEILTFRTFYGVLQAAARELRRRGVTHVVMEASGVYTEPVYYALREEDFTEVAVVNPAHAKALKGHKTDAKDCARLAELFECGLLQGSYIPAPELKELRDLTRYRTKTVQARASEIQRLGKALESAGIKLGSVASDITGKGPAAMIGALIDGERRGAVMADLAIGRMRAAGKLADLSMALEGRFTEHHALLCRLTRDRITVLDAAVADLEARITARAASWQRETGLLKTIPGISDAVAWTWIAEIGPAPHQWFGSHEKLASWASLAPGNYISAGKRRHGRTGDAGTYIKPMLVQAAWAAIRVKGRLQARYNRLVRRMGGPKNPAAKKKAIVAIAHTLLKIAYAVLKTGTPYQDPGADFYTRRESPGHRQAWLERQLQALHPGRTVTITISPPADAPALPP

SEQ ID NO: 327560 - protein, 319 aa, unidentified
MSKIICGVDVCSVDLQARIGCDGPECCFPNTTEGIAGLADFCRQHGVELVAMEATGGYEKQAFSQLWALGLAVAILNPRCVRRFAEGMGWLEKTDRIDAGVIAWFAQVKRSRPCTPASAQQEHLQALVTRLRQLTELQTMQRNQRLLVTDPTVLASFTQVLALLASQIRALATAISEQIAADPLWQQLDQAFRSIKGVADRTVACLMAEMPEIGTLSNKAISKLAGLAPLARDSGTIHGKRAVRGGRAQVRAILFVVASVVRRHHPDFAAFDRRLSAAGKPKKVIRVALAHKLLVRLNAKARQIRAQLRETASGVLVHS

SEQ ID NO: 327561 - protein, 358 aa, unidentified
MSLQTIIAIDLGKFKSVVCVMDVATHEHRFETISTTPATLHEVLVRHAGDDPSKAVVVIEACDAAGWVHDQATALGIECRVANCCHEAWKWKKVKRKTDKDDALKLAKMMLLDQLPTVHMPDARHRQRRRLIQHRRSLVGRRTQCKNAIRSIFSQQGLTEHLPRGSKAWTKPGIAQLREHARPLAECSIDELWRGRLHVELELLEAVSTQVRLVEQKLDQLLDEDASAKLLTSVPGVGPRLAETVAVCLDDPHRFKSGAEVSSYAGMVPKQIESGTMKRIGRITRRGPSLLRGMLIEVAWMVYRHNAWAKAFVEKVSRGMKQRKKIAIVALARRLLVKLWAMLRTNTPWRDPGAVCIT

SEQ ID NO: 327562 - protein, 382 aa, unidentified
MSSTNRNTAAASTIYLGLDVHKDSITVAVLPATAAAPTRVERLPNDLPKLRRLCTRLAREGELRACYEASGAGYVLHRVLREWGYACDVIAPSLIPKRPGVQRKHDKRDAIELARLLRAGELTAVRIPSETEERVRDLVRCRETFQRELLKSRHYVLKFLTRRGFVYRDGAHWSRGHMTWLHAFAARETPLVAEDAIVFREYLALLEYKLARRVELDTQIEALALTPAFMTPTAWLQCFRGIKCHSAMVLTTEIVDWRRFDTPRQLMAYLGFVPREHSSGPRERRGGITKAGNSHCRHVLLQAAWSYRHPPQIGTSLKARQRGQPAAVVAHAWKAQHRLHKRYQHIAHRRPPQIAVVAVARELIGFLWGVMRDLDTPPMVAA

SEQ ID NO: 327563 - protein, 344 aa, unidentified
MTQFVGLDVSQKDTAVSVVDEEGRQMWRGKVKTDPTAIADVIASRAPDAKRIGFETGPLSTWLWHALKDRGLPLICLDARHAKAGLSVQVNKTDENDALGLAQLVRTGWYREVKVKSLDSHLVRGVLGARSQLVSTRIHLTTTIRGLLKNVGVFVAVGHRQTFASAAEEAIGAQAGLAAMVAPLIAAWRAITEQIRAYDGLLRRRAAHDDTTRRLMTVPGVGPIVALAFASMVDEPGRFAKSKSVGAYLGLTPRRYQSGEKDVTGSISRTGDTLVRSYLFEAANVLMTRVKRWTGLKAWGVKLARRIGMNRARAAVARKMGVMMHKMLITNTDFRWGKEEAVAG

SEQ ID NO: 327564 - protein, 429 aa, unidentified
MNYNTQNAKIASITEKTLIVGIDVGSETHYARAFNWRNYEYSKKPFAFSNDEAGFSSFKDWMDDIAEKHGMKVVIPGMEPTGHYWLNLGAYLQEQGMKPVHVNPHHVKKSKELDDNNPSKNDRKDPKTIAGLVNEGRFSYPYIPTGIYAEIRNLSNLRIQTQEEITRIKNRMARWFSIYFPEIKDVYRNPDAVSGLMVIKQAPLPCDIKELGVDGVNKIWRDARLKGAGLKRATTLVTAAEHSIGNTEAPRSARKEIRNLLNDYEIYKNRMDELMEEIKETLSEIPYIDKLMEINGIGIKTVSCVIAEVGDIGRFDNPKQVQKLAGYAIVADSSGKHNGESRISHRGRKRLRYALYEAAISVIGKNKEFKEIHSYYRTREKNPLKKMQSVIAVACKLIRIFYTILTKGVDYDGQRMLADIVRPEMQLAA

SEQ ID NO: 327565 - protein, 521 aa, unidentified
MESVAAIFSLVARKRFGVFEDPVCETASIFRRLSQAASLSQGNQTMKKHKKTKPNPEAAKPLHEPKPDAAGIDLGATEIWVAVAPDRCQMPVRRFGAFTQDLLAILQWLLECGIRTVAMEATGVYWIPLYQLVADAGIEVCLVNARHVKNVPGRKSDVRDCQWLQYLHSVGLLMASFRPAQIICQTRSIYRFRQNLLTQVGQHLQHMQAALDQMNIKLHHVINDLSGQTGMAIIEAILNGERDPLRLAQYRDRRIKATQETIAKSLEGDWRSEHLFVLRLAWENGKQVQEQIKKCDQELMQYTRQLEAKTIVAQPIVPVKIMSLNVEPGVPELTPAPAVRPAKPRKKTSKNEPDGPWRENLHRFFGVDLTLIPAISVLTGITLMTELGNDLSAFKTVHHFCSWLCLCPDNETSAGKVLHKSTRRSQNRVRQALRMAASSFHHDKSYLGDKYRRLRAKLGAPKAITAMAHQIARIIWYLITHQVAFDMSIFAELEKANQKRHLNRLNSAAHQMGYQLTPIAA

SEQ ID NO: 327566 - protein, 387 aa, unidentified
MPQPNDLSRSLVALDQNSTIIAVVELSQSSWLVGGVVPGIERQPRKKLEPSPERLLAVLYRWRDEAVGAGRAITRIALAFEAGRDGFWLARWLEARGVEAHVIHPSSVAVSREHRRAKTDRLDTELLKRGFLGWLRGERGHCSMVRVPTIAEEDAKRPNRERECLVGERTRIVNRIKSTLARLGIRNFKPTLRKAAERLATVHTPEGMPLPPNVLAELQRDMARLGVVVSQIREIEDARQKGLEQKPDTGPHAMVRLLARIVGVGVETADMLVHEVLSRPLRDRRAVARYAGLTGSPDESGAQRREQGLARAGNARVRRGMIQLAWRFLMFQKDSALARWYRARTADSRSGTRKTMIVALARKLVIALWRFVTTGEPLEGVVLRPAA

SEQ ID NO: 327567 - protein, 370 aa, unidentified
MGKSTPLFVGLDVHKDSIAVAHAQGQSADPPVFLGEIGTRQTDLAKLIRRLQAKTSKLVFAYEAGPCGYILHRDLTGQGFDCHVVAPSLIPKKPGDKVKTDRRNAVDLARLLRSGDLTRVYVPTVEDEAIRDLCRARDAARLTLKNAKLRLKAFLLRLGLHYVGRADWNDAHRRYLAKVVCPTPAQQIVFQESVRAVDEQVDRLARLEAELRELAPAWRLYPVVQALQALRGVQWLVAITIVAELGDLTRFTSPRQLAAFVGLIPSEYSSGPSRRQGGITKAGNGRARRALIEGAWAYRHPAKVSQHIQTRIDALPKPIQDIGWKAQVRLCKRFRRLVARGKHPNVAVTAIARELIAFMWAIATEVPVTV

SEQ ID NO: 327568 - protein, 314 aa, unidentified
MDSPCSLGIDLAKSVFSIHGTNQHGKVVVRKRLNRPKLLTFFAQLPPCLIGMEACSGAHYWARELTKLGHDARIIAPRFVAPYRKSSKNDDNDAEAVCEAVSRPNMRFVPIKTEDQQAVLCLHRIRRGLTKERTAQINQIRGLLAEFGLIIPQGRYHARHRIPEILEDAENGLPMLARRLLNNINQRILQLDEEILAYDREIEAMARRDEQAKRLMAIPGIGPQTATAILASAPDPRQFKSGRHFAAWLGLVPRQYSTGGKPRLGRITKRGDKYLRTLLIHGTRAVIAKLADKHDQLSQWAKGLVERRGYKRAD

SEQ ID NO: 327569 - protein, 401 aa, unidentified
MAAVRDNAWVGIDVGKTHHWVCAVDADGKTLLSVKVANDEAGIVSLIAAVTALTQQLTWAVDIIGAPSALLLALLAQAGQPVRYASGRVVAAMSAAYVGEGKTDAKDARVIAETARLRRDLAIIDTDTDLVRNLAVLTGHRADLIADRVRMINRLRDLMTSVFPRLERAFDYSSHKGALVLLTGYASPDRIRRIGQTRLAAWLRTRHVRGFADVAARAIAAAKAQSVVLPGQDLTASIIAELAGNVLRLDERLKSLDDQIEELFQQHPQAAIIQSMPGFGPFLGASLLVGAGDLRAFPNPGHLAAAAGLVPVPNDSGRRTGNLHRPLRYSRPLRHVCYLSAQTSMMRAGPNRDYYLKKRANGRTHSQAVIALARRRIDVLWALLRENRTWTATPPQLAQAA

SEQ ID NO: 327570 - protein, 349 aa, unidentified
MKILAIDLGKYKSVACNYVTTTGTARFVTVVTHVLELDRLLLRESPDLVVIETCSIAGWVHDLCCQRGVTCQVANPSSEAWKWKNVKRKTDRDDALKLAQLAALEQLPTVHVPAPETRQRRALLKYRQSLITRRVAIQNHLRAIVQREGILLDRGGRAWTAAGFEVIQEISKPLEQCSEDELWRGEAALELQALEAVTKLLREVERKLEVLAASNERVKLLRTIPGVGRCTAEVVVAYLDNPQRFENGRQVSAYAGLVPKQSQSGETDHRGRISRRGPSLLRKMLVEAGWILLRYNPWAQRLVLRLSRGQKTRRKQAIVALARKLLVRCWAMLRDGTEWHEPPPATATA

SEQ ID NO: 327571 - protein, 427 aa, unidentified
MLGVGIDWAEEFHDVALGRPGDGVFDEVHVDHTPAALDALIARIVALEPDPAEVRVVIETRHGLLVERLVDAGFTVLPVNPDLIARRRGPAKKKDDAEDARIACLLALDRFTDLRALVPHGAPAGELRAIARDDVRAQRDARRLLNRLRADLLATFPAAMIIAGDDLGAPTLLKLLQRWPSADTLAAAPRDEIEAFARTCRHGWPDRFADRVQAALAVDQLTAKPYLVRAKADTIRLAAAQLLLIHTQRRVWEKRMGALLLGAPREGRSNQPGDDRGPAVPGGEIYLSFPGLGDRLAARIAAEIGDITTFTTANALQCYAGKAPVTRRSGKSELTVATRLACNRFLADAVQQWAFTSLLRSGWAREFYDAKVAVGNNHHKALRALGNRWLEVLWHCLTKGMSYDETIHVANRNHALGRLTEPKKRAA

SEQ ID NO: 327572 - protein, 349 aa, unidentified
MILLGVDPHKSTHTATAVEPESNQQVGTMRIEASLTDYRRLLAWAKRWPQRKWAVENANGLGRHLAQWLIARGESVVDVPAAATSRVRELSRGGRRKNDQIDAAAAATVACLQGDGRDVEPEDHTTALALLDERRVNLAQARVRTVNQLHALLRDLLSGGAPTQLSADLAVKLLRSVRPAGDVETVRKDIAWDLVAEIRRLDKQLTDNAARMQSLVEASGSALMDTPGIGPVMAARLIGRTRRAHRFPTSAAFANYAGAAPVEIASADKARHRLSRSGDRQLNSVLHTIAVVQIRMPKSPGHAYYQRKLSEGKTPKEAKRCLKRRLADHVWRVMIADERRVKSLPGQAA

SEQ ID NO: 327573 - protein, 341 aa, unidentified
MQITTIGLDIAKNVFQVHGIDAAEKVVVRKQLRRGQVMKFFAALPPCLIGMEACATAHHWARELTKLGHEVRLMPAKDVKAYVKRNKNDAADAEAICEAVRRPTMRFVGAKSAEQQGRLMQHRTRDLLMRQRTQVINALRAHLAELGIVAAQGREGLKQLLTIIADEKDARLPIDARASLIVLAAQLQALHTMIGSIEKRLTVQHRANESSKRLESVPGIGIIGASAIAATVTDPNAFRSGRDFAAWIGLVPRQDSTGGKQKLGPISKQGDRYLRRILVVGAHSVLRRARQAPEKYPWLTQLLARRPFKVVAIALANKMARVAWALLARGGTYRVPALAAA

SEQ ID NO: 327574 - protein, 352 aa, unidentified
MKPKTKTTASLAVVGVDIGKEVFHLVGLGTDGTIAFRRKIRRSSLKDVFEQLPPCVVGMEACLSAHFVSRTLRALGHEPRIIPAIYTKPFVKGQKNDYNDAEAVAEAALRPNLRVVQEKSQTQLDLQACHRVRSRLVSRRTATINQIRAFLIEQGITVRAGARALRNSLFTILENRKDEISPRMAKLIHGLYEDWCCLDQRIETVTGEIEELSRIEPKCQRLMSVPGIGPLISTALVAAIGTGEAFERGRDLGAWLGLVPRQYSTGGRSILGRISKRGSRYLRMLLVQAARVLLMRPHTWSRFSFGAWLKAASERLHRHKLAVALANKLARIAWSVLRHDKAFDTHLEIAAI

SEQ ID NO: 327575 - protein, 338 aa, unidentified
MPTDQTGQTYALFVGVDIAAQTAMVATQRPGAKASRSLTIEQTPEGYTSLLRQLQATGFVPCQVLVVMEATGSYWMSLATRLVHEGFAVSVINPAQAHHFAKALLKRAKTDAIDAQTLAQLAMILQSEPWTPPPQIYYALQQRLAQRDDLLNLRQQVRNQLHALVQHPEVIAEVRARMESLLATFESQLTEVESEITAALSQDSAWAAAATRLQSIKGVGWVTAAWTLVTTLNLTSCDTVDALTAYAGLAPMPRQSGSSVWHRPSIGHTGNGRLRTAFYMATLSAAQHNPVIKAFYTRLREVGKPEKVARCAAARKLLHIAWAVVKKDQPFDPNYALG

SEQ ID NO: 327576 - protein, 340 aa, unidentified
MDITTLGIDIAKSVFQLHGIDADGAVVVQKKLRRGAVLNFLGNVGPCLIGMEACATSHYWAREIAALGHEVRLIPPAYVKPYVKRQKNDAADAEAICEAVTRPNMRFVPIKTEEQQSVLVLHRARDLLMRQRTMILNAIRGHLAEFGIIAAQGPRQVKGMIARLRDDGDASLPEIARSALLALGAHLEALAGEIRALERQLIVWHRADPTSQRLETIPGVGLITATALAASVSDPSVFKSGREFAAFLGLVPRQNSSGGKDRLGRISKMGDRYLRKLLVVGATSVIRRAGSNSTKTGAWVRSLMERKPARVVTVAMANKTARIAWAVMTRGEAYRASPIA

SEQ ID NO: 327577 - protein, 394 aa, unidentified
MNGTENQGKGRIIGMDIHPTVFSACALENTDARTVAELFMHDRVDMDDLERWHKKNHQPGDLYVMESCNNSFETAERLKKLGAHVVVLESLRIGQIQKAYLKDDKVDARKVARVYLSGLGVEVWQPDEKTRERREVLAVYDRVKRDSVRCRNRIWSWLTQHGIKKPEGLKLAEESSLNWLLQCRQWSLRQELLIRTMHSNLVYAQSKRKELKRLMAAEIAEDPELLKLQQLCGLRLVVIYALGAVIGDISRFKNPKRLVAYIGLQPSVKQSGISDRSGGLRHTGRKDLRCLLVQAAHAILRMGPSNNSLATWGRALTYRKNRNVAAIAVARKLTVYIWYLLRGFFTPLQNLSTSFRTKLQKLAVEIGTPMRREMGYKTIQDFIHKKEEILLAGG

SEQ ID NO: 327578 - protein, 337 aa, unidentified
MEREQRYVGIDFHRRRSVIVHKDGVGTILETVHLDNDPVAFARELEKAGEHPEVVLEACYGWYWLADLLDELGANLHLAHPLGNAWGNRRVKNDERDAEDLVDLLRLGRLAEAYVAPPELRELREVVRYRAKLVALRSGLKSQVHSVLAKEGVPVPMSDLFGTAGQDLLNTAKLGRVYRIRIESLRDLIVHYDKEIAMLDGEVDRWLAGDKGYLAIQQIPGVGPVLGAVFVAEIGDVSRFSSPDKLCCWAGLTPRHRESDLHVVRGPITKQGSRLVRWAAVEAASRHHGSQSERFERITARRDSKKIARVALARHLITLVYYGLRDGEIRCLAGKAG

SEQ ID NO: 327579 - protein, 411 aa, unidentified
MERVNPRSCGLDVHKASVTACIRVAQGEQVVQEIRTFATDGAGLSALRDWLESQRIDQVAMEATGVYWKPVYYALEDCAAVMLVNAAHVKQVPGRKTDVADSAWLAQLLEHGLLRASFIPPQPIRDLRDLTRYRKSLQEEHSRVANRLEKVLQDAGIKLSSVASDILGVTGRQILAALAGGHSSPEVLAELARGRLRQKKQELREALRGRFREHHAFFLGRLLIDLDNLEESMTEVVARIEELLRPFAAELELVCSIPGVKETVGPVLLAEIGVNMQCFATPAHLASWARLCPPHNESAGKRRRGKWSGHNRWLRTALIQAANAASRKRNCALAAIYYRLRARSGHNHAIFVLARHILELAWLLLSRRTRYHELGATYFETRRREQAKRRSLNQLKRLGYNVTLTPIPQAA

SEQ ID NO: 327580 - protein, 344 aa, unidentified
MSQVTTIGLDIAKNVFHAHGADERGAMVFSRKLTRAKLLEFFAGQPVCIVALEACGGAHHWARQLQTMGHDVRLIPPSYVKPFVKRNKNDAIDAEAIAEAAQRPGMRFVAVKSEEQQAAGLVFRTRDLAVRQRTQLINAIRGHLAEYGWVAPRGTAHMTMLADLLEDEEMTSSLPAAARPMFKLMVDMLADLDKQVAVLDREIARRAKEDEAARRLMTIPGIGPIAATAIIALAPPIETFRKGRDFAAWLGLAPRQHSTGGKQRLGSISKMGERTIRRLLIIGGSSMVRQACRFGAPAGSWLERMLARKPRMLVSVALANKMARMVWALLTRMEDYRAPTAVAA

SEQ ID NO: 327581 - protein, 341 aa, unidentified
MHRSQITYDWIDPDTGQRQRGQLAPAHREHLRVWLEQFAGRQAAFAVEGCTGWRYVVEELQRVGIQAHLAEPADTSAARGPKRRAKTDQLDARHLRELLACGRLPESWVPPAQVLEVRTQVRCYKALADEHTAWLQRVQATLFHHGVPAQRNLLAPDRRARLERGSGLSPAASQQVTVALRTLDHLDGELDRLRGELVGLARRQPGCRALDALYGIGPVTAVAIWVELGEVGRFTSSRHAVRHTGLDVTVYASDGKRTPGHLARQGPPVLCWALFEAATCAARASSPDHVYYTQVKQRLGGNRATLSVARKLTRRCYHTLGALGEQAYAPPCHPHDLEQVA

SEQ ID NO: 327582 - protein, 460 aa, unidentified
MSKAIGIDPDSKGYVCCLVDTGEERTKRKGFLSTVPDLQRLVRWVKNEGEVIVALEGSNGYSRPLEKAFREAEVVFYCFRPSDVSKFRKAVLGQNKNNEKDAESVARYALALQAQGKLEQFRRVWFPDEPLRLLTRSYERKSKELTEELNRLWKVLRLASPDLYLALGGFNPEVEISQNVLQNQGILSLLEQKPDLFEWKSLSREDFSVAMGGGQYRGRENLIEALQKLSPVFPPLPHGVSLVIRDSAQTIRQIKRQMSGMQKMIAEITADNRAVKALEEYRGFSVITAATMVAEIIDIRRFVNDDRLASYAGLGRREYSTGDRSMMIPSQQFNHRLKDIFMTAARNFVRYNPDSHLAGYFRNLVKKGMKLTEARKRVARALVRMIFRKLRSLVSEGSEQDRGSESDMASGLDSRGELCRTSNISLSTPTKNDTKLVGKIKRRTRGKGARKENQVLVEKS

SEQ ID NO: 327583 - protein, 340 aa, unidentified
MDKVTMIGIDLAKNIFWLHGADERGRMVFSKKMSRAQRPEFIVKLQPCTIAMEACSSAHFWGRKFIKMGHEVKLISPQFVKPFVKSNKNDAKDSEAIVEAASRPSMRFVAVKTTEQQEILSLHRVREQVVGNKTALINELRGLLGEYGIIIPKQASNVKKYILEILEDDANELTSGMRVLINDLYCELKKMIERVLVFDEKIKDLSKKSEVCTLLETIPGIGPTTSTAMAASVGNAKNFKNGRELSAWLGLVPKQYSSGGKQILGRISKRGDVYVRKLLVHGARTVLRYAKNKEDVVSKKWNTLAERIGHNKACIAIANRNARVAWAVMTTGSPYRTEVM

SEQ ID NO: 327584 - protein, 356 aa, unidentified
MSRDVKYIGMDVHKEAIVIAVLNDGGKLAMESIIETKASTLLQFIHGLRGELHVTWEEGTWAAWLYDLLKPHVHQVLVCDPRRNALLKEGNKSDKVDARKLADLLRTGMLRPVYHGEHGLRTLRELGRSYQTISKDLNRVMNRVKALYRGWSIPCAGTQVYAPRCRQEWLDKIEHAGVRRRAELLYEQLDGLQALRRTLRPELLAESRKHKAAKLLRQIPCIGPIRAARLIGLMQTPHRFRSKRQLWTYSGLGIETHDSAQYCYVNGQLQRSKKPQQIRGLNRNHNHEMKEIFKGAATRASCGVGPLRDFYVTLLDKGMKPEMARLTLARKIAAIALTLWKKEERFDAEELKTQAA

SEQ ID NO: 327585 - protein, 468 aa, unidentified
MKQAQRRHGKRKPVAGLSLLERINPNAAGIDCGAEEHYVAVPADRDPTPVRAFTTFTADLHRLADWLLACGVTTVAMESTGVYWIPLYEILEARGLDVVLVNARHVKHVAARKSDVLDCQWLQELHSVGLLRGSFRPTAAIAALRAYLRHRETLVQSAATHIQRMQKALVQMNLQLTVVLSDITGVTGQRIVRDIVAGQTDPHALAQHRDARCQASEADIIAALTGHYRPEHVFVLQQNLELFDMYHRQLAACDEAIEAHLATLAAQAPPPAAPLPAPRTKAKPKARDNAPRFDMRTPLHQLTGVDLTQLDALGPYSALRLLAEIGPDMSRWPTEKHFTSWLTLAPCNKISGGRLLSSKTIPSANRAAGILRLAALSLGRTETALGAFYRRLAYRVGKAKAITATARKLAILVYRSLKDGLLYQDSGAAAYDAHTRERVLRRLRQRAAHLGFSLVNRDTGEVLDHAVS

SEQ ID NO: 327586 - protein, 336 aa, unidentified
MLCGAIDIHKHVFQAVVLDPESGESVEDRFPASREELGRWVKQRLGGRECVVAVEATTGWRWVWRELVRAGIDVRLAEPVQARALRGRRRAAKTDRLDARWLALLLARDMLPEAWAPPLEIQRLRDLTRLRHALTEDRTRWAQRLHAFLAHEGWSCERGRLLTATGRRWVRALCLEPAPTRHAERLLGVIEALDAELAEVEREVRVIAREDPRARALQTLYGIGPVLACTLLAEIGEARRFRRGAQVVRLAGLDPVVEESADHRRRGHLAKAGSPHLRWALVEAAVQARRPAHVDHALHQQICTRADATRARLSVARKIGRRAYHVLREHELAQAA

SEQ ID NO: 327587 - protein, 491 aa, unidentified
MANRKISTFERLQRGKLSRKQCKELGRRLQSPNPGLEIIHRNAAGIDVGSGSHFVAVPPDRDVQAIREFGSWTAALHELTAWLKSCAIDTVVVQATGVYWVVLSDVLEGAGLKVWVVNAQGTKNLPGRKSDVQECEWLRKLHTYGLLRNSYRPPEEIRGLRDLWRLRERLVADAGRAVQQMQKALTGMNLQLTNALSDISGVSGMAIIRAIVGGERDPWKLAQLRQPGVRASEAEIAENLRGTWREELLFELRQVVAHYDFLGKQVVELDQLLEKRMAAMPSREVATKGSPVAEKEEVPEGKRRGRKPKTKVKPPPKNAPAFDIGRELTRLLGVDLRTIDGVNIHIAQTVYTEVGPDLSAFPTEGNFTSWLGLTPMRSVSGGKVIKHEKKRVKNRLADALRMGASTLERSQSYLGARFRYLKARLDGRRAVKAMARYLACLIYRLMTKGQAWIDRGEAYFEQKKAERELRTLQNRAQKMGLQLVPLATVNA

SEQ ID NO: 327588 - protein, 417 aa, unidentified
MNSPPETIPIQRYIGIDIHQHYLMIGGQNRHQEWTLRPRKVQVSRFRDWAEKNFQPGDAVVIETTGSVWDIYDIVAPLVTRTLVAHARKVRQIAEARVKTDKEDIKRLITLLIADIVPEVWVPPMHVRELRSLISFRWRLTKQITMSKNRLHSVVQRFNLNFPEGGLLTDTNKSWWEEQEFSDLTGFEVKQDLEIVKTLEGQKEAIDQKLAELSNAEPWSSDMVYLMQIPGLGLIFSMVILSAIGDIKRFSHPKRLVGYAGLGAGVHDSGKKHQGKSITKEGRKELRWALVEAAWVAVRSDPFWKAQFQRLEKRMPRNKAIVAVARRMLVSIWHILTKREPYRHFDEETIAYKMLIWAQAIGEEGRQGLTRQQFAKYGLLRLGIGQDLERIVKGGGPRRIAPTEEVLALKPELAPPR

SEQ ID NO: 327589 - protein, 371 aa, unidentified
MSELPAETRPARLKVEASPRPPGARKPETELGAVSTTAVPHPDSRSGPSPHLQGRVMDEQRAVFVGIDVSKDRLDVHLRPSGKAFCVPREGKGMDDLVIRLQGLPVALVVLEATGGFEATVAAALAGVGLPLCVVNPRQIRDFARAMGRLAKTDTLDAEVIALFAERVRPQARPLREPERVHLAELVGRRRQIIEMIGMETNRGRQAIDKPLARRLARHVAYLQKELDAIDHDIGDAIKHSPAWREAEALLKSVPCIGDVTARTLLAELPELGTVSRHQVAALVGVAPINRDSGLMRGRRAIAGGRTSVRAVLYMAALTAIRRRSPFRAFYDQLTAHGRPKKVALVAVMRKLLTILNAILRDHTPWRPLNA

SEQ ID NO: 327590 - protein, 381 aa, unidentified
MEISPAPAAPTNDVEPATLFVALELSKAKWLVGLHSPAADKISRHTIAGGDAPALLRLIEVARRHVEASLGGEVRVVACYEAGYDGFWLHRLLLAHGIANQVVDPASLLVNRRARRRKTDRIDLAGLLRTLMAWHRGEPQVCSMVHVPSPEEEDQRRRGRERERLVKERVQHLGRIKGLLMTQGVRDFQPVRRGWQERLGALRAGDGRPLPGCLKAEITRECRRLALVDEMLDELEREREAASDGKAPQQAALLSKLRGIGPTSAHLLAEEVFHRDFANRRQVAAYLGLEPSPWQSGQRDHEQGISKAGNRRARRVAVELAWFWLQHQPDSGLSRWFKERVGTARGRVRRIMVVALARKLIVALWRYLASGTVPEGALMRA

SEQ ID NO: 327591 - protein, 349 aa, unidentified
MRFYTKQHQFYCGIDLHARLLAVCIVDQAGAVVLQTQIPADKQLLLQTLAPYRPDVVVAVECLFAWYWVADLCRQEEIPFVLGHALYMKAIHGGKAKNDDIDAEKIARLLKGGNIPVAYVYPKGLRETRDLLRRRMYFVQQRAALITHVQIVNAQYNLPEFSKKLIYAKNRTELKIAERFDNPQLRKSVEVDLALIDALDERIAEVELHLERTAKVEDPQTFQLLKTIGGVGKILGLTLLYEIHDIRRFPDVGEFLSYARLVRCRHESAGKKLGSGGHKIGNAHLKWAFSEAVCLMVRHYPAVKAWQARHEKKHGKKKTLGILAARLGRTVYHLWRKREAFDVKRFLGQ

SEQ ID NO: 327592 - protein, 310 aa, unidentified
MENKNYDYIAIDISKSDLEVRTELHRCSVTNNLTGFKALVKLAGKQEQPLVVCESSGGYERDMMDYLHQKQIAVTRVNPGRIRNYIRSEGIKAKTDPIDALMILGFAREKQLQPAPVPQPIRQELAALLDRRSHLTEQAAREKNRIQNSSKFIKASIERMIKEVEKELQRIEKQIRKLVVNDQQLTEETNILQSVCGVGEVTAWTLLSYLSEIGKLKRNQLVALAGIAPFNKDTGIFKGKRRIEGGRAKVRKCLYMAAQTAAIHNPVIKAYVDGLRARGKPYKCAMVAAMRKLLIHLHILIKKHQLTLAS

SEQ ID NO: 327593 - protein, 494 aa, unidentified
MPQLAKNANINWPAPPEPLRKVGRPGKAKARKRKKDPTEGLLVANPNAAAIDIGCSEHWVCVPAGRAEKSVQAFGCCTAELNRLADLLVECRVDTVVMEATGNYWVVLYDILEARKLNPVVVNPRYAKNMSGKKGDIPDCQWMQKLHTYGLFANSFRPTQEIRVLRSYLRQREELVGAASQQIQHMQHALTEMNVQLANVISDISGDTGLAIIDAILGGQRDARQLAKLKGPRIVASLASLQRALEGHWKDEELFALEQARLSYTHFQEQIQQCEQRIEQQLQAIRSRLPTGTAQASAEAAPGAKAANNGQGMAEEGAAATLTPSFDLGAQLKRILGVDLTQIDGIGPVAAQIILSEVGTDMSPWPTEKHFASWMGLCPDHRISGGKILGRCTRPVVSRARNVLRMSAYTLTNSKSWLGAKYRRLKARLGAPKAIVAMAHHLARLIYRMIKYGQEYVDKGMAAYEAKYRAQRIKWLQKQAMELNMELVEQQAIA

SEQ ID NO: 327594 - protein, 317 aa, unidentified
MERGKTSTKCAGIDVGKRWLDAAVHGLETSIRVANDASGLAELIAWLTAHEVARVGLEASGGYERSALETLAGAGFELVLHQPLEVRLFARLKRLKAKNDRIDAALIAAATAQVDAVKAAADPRLQDLAERLTAYEQISDQLAQLKGFMEHVSLKDLIVGLRRQIAALAKLKQQIALEVIRRLKAHQDLLARYKLLLSLPGFGPIVAASLVVRMPELGQMRRGQAAALLGVAPFDRDSGQLKGLRFIAGGRGRPRRLVYMAALSASRCDPTFRSVAERLLARGKPAKLVLVAVMRHLIEAANLVLARGQPWVNHAQP

SEQ ID NO: 327595 - protein, 343 aa, unidentified
MNTEPITPVFAYLGIDVSKDTLDVCLLRESGKPLFETFDNSPGGHAKLLKWALSQARHAGRRFCIEATGTYGLALSLHLDEAGEFLSVVNPAHIKYSSADGAANKTDRASALQIATFARLHKPEQWTPPSREQRELIALVRHRDDLVASQAQVKTRLADKSPAITQAVRKSLSALLKSYAGLIADIEAQIKNHIDSHPGLKREHDLLRSIPGIGEVSAHKLLAEMLPVGQCKSAQSAAAYAGLSPKEHRSGTSVRRATRISKAGNKHLRTALFLPALIALKCNQRIMAMAARMKEAGKPKMVIVGAAMRKLVMIAYGVLKSGQPFSTEIRNTRNLNSATSLTT

SEQ ID NO: 327596 - protein, 355 aa, unidentified
MASITLLGIDLAKDVFQLHGLDELGRPQLKRTLRRRALVQFVAKLPACTIAMEACSSSHHFSRKFQQNGHEVKIISPQFVKPFVQGNKNDAADAEAICEAASRRKMRFVATKSVVQQDIQCLHRVRKRLVHNRTALTNEIRSIVGEFGIVFAKKRSALVEGIKGLLNGSCPREELSSEGLTLLQDLYSELLELEQRIENCELKLKKISSQPQCQRLFKVGGLGLLSVTALAVALADPGQFKNGRNFAAWLGLVPRHQGTGGKNRILGISKRGDMDLRTLLIHGARAKLRGINAKCRAERKLDPLEDWAYRLCQRQGYNKATVALANKNARIAWSISAHKTEFESHQAVASLKKGA

SEQ ID NO: 327597 - protein, 365 aa, unidentified
MQYIAFDAHKHYTLASVARPDGQLVREERIEHDRGALRQFLARCERGSPVAVETTGNWYWIVDEIEAAECVPRLVHARKAKLMMGMINKTDKLDARGLNRLQRAGTLPTVWIPPGELRDQRDLPRTRMVLVRQRTQLKNRIHATLAKYALHWSREEVSDLFGARGRNLLRQRLALLPPHTAYATQHLLEQVESLDRRVNAFEERIKTVFKPTPAIQLLLTLPGVGLTLAVVIALEVGDVARFATAEKLAAYAGTTPRVHATGGKTHYGRLRPDVNHYLKWALVEAATAICAMRGRVPPRHVSRLYDRVARRKGHAKAIGAVARHLAEATYWILSKQEPYREPTASAVSSTGDKRGKPMSSCKLGK

SEQ ID NO: 327598 - protein, 359 aa, unidentified
MMYIGVDLHKTKFTAYFSKNGRWREYGTNETGYKSFLLDIRQIGEYRSACVGVESTGNTRYFKNVLEQEGVTVKVINTCKFKVINESVNKTDKRDAATIAEFLEKDMLPEAKICSQYCENVRLLLKARRDTVRHMVRLKNQIHSLLVSHGFEDKKASLQSKRGRHKIVSALEKTSIGLIVHLLCSMLDELSKKVKQIEAEIEKMVAGDRVIELLQTIPGCGKVTAWTIRAYTDDIARFKESKHYAAYAGLVPWVRNSNETIHHGRITKRGPEELRTAFVQLVMGMHRLTKTKDYRLMVQYRTMKKHKGSGKAIIATARKFSKIVWHMLRYNEPFNPDFMVDAKLTTVIENMRKASVKSI

SEQ ID NO: 327599 - protein, 351 aa, unidentified
MKKKVFIGIDVSKKTFDAVVYDVKAAGVQDCQHCRFDNNGDGFASFREWAVSSRGVRRGSVVVGMEDTGIYSTDLRVFLEDAGIDYCCFNALKLGMDMGRRRGKDDRTDAYRIGRYLYQNRDTLRPSRLEGGTVLKLRELASERARLVKQAAMSKALVTDRKGRRPTAQVERAKKLIGYIEGLVKEVEQEMRATMEQDDEVRSNYGLLTSIKGVGPVNAMAVITSTDNFRAFSNARQYACYVGVAPFPYTSGTSVRGRTRTSKFANAGIKAVLSQAAKSAVVHNPELRAYFMRKTGEGKHYACVLNAVKFKLVCRMFAVIKRRLPYVADSNEYRIRIAMDDYTPARHINVS

SEQ ID NO: 327600 - protein, 391 aa, unidentified
MVCVGIDVAKDKHDCCILDSDGMVRADCFTIPNNMDGFKQLLQTIRNCTKKSDKIKVGLEATGHYSYNILGFLLDKDLAVYVMNPLHTNLYRKSLSLRKTKTDRVDARTIATMLLSDVDLKSYTDTAYHNEELKSLTRYRFDKVRERAKLKQSVSRLVTILFPELEKLVPSLHIASVYSLISEYPGAKQVSEVHLTKLTNLLTTASKGRYGKDKAIQIRDAAKTSIGSVMPAKSLELKHTIKLIKELTSEIDEIEDSIQQIMDELHPPILSIPGVGIQSAAMILAEIGDFSNFESPDKILAYAGCSPSTYQSGKLTNCYAHMEKRGSRYLRYALYNATKYVCHWNPVFAEYLAKKRAEGKHYNVALSHATKKLVRLIYALQKSGKAYLVAA

SEQ ID NO: 327601 - protein, 420 aa, unidentified
MRAVALDVHRDFCEVAIVAEGRLRSAGRIATTPQALELFAQSLDPRDWVALEVTGNAWAIARILEPHVARVIVVSPSDTGIRQARAKTDRLDARALARLLWAGQLDGVWTPDERVRAMRRRLARRAQLVRARSRAKNEIHAVLMRCLKDRPPASDLFGVKGRAWLAEQQLALTERETVDSAMRQVTFLDSEIAAVERLIAAEALSWPQVKRLMTVPGVNVIVAATFMAAVGDIRRFPDRRKLTAYLGLDPRVRQSGAGPATHGHISKQGSSSARHALVEACWSTVRQPGPIAGFYQRIRARRGHSIAIVASARKLACLFWCLLTRGEDYAFAQPSLTTKKMRRLELQAGAAKFQGARGIWSTNETMRHAERELALQAQRAYERTVTDRQQAGASATPGRASRGSSKEQVARQTTRPKSAL

SEQ ID NO: 327602 - protein, 425 aa, unidentified
MNSNTNQKINQVSEKTLVIGIDIAKRTHYACAVDERGRVLQKSFSFSQTREGFDTFYERIMALRATHEKSDVLVGFEPTGHYWMNLAAYLCAHGIPFIMVNPHHVNRSKELDDNLQTKNDQKDALVIARLMRDGRFSYPRILEGVEAELRNGATLHAKIQEDLNALQNRIIRWLDRFFPEFTQVFKNFGKMAYAALEKTPLPMDIQGKTPEELLFLYRQVDGMKSPQLPKAKQLVEVAQSSIGLTEGLVMARIEIATLLSQYQLMQAQLDELTAQLIELAKQMTDYAYLASVPGIGDVTIVELLSEVGSLTQYEHPRQLIKLAGLTLRENSSGQHKGQKRISKRGRRRLRALLFRVMMPLIRHNEAFKKLHEYYTTRTVNPLRKKQSMVVLCGKLLKILHALCKKKVQFDEQQMMKDLYCLQEAA

SEQ ID NO: 327603 - protein, 345 aa, unidentified
MTVIIGVDPHKQSHTAVAICGEEREVSKVTVRATCQQAAKLLAWAEPFGERTWAIESAGGLGYLLAQQLVDAGEHVVDVPPTLASRVRVLGTGRSDKNDPNDALSVAIAALRSQGLRRVETADHSEIMRLLSKRNHDLGRMRARLICRLHHALADLSPGGIAKELYASDADRLLESFEPATPIEHMRYELALELVDDVRRLDQQIKESHRRIRTAVRASKTSLTELFGVGPIVASAVIGHTGDVRRFANRDHFAAYAGVAPIEHSSGGRVAHRLPRRGNRKLNNAIHIAAISQIRQPHSNGRAYFDRKVAQGKTKREAVRSLKRQISNALYRQLVIDAERGPGGH

SEQ ID NO: 327604 - protein, 355 aa, unidentified
MNIIGVDFHPKFQQIAWVDTDSGELQERPLTHREEAEKFYRALAAAGQQVRVGMEASGHARWFEGLLGELNFELWIGDAAEIRAKRVRKHKTDGQDAQHILGLLLENRFPRIWVPSWENRDLRQLLWHRHRMVQARTRVMNQLQAIALNEGLRCKKRLWGERGRQQLESFPLGPWASRRRRDLVALLDRLNPTIAELSQAIEQEGEKCREAQRLMTHPGVGSLTALAFVLIIGRVERFPSGKQIASYLGLVPMEDSSGDRRRLGHITKQGSSMLRFLLVEAAQVTVRSIPEWRSQYVHLMMRRGRKIAKVAMARRLAIALYWMWRNGCIYEQSKSSVRTRASSDQAMACSTTPGD

SEQ ID NO: 327605 - protein, 342 aa, unidentified
MQITTIGLDIAKNVFQVHGIDATEKVVVRKQLRRSKVIAFFEALPPCLVGMEACASAHYWARELRKLGHEVRLMPAKDVKAYVKRNKNDAVDAEASCEAVRRPTMRFVGVKSAEQQGRLMQHRTRDLLLRQRTQVINALRAHLAELGVVAAQGREGLKELLAVIADEKDDRLPVDARASLMVLAAQLQALQTLIGSIEKRLVVQHRANEASKRLETIPGIGVLGASAIAATVSDPNVFRSGRDFAAWIGLVPRQDSTGGKQKLGPISKQGDRYLRRILVVGAIAVLRYAKQNPEKYPWLTQLLARRPFKVVAVALANKMARMAWALLAKGGTYRAPALAAAA

SEQ ID NO: 327606 - protein, 401 aa, unidentified
MKEFNAEAVRIEAASALEAVRPAQAGRKYPAYIGLDVHKETIAVAVARVGRAAPESRGEIANKPKTVAKLVERLNQEFDGEVLLFCYEAGPCGYGLYRQLLALGHDCQVVAPSLIPKKPGERIKTDRRDACKLAGTLRSADLTAVWVPDEEQEAMRDLTRARDDMKGQERKARQQLNAYVLRHGHAWPSNKTRWTQTHYNWLESLKFAHDWQQVVLQEYIDAVKAASQRVADITAQMERVLPQWSLAPVVDSLVALRGIDKLAAMVLLAELGDISRFDSPKQLMAYLGLVPSEHSSGGRRRQGAITKTGNSHARRMLVESAWSYRFPARQTAHLKRKAANASDEAKVIAWRAQKRLCGRYRTLLQAGKNTKQTTVAIARELTGFIWDIVCHEMPKVQQTTR

SEQ ID NO: 327607 - protein, 440 aa, unidentified
MSNYAGVDWASEKHDVLVADAAGERLLSTTFAHDEQGLRSLCRALVRLEVELVAIERPDGLLVERLLDAGLRILALHPNQVAATRDRFRVSGGKSDRFDAFVLCELARTDHHRFRVLEPDSDQTKALRALTRAREDLVGTRTALTNQLRAELERFWPGPLGLFTDLHSRISLAFLERYPSPADARGLGEARLHGFLVREHYTGRQQPAQLLAKLRRAPATRVGELELATRRQLVLSLVATIKTINEQIKQLERQIATAIREHPDGAIFLSLFKHPSSVICAAELLAEIGDCRARYPTRDTLAADAGQTAVAKESGKYKAATFRWACNKRLRGAVGTLADSTRHHNPWAQDLYASARQRGHDHPRAIRTLGRAWCRILWRCSWQDGVPYDPARHRALQQHITVTIPTLSGPVVDHHGTQRMLAGAVATAANPREQEVTATQ

SEQ ID NO: 327608 - protein, 337 aa, unidentified
MNYFAGLDVSLEKTHICVLDRNGAVVLETSAASTPEAISSALEGAPACKRVVFETGRMAPMLYHGLADLDVPVICIESRQAYQALKTLATHKTDRNDARGLAQLARTGFFKPVHVKSLPSHAVRALIMARKKLVGQRITLENQIRGLAVVFGVRLPRGLSPAFVEEVIAMSDGIAGLSSAMRGLVAARDAVLAAVAAIDADMKRLVRASDACRRLMTIPGVGPLTALAFTAAIDDPKRFRRSRDLGAYLGLVPRRYQSGEIDYTGSISKVGDRRVRTLLYEAANVMLTRFKGQLKLKDWAIAIARRSNMRKARIALARRLAIIMHAMLKHGTEFKPA

SEQ ID NO: 327609 - protein, 319 aa, unidentified
MTKIICGVDVCSRFLEARIGQDGAAACFSNTAAGIAELASFCRHHGVALVAMEATGGYEKQPYALLWTQGLPAAIVNPRAVRRFAEAMGQLEKTDRIDAGMIAWFAEVKKVVAGPPPTSQQEHLKALVIRLRQLTDLQTAQRNQRLLVQDEMVLESFTQLLALISSQMRQIETAIAQLISADPLWEKLNQAFRSIKGVADRTVARLMAEMPEIGTLSNKKISKLAGLAPLARDSGKHQGKRSVRGGRSGIRGILFVVVSIVRRYNPDFADFDQRLNRAGKPKKVIRIALAHKLLVRLNAKARSVRNELAISTVSPAKVG

SEQ ID NO: 327610 - protein, 389 aa, unidentified
MTSSLHIDTPAACTKHDTMFVGFELGKAKWKLGIVLPGGGKLSQYTVAGGDVEAALRLIAKARQKAEKKAGSSVRIVSCYEAGYDGFWLHRWLEGRGIENRVLDAASVQVNRRARRAKTDRLDLERLMSALIRHDWGDRLACRVVHVPSVAQEDDRRLGRERDRLVKERVGHVNRIKGLLHGQGVRDALPRAKTFCAWLAEVRTGCGHNLPPHLMAELKREHGRLLLVEEQIAEIEAQAVAARQAAVPAPMASKINQLIELKSLGPVSSQTLVGEVFFRDFKNRRQVGGYFGLTGTPFDSGGSRREQGISKAGNTRARTTAIELAWLWRRHQPGSALSRWFEERVGDQKGRVRRIAIVALARKLMVALWRFLEHGLVPEGAILRAAAHA

SEQ ID NO: 327611 - protein, 372 aa, unidentified
MKQSSTLYVGMDVHKESIAVAYVAQEHGAEVVSLGTVGTRQCDIDKLIRQLQSKSPQLVFVYEAGPCGYWLYRYLMKKGYVCWVVAPSLIPKKAGDRVKTDRRDAMQLARLMRSGDLTPVYVPAVDDEAIRDLSRAREDTLRDLKAAKLRLKAFLLRHDIRYTGRANWSPAHLRWLSEVLCPTPAQQIVFQEYVQTVTEQTARLQRLEQELHEQVHTWRLAPVVEALQALRGVQFTVAVTTVAELGDLTRFDNPRQLMNYLGLTPSEYSSGGRRQQGGITKTGNTHARRALVEGAWAYRYPAKVSRHLQLRLEKLPAAIQAISWKAQVRLCKRYRHLMAKGKNANQVVVAIARELSAFMWAIAKQVAVRPKA

SEQ ID NO: 327612 - protein, 371 aa, unidentified
MKNKTKTPSVVSTPNPAVVVPGGFTVGLDLGDRCHHICVLDVAGQIIREASLTNTRTALAQLLTEFPHATVALEAGTHSPWISRFLTAYGATVLVANPRKLHAISRSERKCDRRDAQMLARLARVDPALLHPIQHGSAQAQHDLLGLKLRDALVRTRVNLINAVRFTLKSLGHVVRNPSSESFHKSVLADVPADCLPVVQPLLIVLAQVTEQIKAMERDLVQRGKKDYPVTQRLQQIAGVGPLTALCFVLKIGDPQRFSRGRDVGAYLGLCPRRDQSGGTDKQLRISKCGDGLMRRLLVSAAHYVLGPFGPACALREHGQRLTGTGSAREKKRAVVAVARKLAVLLLSLWKHGTDYEPRVTASPALVLTPA

SEQ ID NO: 327613 - protein, 325 aa, unidentified
METKKLCCGIDVSHATLDVCYQNNLGELFYLKVGNNNSGYQQIMEHTGAGYHFVMEATGVYYIRLAFYLHQRGSSLSVVNAISIKRYIQMHLERNKTDKKDARWICRYAIEQQPPYWQMPDSAYFESKQLYNTIRQYTELIKSFNNQLHSLRLLPVPSKDTIKSIEKTIVCMEKEIKLLEQKLQLLLQQWQPDQLKSVSSIKGIGKRAAAMLIVFTQGFKHTENHRQLISFAGLAPTQYSSGSSIQGKPRIYKRGGKNLRDVLYMCSMNAMKTNTACKTLYERLRANGKTGKQALIAVCNKLLKQVFAVVKNNTLYQPNYCSAKP

SEQ ID NO: 327614 - protein, 345 aa, unidentified
MLYVGLDLSRKRLDWQALLPDGERAGLGAVPPDRDGLAKLVRRLGDPDEIVAVIESMSGARFVHDELELAGWDVRIADALKARGIAPLACKTDTIDTWVLAELARLELVPEIWLPDPEVRAERERARFRLHLVKHRSALKNRIHAILFQHGVPSPTSDLFGTGGRALLERLRLPEPWASTVGASLALIDVLDGEIAACEQGLRRLGAEHRYIPLLLTCPGIGWVLAFTIASEIGDIARFPTPSKLVGYSGLCPRVEQSGERDRRGPLRKNGPNHLRWALVEAAHTAARHPAYRPLLERKRAQLGRKRGTKIAAIDVARRLAEAIWHMLTRNEPFAPAGATVSLAA

SEQ ID NO: 327615 - protein, 332 aa, unidentified
MKKVQFFVGIDVSKATLDVFIHGLNLYFVVQNSLQGFVCLLEKVMTGTKCKKEELFFCFENTGKYSRMLSVFLQSENILFTMESALQIKKSLGITRGKNDRIDAKRIAHYAYEKREILVPTILPGAKIDQIRSLISLREKLLKHRTAYKNGISDLHDCYEDGESELIKEIQQRLISNLNDEIKKVEQKIESIIESDESISRNYKLILSIRGVGRILGFYLIGYTANFTSFANARAFACFAGIAPFSYSSGTVKGTPRVHPFANKMLKALLNLAAMSAIKYKGEYMQYFNKRVNELGKNKMSTLNIIRNKIVYRVFAVVQRQTPYVDLLKFAA

SEQ ID NO: 327616 - protein, 352 aa, unidentified
MDYFAGLDISLEMTSICIVDADGTVVKEAKVASEPDDLVAFFDQCGMAMKRIGLEAGAPSQWLYGGMAEAGLPVVCIETRHAKAALSAMPNKTDRNDARGIANIMRTGWFRAVHVKTQTAQELRFLLVARQTLVRKLMDIELAIRGMLRSFGLKMGVVSKRNFEARVLELAGDRAMLMRALNPMLAARRALALEYANLQKVAMDFARDDDVCRRLMSVPGVGPIVALTYRATIDVPSRFRRSKSVGAHLGLTPRAYQSGEVDWNGRVSKSGDAMARAALYEAAHILLTRVKRWSSLRAWGMRLAKNRGHKRAVTALARRMAVLMHRIWVEGTTFLWKTGNGQAIAPSPVPGV

SEQ ID NO: 327617 - protein, 424 aa, unidentified
MNDTQNKKIAQVTDKTLVVGVDVGSDKHYARAILVRGFEVSMKPFEFANTRDGFERFVNWSYHLAAENQLTKIFVALEPTGHYWFNLADYLRGYDVKLVLVAPQHVKHSKEMDDNIQMKNDRKDPLVIAKLVTEGRYMFPYIPEDNYAALRAAFNRRCDLVEALIRNTNRMVRWFDIYFPEYREVYGKANALTGLMVLMRAPLPSDILALGVDGICRIWREAKIRGIGINRAKKLVAAAERSIGRKGCAAVRQELWQLLEEHDLLSRQLNDMMQIITDLLGKIPGAERLLNIPGAGVITVAGFLSEVGDISRFTDPKQIQKLAGLAVVENSSGKRKGLPGISRRGRKRLRWVLFQLARTMVTSNKEMKAYHQYYTTRKENPLKKMQSLMAIAGKITRIFFGMLKNGTEYDPAVVMKDLNKAAAA

SEQ ID NO: 327618 - protein, 378 aa, unidentified
MREVPVELERTFVGLDVHARSVVACALDDVTGELTRARLVPQPEVILAWLRQLPGPVAVVYEAGPTGFGLARHLIEAGLRCLVAAPSKLQRPSGDRVKTDARDALLLARLLRLGEIVSVRVPTVEQEAARDLVRVRDDVRGDLMRARHRASKLLLRQGIVWSGGTAWTGAHHQWLNKQHFDQLGLQVAYDTALEAVLLAQSRRDRLDKTIVEMAALPAWSPVVTRLQCLRGVSTLTGFGLAVEIGDWRRFTGATIGAFLGLVPTESSSGEGRSQGSITKTGNTHARRLLVEAAWHHRRPYGAPSKVMRARWDQAPAAARARGHAGNQRLHDRWTTFGERKKRPVIANVAVARELAGWCWSLATLEDTELAPPAGAGRR

SEQ ID NO: 327619 - protein, 404 aa, unidentified
MYNAVGIDVSKGKSTVAVLQPGGVIIRKPFDVLHTSGELKDLSKYLGNLEGDTKIVMECTGRYHEPLAIALYDAGLFVSLVNPHLIKNFGNNSLRKVKSDPADARKIARYTLDNWAELRQYSSMDSTRTQLKTLNSQFSFFMKQKVAAKANLIALLDNTYPGVNKLFDSPVRDDGSEKWVDYAFSFWHVDCVRKSSLKAFTERYRAFCKKHRYNFQPAKPEVLFNASKELVAVFPKEKTYKLLIKQSIQQLNLASEHVEQLRKEMDILASTLPEYTTVMSIYGVGKTYGPQLIAEIGDVSRFTHREALTAFAGVDPGVDQSGQHNSKSNRASKVGSARLRKTLFQIMTTLLQNAPEDDPVYGFLDKKRSEGKPYYVYMTAGANKFLRIYYGKVKECLRNLEQNN

SEQ ID NO: 327620 - protein, 374 aa, unidentified
MLYILNNHQEKKRREIFHFIFLFIFKTIGMKKVIKQVLGIDVAQDELVVCLAKKYDDWSEDNYVHKTFVNATKGFEQMTGWIKKFTDIAVPVNYVMEATGVYHESLAYYLRDQDQPVSIVLPNKISSYARTLSVKTVTDKTASEAIAQFGLERKTDQWEKPDPIYKKMKQLTRERGQIIVERTMVKNELHAEKAEAEPNKSSLTRCNKRIELLTKQEKEIVIEIAALIKTKDSVNELVKLICSITGIGMLTAATVLAETNGFDLIRNKRQLTSYAGLDVKDHQSGTSVKGKPTISKRGNRFLRKAMHLPALAAIRYDERFKALFVRLVSKHGIKMKAAVAVQRKLLEMTYTIYKSNKKYDKEYFKHNAAVMTEI

SEQ ID NO: 327621 - protein, 416 aa, unidentified
MKIIRFNCCGMDVHKNSAVATIGITNKDTQITRYIQETFSTLNTDLLRLKQWLIDHQCFDVCMESTGKYWIPIFNILEDTVKVHLTHPKYVKAIRGKKTDKKDSKWICDLFKHDLIRFSFIPTKEIRALREIARYRYKLVAMRSSERNRYQNCMTVSNIGIGSVFSDPFGKSAQAVMKEVLESKVIEDDRILKCIHGACKNRDKILDAIKHCYVESDQRFKMNESMRHLEELQIHINNCEIEMIKRASRMFDSFMHITQIPGINTLSAILIISEIGIDMTQFESDKQLVSWAGLAPANNESANKKKSVRISKAGQYLKPLLVQCALGAIKDKESYFGIKYARIKKRRGHKKAIIAIARMILVSIYHMILTGESFNPSDYQSFKAPNSKKVIELTKESAIEFLRKSGFDVSKLTKLE

SEQ ID NO: 327622 - protein, 441 aa, unidentified
MQIVYARCAGFDVHKKSVVVCVRLLAADGSVTIHIRTFGTTTAELLNLVAWLLSLQVTHVAMESTGEFWKPLYNLLEGSFTVLVVNAAHIKYVPGRKTDVKDAEWIAELLAHGLLRPSFVPPAPQRALRDLTRQRTQLIRERASLVNRMQKVLEWANIKLSSVVTDITGVSARAMLQALVAGQTDVTALAELAKGRLRTKLPELEQALRGTLQPHHAFMIGQHLALLDVFDEQIAAFDERIGEAIEGTRPTAAPAEQQGNAPEAASEPMSTAPEGAWAAQAIMDAIPGIGTRVSEIVLAELGTDMSRFPSAAHAASWAGLAPGQDESAGKRKSTRIRDGNRYLRATLVQAAWAAIKSKDSFLAAYFRRLAARRGKQKAIIAVAHKLLVIVYTLLKSGQVYQERGAAALDERQKERIVHRLERRIAQLGYKVNLEPITAAAA

SEQ ID NO: 327623 - protein, 347 aa, unidentified
MNAIMIGLDISKSVFQVHGEAAGGSVVLQKRLRRSQVEGFFAKLPPAVVGIEACGSAHHWGRTLRALGHEVRLIPAAYVKPFVKRNKNDARDAAAICVALGRPDMRFVAIKSVAQQASRGLERSRDLLVKQHTQLSNCIRSQLAELGIVAAQGRRGFAELAGLIEVGDPRIPAVLLPALRLLLAQAQAVAHAMATLEAKIMAIAKEEPTMRRLATIPGVGGLTAHAIVAAIGEGKQFASARDFAAWCGLTPKEASTAGKRRSTGLSRMGDIRLRKLFALGASTIMRNARARSDRASAWQRGILARRPMKVAVLAQAAKTARIAWAILVSGETYHPQRAASRSLAPAP

SEQ ID NO: 327624 - protein, 352 aa, unidentified
MKQDTVTADLQTIGLDLGDTRSTLCVVDPQGRIVEEKSVSTTREALTLRFRRPRARVVMEACGQSNWISALIEELGHEVYVVNPRQLHLITRSVKKTDRNDARLLARLGRADIGLLQPTHRRGLDCQAARTVLNARRALVQTRTRLVNTIRSAAKSYGFKLRGCSSKTFAKLANTNLPQQVRTLVQPLLDAILNLDQYIERYNAEVERLGREHFPQTNVLRQIHGVGPQVALAFVTTIEEPKRFARSRDVGPYLGLTPRRDQSGDSDPHLKISKHGDGSTRSLLVGAATAIMRDTAPDTDLKRFGERIAGGTSRRDRGRARIAVARKLSVVMHRLLLTSEVYEPLRHAQTAG

SEQ ID NO: 327625 - protein, 390 aa, unidentified
MVGSEILLANCLPLETRESPTRKRANEMVTPTPCEGYALAGCFISEAIIMSSVALVGIDLGKHSFHLHGQDNVGREVLRRKATRQQMMRLLGNLPRCTVAMEACAGSHFLARQLVAFGHEVKLISPQFVRPFVKGNKNDFIDAEAICEAASRPTMRFVTPKTEAQQTLSVLHRMRESLVRDRTKTANQAHGFLLEFGISLPKGLSLVRRLPTTLNEHELPPHLVGLLSRLHEHFCYLDEQIKSLDKEMTGQLAEDELGSRLLSIPCVGPITASLLCAEMGDGKQYGGSRDFAASVGLVPRQYSTGGRANLLGISKRGDKNLRRLLVQCARVYLQRLEYQQGALADWVRSLRERRHSNVVVCALANKFARIAWAIAANHSQFKARPGAAVA

SEQ ID NO: 327626 - protein, 360 aa, unidentified
MAKARTLVGLDVHATKIVAAVLDAETGQLQTFQMSGESEKAAAFCAALPAPVRVAYEAGPTGYGLARELVKRGVGCVVAAPSKIPRASGDRVKTDRRDAEHLVRLLLAGKLHAVRVPGDEEEALRDLVRAREAVRVDLMRSRHRLSKLLLRHGIRFEDGAAWTDRHRAWLAEVVLDWPAAQATLLDVRGAIDALCHRRDGLEREILGLLPASPWAVQVGRLRCLRGVDTLTAVGLCSEIGDFERFAKAEQLMSYIGVVPCESTTGQQRRLGSITKTGSGHARRLLVEAAWHYRARPNLGKALIERQELQPQEAVAVAWKAQLRLHRTWTRLEARAKRRTLIAVAAARELAGFCWAITQIE

SEQ ID NO: 327627 - protein, 319 aa, unidentified
MNTVSHERIIGIDVSRDWLDIYCLPDGERLRLPNTGGGHERLADMASTPDTVVCFEATGGQEWRLWITLDTASVRTRQLPPAQIKAFAASRGTRAKTDRIDAELIACFMAFRPDAGRTLPAKKLRLLRALTSKRSQLVETRKRLVAQIKAHRKLGTAESFAVMDSDLKGLLDQQVAELEGQIEAVIASNTELTGTVKILRSIPGIGPVASTMLIAEMPELGQITGEQAAALTGLAPFAHDSGAMRGKRAIGGGRRLLRHVMYQAALVASYHNPVLKPFADRLRKAGKPHKVVSTAVARKLVTIANALCKARQTWASPAT

SEQ ID NO: 327628 - protein, 364 aa, unidentified
MISVGIDVSKEKSTICILKPYGEIIGRPFEVCHVARELSELATMLLRLDDEVRVIMETTGIYHLPVLSYLKEKGFFVAVINPFEMKEYRCQGLRFVKTDKQDAITISNYGIDHWYRLKDYEAEESVYAELKLLGRQYRHYMRMRVESVLELTHLLDYTMPGIKNLLKGWNETNGKDKLSDFSEEYWHYDNITRQSEEEFADSYLEWAERKGYHRRQDKAIKIYALAKEGIPTVSSSTPSTKMLVQEAVRVLREVDNTLMTILTQMQTIAKSLPEYPVVRAMGGVGNVLAPKLIAEIGDVRRFHSGKALIAHVGIDVPPYQSGQFTGTERKISKRCSSSLRKIGYEVMRCLKTHKAPKDALMNLY

SEQ ID NO: 327629 - protein, 339 aa, unidentified
MSNITIGLDLAKHVFQVHAIDAVGKIIARKKLRRSEVLEFFQTLPPSLIGMEACGTAHHWGRELTKLGHEVRLMPASYVKPYVKRGKNDAVDAEAICEAVTRPTMRFVEIKSVEQQSGLMLHRTRELLVRQRTALVNSLRGQLAEFGLIAPKGIWSIPDLHELAQNAPPHVLPDLVRGCVELIMGQVDDLQARIQSMEKVIRVQHRANEVSQRLKTIPGIGVITASALTATIGDIKAFKSGRHLAAWIGLVPRQSGTGGKVHMGKISKKGDAYLRRLLVLGATAVIRYCRNKPELAGWINALLQRRPARVVTIAVANKMARIAWAVMSATARRRLRLPR

SEQ ID NO: 327630 - protein, 343 aa, unidentified
MHSVTTIGLDIAKSVFQVHGVDAHGNVVVRRQLRRRQVLPFFKKLPSCLVGVEACATSHHWSRELQALGHTVRLMPPAYVKPYLKRQKNDAADAEAICEAVMRPSMRFVATKTPEQQSCLMLHRTRHLFIRQQTAVINAIRAHLAEFGVVAPVGRNGVEELLDVVANPDDTRVPKVARECVAALGTQLRMLKAQILEFDRHIMAWHRSNETSKRLDEIPGVGPALATALVASIANPMAFRSGRDFSAWVGLVPKQSSSGGKERLGSITKRGDRYLRSLFTAGALAVIRYAKIHGTKHRPWLTALLARRPTKVAAIALANKIARMAWAMMAKGEHYREPAALAA

SEQ ID NO: 327631 - protein, 324 aa, unidentified
MLPILGIDISKVSFHVELSVREKLRHRKLANRQEGFAELCVWLAKHKTTQVHACLEATGAYGEDLALYLHQQGHTVSIVNPAQIKAFGQSELLRNKDDRLDAGLIRRFCEKQRPPAWIPPPPHWRELQAMTRHLENLIETRQQQLNRLEGTKTKGVVKSLRKLVAYLDSEIARTEKQIQAHINNHPDLKLQSQLLESIPGIGKRTAAKLLSEIKDINQYKSARQIAAAAGLTPRNNRSGTIRGKTRLSKIGNARVRKALFLPAMVAKQHNPIVRSFCQRLAQNGKNKMQVLGAAMRKLIHIVFGVLKSGKYFDPNHELLLNSVS

SEQ ID NO: 327632 - protein, 401 aa, unidentified
MSTTTILYVGIDISKDKSDICIKDVKGNDLIQRFKITNNKADLGHLYETIERIKSRTSGNSDVVFGMEATGIYSLPLYSALTRDGHKVKLYNPIQTNGFRKMNIRKTKTDPIDSAIIADMLRFSELPQVNPIKDLNLYQLRELVRIRDRLIDKQTVCKVQLVRNIDTVWPDYSSVMKRATGATSIAILKKYSVPSKVRAESFEKFYELVKMKSRSKISRTTAEEIYAHAGNILTIPELDSIISVEIKTLITELELYDEQIRSIEKKIDKMMELIDSKIMSIPGIGDTLGPMILGEIGDADRFSNVKKLIAFAGLDPVVSQSGRFENKSGPISKRGSPLLRKGLFLAANVARQNDENLKRFYDKKICEGKHHFSALNAVAAKLLRITYWVLKNNREYQIQLN

SEQ ID NO: 327633 - protein, 371 aa, unidentified
MKKSIMFVGLDVHKNSIEIAFAEGGRDDEVRSFGKVSGNLEALDKVIRKLVSKGCELNFAYEAGPCGYEIYRHLNSKGFDCTVVAPSMIPKQSGNRIKNDRRDAQMLARLHRAGELTKAYVPCVEDEAMRDLTRAREDAKGLEKRAKQRILAFLLRQGYRYSGRSPWSRAHFRWIATLKMPHPAQQIVLQEYLETLSECRQRVAHLTEQIQALLPQWRLSPVVRALQSLRGVSLIVAATTVAEVGDLTRFDSPVELMSYLGLVPSEHSSGGKTRRGSITKTGNGHVRRVLIEAAWAYRLPARVSLKLQQRQEGLSQNICAISWKAQLRLCARYKRLLAKGKATQLITTAIARELCAFMWAIAMAVKAPETV

SEQ ID NO: 327634 - protein, 338 aa, unidentified
MTSKISILAIDLAKGSFQVCAVGPDGVVVFNRAMSRARLAALLAEQPACIVAMEACATSHHWGRFAQSHGHEVRLVPAAYVKPFVKRQKNDRADAEAIAEAAMRPTMRFVAVKSAATQGRAVAFRTHQCMVRQRTQLINALRGHLAEFGLVAPKGPASLKLLENALADESTDLPEAVRHMGSIYVEQIARLTKVIDRLASELETSSKTDVQLRRLCTIPGIGPVTAGAVAAFAPDLDTFDSGRNFAAWLGLVPRQRSTGGKARLGSVSKMGQTDIRRLLIVGAMSVIRWVVRKGGSSNRWLAALVARKPKMVAAVALANKMARMIWAISTKQENYRMA

SEQ ID NO: 327635 - protein, 323 aa, unidentified
MDGSPVETPQVFIGIDVSQSSWDVHLLPEGRSFSIRTRDGAFERMVKQLGSPEASFVVVEATGGVERQLVADLFDAGWTVSVVNPRQVRDFAKALGRLAKTDRIDAETLAIFAHRVQPRPTHKTPEKQQELDALVTRRRQLISLRSMEKMRRPQAVHKTASRSIDQVIKMFDRQIAALDKAIARLIEADDDWRAKRALIESVPGVGPTTSAALVAELPELGRLNRQEIAALAGLAPFNHDSGKFRGQRRIRGGRAGVRTSLYMAALTATRCNEKLRAFALKLRQAGKPFKFVITACMRKLLTILNTLLRSGKPWTPHPLVEQR

SEQ ID NO: 327636 - protein, 319 aa, unidentified
MATLGIDVSKETLDVTLLKPDGAQVKGQFGNQAKEFKKLQRWLTNHQLKELHVCMEATNVYWEEAAEFLHEQGYQVSVVNPARIKGFAQSQMRRNKTDPLDGEVIAQFCAALKPALWQPPTPEQRQLRALVRHQRALQKSLTQQTNRRATCKEAAVKASLKRVIDTLQAEIEHIEQQIQTFIDDQPELKQQYTLLISIKGIGHRCAVVLLAEMYDLADYESARAAAADAGLTPSHYSSGKTVRRKPKLSKVGKASVRSILYFPAITAMQHNPIVRALKERLEARGKDWNVILGAAMRKLVHLAYGVLKNRTLFDPNYSR

SEQ ID NO: 327637 - protein, 350 aa, unidentified
MEIRTIGIDLGKMVFHLVGVNARGEVVVRKKCSRLQLLRFTSNLRECLIGMEACGGSHFLGRALREQGHDVRLMPAQYVKPYVKTNKNDYIDAEAIAEAVTRPSMRFVPIKTDDQLDLQSLHRVRERWVGRRTAVINQIRGLLLERGLTVPKGRRHIEESLPGILEDPDNKLSGALRALLHELRLEMQYLHRQIEESDKLIVRIAGELEQCKRLVAIPGIGPVIATATIAAIGNGAAFKKGRGFAAWLGVVPGEHSTGGKQKLTGTSRRGNKYLRKLFVQGAHAVLQFRTQQDPGLSAWLERLAARKRPQVTAVALANKMARMAWAVLYKGEAYRPPLAAQTVGTVMACT

SEQ ID NO: 327638 - protein, 335 aa, unidentified
MRYIGLDVHYNTSTYCVLEENGQELQCETVRGHWAKLFERLRTVAGPWTICFEATCGYGYLYRELSRLARRVVVAHPGQLRLIFRAKRKNDRIDARKLAKLLYLDEVPAAYVPSQEVQSWRELIEHRRHMMDRQTTCKNAIRSLLRSHGKAAPKGLWTKKGLAWLRQEEMPTAAARLKRDLLLDELTEAKRRVRTVTKALDEIGERHPAVLLLRTIPGVGIRTAETMVAYMDKAQRFLRSSQVGAYFGLVPCQDASAGVNRLGHITRQGPATARKYLVEAAWQGVYRSPTIRAYFERIQHGRPERRKIALVATAHYLLRCMHAMLVRNQPWHEAA

SEQ ID NO: 327639 - protein, 323 aa, unidentified
MSQPNLQCMGIDVAKLSLDIATTDTIEPFTVGNDEDGFAVITDKLKHTKINLILMEATGGLEAAIACKLQSEGYDVVVINPRQARDFARSMGYLAKTDKLDAAMLAQLTLVIDRHPDRSRYIRHLPDEARAVLAAMVVRRRQLNHMLVAERNRLYPSHPQSRKSIDNIIDALQNELDRINEQMKQHMTAFFQEQARLIGSVKGVGDITVASLIAELPEQGKLNRREISALTGVAPLNRDSGKMRGKRTTFGDRAGVRATLNMAALVATQFNPAIKLFYQRLLAAGKPKKLALVACMRKLITILNTMLRKGEEWNASFQSQVIS

SEQ ID NO: 327640 - protein, 371 aa, unidentified
MKSIIYIGMDVHKKTYSLCALLKETGEIIGETKIPADVSLIIKFIENAKKSVDSDDVQIKTGYEAGCLGYSLYWQLAAKDIECDILAPSTMHRSAKNKVVKNDRRDAKNIAANLANGTYKSVYVPTDEDVEIKEYIRMMHDFKIELKKVKQHINAFLLRFGHQYPGKSKWVPAHIKWLKELELSDMYREILDEYLSQLEILSEKIERFKHRLEELSQKETYNEKIGQLRCIKGIDTTAAMTMHAETSDFDRFPTANAFASYCGLTPGEDSSGESYHRLSITKQGNSMIRTTLIEAAQVLVRGTIGKKGKKVKSKQKDQDVKVIDYADKAVIRLQKKYHRMIFRGVKRNIAITAVARELACFVWGIETGHIS

SEQ ID NO: 327641 - protein, 414 aa, unidentified
MLKIVYRVCCGMDVHKSFVVACIASTTEYGVTTYKSKHFSTFTGDLRRCAAWLAENSCKDVCMESTGKYWIPIYNILEPTCNIVLAHPKYVKAIRGKKTDKRDAKWIADIFKHDLVAGSFIPPADIRQLRDLVRYRWKLTNFTTGEKNRAQNCLTVSNIKLDDVFSDVFGKTASAITTRILENPAEKITDVSGFRTKGMKATNEQVLAAVDGEMCEEQAEKLRIIRSHMDSLQLCKLDLESLILATAEKYLPQLGLVMTVPGIQSFTAIGIISEIGVDMSVFPTSKHLCSWAGLTPQNNESAGKKKTTRISRAGAYIKPLLVQCALNAVRAKKFPEVRNRYLALKKRRGHKKAIIAIARMLLTAIYNILKKNESYNPELYRQTDRPPAHREVSVAEAIFILQRQGYLVAAPPTP

SEQ ID NO: 327642 - protein, 319 aa, unidentified
MAQNDRIVAGIDVAKDKVDVCIRSLSLRRTFASTAEGRRELASWLRRQKVGKAVMEASGGYEREWAKALRDAKIKVRTVDPKRVRSFARSAGRLAKNDTIDAEMIAWFAETFDEARGQAYDATREQLHQMVNARQAMMDMQARLENQGEHAVPAAVQRMHAQVLKKIGAELVKIEAAISTLIQATPHFNELAEIIESVPGLGRTTSAALIAAMPELGQANNRIVAALLGVAPYDDDSGRRRGERHIKGGRRRTRNVFYMACLGAATQHNPVLKAFYDRLVAKGKEKKVALIACMRKLISILNIMIERRQKWDASRHALS

SEQ ID NO: 327643 - protein, 343 aa, unidentified
MVRMIVGGVDTHADSHVAAVIDANGGILGVESFPTDESGFEALVGWLTSYGEIQVVGVEGTGSWGVGLARFLHDHEIPVVEVDRQNRQNRRRVGKSDSTDAISAARAALSGSASVIPKTRNGPVEQIRILMVARRSARSQRIETLNQLRHLIFTSPEEIRSRFKDRPRTGLVTDVAKLRPRKGSDPVTYTTMVTMRGLARRIQHLNSEIKALDGMLTELVIDTAPSLVDLYGVGTDTAATLLVAAGDNPDRLHSERSWAHLCGVCPIPAGSGKTDGRHRLNRGGDRQANAALYRIVLTRMSGDPTTKTYVARRRDEGKNTAEIMPRLKRYVARETYKHIHHDT

SEQ ID NO: 327644 - protein, 392 aa, unidentified
MICVGIDVAKDKHDCFILNSEGEALADVFTILNNADGFDTLLQTIRSYTRPEDKIKVGLEATGHYSYNILGFLLDCGLPTYVINPLHTNLYRKSLSLRKTKTDRIDARTIATMLMSDVDLKSYTDTVYHNEELKSLTRYRFDKVRERAQLKSSIARLVCILFPELEKLVPTLHMASVYTLLSEFPGAKQVASAHLTRLTNLLHEASKGRYGREKAIQIRDAARISIGSAMPAKSLELKHTIHLIRELDAEIEEIETEIDSVMETLHSPITSIPGIGNRMGAMILAEVGDFSNFDSADKILAYAGLSPSTYQSGQLTSSYAHMEKRGSRYLRYAIFNATKFVCNWDPTFAAYLAKKRNEGKHYNVAISHAAKKLVRLIYTMEQTRQPYRRAAV

SEQ ID NO: 327645 - protein, 452 aa, unidentified
MPAGKDNTMNYQKVLMMLESIPYLSVGLDVGADFTWMSIMLPNGILTGKPFKIIHSDPDSRELAVTKIKEAQETYSLESRCFLESTGIYHIPLLYFLRDKGFDCSVINPIITKNTTNMNVRKLHNDKFDSKKVAKVGLDASLKTSIVPDDTVIDLRNLVRDYYYYKDLQSAIVLKLNAELKVSFPAYLNVFSKVTTQTSLKLLEAFPLAADMLAAPKDELVETIRQTARFGEKYAVSKYDAICAAAKDAALFGRALPSNALRIRLYINTYQEYQEHLDSILEELHKAVEKLEGTLVYDRIFLLQSLRGVGFLSAVVLIAEMGSFDLFSSPKKLYAYFGLDPAVKQSGKFNGDKVHMSKRGSSLARRILHMVALNNLKVDKGSKAPVNPVIHSYYADKCKRKKKNVAVGAVMHKICNIIFTMLRDNKPFEVITPQEHCERYLAVHPDKAQNIT

SEQ ID NO: 327646 - protein, 476 aa, unidentified
MATPDEKPDKPTNPDKPTKPNPSRKRSLPVPVPVSAAALDVINPDAAGIDVHSDMHMVCVPADRDANPVRQFGANTADLQEIVAWLKKCRVRTIALESTGVYWIPLFELLESEGFEVNLVEPGQLSRCGARPKTDVLDAQWIQRLHSYGLLRASFRPPDSVLALRAYWRQRQMQVRYAASHVQHMQKALEQMNVKLTEVVSDITGLTGMAIIGAILEGQRDPIQLARLRHERCHHSEEQIALALEGTWRPEHLFELRQAHELYQFHHRQITECDQQVQAELAHFPNRAGAKTHTVKPRKRGRKSNDVRFEATGPLFQALGVDLTLIEGIDVGTALVILAEIGVDVSRFPTEKHFASWLRLCPPQDESNKTKKRRGHRKGTNPVTLALRMCARSLGKTMTPLGLFYRRIRSRIGGLGAVKATAHKLACLVYRMLKYGREYVTQSMEEYEAKMEANVLKALKRKAAAMGFELSPLPPQ

SEQ ID NO: 327647 - protein, 328 aa, unidentified
MECLSVGIDVSKRELVIAVHPTGDQWTTATTPAGIATVVKRLQTLGPGIIVVEATGGYERALVAALAVAELPVAVVNPRQVRAFAQAIGRTAKTDAMDADVLALFGGRLDPAPRPVTDVATQALAALVARRRQLLEMIGMERGRLEHAPPTGHLTRELRRHIRWLERRVTDVDDEIGTCIAAHPTWRVQEELLRSVPGVGPTTARTLLGELPELGQLDRRAIAALVGVAPFNCDSGQQRGQRHIWGGRASVRATIYMAALSAARYNPVLRVFYRRLRDAGKPAKVALVATMRKLLTILNAMLKHQSPWTTQVASTPASLSGPARAASV

SEQ ID NO: 327648 - protein, 351 aa, unidentified
MKTNSLLTTVIGIDLGDLRHAVCVIDSAGEIIEEVTITNTRESLAKLAKKYPGSRIAMEVGSHSPWISRWLTELGCEVIVANPRKLRAIYQNERKSDELDAQMLAKLARADISLLHPVQHGSEQAQRDLLRIKLRDNLVRQRVDVISAVRFTLKALGVRLASPNTNCFAKCARGYLAERDPELLAMIEGSLHVIDEMTKQIRQFDREIEQLCDNHYPETKRLREIRGIGPITALCFVLVIEDPHRIDKTLDVGAYLGLVPKRDQSGKSDKELGISKCGNAYLRRLLVSAAQYMLGPFGEECDLKTRGLRLAERGGRGAKKKAVVATARKLSVVMLGVWKNQTNYEPLHQAA

SEQ ID NO: 327649 - protein, 317 aa, unidentified
MTEQNTPLFIGGDVAQDAVVVATHGEATSRSIENTPAALKAWLKTVPPGARIGLESTGSYHERLALLAYRAGFTVYILNPKDVRHYAHAVGKRAKTDHVDALLLARFIAHEHTGLHPWQPPTREQRYLDNLLKRRATLVKAQGMLRQTLAHLSPLKTESKAMLASLTKLIATIDRKLEQAVAANPGVQAKADCVQSVPGIGLLTGTALVDLFSRLPTARADALVAFTGLDPRPCDSGKKRGTRRLSKRGPGELRRLLFNAAMSAAKTRVWKLFYERERAKGLPTTAALVCLARRLVRVAFALYRNNVHFNPEAIHCA

SEQ ID NO: 327650 - protein, 420 aa, unidentified
MAPLSDQQFTAYVGIDWADTKHDICLQAAGDIRREFDCIPHQVARIDEWAKTLQRRFGGPIAVALELAKGPIVAALQKYDFFTLFPINPSTLAKYREAFKPSRAKDDPTDAELALDLLLRHPERFAPLRPQGVAMRSLLSLVERRRDLVGDQNRLTNRLCDTLKQYYPQALEWFDDRGTVLFCDFLTRWPTLLAARRARRTTLEAFFHAHNGRRANLIEARLESIRAATPLTEDPGIVAPCRLYVLALVEQLRTVLTAINGFDREIATVAGTLPDYTLFQGLPGAGPQLAPRLLAAFGEQRERFHGADELQKYSGIAPVTERSGKKSWVHWRWQCPKFLRQTFVEWAAQTINRSFWAGAYYRQQRAKGSSHQAAVRALAFKWIRILHRCWQTRTPYDETIYLNALRKRGSPLLRNLGLAG

SEQ ID NO: 327651 - protein, 377 aa, unidentified
MRNVRFLGLDVHAETIAVAVAESGGEVRSLGTIPNRPESVGRLIKKLGKPEQLRACYEAGPTGYVLYWQLSELGVKCEVVAPTLIPVKAGDRVKTDRRDAEKLARCYRAGDLTAVWVPDAAHEALRDLVRARLAAKRDQLRARNRLSKFLLRHGRRSPEGTKAWTAKHLLWVKTQRFEQAAQQMTLEDYRHEVEHAAERIARLERSIDAAIESLPVKMRAVVEALQSLRGVAQVSAVSIVAELGEVSRFAGARQLMGYSGAVPWEDSSGQRVHRGSISKAGNAHLRRIVVEAAWSYRHRPAIGHSLKVRQRQCSARVCELAWKAQHRLHQRYARLTGRGKSKQHAVTAVARELLGFIWAIGVEVEGSQDTKELKRPA

SEQ ID NO: 327652 - protein, 550 aa, unidentified
MMDHDKTMGIAGSSAGAEVPCDSIAPREYGIICGVSDIAAANAPSHTGAQCPKVRLSSARPMFNGRVGVGDRNDVLPRQDFTSIPPKPSPCSWKGVQDMARHSNKFDEVRRYVAGVDLAGNADHYVCGPRKDDGTHDIERFGTTTNELLRMVAWMKEHKVVSAAMESTSVYWIPVYDTLEAAGIEVVLVDTRTVKMVPGRKSDVKDCQWLQRLHSCGLLRGAFRPPEAFNAVRSVIREKGNVLQMRSQSILSIQKALDQMNIRLHHAVSDIDGVTGMKILGAIVAGERNPRKLATLRDRRCKKSEAEIAEELTGNWREEHLFNLKQAYETLCFLDGRIADYDTQIRAMYAKIAEAFPPVDPPPDGTGPKKQKDKEDSKAKADIARICGGFDMTKIDGIGYDNAAAILSELGPRLDAFPAESNFVSYIGVAPALGKSAGKNVSSRKKHKNTSRVGIVLKMAASTLSRSESSLGARYRCVRSRTCSRTAIKDVAREMAKRIYRGIKYGQAYIDEGERAYMERTRERTIQSMKKKISKLGISAEELGIYAVAV

SEQ ID NO: 327653 - protein, 403 aa, unidentified
MNAVGIDVSKGKSMVTILRPFGEIVSSPFEIKHTSSDILSLIKLIHSIEGESRIVMEHTGHYYEVLAQQFSAAGLFVSAVNPKLVKDFNNDSLRKVKSDKADSIKIARYALDKWQNLKPYSIVDELRTQLKAMNRQFHFYVKQKTAMKNNLINLIDQTYPNANTYFNSPPRSDGSQKWVDFVYTYWHVDCVRKMSLNSFVEHYQNWCKQKKYIFNKSKAEEIYTKATELVPVFPKNEITKRIIRQAIVQLNSTSATVETIRILMNETASKLPEYPIVMQFKGIGPSLGPQLMAEIGDITRFTHKGALTAFAGVDPGVNESGSYAQKSVPTSKRGSSNLRKTLFQVMDVLIKTMPQDDPVYQFMSRKRTQGKPYYVYMTAGANKFLRIYYGRVKEYLCILSGSS

SEQ ID NO: 327654 - protein, 361 aa, unidentified
MVLATPFALSERKGQLMSIVRSVVGGVDTHADTHVAAAVDHNGGLLGIESFPVDLAGFEDLVGWLAGFGPVERIGVEGTGSWGVGLSRFLHHAGVETVEVDRPNRQKRRKVGKSDPTDAVAAARAALSGEAAVTPKSRNGPVEQMRVLLVARRSARQQRIQTLNQLRHVVFCAPEPIRARFKDRYKTGLVSEAAKMRPRAGSDPVSFTTNTVIRDLARRIKSLNTEMQTIDQALVALLEGAAPSLLALYGLGPDTAATLLVTAGDNPERVHTERAWARLCGVAPLPAGSGKTSGRFRLNRGGDRHANAALYRIVLTRMSSHQETRTYVARRRAEGRNTTEIMRSLKRYVARQVYKHLPTES

SEQ ID NO: 327655 - protein, 351 aa, unidentified
MESISIIGLDLAKRVFQVHGINAQQEVVVQKRLRRNEVVAWFATIAPCLVGVEACATAHYWGRELSKLGHQVKLIPPAYVKPYVRRQKNDRADAAAICEAVSRPTMRVVAVKTVDQQAVQVLHRSRELLIRQRTQVGNALRAHLAEFGLVFPQGNAGLALAIRAIHDRSDGTIPTLAYDTLRALVEQIDALKKAVTRLDHQMLAWHCATADSQRLATIPGIGVVTASAVLAAIGTGKQFRSGREFAAWIGLVPRQHSSGGKDRLGHISKQGNQYLRQLLVLGATAQLHGQRRERAPGGAWFDALLRRKPGRVATVALANKMARVAWAVLTKGGSYRPLGETMPEGNGMVAA

SEQ ID NO: 327656 - protein, 437 aa, unidentified
MLNALNTITQIMNTTTNFAATIGLDWADQKHDLWIRPADGSKAEHVRLEQTPETLHEWVAKLRERFDNRPIAIAVETSRGPVISALMAYDFIVLFPVNPKGLKSYRGTFSISGAKDDRTDAQLLEELVRLHPEKLRALEPDTELTRRLGGLVGNRRHLVDERTRLVNQIHATLKTYYPMAETLLHRQMNTPMAADFLVRWPDLAALQTAPPEVIRSFFYKHNSRSAKKTEERLAAIQKAKPLTTDPAIIVPARQLVLALAGMLRPLHQSVARLDKQIQQAMDEHPDAPIFKSFPGAGPALAPRLLVAFGTNRDRFDQADEVAQFYGVAPVVVQSGNSKTVHFRYRCPKFGRQTFHENAGCALKKEPWARCYYDQQKERNKGKHHQACRALAYKLVRIYFACWKQHKTYEPNRYLIALEKHASPLHRKLKNLTATHCE

SEQ ID NO: 327657 - protein, 429 aa, unidentified
MRGGEQRAALCQTVLAKKPTLETGMPTTAHRSEAPSAVRVDLNALFVSLELSQSKWLITSLSPGNGEKLSKFSVGGGDVAGMLARFAELRRKAQARTGQRFPFVVIQEAGLDGFWIHRVLEAEGIESHVVDPASIAVSRRKRRVKTDRIDGEMLIRTLLAYKRGEPRVCAMVRAPTPEDEDRRRISRERKSLTIERTRHTNRIKGLLFGQGITDYEPQRRDRRKRLDELTTGDGRPLPARLKTQISRELDRLELVMEQIKACEQERDASLTALYPVPAAKADQRVEPGEATPPAPSVPAMLLALKGIGPETASVLWLEGLSRQFDNRRQVAAYAGLAPSHWQSGKIDHDQGVSKAGNPRLRTALVQLAWLWLRHQPDSALTLWFKARVAQNGGRLKKTTIVALARKLLVSLWKYVNAGVVIEGAIVQAA

SEQ ID NO: 327658 - protein, 400 aa, unidentified
MDETPRFRWFLGIDVSKERFDACCINLKGESLFSLSTSMNRKGFEELIKQLSCLSVSQESVLVGMESTACYHVNLYSFLVSSGYTVIVINPLLISNFVRLQLRKTKTDKKDASVIAQFLLLNRDSLCQTLISSDVSELRDLSRQRESLVDQMSSIKSDIKRLLSVTFPELEQIAGVFSKSMLRLLCHYPSAASIKQLKRSQIAKILIPGSYGKQTASSVERMIKAAQGSIGTTSPAKEIILKQKASLLMQLEQHLQELTDILKQLCQEKIQQDTGILTSMKGIGEKSAMNFLIEMGGDIKQFERHQKLIAMAGLDPALYQSGKIDRKGKISKRGNRHFRRIIWLMTTKVIQFNVRFKQYYLKRIKDGLPYKMAVLATAHKLIRVMFAMLTNRTLFDARMN

SEQ ID NO: 327659 - protein, 370 aa, unidentified
MLDTTTFVGLDVHARSIKAVSLDVMTGEVRCATFGYDAGAVAEWVRSVDPRARCVYESGVTGFDLQKRLSGLGVDCVVGAVSKMIKPSADRRRKNDRNDAEFLARMLSVGNVVEVWVPDDECEAARDLTRALEDARDDLSRSKQRLSKFLLRHGLAFDERTPTGRRKGNWTRAHWSWIESIRFAEGADNDVLAYYVDAVRRAAEEKARLEGLVEAEARKPRWRRRVDSLRCLKGVDTASAADLVFEAGEFSRFGNARSFAAWVGLTPSEHSSGESDRRGAITKAGNKHLRKALVEAAWHYLTCSGRPKDLARGQAPDRVARRHAAKGVRRLVERREALLARGVHNNKANVATARELACWVWAVGLMAEEA

SEQ ID NO: 327660 - protein, 322 aa, unidentified
MKMTQPTIISAGVDTSKDKLDVAIRGRANGLKVANNAAGWQQLAAWLQQSGVEKIGIEATGGYERGAMRHLQSAGFNVVLLQPLAVKAFAQMRLRRAKSDKLDAVLIADFTHTMDAANKMPPDPRFDGLGELLTYIEQIEEDMACFKTRLEHLRDVRLQQNVKDEIKRFNKLRLVEIRRLRAQIFEHEDLKARYNLVLSIPAIGIRTALSLIVRMPELGLVSREEAASLAGVAPFVHQSGKYQGQTHIGGGRKRLRRSLYMAAFTGAFNWNPELQALYKRLTARGKDHKCATIACARKLLIYANTVLARGTPWEKTRPLTAA

SEQ ID NO: 327661 - protein, 708 aa, unidentified
MHRVAQAIVEEKTRVIDVDLRSYFDNVQHALLLKKVGRRVQDTAVMHLLKMILKATGKKGVPQGGVVSPLLSNVYLTEVDRMLERAITTTRRGKYTHVQYARFADDLVILIDSHPRQDWLVKAVEKRLREELAKLGVEINEEKSRMVDLTKGDSFSFLGFEYRRILSRNKVWRPQYVPRLKKRTALLAKLRELSNLHDPRATLGHENVVSAIGVDSCARSPGKTDVLCGGLTPLVKLVRPALREPKDGALEAREAKFMSVALAPVLCRTGAGMRKFLECCAGIDIGKREITVTILTGSAEIEPVQQTRTFGTTVQELSRCLEWLLVSHCSTVVMESTGTYWVPVWNVLHEQIAVIVANPEHVKARRGEKTDPEDSRRLAERLRVGDVRGSFVPSAQIVELRDLTRRRKRLLSAANSERNRIQKLLEQANVKIGNVVSDVFGVSGQRILQALLQHPQLPPADLAELAKGRLRHKQQALIETLQGHRLNDHVRWMIQHSLDHLVFLENQLTELSQRTLQKLQPFEREYELLQTIPGIAGETAAVILAETGGNMAQFPSPKHLTSWAGVCPGNNRSAGKQKSASIKRANKWLLAALVQSAWATVRQRGSIFKKRFYRQMQHRGRKRALIAAARSLLAVVWQVLQRMTPYDEPSNEIFQERERGKKIQHHLRRLQQLGVDISALELPPPIPSDRLHPLTNLHPLGVLGIHAR

SEQ ID NO: 327662 - protein, 410 aa, unidentified
METVVERPAALDVHKEQVTACVRVPAGRGGREQHVAEFKTTVQGLLALRDWLKAHSVTQVAMEASGVYWKPPWAILEDEFECLLVNARHVKQVPGRKTDVSDAAWLCQLLEAGLLRASFVPPKPIRTLRNLTRYRKAQIGERQREANRLHKILEDTGIKLDCVASDILGASGRAMLDALVAGTTDPAVLAELAKGKLRQKLPALREALEGRFDAEHGIVVGAILAHIDFLDEQITLLSDAIEEQIRPFASAVELLCTIPGLQRRTAEVIVAEIGTDMSVFPTAGHLASWAGLCPGNDESAGKRRSGRTRKGSRWLGIALTEAAQANTRSRDTYLSAQYRRLKPRRGHRKAIGAVRHSIIVACWHMLTTGEIYRDAGGDYFTRLDPDKQTQRLVAQLQRLGHVVTLQEAAA

SEQ ID NO: 327663 - protein, 356 aa, unidentified
MEIIAMDSHKRYSLANVQTPDGRRLCEQRIEHRRGNIRDFLSAYRPGSPVAVETIGNWYWIVDEIEAAEMVPRRVHARKAKLMLGSINKTDKLDVRGLNMLQRIGTLPTVWIPPASIRDQRELPRTRMVLGVSRTRLKNRIHSVLDKYGLQDQFEGVSDIFGKKGRTILQDTLVQLPLHTAYTAEVLLEQLDQIQEAIGKIEKQMAEVFKPTPEMTLLASLPGVALILSVVIGLEIGDIRRFKWADRLASYAGTVPRVHSSGGKTRYGRTRPDVNHYLKWAYAEAGNSVAVNRKRFPYRHVSQLYTRVRTRRGHAQAVGAVARHLAEATYWMLSKNEPYQERGYKQVQGAVSATLS

SEQ ID NO: 327664 - protein, 349 aa, unidentified
MKIIGCDFHPGYQQIAMVDTETGEFTQMRLSHSNNGEEARKFYAGLAGPVRVGLEASGQSQWFERLLAELGQELWIGDAGKIRASSDRKQKTDRRDAELILQLLLEERFPRIWVPTPAERDVRQLLLHRAKLVRVRTQVKNPLQALALNQGVQRKRKLWSAVGRQQLENLPLLPWASRRRTELLKLLDELDGSIVALDGAVCEEAHRRPAVRRLMTHPGVGPVTALAFVLTLGPAERFRRGKQVGSYFGLIPSEHSSGGKQRLGHISKQGSSFVRGLVVEAAQSAVRFEPQLRREYQRLAQRRCRALAKVAIARKLAVRLYWMLRADLDYARLIQGSHAEQPESFCGRG

SEQ ID NO: 327665 - protein, 469 aa, unidentified
MNQRRLVGIDLGIATAHTVRVLDGEGTVVAKRKAWPTAESLTTVAAAALAGSPEGTRLEVVIEPTGPAWLPVAVFFSARGHRVFRVSSQKAADLRRFLSRHAKSNGIDADTLARLPLFDPAGLRPLALPSAERAALDRRVRASDRLTRAAADHKRRIKDLARQLLPMTPLSGDLGSADLAVLEHYADPRALGRAGLDRLTALIATASHSHQGAQRARQWLDAAQASLDLYAGHPAVDFTGLAAEVATEIRLLRAVQAELAAHAGQRETCYRAVDPAGLARSLPGLAEVGGPALAACMGDPARFGAGKQFRSCTGLTPKASETGETDRKGQPMSKAGSSLLRTTLVRAADTARKQDPQLARIYHQQMTERGKDHLGALCVTAASLAERAWTVMRRGTPYICDTDGRPVTAEQAKAIIAERWTVLPEIRARRRSKKTGKAPQKVLQGQYTRGSLPRRTTPPQRERPVKQTT

SEQ ID NO: 327666 - protein, 398 aa, unidentified
MTESSDYESVQVFIGVDVGKDTHHAVAINRSGKRLFDKALPNDENKLRSLISDLKQHGQILLVVDQPATIGALPVAVARSEGVLVGYLPGLAMRRIADLHAGEAKTDARAAAIIAEAARTLPHALRTLKLADEQIAELSMLCGFDDDLAAQTTQASNRIRGLLTQIHPALERVLGPRLDHPAVLDLLQRYPSPEKLASLGEKKLAAQLCKLAPRLGKRLAADIAQALAEQTVVVPGTNAAAVVLPRLALQLITLRKQRDEVALAVEQRVLAHPLYPVLTSMPGVGVRTAARLLTEVACRAFDSVAHLAAYAGLAPVTRRSGSSIRGEHPSRRGNKALKRALFLSAFAALRDPLSRAYYTRKMSQGKRHNQALIALARRRCDVLFAMMRDGTFYTPQAS

SEQ ID NO: 327667 - protein, 323 aa, unidentified
MSLPSPSTNVGIDVSKETLDIAVHETAAHWTSKHEFTEFPQVLKSLRAVAPTRIILEASGGVENLLVSYLAMAGLPVIVINPRQVRDFARAIGQLAKTDRLDAFVLARFGATLEPAVRHLKSAETQELAALVVRRAQLVNMLTAERIRLQQAQQQRRQSIVSDLKAHISWLQKRLDKCERDLSQLLGSSPIWRATDERLQSVPGVGPITSLVLIAELPELGQLPDKQIVALCGLAPHARDSGKWHGKRTTRGGRARVRTALYMAALVATKHNLVIKSFYRRLLSAGKQKKAALIACMRKLLVILNAMFRNQTSWQPPRLVPGA

SEQ ID NO: 327668 - protein, 363 aa, unidentified
MKSMIWLGLDVHAASITIARYDGDATKGSVTTIVNTPTAVRRFVQRLPASPPVRACYEAGPCGYVLQRQLTALGIACDVVAPALIPRRPGERIKTDRRDADKLARYYRAGDLTRITVPTVAQEAVRDLIRARDDARCDRTAARQRLVKFLLRQGQRHPGRQWTKQFRAWVRAQRFAGPTQVVFEYYCAQVATLDERLTQLERAILELAATPELAPVITRLSCLRGVAPLSAMVVMAELYDLRRFATPRELMAFVGLVPSEHTSGPRHRRGHITKTGNSLARRLLIEAAWSYRHTARNTDRARRLLRTQPPAVRAITERALHRLTRRYRRLLGRGKPSTVAVTAVARELCGFVWALARTEAAAA

SEQ ID NO: 327669 - protein, 419 aa, unidentified
MGDLAACVGWDWADQEHEVCMRVEGSQQVEREQVRGTPEALHAWARKIEQRFGGRPVGVCIETSRAAVIWALCSYAHLILFPVNPKSAASFREAFYPSGKKDDPVDADVLMMMLDKHGEKIRPLKPADPDTRALGMLSEYRRKLVGDLVRDTNRLRAVLKSYYPQALELVGDLDTPMACDLIERWPSLDKIMRSRPSTLRAFYTQHRSRSKELMEERLEIARTAVALTSDPAMIESGSIQATGLVRVVRALLESIAEVDQTIGERYQAHAEHKLIDSFPGAGAVIGPRLIALLSSDRERFGSHEDLQRMTGVAPVTSRSGGRDGTISVHRRLKRSKFIHQTIVEWAGHTLKSSQWAREYYATKEATGASRFKILRSLGYKWLRILYHCWKTRVLYNEQTHQEGLIRRRSPLAARLLPAA

SEQ ID NO: 327670 - protein, 453 aa, unidentified
MEQEDIRLEQFRRLRKEIRGSEDYLIVGIDVGKDKHNAYLGTPRGKTLYRRLIFENSRERFEKLMFQVQAIRVQQSLNQVVFGMEPTANYHKPLGEFLINQEHQVVLVSPEAVKQNRKLLDGRWDKHDGKDCANVADLIAQGKCLYYEYPLPALHDLRNLLSLKRKLKKLEQGLRLRIRNHLVAQYFPEMDQYCNWGEQEGLALVRWCLDPAVMARLSEAELLSQLHNQSRTLAQRRRLSALREKSPSSIGCRFGISVEFEGQSTVKLLKEVRQTISETEEKIEQVCLRFKEYPCLLSIPGFGPSLSAMVLGAIGNPWRFQNGAQVIKMVGLDLSASQSGKSQGPPSISKKGKAEIRYALYQAALVASSRDKHFVAYFTDQLRGREKEKGIKTKRRVKLAAKMLMIAWTMMKKQELFDPRYLSPQAEPINARKTMKTENRGIPEVQRGSDRGL

SEQ ID NO: 327671 - protein, 351 aa, unidentified
MFAGIDTHKDTLAVAVVDQLGRQLAAAQLPNTEPGFLELVELLEAHGVSRVGIEGSGNFGRAIAVHLVIDWAPGREAAVVEVPTLKTSRERRAQVGRGKTDPVDALAIARITAREPGLPAVRLAVGVAADLRALADYRAQLVAERTALANRTHAELHGLLPGYQATIPRLTAPTFITAARDLLDGDSSVRAQLTRRRLARLSQLTAEIRELKELITAAVTEVETGLTGLYGVGPVGAATILGEVADIRRYRSRHAFAAANGTAPIPASSGRTTRHRLNRSGNRTLNRVLYTVAITQIRADTEGRAYYLRKRAEGKTSREALRCLKRRLSDVVYRTMRADLQPARESLPAAA

SEQ ID NO: 327672 - protein, 526 aa, unidentified
MASSNKHSKLRACDEGRYTSDGLKNVTLDDGTRVITSPSNDIKRPVCGAVDVHKSVLMAAACVTDGESLSAVFYVRQFTASNSDIRLMAEWFASYGVQDVCMESTGKYWIPVYDILEHNGLKPILTHPKYVKQAKGKKTDFRDAIHIANLFRMDLVVASFIPPADIRDLRELCRYRLKLTYIRTSEKNRFQNSMTISKVRLDSVFTDPFGKSASNIMSYLIQTDPDEVSDEKILSFVRHGVKASTEEILDSIHGYEFIGAQRDKLEVIQTHMDDLNKCIDMIDEKLSYYRLKYSKVIRHLVTMIGISEESALYILGEIGADMSVWRNSDSLASWAGLSPANNSSAGKKKTTKIGKGGHYLKPLMVQCALAAIKSTKKHPYFYYKYLTLKKRRGHKKAIIAIARKMLVAIYHMIRDDKDFAPIDYEQVVTRKQSQKELNLTNIIEFLGEHGVDPETIRTVETQCSQASQAGEGAKTDKPKKSPQKKQPKSKTAATPTEQKPAKRRGRPPKSPQTKSQSSTQPAPATA

SEQ ID NO: 327673 - protein, 346 aa, unidentified
MNDITLIGIDLAKNILRINCVDKKGKRVMNKSLHRDSLLRFLTALPQCTVAMEACASSHYWGRAIASLGHTVKLVHPRYVTPYRLGDKNDANDAAAICAAAQRPDMRFVRLRSQRQSDIQSLHRVRSGLVQERTATINRVRALLAENGIVIKQGPSAVYAQLPAILGDESSELSAIMRRILGSQHEHLLHLREQIKELEKTLNTLIDEDADCKRLMQIPGVGPLTATILASEVGNGSGFSRSRSFAAYIGLVPRQHSSGGKNLLLGISKRGNRYLRTLLVHCARAAMRTIIFGKRPFGGSIERWVLQLMERRGKNKAIVALAGKLARIAFGMLSNGTDFQKAADAC

SEQ ID NO: 327674 - protein, 342 aa, unidentified
MQVTTIGLDIAKNVFQVHGIDAAEKVAVRKQLRRGQMLAFFKALPPCLIGMEACATSHYWARELTKLGHQVRLMPAKDVKAYVKRNKNDAADAEAICEAVRRPTMRFVQIKSIEQQGRLMLHRARDLLMRQRTQLINALRAHMAELGIVAAQGREGVKELLKIIAGEQDARLPLDAHASLVVLAAGLQAMQTMIGSIERRIIAQHRSDEASKRLRSIPGIGIVGATAIAATVPDPKVFRSGRDFAAWIGIVPRQDSTGGKQKLGPISKRGDQYLRRILVVGAHAVLKRARHQAEKYPWITRLLARKPFRVVAVAVANKMARVAWALLARGGSYRASALTAAA

SEQ ID NO: 327675 - protein, 340 aa, unidentified
MTDVTRIGLDLAKSIFQIHGVNADEVVTIRRSLRRGQMLAWFAKLPPCLIGMEACAGAHYWARELSQLGHTVRLMPPLYVKGYQRRNKTDAADAAAICEAVSRPSMRFVTPKTAPQQAAAGIHRVRASLTKQETMTMNSLRGLMAEFGIIAPQGRKGIAELLAILNDPQDTRIPQPLHGALQALAATLRSLAAQLKAVDKALAAWGRADTTSRHLSTIPGFGVVTATAIAAHVPDPSVFASGRDFSASIGVVPRQNGTGGKVRLGAISKKGSHYLRRLSVNGAVSYLRSKRGRQDPWVVKMLARKPMKLVAVALANKNLRIAWALMVRGEDYRAATVAAA

SEQ ID NO: 327676 - protein, 365 aa, unidentified
MANDEPELLQLLADVLGLADDATWAVDMADGGAALLIALLVNHDQELLYIPGRAVNRAADGYRGEGKTDARDALVIADQARVRRDLKPIRPSDEITAELKLFTARRTDLACDRNRSINRLRATLTSMFPALERALDLTTKGPLVLLTGYQTPLAIRRVGLTRLTKWLSVRNVRNAESLATAAVRAAERQHTAVPGEAAIASLVGALVEEVMALNEKIADVDKLIEGRFRRHELAEVITSMPGIGSLLGAEFLAAVGSDMASFATPDRLAAFAGLAPAPHDSGKSHGNLHRPQQYHRGLQRVFYTSALISIRSDPNSRRFYDRKRAEGKRHIQAVLALARRRVNVFWALIRDRRCYQVIPPVTHAA

SEQ ID NO: 327677 - protein, 422 aa, unidentified
MKKIQTKKLKFVNDKTLIATVDIGKGLNMGYARCPDHSVVKSFEFANNRAGFDKFWDCLEKARDSKNLDSIIVGFESTGAYGEPLQHFLKNKPVRLVQVNPMHTKRVKELQGNSPNKTDRKDPKVIADIIELGHSLTVVIPEGAAAELRRLTLARERANKRCTALYNQLQDLIFISFPEFSQVIKDVKTKTARYLLQTYPDPQDIIDLGLESLGAVIKRVSRGKMKLAKAKDLFEAARTSAGITEGRFSVALEIQATLEAIASSDDFVVRLEEEMSRHLEDIPYSHLLLSMKGIGRVTVAGLIGEIGDFNSFDTQRELLKHAGFDLFEISSGKLRGSRRISKRGRPLLRKLLFFAALNTVRKGGVMHAHYQRHLKKGMKKIKALVAIARKLLGIIFALVRTKHEYQEDYQKIQAAATIPMAA

SEQ ID NO: 327678 - protein, 350 aa, unidentified
MKTAHPVIIGIDTHKAIHVAVAIDTQGTRLAALSIPTNRKGYLELERWSRSHGEVLAFGIEGTGSYGAGLSRHLLSQGHTVVEVTRPNRQLRYTQGKTDSLDAEGAARSVLSGQATARPKTHTGSSEMIRHLKIARDTAVKSRSQAMVTLKTLIINAPAELRETLDQIRGKIALIRHIAAFRPGNIDSPLASAKMAMKALARRWLWLHEEVLTHDAELERLVTARAPTLMASHGIATLTIAEMLILVGDDPTRIRSEAAFAKLCGVCPIPASSGRTRRFRLNRGGNRQANAALYRVAIVRMRSHEPTLAYVRKRTKDGKSKSEIIRCLKRYIVREIYSQLCVPKTAEIAT

SEQ ID NO: 327679 - protein, 472 aa, unidentified
MPSIFKHDVGTLKEMLAGCSPAQILYVPIDVAKTNLSAMIVNFVGEVITPKFDFPYNTHGIRFLQHRILQAQRETQAQKLFLGLEATGHYHENLTGSLQTMGYDVQVIRPFDVSRERDNVHAKTDAIDLAAIARVLISQKGKRSYVPDDVYYNLQRASRTHRQLTQQETRTKNIITALLDKTFPGLWKNSEQEKSLFSDPWGKASLLLIEHYPTPHKVLKLGAKRLAAFFKKHNTKLGDQTAQHIIQHAKTCPAFPPQRMEADLKALQAHLLLLKVLRTQIEGQKKLMAKFLIQTPGIYLLSIPGISLVYASDFTAEVGNIHRFAYPKQISSLAGTAPKKAQSGQMDSNHLPTSHKGKKLLRMTLNQIALSCNTHCPEYTRYYGEKHLHYQHAPGKARTATANKFIRLAFALMKKEHLYEPDSRNPLIPQREYQQQLWEKIQRKLEPYLPGEIPENTYLHKVQRQLEEKTMT

SEQ ID NO: 327680 - protein, 366 aa, unidentified
MKKISTVQTFKSEVFKEQKLTIGLDLGDRWSFYCVRDEAGQVLLEQKLPTTPEAMKHTFGRIPRSLMALETGTHSPWVSRLLTELGHEVLVAHAQKVQLITKSSRKDDRHDAQTLARLARVDPELLGPVRHRSAQAQIHLTVIRARAELVSARTALVNAARGLVKSYGERLPQCGTQQVSGKLAAGLSAELREVLVPLLTEIESLNERIKEYDERMEKIAKEVYPQVSLLKQVKGVGTQIALTYVLTIEDPYRFPKSREVGCFLGLRPGRRNSGQSEPQKKISKEGDRYLRTMMVQGAHYILGPFGEDSDLRRWGLKLAERGGKNAKKRAVVAVARKLAILLHRLWVSGEVYEPLRNSHKAMRAVA

SEQ ID NO: 327681 - protein, 386 aa, unidentified
MQKLNDLSRSLAPLKPDGTLIAVIEMSQSSWLVSGIVPGVERQPLKKLAADETALLKLLHRWREEAEKAGRRIERTAVAFEAGRDGFWLARWLRTRSIEAHVIHASSVAVSREHRRAKTDRLDTELLKRAFLGWLRGERDHCKMVAIPTSKDEDAKRPNRERESLVGEQTRIVNRMKATLIRLGIRGFNPKLKKAAGRLEDLRTPEGEPIPPNTMAELRRDMDRRRLVSDQIRQIEEARLDRLKQTPDDGPHAMLRLLARVIGVGIETADMLVQEVLARNMRDRRAIARYAGLTGSPDESGTKRREKGLARSGNARVRRGMIQLAWRFLLFQKNSALAQWFRARTENARGTRKLMIVALARKLLIALWRLVREGVVPDGVVLRPTQ

SEQ ID NO: 327682 - protein, 312 aa, unidentified
MPSETTIHIAIELSVSSWLVAARPPGVKKSRLHHIEGGDTTALLALIAELRTRASTKLGKPAEVVCCFEAGRDGFWLHRALTMHGVTVYVIEPTSILVNRRARRAKTDRLDAEGMLRVLAAWLAGDRQVCSMVRVPTPEEEDAKRPHREREHLVQERLRIENRIEALLFTQGIRKRPSLRSWERDVAELRTGDGRALPSLLRVELNRRRRRLVLALELIREVEAERVEALAETADDEMTQKIAALQRIRGIGTNFAAVLVREVLYRSFANRRQLASYVGIAPMPYQSGGMDRDRSISRAGNPRARTTLIQLA

SEQ ID NO: 327683 - protein, 387 aa, unidentified
MPQPNDLSRSLVALDQDSTIIAVVELSQSSWLVAGVLPGIERQPQKKLEPSAERLLGLLHRWRDEAIRAGKKIARIALAFEAGRDGFWLARWLNARGVEAHVIHPSSVAVSREHRRAKTDRLDTELLKRGFLGWLRGERGHCSMARVPTIAEEDAKRPNRERECLVGERTRIINRMKATLARLGVRNFKPTLRKAAERLATVHTPEGTPLPRNVLAELQRDMARLGFVVSQIREIEQARQKRLEQETETGPHAMVRQVARVIGIGIETADMLVHEVLSRPMRDRKAVARYAGLTGSPDESGARRREQGLARAGNARVRRGMIQLAWRFLRFQKQSALAQWYRARTADSRLGTRKTMIVALARKLLIALWRFLTTGETLEGVILRPAG

SEQ ID NO: 327684 - protein, 345 aa, unidentified
MPIVGGLDIHRKQITFDYLNTETGQVQRGQISPADREHLRAWLARFADCEDVAFAVEGCTGWRYVVEELAAAGVAAHLAEPADTAFARGRKRHAKTDKTDCRHLRMLLAEGRLPECWIPPGHILECRALLETYHDLRREHTAWAQRIHAVLFHQGAPALGEGTLRTGPGVAALRAAAAAHLSPAGQLQIATALDMTDMLDTRLHELRHQLLDAARHLAGAKVLAARLYGVGPVTALAMTCWLGGKDRFSSSRKAVRFAGLDVTVRSSDRKGPPGRLSRQGPPVLRWAVYEAGKTHARSSAPDYRYYAQVKDRCNGKRAALSEARKILRQACHILAELGDDALSAA

SEQ ID NO: 327685 - protein, 370 aa, unidentified
MLDTTTFVGLDVHARSIKAVSLDVMTGEVRCATFGYDAGAVAAWVRSVDPRARCVYESGVTGFDLQKRLSGLGVDCVVGAVSKMIKPSADRRRKNDRNDAEFLARMLSVGNVVEVWVPDDECEAARDLTRALEDARDDLSRSKQRLSKFLLRHGLVFDERTPTGRRKGNWTRAHWSWIESIRFAEGADEEVLAYYVEAVRRAAEEKSRLEGLVGAEARKPRWRKRVDSLRCLKGVDTASAADLVFEAGEFSRFRNARSFAAWVGLTPSEHSSGESDRRGAITKAGNKHLRKTLVEAAWHYLTCSGRPKDLAKGQAPDPAARRHAAKGVRRLVERREALLARGVHGNKANVATARELACWVWAVGLMAEEA

SEQ ID NO: 327686 - protein, 468 aa, unidentified
MKRRKSTRIRALHPQLRSDAAGIDIGARELVVAVPPDCLTAGPLTVRTFRSFTDELHALADWLTQCGIKTVAMESTGVYWIPIFQILEARGFEVCLINAKQAAGIAGRGKTDVCDAQWLQYLHACGLLRASHRPPMQVCALRSVLRHRDRLVRAAASSTQHMQKAMNQMNLQLHHVISDVTGKTGLTIIDAILAGERDPAVLARHRDHRIKADLRTIERSLRGDWQAEHLFTLRQARATYAHYQQQITECDTEAEQMLGTFDKANAPGDLPPPTSSHRKPQRNEHRFDARAALHGILGVDLTQIPGLSALSAHGLIGEIGTTLEKFPSVRHFASWLGLCPDNRISGGTILSSKTRDVPSRVKASLTQRAARRKSSASRRKACTRPKARWAITSGECAGASGRPKPSPPPRTNWRASIMRCSKTGRPTTKAASPAAPNNKPSNGGKGWKSKPPNSASPFPRYQLSINAL

SEQ ID NO: 327687 - protein, 448 aa, unidentified
MKQDPEEITDAEHELVLNRACAIDVAKASGKVCVRVDSRDGRRVSKVWDVDATSRAVGELADHLVDAGIEKVTVESTSDYWRIWFYLLEAAGLDVQLVNARDVKNAPGRPKTDKLDAVWLAKLTEKGLLRPSFVPPASIRELRDYTRLRIDLTRDRAKYWQRLEKLLEDALIKVSSVASRIDTLSVRDMLEALIAGERDPRRLADLARGKMKPKRAALIEALTGRFDDHHAELARMMLDQIDVFSTKIAILTTRIEELLAAMEAGPGTGTDTPDRGAGPGSDSAAELTTIERLDEIPGIGPGAAQVILAEIGLDMSRFPTAEHLVSWAKLCPRTIQSGPVLRSGKAGKGNPYLKGALGEAAAAAAKTNTFLGERYRRIVKRRGKLKALVAVARSILVIVWNLLKDPTARFHDLGVDFHTTRANIERRTRNHVAQLAALGYRVTLEPAA

SEQ ID NO: 327688 - protein, 366 aa, unidentified
MNSISYVGLDVHKRTIAVALLHPGTGELIQWQIAHEPTALRRLIRKLKTHLPLSCAYEAGPTGYALQRQLETAGIPCLVAAPSLIPVRCGDRIKTDHRDARKLAELHHAGLLTAVHPPTEDEEAVRDLCRCREDAQLDLVRARHRLGKFLLRRSLIFHDGHQWSQQHHYWLHGLKFSRTADRVVFEDYLLAVEQQQARVAALDERLAEAAGQEPYKTPVAHLRCFRGIDTVTALCLTAELHDVRRFQSAPALMAYLGLVPSEHSSGEHRRRGGITKTGNRHLRRLLIETAWHYRHKPAVGVRLAKRRREQPPAVIARADRAQQRLCRQYRLMTGKGKHHNTIVTAIARMLVGYLWETLREAQAGRA

SEQ ID NO: 327689 - protein, 357 aa, unidentified
MTEDHQKWEILTRGKAVYVGIDVHKESWQVTIQAEGEEVFHGRLPSQYHALKSLFDRFSNQNIKVAYEAGPCGFWLYDKLTADGIETIVVPPSLIPIESGNRVKTDKRDSRKLANFLERNMLKRVHVLTEEERADRELVRTRRQIVEHRSNVARQIKSKLLFYGIESPFPSKNHWSKMYIRWLREIASTHKGMGLSIDFMIDLYEQLSDQIKKITKEVIELTNNEKYSHKIALLKSIPGVGMLIAIEILVELQDMRRFKSAEKIASYIGLTPSEYSTGQYTRQGRITRCGNKRVRTSLVEGSWILIYRDPVMRFKYERLKERKGGKRAIIAIARHLIILMRRMLINNEPYIMGTVAS

SEQ ID NO: 327690 - protein, 415 aa, unidentified
MGQQRNKVCGVDIHKKFLVATILTRDGTKMQKRFGTDIDDLLNFRDWVLKENCDCVAIESTGVYWYPVNAVLENKVELILANAHQIKHTPGRKTDALDSEWIAEVALNNLIDPSRILPKEDRELRRLTRTRESLVKIRSQMKNQVHQGLESCSIKLSSVLSDSFGKSGRYILDGLIKGKNIDEIIAGIPSKRVKNNGDQIRSAIKIGLDQIQVFLIQSHLDTIDCLTKKLDEMDLEIKQRISGRKDDLKIVMSVPGIGFIAATTILAEIGNYQDFSTPDKLAAWCGIVPSVYQSADKLRTGSITKQGSKHIRWIMVQVAQAAAKKKGSKLRKFFLRVKAKKGHNVAVVALARKILCILHHLLMNREMYQEEGVEKSRPSRLDWSSATTDKMSLQTMIEIIAKAGYEVRKTERDGG

SEQ ID NO: 327691 - protein, 410 aa, unidentified
MEVLHAHCAGLDVHKDSVVACVRHMAGGKITAPVKTFKTTTQELMALSEWLSSQGVTHIVMEATGIYWKPVWHILSDGEFELVLANAAHVKNVPGRKTDVNDATWLADLMAHGLIRASFVPDEPTQQMRDLLRTRKQMMRERSSHIQRIQKTLEDANIKLDSVVTDILGLSGRRILKALIAGQTMPQALATLAHRRIHASADELEAALRGRVTKHHRFLLKLHLDQIDAFDAAIAAIDQEVNVNVEPFRAAIELLSSIPGVGNLAATVIVSEIGIDMSRFPSAGHLISWAGLCPRNDESAGKRRSNRMKKGAPWLKTTLIQCAWAASRKKNSYLQAQYLRLRSRRGAKKAICAVAASMLTAAYHMLKDGAFYKDPGADHFDRREKGKQALRLVNRLQSLGYVVQITPQAA

SEQ ID NO: 327692 - protein, 350 aa, unidentified
MSILADHYDVVIGVDTHKHTHTAVAIDAATAVEQQSWTVSAAPAGYADLLGSVSCLGSRRRCWAIEGCGSWGKGLARWLATHGEHVIEVERPKRPARHNGAKSDAIDALRAAREALASPHHAGPRCGAGRDALAALVSARRSALAGATDAERQLLGFVTTAPESLSGKLRQRSTRRIVNECCSWRPAAHVDADVAATAAAMKAVADRARALRGEAARHEELIRRHITVWRPDLLEIAGVGPITAAVALCAWSHHGRVRSESAFAMLAGTAPIPASSGQTNRHRLNRGGDRQLNWAIHMICVGRIARDRRTQAYLARRRAEGKTTKEIQRCIKRYIARELYRALESGLDTP

SEQ ID NO: 327693 - protein, 365 aa, unidentified
MNTNNCDDVRKNVKSTGPASQVAVDDNAQVFLGIDVAKAKQVVSKFVPGEGAKPAEGMFTQTLLKRVGALLKRGLRVHCVYEAGPTGFALARQLIALGATCLVVRPRRLDRYGRRRKTDPLDAQHLAEDLAAHHFGRRGLLRPVRLPTVAEELRRLPVREREILARNRHQLLNSAKGRALALGYTLPKQWWRPRVLPSVLELLPQELADLLRRTATVAHAMRVQLEAVETQLKADAPSAPRGVGALTVGVLEREVCDWHRFPSARKLASFVGLCPSEDSSGSRHQLGAIDKHGSPRLRFWCQETAWRLLKFQPNYRAVLWARERLRTANASRAKQICVALARRFLVDWWRIRTDQASCAQLGLLF

SEQ ID NO: 327694 - protein, 533 aa, unidentified
MASKKSTQRKHIRSEGTYSSEDLKCLTLDDGTRVVTSADGDIKRPVCASIDVHKKILMAAVCRTDPETLKAVFFVRQFQSTNKDIRGMAQWFKDQGVQDVCMESTGKYWIPVFNILEQCGLRPVLTHPKYVKQAKGQKTDFRDAIHIASLFRMDLVVASFIPPADIRDLRDLCRYRLKLTYMRTSEKNRFQNSMTVSKVRLDCVFSDPFGKSASAIMEYLIGTDPDQVSDEEILHLVDRRVQASSEDILESIHGYEFLGAQRDKLNIIQLHLGQLNECIRLIDEKLEYYRQKYSRIIRHLVTMVGITDMSALYILGEVGTDMSVWKNDAALSCWAGLSPANNASAGKKKTTRTGDGGHYLKPLLVQCALAATKSTKKDPYFHYKYETLKKRRGHKKAIIAIARKMLVAIYHMIRDDADFLPADHEDTIQNTKKTKGLNLNNVIAFLKEQGADEGKIRLVETQCCGKEAETIDTCCKPPVVQDAKEKQSISGSADVSQPIQESVNGSPVLISGSQQGHALNHHSKEPAVATATA

SEQ ID NO: 327695 - protein, 373 aa, unidentified
MDASGRQLLSRKVENDEADLAKLIGEALSFAEEVVWAVDQPGGGAALLLALLWERDQKVLYVPGLSVDRARDAYRGESKTDARDAHLIADQARMRPDLGELRPGEREISELQLLLARRRDLITDQSRTITRLREALLSLFPALERALDLNSKGPLILLTHYQTPAQLRRAGHKRIAAYLRSRSVKGSNSVAHKALAAAKTQSVTLPAQEEVASRIVAELAKDVLGLKERIESIDEEIGQRFFDRPEARILISLPGMGPILGAEFLVAVGDICAFSSADRLAAYAGVVPAARDSGKRVGKHRRMRGGNKTLKRVFYQSAFSSLRSSSESRAFYERKRREGKRHTQALIALARRRVNVLWAMLRDGTTFEARSAT

SEQ ID NO: 327696 - protein, 370 aa, unidentified
MKKNNTCRQSSKRRGSTRTGRLTIGMDLGDKTSRYCALDRNGEVVRERCVGTTKKAMTQVFGAMPRCLVAMEVGTHSPWVSRLLGRLGHEVIVANARQVKLISASSRKDDRLDAQTLGRLARVDPQLLRPIRHRSEKAQGHLMTIRVRARLVEARTGLVNAARGMAKAVGERLPACDTDQMGVEKMQSLPPELQETLQPLLQSVESLTEKIKACDVKIEQIARSEYPETELLQQVSGVGTLIALTFILTVEDRERFQKSRDVGCYVGLRPKRSESGKSQPQLRITKEGDIYLRKMLVQGAHYIMGYRGPDTDLKRWGVKLSERGGKNAKKRAIVAVARKLGILLHRLWVTGEVYEPLRNSKQGQPVGTAA

SEQ ID NO: 327697 - protein, 279 aa, unidentified
MGEASTIGIDIAKSVFQIHGVDANGTVVIRKRVSRARFLEFFADLPPCVVGMEACATAHQWARELKKLGHDPRLMPPTYVKAYVKRGKNDAADAAAICEAVTRPSMRFVPIKSVEQQSALMLHRTRDLLIRQRTQLINALRAHLAELGLVAAKGHEGLQQLVIAVTESSDERLPSNARFACQSIVAQLHAVQTQVNGLDKRIIQAHRANADSKRLDAIPGFGVILSTAVVATMTDPKAFKSGREFAAWIGLVPRQNSTGGKERLGSISKQGDRYLRRLL

SEQ ID NO: 327698 - protein, 402 aa, unidentified
MPINMQYNRAFGLDLSKKTFHGCILDGPDLSERHFFTGRMDEEGKARLAGRLCPGDIILMEAGTASFMLARQLITSTEAEVVVLNPAKLFNIFNSTVKTDKSDSEKIARIARNMPRDEWPTVLIPTMEEQAERSTVSHEVFIAQSITRELNRLHALFNSMGFPFIKKSTLKNKESREDLINSCLSESPLAVEQAMMISSQVNLLMEHMKSSKKNLVQICLNHPIQALSLLSIPGMGVVTAAAQIAFLNDGSRFSSPDSYVNYIGLSERRFDSGISVSKGHISHMGNKVIRRNIIQASWIACLKSGDNPLSCKYEYFRSHGKPKVVAAVAVAKKMIQLSYILVKSKGIYEFTKQQGLETFRNKLKSHRLLALLDYLPTSIRFEMEEYDRNKKEVAATTPRKIS

SEQ ID NO: 327699 - protein, 340 aa, unidentified
MTLATIGIDVGKSWYHLVGLDQRGAVEIRQRFNRSQLIRFMTKLPPCLIGMEASCGSHHLARALVEIGHDARLMSAKFVRPYLKGNKNDYLDAEAIAEAVGRANMRFVPIKTADQLDLQAVHRVRSGLVSRRTGVINQIRSFLQDRGVLVGVGPARLARALPTILDEHEPHLSGELRRLIELLWAQWRQIDTQIDELEDLLEAQLERDPACARLKEIPGVGLITSTAVVAAIGDGKMFRSGRDFAAWLGLVPRQHSTGGRATLLGISKRGNSHIRTLLIHGARCRLRFEKEGASQLSVWAKRLLARAHANVAAVALANKMARIIWAVLTKGERYRARLAV

SEQ ID NO: 327700 - protein, 409 aa, unidentified
MLFIGDDWAEAHHDVEIEDDAGRLLVRKRVPEGLAGVTMLHELVAEHLDPAGEPDQVMVGIETERGPWVQALLAAGYVVFAINPLQVARYRVRHSPSGAKSDPADAHLLAEIIRLDRAHHRPVAGDSELAEHLKVAARAHQTMIWSRVRQVNALRSLLREYYPAAMAAFGTDLASPDALAVLAAAPTPEQGRRLSQARIETLLRKAGRQRNLATTAAKIKTALGSDQLSARPGVVPAYAASASALVAVLITMVAQTEVLAGQVEQGFGRHPDVEIYLSQPGLGMILGARVLAEFGDDPDRYTDAKARRNYSGMSPITKASGTKRVVLARYARNRRLGDALFLQAYSALRVSPGVRACYDRQRARGATHYQALRAVANRLVGILHGCLRHHTPYDEHRAWHTEHEQPAAA

SEQ ID NO: 327701 - protein, 366 aa, unidentified
MEAKEKSGTRYVGIDLGKRTYEVAIVGENGKVTMSNGKTFVAGRQALYKKLRPQDKVALETGNMSFIMAKEIEKAVPGCKVYVLNASNLALIYGSMKKTDKEDALKLAHILEDFQEERLPVVPVPSEKEMHRRKLLSSYQRAQQSRNRNINQIHALFLSQGITTKVRADLVTAEARKEAIAELTGIEREEAEYLCASLELSEQRIAVLEKQMEEEAAGDKEIELLKTIPGVGPKTSFAFVAHVGVERFGNASQVSNHLGLVPRVYMSGDTVNYGPITKRGNGYVRALLVQAAWSLVLSKDGGKLKERFKYMTEEKSKSKKKTIVAIARRLAEEMYTLLKYGTRHESRPFTPEKGKAKKIAKEALSA

SEQ ID NO: 327702 - protein, 387 aa, unidentified
MPQPNDLSRSLVALDQNSTIIAVIELSQSSWLVAGMLPGIERQPRKKLEPSPERLLGLLHRWQDEAVRAGRTITRIAVAFEAGRDGFWLARWLAARGVEAHVIHASSVAVSREHRRAKTDRLDTELLKRGFLGWLRGERGHCSMARVPTIAEEDAKRPNRERDCLVGERTRIVNRIKSTLARLGIRNFKPTLRKSAERLATVHTPEGMPLPPNTLAELQRDMARLGFVVSQIREIEDARQKRLEQQHETGPHAMVRRLARIVGIGVETADLLVHELLSRPMRDRRAVARYAGLTGSPDESGARRREQGLARAGSARVRRAMIQLAWRFLMFQKESALALWYRARTTDSRSGTRKAMIVALARKLIIALWRFVTTGELLEGVVLRPAS

SEQ ID NO: 327703 - protein, 343 aa, unidentified
MNVFIGLDVSLASTAICAVSENGKILRARSADSEPEALVRALKEVDGTIVSVGLEAGPLSQWLYKHLTDAGFETVLLETRHVKGVLKAMPIKTDRRDAEGIARLLQMGWFRPVHCKSISAQETRALLTTRKALQQSVINLELSIRGVLRNFGLKIGVVTKRNFEARVRELADGNPMLEAAVDAILGARTSLREQYAEIDKQLVGLAQDDAVCRLMMTMPGVGAIIALTVKSAIDDPERFSSSKDVGPWVGLTPKRNQSGEMDIVGRITKAGDASLRAALYQAATVMLNIAKPNWLTTWALRVAARRGKKRATVALARRICVILHRMWRDGTVFEVTRERAIAA

SEQ ID NO: 327704 - protein, 346 aa, unidentified
MKITTIGIDLAKAVFQIHGVNECGKVAVRKQLKRAEMSSYFANMEPCLIGMEACGSGHHWARKLEGYGHTVKLMAPQFVKPYVKTNKNDMADAEAICEAVSRPNMRFVAMKTVEQQAILSVHRARQGFVKARTAQGNQIRGLLSEFGIVIPQGIRSIMKQVPEILEDGENGLPGTMRNLLERLTENLKEMDRQAKELEVQIQVWHRENEASRKLAEIPGLGPITASAIVATVGDAREFKNGRQLAAWMGLVPRQHSSGGKQNLLGISKRGDSYLRTLMIHGARAVIRFAENKAEPESWLRKLMARRNKNVAAVALANKNARIVWALLANDRTFRPDYTPAAVVAGM

SEQ ID NO: 327705 - protein, 409 aa, unidentified
MDVLHPRCCGIDVHKATVVACLRLQDGRRVKMEIQQFGTTTAELLRLHAWLAAAACTHVAMESTSVYWKPVFNLLEGSFEVVLANAHHIKAVPGRKTDAKDCEWLANLLAHGLIRASFIPPVSIRELRDLTRHRKSLIRDRVTAANRVHKLLETANIKLGNVVTDVLGVSGRAMLNALVRGETDAARLATLAKGSLIPKVKQLAEALCGRFTSHHAFLLDQLLTQLDQVAALVAACDARILEVATPLEAHIQRLQTIVGVGRRSAEVMVSEIGVDMSRFPTSGHLASWARICPGSRESAGKRRNAGTGTGNNWLRTTLLESAWAASHSRHSYLGAQYRRISKRRGPKRAAIAVAHSILVIGYHVLRDGVAFQDLGSDYFDRMNTTKLKRYHLRRLAELGCEVTPVTPAA

SEQ ID NO: 327706 - protein, 429 aa, unidentified
MVKRTKHPYRAVPLGRLDWSRLIDSVEGQEVIVGVDVAKEAMVAAVMDEGESVVSTIRWSHPQQADAFVAFVSSLRERSAGVTVAMEPSGVYGDALRWQLLGAGIEVFRVSPKKSKDMTEIYDGVPSSHDGKSAAIVAVLHHRGASAPWPIESDRQRELTAALRLLEVYGKQLRQNRNRLEGLTARHWPELTSILELTTATALELLGAYGGPAAVAADAEGARALMRRVGGSMLDPEKVESIVRGAAGSKGVPLIPEETALVRALAMEARRNQVAEKQARRRVEELASAGGATQQMAPVVGRATAAVIVAGVGDPRSFESPQALVKAAGLNLRERSSGKKKGGLHITKRGSGVARLYLWMAVLRLIQSDRVIRAWYAKKVRRQGEQAKAKAIVAVMRKLVLGLWHVARGEAFDAAKLFDTRRLGLLEKG

SEQ ID NO: 327707 - protein, 343 aa, unidentified
MYYIGLDVHKKTISYCVKDAAGHVHREGKIGSTRRELDAWIQTLPQPRMMAMEATIFTGWIYDYLLPHAEKVKVAHPLMLRAIAASKKKNDRIDAGKIADCLRCDFLPECHMASTEIRDRRRTLRYRHLVVRQTVQMKNRISGLLMESGVSYDKQRLHKMGYFTELFSTNEEISDSIRPLLRLGREHILRGQRLDRALISSLERDPLLSERLRRLRTIPGVGPITALTWALEIGDYTRFPSVKEAISYCGLCGAEKTSADKVMRTPISKQRNKHIQHVLVEAAKLAPRYSHELALLREKEIQRGNKNRATMAIARKLVAYMLAVDRRKQDFVPAEELVAKAVA

SEQ ID NO: 327708 - protein, 417 aa, unidentified
MWNKATRVKSSVESASNKHIGGILMVCVGIDVAKDKHDCFIISSEGEILADVFTIPNNAEGFDTLLQAIRRSTRPEDKIKVGLEATGHYSYNILGFLLDKGLPSYVINPLHTNLYRKSLSLRKTKTDRVDARTIAAMLMSDVDLKSYTDTVYHNEELKSLTRYRFDKVRERAKLKQSVSRLVTILFPELEKLVSSLHSASVYALLSEFPGAKQISSTHMTHLKAVLKNASQGRYGQEMAETIRNAARSSVGSVMPAKSLELQHTIRLIRELDAEIEDIETAIQAIVDEMQSPITTIPGMGVRMGAVILAEIGDFSRFDSPDKILAYAGMSPSTYQSGQLSLSGAYSHMEKRGSRYLRYALYNATKHVCHWDPTFAAYLAKKRAEGKHYNVALSHAAKKLVRLIFAMEKSQRPYCAAA

SEQ ID NO: 327709 - protein, 460 aa, unidentified
MKRKEKKAKNPRVRQPGSQGLPQIRPMVAGIDVASEILYVCAPRPEGGTQVRTFGATTPDLQALAEWLLGLGVESVAMESTGVYWIPLYEVLESRGLEVVLTDARQLSRVPGRKTDVLDCEWIQLLHSCGLLQSCFRPAEVVCQLRSLVREKAALVAERSDWLRRLQKTLQQMNVRVHHALSDINGDTGMAILRAIVAGERNPVVLAKLRDPHCRNSEETIARELNGNWREDHLFNLQQGLKMYDSINDRLEDYRREIEKKMEPLRCKQADENPLQPLKKEKAKAIKRRKQEPLRRVLHGLAGVDLVEIDGVGVETAEVLLTEYGWDLSRFASEKQFVKHLRLAPRQNISGGKPRKSKGRKESTRAGQALRNAAVSVGQTQTALGAYYRRLAARKDSKVAVFATARKLAVLIYRMLKWGKAYVDEGVAEYERRYLAARVRRLETSAKQLGYQLTVQEATI

SEQ ID NO: 327710 - protein, 416 aa, unidentified
MKKHNNSGKKSEPTSKPTKSRGPVQRGTKEVLAELVGKLKEKLDPKKVPATKAGEKPQSGELRPNLDRLTVGVDLGDQWSNYCILGLEGETLAEGQLRTTQEDVATFFQGLNTARVVIEVGTHSAWVQEVIHGCGHEVLVANPRLMDGSKRRKRKNDRIDANKLARLGRVDPESLYPIQHRSREVRQDLVMLRARDALVAARTEIINTTRGLVKSMGTRLPKCSSRSFARKGEEAVAVEMREALLPLVRLAATLSADIKEYDKKIEELGREKYGHTALLRQVKGVGPITALAYVLTLENPERFAKSRDVGPYLGLVPKQEDSGESQPQLGISKAGDTMVRKLLVGSAQYILGPFGPDTDLRRYGLRLCERGGKNAKKRAAVAVARKLAVLLHRLWVSGEVYEPLHNAMSAPIAAAA

SEQ ID NO: 327711 - protein, 362 aa, unidentified
MFVAGIDAHATYLVVAIVSKDGTLVQKATRVQVRHPEKLKELLAPFRPLEAVVETSLSWPWLDELLSGWDVRLVLAHAKRLRAIASSNYKSDQVDAELLARMHLAGLIPAVFIRCREQREFATLVRHRVVLVRQRTALLNRIHAQLQMAGLHLARGRLQTRAARVWLREVAWLKLGNESRRLIRSHLRLIDHLRPLVRSVDRRIDQVADTIPAVSLLRTIPGIGAYRGLLIAAEVLPIQRFPQPKHLVSYAGLAPRSRQSGTKPVRYASIPAGANRWLRGALVRAVVSHSQHAPDSWLSHYYTQQKARLGWQKARIATARKLARAIHAMLRTGEVWRNESDVPVQRGELHFTHVAETTESSD

SEQ ID NO: 327712 - protein, 478 aa, unidentified
MAAGKLNRKQRKELTRQLRSEDPGLDVVHPRAAGIDVGNSAHYVAVRPDQDAEPVRRFECFTADLHRLADWLQACGVRTVAMQSTGVYWIPLYEILEEHGFEVYLVNARHTRNLPGRKSDVQESQWLLKLHTYGLLNNSFRPTAEIRVARTYWRQRAEHVHGASTCIQRMQKVLTQMNVQLANVISDLSGLTGQTIVRAILGGERDPRKLAELSHPQIRASRPEIAKSLEGNWRPELLFVLQQEVEMYDTYQRRIGECDRELEAHLKTFADKVRSKQAEAESASDERKGSKGQKTKPAQNSKRSQGNAPRFDLRSELYRISGVDLTRIDGIHSLVAQTVISEVGLDMSRWNTEAHFASWLGLSPDNRISGDKVLSKGTRHVVNRAATALRMAATTLLRSQSYLGAQYRRLRTKLGAPKAITAMAHKLGRLVYRMLKYGQEYVDKGMQHYEDQYRCQQVELLKKKAAKLGLQIVETQTV

SEQ ID NO: 327713 - protein, 356 aa, unidentified
MEHFVGIDLHSNNSYIAIIDNDNKRVFKKKVSNDLHNVLHVLEPHRKQIKGIVVESTYNWYWLVDGLMEKSYKVHLANPTAIKQYEGLKHSDDVTDAFHLANLLRLGILPEGYIYPKEERPVRDLLRKRLQLVQQRTALILSFENLLARNLGTRLKVDEINKLTEEDVEDIFQQEYLIVSGKASIATINFLGTRIEQIEKTVHKAAKLKSEYKLLMTVPGIGKILALTIMYEAGPMERCAKVGNYTSYCRCVGSKRISNGKQKGKGNRKNGNKHLSRAHVEAAHYAIRHYEYIKRYHQRKMAKTNNIVARKAIAHKLARACYYIIRDQKAFDPGKLFAHKIAATVNPYCCWDNHAT

SEQ ID NO: 327714 - protein, 391 aa, unidentified
MKTYKLSNPLVEPQNCAAPVRTLHVGLDVHNDSIAVSLAPSDSTEVRRYGIIGGTHEHVQRLVKQLQGAHPGATLRFCYEAGPRGFPLARLLRGLGHECLVVCPSRVPRAPGDRVKTDRRDADQLARLLRAGELTGIYLPDPADEAIRDLLRSRDQVRRAQHRARQQLKMFLLRHNIRYAGKSSWTSAHLRYLAKIKLPFPAQQFAFQELLSAITEAGARLERYGAQLEREVAGWRWEPVVRALMSLRGVALLNAATLVAELGDLSRFTRAGQLMSYLGLCPSEHSSGHARQQGGLTKMGNGYARRALVEAAHHYRTPARLTPHLQKRQEGLPKAVTEAAWEAQRRLHHRYKQLSGPGRKQTPVVIAAVARELSGFVWAIARQVKAHGKKT

SEQ ID NO: 327715 - protein, 338 aa, unidentified
MSVYAAIDLHSNNSVLAVLDETDRVLRQRRLPNELPVILRELEPFHDELAGVVVESTYNWYWLVDGLMAHGYRVHLAHCSAVPQYAGLKHGDDESDARHLAHLLRLGILPEGYIYPRAQRGVRDLLRRRFGLVRTATRLLLSVQSIWSRHTGQGLSANRFRQLDAAAIEVALPDPIVRLSVFTQIKAWQGIQEQVEQMEKGVIESAACRRELIALRSIPGVGPILSMTIALETGAITRFAEVGDYASYCRMVKSERLSNGKKKGTGNRKSGNKYLAWAYIEAATFAVRFSPQIKRWYTSKCGKHHKVSALKAVGHKLARAAFYLMRDGGRFDVHRAFG

SEQ ID NO: 327716 - protein, 373 aa, unidentified
MSKFSKYVGLDTHAETIAVSIAAALGGPPRYYGEIPNRPASVARLVKQLSEDGELMSFCYEAGPCGYGLYRQITSLGHACDVVAPSLIPTKPGNRVKTDRRDSLQMSRLQRVGELTPVWVPGPEQEAMRDLTRAREDLKAIDRCSKQRLGAFLLRQGKYYQAGKKKWTQRYFRWLEQVKLDTPLQQIVFQEYVDTVLHLQARVNALEVEMERALPEWSLAPVVTGLMALRGIDLVSAMTLMAELGDVTRFESPRQLMAYLGLVPSEDSSGPRRRRGGITKTGNGHARRVLVESAWSYRFPARKTAHLQRRARQTSTAVQAIAWKAQKRLCGRYQHLMGRGKLKVQVCVAVARELAGFIWAIACEVMGRSVVMR

SEQ ID NO: 327717 - protein, 362 aa, unidentified
MSEATCWVGLDVHASRTAVAVIDTATGEIAKRTVLGRPHEAFELLEQLPGPVRAVYEAGPTGYGLARRSRPGLEIEVCAPGDIAVGGGAGSRQKTDARDALKLARLHQAGQLTMVCVPTVEQEQVRDLVRAREDARADLMRARHRLGKLLLRREVYYGGKAGSWTAEHRDWLASLRFEDLPTEAAFQDYLHGHDTLVARRDRLDEHIEQVAGQWSLASEVARLRCLRGIDTLSAMGLVAETRGLGRFGRPRHVSAFLGLVPSESSTGERRRIGAITKAGSQHGRRLLVEAAWHYRKPPRMSGALRRRQDGAGPAAVDCAWRAQRRLHQRWRDLHQIRGKRATVTNIAVARELAHFCWEITRT

SEQ ID NO: 327718 - protein, 391 aa, unidentified
MRFVGIDIGAERHMVASIDEQSTVLQRPTAFREDAEGYQQLIGLLGPPAGTLIVMEATGHYWQNLFAMLAAEGFAIALINPLRTRRFAEEDLVRTKTDAIDALGLARFGQQKRPPATLLPDVATRDLRELVRLRARFLQDFGDRTRQLHRVVDLSFPEFTRYVVQLDSPRATALLQAFPTAAAVRTASERQIASIRGGQRPVGRELARALKSAARTSVGHHDTEVYARQVRFFCEDLDLLRRRLGNLERDIEHLLAAHQVGQLLTTIEGIGPQTAAKLVAELGDPAAFRSAGALAAYVGAIPGLRQSGNQTWDRAGLTRVGHAKLRAALWMPTLVAVRRNPWLRAYYQRLRVRGTLPKVALMAAMRKLLIAIYTVAKHRRPFIPIITMTTP

SEQ ID NO: 327719 - protein, 373 aa, unidentified
MDQQLALPTGNIVGVDPHKRTLSATLLDDRHQILAQSHFNVSGAGHRDLEAWALAFGSVARWGVEGANGLGRHTAVFLTDRGHDVRDVCPTRTADQARKRRQGKSDALDSERIARETAIHADLPSAFKRAHGDTGVDENHDLMALWHTTRRSLAKVRAQLLNEAAALLHQLPEDLRDGLGGSQLVQPQLNALAKRLPGLRRRRWDAATALQLRLLAAHIKMIAELRRRDAEAAQELRGLIEARGSTLTELPGLAERSAAELLVEVGDARRFTSGGFARFNGTAPLPASSGEGSDQPVRHRYNPAGNRRVNAALHRMAITQLRCEPRARQLYTNARQAGHTNKEAMRILKRHLSNVVHRQMLRDLPTRPAPLTT

SEQ ID NO: 327720 - protein, 340 aa, unidentified
MNRYLGVDLHRNCFTVCTLGEDGASELRKWSMHALGDFAQEVQATDAVAVEATGNARYFCQALKERGCRLVVVNPHQFQVISRSVKKTDARDAKTLAEFLAKDMLPEVRMKETLPAEIASLLQTRDKLVKLRTTLKNKINNLLAARGILMRKESLSTEKGLEQAMRAEVGELAKVELEVLVEQIRHLNRSIAKLEASIGKQGPKLPGYKNLKSIKGIGDIGGSTLLSTIGDINDFADEGKLAAYFGIVPRVSNSNETERSGRITKRGNKLGRTALVQCALIAMRYSPYLANYYARMKAARGTGKAIIALARKFLGIIYKTLKNGWVFEDFPKFVLAPAAW

SEQ ID NO: 327721 - protein, 384 aa, unidentified
MKKMHLSVACAGMDVHYKFSNVTFRDASGRIVSRQRLDHPDREQLQKRLSRWPTGIPVVMEASFGWGWLSDLVEEAGMEVYLSNCFKVEQMRKARGWVKTNKKDADLVSLLPLEPSDWWRVWRAPPDVRNRREQMRFRGDLVKSQTAVKNRIHAIFHRHGIFHEFSDLFGGQGRMFLIELCLHNPANLSPEVLLALRGQVKLLDHLRRQLADAARILHRQLVKTPLTIRLKTIPGIGLILAHLFYAEIGMIGRFKNHKSLASYSLLAPRADDTGQDDPNKSPKGRHLGRRGNHTLKWAFIEAAHGAVRSGGKWRAIFDRVTNGGKKDRNRGYIKVARELVKVVYAVWAKGTEYQEIAPVRPGRKNNRKKSRSETGQLCHPMVHA

SEQ ID NO: 327722 - protein, 343 aa, unidentified
MEIVRIGLDLAKSVFEVCGVDMRDHVVLRKTLRRDAVPQFFAELPPCLIGMEACSSSHYWAKVLTDLGHQVRLIAPQFVTPYVKSNKNDRNDAEAICEAISRPSMRFVPPKSSEQLEIQAVHRIRQRLVSSRTRLVNQIRGLLAEHGVVIGRDISRLRRALLEIVEGSDLNLGDLIQDLASDIHQELAALDERISSYDRRIRDLFRTNEMCQRIGKIEGIGPITATALVAAVGDQSCFKNGRQFAAWLGLVPKQRSSGGKSRLFGISKRGDRYLRTLLIHGARVVLGKAGGKQDARSVWINRMRERRHPNVVAVALANKNARIVWSILSKNEEYRGLEMMQTA

SEQ ID NO: 327723 - protein, 444 aa, unidentified
MEVIYPRCAGLDVHKKTVVACAMHTKKNGHKEQETRTFGTTTGELQELRVWLQEKGCTRVAMESTGVYWKPVYNILEDHITVLLVNARHVKNVPGRKTDVSDAEWLADLLRHGLLRGSFVPPREQRNLRDLTRQRSKLVEERSRQVNRLHKVLEDANIKLTSVATDVMGVSGRAMLEALIKGEANATLMAELARGRMRTKREALAKALTGRVKEHHRFLLEQHLIHIDFLDEQIDLFSRQIAAQIDRLSEMPEYQVPAPSSATGASEQSPEPLTYARAIELLDTIPGINRWLAEVLLAEMGIDMSRFASDKHLASWAGVAPGNNESAGKRRSGKTPPGNRHLRKGLVQGARGASRKKDTYLKSKYHRIAARRGKKKAIVAVGHSILVSAYHMLSRNEPYCDLGGNYFDQFKRDHVANHLVRRLEKLGFEVLIEDQQPLTGNLVG

SEQ ID NO: 327724 - protein, 427 aa, unidentified
MQYALIQVLPDVPAGGVCAGIDWAAADHVACVAGMAGRVKDRFSAAHDKAGITAVIARLRRNKVTEVAIERGDGALVDALLAAGLTVVVITSRPVKNLRSRYGSSGAKDDRFDSFVLADTLRTDRARLRPLVPDTAATIALRAAVRARRDLVAHRVAACNQLRAHLAVAFPAAAGLSCELDSPISLAFLARFGSCDAAAQMGEQQMAAWLQTVPARGNTAPASVLCARLRAAAPGATGADGTAQAGVTAALTTALSALSAQVKALETQIAAQLAAHPDGHIFTSLPRAGTLRAARLLAEIGDCRSRFPDPQSLAGLAGVAPVTRQSGKHASIEFRWAVNRQLRDAVCDFAAGSRHASPWAASVYDAARDRGKDHPHAVRVLARAWIYVIWRCWHGAAAYDPAKHNALQHLLDRQHGEAADSIWQEDR

SEQ ID NO: 327725 - protein, 313 aa, unidentified
MDAAGKILKRQRILSTPEHFRQSLAEFSGPIKAVLEASYCWGPMYDWLDGLTDEVVLAHPSKVRAIAEARIKTDKIDSEILAHLLRADLIPRAYAPSKDVRALKRVLRQRLFLVQLRTMVKNRIRALLTQHSVELPKETLFSKLGLAWLQQVELPGPDGCVLREDTELLKVFAKKIASTDKLIEQLAEGDEAVPWLASLPGIGKFLSVVIRWEVDNINRFQEAKKFASYTGLVPSTYASANRMVHGRLTKRGNKWLRWAFIEAVTPAVRSSASLRAQYLRIKLRRGAKDARTARKLAELAWTVWTEQRCYEQR

SEQ ID NO: 327726 - protein, 423 aa, unidentified
MNRLHYELHVGIDLGQWLHQACVVDANGELLEERGFEHSVDGLGTTLAWLLSLAGKDAERIAVAIEKPHGAVVETLLESGVAVFAINPKQVDRFRDRHSMSGAKDDRRDAFVLADALRTDGHRFQRLQLPPPEMVALRELLRTRDQLVKNHVALSSQIRDLLARCWPHLVTLAPKDKALDAFFCELLQLFFDHHPTAELSLQNIQKLVHQHHIRRLQPEHILEVLRKTPLRVAPGTTQATSAHLNLLLHQLILVRQHRRDSDQHLERWFKQLQPTSNQPYSDAAILASLPGVGAVVLASVLSYAHDPVRLRNLDAFRSLGGIAPVTKKSGKRGQQRPQILMRRARSLPLNNALHHWARIAVLTDPRFKEHYGRLRDRGHSHARALRGVMDRILAIAVAMLRDQTLYDPSKRANFNEGAKKVSS

SEQ ID NO: 327727 - protein, 323 aa, unidentified
MQGKVSPEPSAEGPVYVGIDVCKDWLDVHLHPVGRKLRVANDRDGLKALGRALRPHAIALVVMEATGKFHRRAHRTLHACGLRVAVMNPLRARLFAQATGTLAKTDAVDARLLAILGESLAPGATAPAPEALEALQELARARSAATAEAAALVNRHHASQVAFLRAELGRRIDSLRRHVARLAKEIDRRIAADPALARRRTILLSVPGVGPATATTLLVDLAELGSCSAKAASLLAGLAPIACDSGERTGERHIKGGRGTVRAALYMAALTAARRNPDLAAFYRRLRDAGKKPKVALVAVMRKLAILANTLIKDNRIWQPTPP

SEQ ID NO: 327728 - protein, 412 aa, unidentified
MDVIVQRPAALDVHKEQVTACVRFPAPDGARAHDVREFKTTVGGLLVLHDWLKAHGVTQVAMEATGVYWKPVWAVLEDSFDCLLVNARHVKQVPGRKTDVKDAEWLCQLLEAGLLRRSFVPPKPIRQLRNFTRYRKAQIKERQREANRLHKALEDTGIKLDCVASDILGVSGRAMLDALCAGTTDPEVLAELAKGRLRAKLPALREALEGRFDAQHALLIGTILAHLDFLDEQIERLSDAIEEQLRPFQPAVDLLRTLGGIEVRTAQNILAEIGTDMSVFPSAGHCASWAGQCSGNDQSAGKRRSGRTRKGSKWLNDALKDAAMAAIRTNDSYLQAQYQRLRPRIGHGRALGAVKHSILCAIWHMLSTGELYRDLGGDYFRTRDPERQTKRLIAQLERLGHKVTLDPLQQAA

SEQ ID NO: 327729 - protein, 420 aa, unidentified
MIPAVTERCAGIDVGRRFVDVCVMVGDAAAVPTEQQRKFSTLNEDLEKLRQWLHENGVTQAVMESTGSYWRPIHNVLDDGKLEVVLANPQHVKNLRGHKTDRNDARWLAHLLRHAMVRPSFIPDRETRQLRDLTRRRKQMVGCAADERNRVQRVLQEANVQLGVVLSDVFGESGLSMLDALMNPDASPEQIAELAVRQARKKIPELRKALEGHRMTDHHRKLIRHSMEHLAFLEEEIAELDGEIAEHVTAHQALREASELAQTVPGIRQTAAAAIIAETGPDMNQFPGPDKLASWLGTCPGNNITGGKRKSGHTRKGNPWARRILVECAWSATRKKDSEPKRFYERLKPRLKHKRALIATAHLLTVKLYQALATGKAYAADPQPELTETKAQRLVRHHTHRLKKLNRWLAGHRQRCVQTP

SEQ ID NO: 327730 - protein, 372 aa, unidentified
MEQNTTYVAFDTSKETIAVALAEGGRRGEVRFFGTVANRPEAVRKLVDKLAGRHSRLAFCYEAGPTGYGLYRQIRALGHDCQVVAPSMVPVRPGGHIKTDRRDATTLAALFRAGELTAIWVPDAAHEAMRDLVRVRQTATEGVRRARQQLLSFLLRHGHIYPTKRHWTRAHRRWLAEQRFEHPAQQIVFEELIQAVEQAIARRDRLQQQMIALVPSWSLQPVVAALQALRGVAMVAAIILVAEIGDFRRFATPRQLMAWLGLVPREHSSGGSTSRGAITKAGNGRARRLLIESAWTYRLPARIAAELLARSAALPEAVKAIAWKAQVRLCARYRRLRCTGKPTNVVTVAIARELAAFAWAIAITVMPAPQTA

SEQ ID NO: 327731 - protein, 372 aa, unidentified
MPQRSRVFVGLDTSKLKISVALAEEGRQGEVRFLGEIDNTPEAVRRLVGKLASRYSEVLFCYEAGPTGYGLQRQISALGHECVVIAPSLIPKRPGERVKTNRRDALTLARLHRAGELTAIWVPDPGHEAVRELVRARDAAMADLRAKRQHLQSFLLRHGRLFPGRKPWTRAHARWLSELAFEHPAQYLVLREYRQGLEDAQARLERLTQQIAEVLTTWSMAPVVEAYQALRGVALLTAVTFVAEIGDVRRFESPRQLMAYLGLVPCESSTGERVRRGSITKAGNTRVRRVLIEGAWTYRFPARMSRLLQERQANLPQIVRTIAWKAQVRLCARYRRLMAAGKRQTVVTTAIAREMAAFLWAIGHAIEPRSAA

SEQ ID NO: 327732 - protein, 265 aa, unidentified
MKMQSRYLGVDVSKELLVVAFEGHRWEFPNSKQGFGKLIVQIRQQSGSVHVVCEATGPYHLPMCLALQEAGIAVTVSNPAQIKYYGRSQGVLAKNDPIDAALIERFAHERRPAADPPFTREQIALNELINHRGQLADSRKGMLASRQTVIDPGVRKEIDRAIAALDRCIATVERRLKEKVDSNPLWKEKIARLSSVSGVGFVTAVVLLVKMPELGSLSRGQCAALAGLAPYDNDSGSAAASDRSAEAALGGAQRPVYCRSQRDEP

SEQ ID NO: 327733 - protein, 414 aa, unidentified
MLKIVYPICCGMDVHKSFIVACIASTNEQGVTTYKSKRFSTFTGNLRRCAAWLATNNCKDVCMESTGKYWIPIYNILESTCNIVLAHPKYVKAIRGKKTDKRDAKWIADIFKHDLVAGSFIPPADIRQLRDLFRYRWKLTSFTTGEKNRAQNCLTVSNFKLDDVFSDVFGKAASAITSCILENPAEKITDVSGFRTKGMKATNEQVLAAVDGEMCKEQAEKLRIIRSHMDSLELCKLNLESLILATAEKYLPQLNLVVTAPGIQSFAAIGIISEIGVDMSVFPTSKHLCSWAGLTPQNNESAGKKKTTRISRAGAYIKPLLVQCALNATRAKKFPEVRNRYLALKKRRGHKKAIIAIARMLLTAIYNMLKKNEPYNPELYRKDDRPPAHREVSVEEAIFILQRQGYLVTAPPPT

SEQ ID NO: 327734 - protein, 330 aa, unidentified
MKKWEFTLGVDVSKNTLDISCSELNEHVKIKNGTEGFTVFLKWCKHFKIDLKQSFLVMEFTGGYEYKLIQFCESRGILYTRIPGLAIKNSLGITRGKNDKVDSSRIAQYGEEKHKSLTPSKPLNPALVSLKELLSFRKRLVRENAGYQATIKERIHMYGGNKKDIIVKKLEQKLKGNIKNIAAIEAEMLNIVAQDEKISINYSLITSIKGIGKINGSMTIAFTENFTSFTNPRSYAVYVGVVPFDHSSGISIKGRKRVSHIANKELKQELNQAARSAMEWDKEMRSYGEEKLKTKCYKIVFNNIKFKLILRMFAVVKREEIYVENYRNVA

SEQ ID NO: 327735 - protein, 387 aa, unidentified
MKQSTTPPTARATKTSATKRTSQQQASTAPPSSAASPVPLTVGLDLGDRHSHFCVLDAGGRVLEQGRVAMSPAELTAFFERVGPARLVVEVGGHSPWVSRLAQAAGMEVIVANPRRVQLITRNERKNDRTDAELLARLGRVDAQLLSPVTHRSVEHQADLAVKRARDAAVASRTALINHVRGAIKSFGLRLPTCSPDGFHRRVLAHLPKELAPALQPIVRLIRQVTAEIKNFDAQIEELADERYSVTKVLRQVSGVGPVTALSFVLTLDTPDRVSDSRQVGPYLGLVPKTHDSGASSPQLRITKAGDPGLRRLLVIAANYILGPFGPDCDLRRFGLKLATQGGKNGRKRAKVAVARKLAVLLHHLWKTGEVYDPFHLAKKRGELVPA

SEQ ID NO: 327736 - protein, 349 aa, unidentified
MEHYAGIDVSLEASHVCVVDAQGKILKEAKVASEPEALIAWFAAHGTPMARIGLEAGPLSQWLFAGMKAAGWAVELLETRHVRAAFKAMPIKTDRKDARGMAQLMRLGWFRPVHCKSLPAQEVRALLTTRKLLQAKRHDVEMSLRGVLRGFGLKVGPTTPKTFEARGRDLVVHHDTLRTIADALLKARAVLEQEFKAIEKRLSALARAHVPTRRLMTTPGVGAIVALTFAAAIDDPARFRSSRMVGAHFGLTPRKHQSGETDVSGRISRIGDHGVRVALYEAANVILTRAVRGSDLKSWALRVAQRAGMKKAKGALARKLAVVLHRMLADGTPFMASQGAGTRAVAVAV

SEQ ID NO: 327737 - protein, 341 aa, unidentified
MKDTMIGVDLAKNVFQLHGASMTGEVRFRKKLTRPQFLKFMTEHPAAVVVMEACGGASYWARELVKAGHEVKLIAPQYVKPFVKRQKNDAADAEAIVVAAQRPEMRFVPPKTEEQQARAVLFRARERLVHQRTELTNALRALLYEYGHAVPQGPVHLKRIAEIVGVETCDLPELAREEAQDLLEQIAEKTVRIEAKTRKIAAVAAQTGTARRLQTMPGVGPMTALAIEAFAPAMATFKCGRDFAAWLGLVPRQLSSGGKERLGRISKAGQSDIRRLLIIGAMSRLNWIGLKGVREGSWIDRLRARKPKMLVAIALANKMARMIWAMLTKREDYRDPVPGAA

SEQ ID NO: 327738 - protein, 355 aa, unidentified
MTIVAHAHPFVIGVDTHARNHVLAILAATGEIIDTGQFPTTAAGLARTIAWVGRRTGEDLASLWVIEGVASYGAGLAATVARAGYEVVEAARMNARGNRGLGKSDPLDAHRIAAAVLPLDTGQLRRPRLAEGARAALRVLIASRDHMTAERTATVNALIALLRVVDLGIDARQPLSRTQVATVARWRSRDEDLGTATARAEAIRLGRHVVGLDEQIAANSARMRELVHASQAAPLLEKNGIGPVTAAICLTAWSHHGRVRSEAAFAALAGVSPIPASSGNTVRHRLNRGGDRRLNRALHIAVLTRMTHDPETRAYVERRRAEGRTTKEIRRCLKRYLARQIYRILNSAEPAISPA

SEQ ID NO: 327739 - protein, 343 aa, unidentified
MKYYTGLDVAMKETFICIVNEEGTKVYETKANSTPEAIFESLEKSGFQSELVGLESGSLTRFLTKGLQIFGVPAICIDSRKMSAILSVTINKTDKNDARGIADAIRCNHFKEVYVKSDEDASVEILLKSRKTLVHLSGILKNTIRGFLKTYGVLLGDLQPKNFAEKVREKFQNIPQEAGDGIESLLKSFETNSSEINIIDQKIKILTAENKHVKLLMTVPGVGPVIAANFVFSLGEADRFKKSQSVGAYFGMTPRQYSSGETVSMGRISKCGDADMRRFLTTAAMVLMTATKSWSPLKAWGVKISKKHGNKKAYMAVGRKLAVIMHRMLMTGEVFRYTATVKA

SEQ ID NO: 327740 - protein, 355 aa, unidentified
MSSEKYIGLDVHQATISVAVMDSQGKVVMESILETKASTLLELFAGLRGSLFVTFEEGTWAAWLYDLLKPHVSEVLVCNPRKIPLRKRGNKSDKIDARQLAERLRLHDLKPVYHGENGVRMLRELARSYLTIVKDLTRVMSRVKAVYRSWAIPCAGRDVYYRRHRNQWLDKIVEPGVRCRAEQLYQQLDMLQHLRQQARRALLAESRKHTITAKLRQIPSLGPIRSALAVALIQTPNRFRTKRQLWTYSGLGLETRDSGEYQFVQGQPRRRKKQVFVRGLNRDYNHDLKGLFKSAAVRASVQPGPFQEFYQRSLAKGIKPTMVRLTLARKIAAVTLTLWKKGENFDAEKLKSQAA

SEQ ID NO: 327741 - protein, 361 aa, unidentified
MNPTTAAVDLAKNVYQVAVADAQGHVVEQHRLTRTQFERFFANRAIDRIIMEACGSAHHFTRTLSARGIQVVLLPAQYVRAYVRRNKTDRADALALLEAGRAPDIRPVRIKSVEQQSLQAIHRTRSLWMSTRTSRINALRGFCRELGLHVPVGARTGIEAMTRAIADEQSAIPDLLRPSMRMLLDEIRVLETRIAQLERQLASIATESAACRLLMSIPGVGLLTATGIAAATSGSVAHFTDARHFASWFGLTPKERSSGESRNLGRISKRGDKYLRMLLTHGARSVLRAATAARTKGLELTGLRRWAFELQKRSNHNKAVCALANKLARVCFGVLRDQTAFGQPATRLGKKIDRLSFGLAH

SEQ ID NO: 327742 - protein, 334 aa, unidentified
MKELKSCVGIDISKDSFEVCIKQLKDERSVIKATHSFQNEFSGFENLLNWTLRKVSNPIFVMETTGVYHEDLTHFLYSNDQKVAVVLANKMKHFAKSLNMKTKTDKADAQMIAQYGLERPLEWWEPMMPQMKDLRDLCRERLSLKKDLVRCKCQVHALRHAHSTLDVVLKLKEQQIEFLEKNIQIIENEIIRITEQDKEFSQRVKNIETIKGLRLLTIVTVLCETNGFSQFNNIRQVVSYAGLDIAERQSGLFKGKTRISKKGNSRIRECLYMPALSATSYNEHIKALYQRVIERNPTIKRKGVIAGMRKLLILIFVLWKKNEAYNTEYQWDAR

SEQ ID NO: 327743 - protein, 329 aa, unidentified
MYYVGIDISKRFIDVCLLVDGIKGKRKTKVLPNDPNSAQALAQWLILQKCDPSQAHIIMEATGVYHEHLAYGLHVAGILVSVANPHRVREFAKGMGILTKTDRVDAYVLASYGCLKQPDSWVPPSQEIKKLRALLQHRDSLLNDKQRVENRLGTLKSTTPPEEVVTSLESMVQHLKDELEHIEHLIKAHIEKHPGLKKDLALLKSIDGVGEQIGWNMLAIIRGNHFRSAEQVAAYLGVIPVERRSGTSVHGRASLSKIGPPGIRAKLYMGAIAAISHNRHVKAQYTRLLLKGKVKMLAIGAAMRKLVHLCYGVLHTQQPYDKNYGVVTD

SEQ ID NO: 327744 - protein, 393 aa, unidentified
MVVSVGIDVSKDKHDCFIVSSEGKVLADVFTIPNNMDGFYALLEKIRACTTPQDKIKVGLEATGHYSYNILGFLLDNGLATYVLNPLRTNLYRKSLSLRKTKTDRVDARTIAAMLLSDVGLKPYTNTAYHNEELKSLTRYRFDKVKERAKLKSSISRLVCILFPELEKLVSSLHLATVYALLEEFPGSKQIAKAHLTRLKTLLGNASKGRYGRDMAVTIRSAAQNSVGSCMPAKSLELQHTIRLIRELDAEIAEIEAEIETMMDKIQSPITTIPGMGFRMAAMILAEIGDFSRFESPDKLLAYAGMSPSTYQSGQLKNCYPHMEKRGSRYLRYALYNAAKYVCHWDPTFAAYLAKKRDEGKHYNVALSHATKKLVRLLFALERSRQPYCSLAA

SEQ ID NO: 327745 - protein, 348 aa, unidentified
MSQIIRIGMDTSKHFFQLHGVDASEKVVLRKRLSRKAMLEFFAKLPATVVVIEACGAAHYWARELSKLGHTVKLIAPQLVKPYVPRNKNDGRDAEGLCEAASRPQMRYVPVKTAEQQAALMLLGIRDQLVARRTQLGNMIRGHAAEFGLIAAKGLDKLVSFLAAIEQDERVPALARELFTMLARQHEQVQLELKTIEAKLLAWHRANALSRRLAQIPGIGPVIAAALVMKAPDPHAFHSGRLFAAWLGLTPKDHSTGGKTRLGKITRAGDERLRQLLVVGATSVVKQAKAKGRGAGWLIELLKRKTPKLAAVALANKMARIAWKLMTTEETYDSARLNAQADVRVAAV

SEQ ID NO: 327746 - protein, 449 aa, unidentified
MKIYFGIDVGGHSHTVHFMDGSKRQLMPELVISDDVDGYDELVARLRELRQRYPGAEIHGGAEATGIYWRNLFFYLKRALPWVKMTLVNPLQTRRYRDLQLRRTKTDRQDSQLVAMYLATFEPAETELPDEHLADLCELVRYRRVKLKEYSRYRNYLHKYLKQAFPELCGKVRRMSGLRILAVLSRYPTAGHVRRASVAEIARLRYGKRCWRVGRATAVQLKKLAERSAASYVGPGVGFTIQSLAANLLRLREETIAFEEKIDELYCKNPATKLITIPGIAGLSAAVIESEVKNISRFKTAEDLVGYAGAYPEIRQSGVSSNPKPRMTHKGNRYLNQTIYMCVLNAISPRAPESAIKHYYYRLIASGKDRMVAIGSCMRKLLHIIHAILTTGKPYRVDYEFPVGTFQVRFVDRKTARYLTEDEISTSTTVIPIKYKGKVTAPKVLKDSR

SEQ ID NO: 327747 - protein, 371 aa, unidentified
MTEAVKYVGLDVHKETIAVAVADGQRGGEVRFIGTVANEDDAVRRLVKRLTGPSVTLNVCYEAGPCGYGLHRLLTKLGQDCIVIAPSMMPRRPGDHVKTDRRDAMTLARLLRAGELTAIWVPDEAHEAVRDLIRARRNAQDDAIGAKQTVRSFLLRHDRRFGGKAAWTKMYWRWLSEQRFDFPHQQLAFEEMQKRVLEAQARVGRLEAALAEAVDAWCFAPLVRNLQVLRGIRLVSAATLVAEVGDLTRFDNPKQLMAYVGLVPSEHSSGARTKRGRITRAGNAQARTMLIEAGWSYRLPAREERRYRERVIDLSEDIQAIGWKAQVRLCQRYRRLAATGKPQPKVTTAIARELFGYAWDIARRVSPAIAG

SEQ ID NO: 327748 - protein, 423 aa, unidentified
MKKRIYRATKVKKLNLEKLQEQVDGREIVLAVDVAKEDFFAVIVGNDQQVYATIKWKHPVESHFFLNVILKELSWSSLEVVMEPSGTYGDSLRSQFLNAGIPVYRVSPKRCHDAAEVFDGVPSMHDAKASAIIGRLHQQGLSKEWPMPDDAQRELTASIKTFEIYDSAYHRNINKLEGLVMRFWPELTQSLDLQSATLLELLIAYGVPDRVAANQTQARELMSKVGNNFLVESKKEAILESASSSLGVKSVKAEQEQIQELCLEIRRLQHLCRQAKRRVESLTQGIDSVRNMSGVLGKMTAAVLYIVLGDMQKYSNAGSVVKTLGLNLKEHSSGRHKGQLRITKRGSGLARMYLYFAVLRLIQKDAVIKAWYQKKLQRDGKVKKKAIIAIMRKLASALWYVGQGAKFDSSKLFDVNKLAFQSV

SEQ ID NO: 327749 - protein, 309 aa, unidentified
MSQTLNAAIAVIGIDIGKNSFHIVGHDERGAIVLRQKWSRGQVEARFANMPPCLIGMEACVGAHHLSRKLNSLGHDARLMPAKYVRPYSKGQKNDFRDAEAIAEAVQRPTMKWVATKTADQLDLQALHRVRERLVSQRTGITNQIRAFLLERGIAVRQGQRFLRAELPRILATPPDVLSPRMVRVIEGLAGDWRRLDERIEGLSGEIEAIARQESGCERLMSVPGIGPIISSAMVAAIGPGDAFSNGRDFAAWLGLVPKQMSTGDRTILGKIFKRGNRYLRVLFVQAAWVVLIKPMSWARHGLKPWLGG

SEQ ID NO: 327750 - protein, 429 aa, unidentified
MTVSNDTPQRVTLVAVDIAKNSHDVLIESPARGRRRRLRLANNLEDFEQLAGYLRSLKSPVLIGFEATGNYHRPLAYFLHRQGFELRLIPTLALARTREAMHNSWDKNDPKDAQVILHLLKTGLAQTWHDPVVKGINDLQELSKTHFQVTLARVRVWHTLRNHYFALYFPEIDRFIRSDHSVWLVQMLASFPTPASITALSEAEFQKQAWNLVGRKVSKRALLAEIYAASKRSIGVPVELDSAAIAMFRLVLGEYLELHRLRERIAERAAIMLGDNPDSRRLMTVPGIGPANALTILAEAGDLRRFRHHRQFLNFCGLNLSTLQSGKSRSQSHISKYGNARLRTALWMAAQTAVRMRENSFRRKFDNYVRGNPLDADLRRKAYTAIAAKLARVIFGLIKSGADYRLFFAHKFQVEEPSRAGAVGAISTP

SEQ ID NO: 327751 - protein, 416 aa, unidentified
MNAVGIDVSSRKSTVAVLRPLGEVVCLPFDVTHDIAGLASLAEKLKALDGETRVVMEHTGRYYEAVAKALHEAGFFVCAVNPLLIKEYGANSLRRVKTDKADAIKIARYALDNWADLRDFTPMDAIRYDLKTLNRQFQLASKQRTASANNLIALLEQSFPGIRKCFDSPVRSDGTQKWVDFAHSFWHVDCVRKQPFAAFCERYRKWCKLHAYFFKLRNAEKVYALAKSAVVLTPKAKVVKVLVQEAANQLISISRSVEVYRAEMDRLAAMLPEYPVVMAMYGVGKSYGPQLMAEIGDVRRFERKQALVAFAGIDPMPNQSGDKNVRSNKSSKRGSPYLRKTLFNVIRTYLQCAPQDEPVFQFLNRKRAEGKPFYVYMLAAANKFLRRYYAKLRDYFASLDTLQPVAPIPTILKATL

SEQ ID NO: 327752 - protein, 423 aa, unidentified
MDVIHDRVAGLDVHKETIVACVRIMAGGKATRECRTFDTTTAGLEALLSWLSESGCTQVAMEATGVYWKPVWNILSDGKFELIVANAKHIKNVPGRKTDMNDAMWFADLVSVGLIKASFVPEPEMQELRSLMRARKQLTREQTRHVQRIQKTLEEANIKLDSVITDIMGVSGRRIIQAMLNGIKNPRKLADLADRRIKASRKELYDALHGRLTDHHRFMLRLHLRQYDALVEAIAEIDKVVDAAIAKIDAQVAAGQATFRSLIALLCTIPGVSDLAATTILAEIGTDMGRFPTAGHLLSWAGMCPGQNESAGKRKSSRMRKGSPWLKTLLVQCAFAATRKKDSYYKAQFNRLRGRHGAKKAICAVAASMLTAIYHMLKSGTEHQDLGANHFDRRSIEIKAKRLAAQIAKLGYQVEIRQMTQAV

SEQ ID NO: 327753 - protein, 365 aa, unidentified
MGKYIWIGLDVHVDSITAAILEGDREKADVLKMSGDLTKVRRLFRRMAKKGAVRACYEASGAGFVLHRVLKRDGFHCEVIAPSLIPRKPGDKRKTDRIDAAMLAKLYRSGHLTPVHIPTEDQEALRRLIRLRYSYQEQCKSTKRRISGILLSHGLVFRGTKSLWTKKHVAWLEKQRRELQGPLHTALVAELEHLEYMQTQRNALDSDIERYAQNPPYRGKVEALSCLRGVKTLTAMTLLSEIGDIRRFRSPRALMAYLGLVPKENSSGGIERKGSITKAGNSHARRVLVEAAWNNRHNAGAELVLRRQRQGQPPEVVAIAMKAQHRVSRKFYRLWQKKHPNVAVIAVARELCGFVWAIMKAAPQY

SEQ ID NO: 327754 - protein, 336 aa, unidentified
MYTIGLDVHVRRSTFVVLDENGKELMNRTVHGPIDKVITELQEVKQPFQICFEASSGYGYVHDRLVRIARRVVVAHAGKLRLIFRSKRKNDRIDAHKLAKLLYLDEVPPAHVPDADVRAWRSMIEHRHALIDERTRTKNRLRALFRTVGLTPPRGLWTKRGIEWMRKVCFDQPLHAVMRDMFLERLASVNDMLGCAEKELNRITRRHPGVAVLMSIPGVGARTAEAVMAYIDKPQRFGRINRVASYFGLVPCEDSSADKTRMGHITRQGPGTVRKLLTEAAWQAVRRSPQVRAYYERVKRDDPQRKKIAIVATAHYLLRAMQAMLCTGETWRTGAA

SEQ ID NO: 327755 - protein, 362 aa, unidentified
MTQTTVEVTGGVDTHKDTHTAAALNPAGRILGTEQFPATGPGYVALLTWLGGFGPIRVVGIEGTGVYGAGLARHLTAAGVAMVEVDRPDRKTRRWQGKSDPVDAVAAARAALAQTQTGHPKARSGPVEALRSLRVARRCAVTHRADVQRRLKALVVTAPEALRARLRDLVTRRLVEVCAATRPDLTRAADPTVAATIALRHLARRHTALTEQITELDALIGPLVAAINPTLLALPGVGPDVAGQLLVTAGENSDRIRSEAAFAMLCGVAPLPASSGRTTRHRLNRGGDRDANCALWRIVITRLATDPRTRAYTARRTAEGLSKPEIIRCLKRYIAREICTALQPPASRRALPANPQQLPAAA

SEQ ID NO: 327756 - protein, 350 aa, unidentified
MMNILKQVLGVDVAQKELVVTLGRLLSDLSIELYAYKVFSNTENGFSSLLTWTNRLIDPDIELRFVMEATGVYHQKFAYFLDDHGYGLSIILPNKISNYIKTLEVKTVTDKSCSEAIARFGLERKLDSWKRPNSTYKNLQQLTRERDQIVLERSAVKNQLHAESQEAEPHERSLERLKERISFLNRQEQEIKEDINQVVNQDTELKKEVKIISSIPGVGELTAIIILAETNGFELIRNKKQLSSYAGFDVKEKQSGTSVKGKPRISKKGNRTLRKAMYFPAITAVKWDENFKNMYIRIVSKQGIKMKALIAVQRKLLELAFTLFKTKAKYDKSFEARKAEQKNSMSAQNA

SEQ ID NO: 327757 - protein, 311 aa, unidentified
MRRMAGEAFVGIDVSKAHLDIAWEGEGAAERSANDAASCAAIAAELKDAPLVVVEATGGYELEIVRALQAAKAPVAVVNPRRIRDFARAAGRVAKTDQVDARVIAHFARAMRPSQTPQIEDGRMALAELVARRRQLIDMLVAEQNRIEHAGPSMAAAIRDHLAYLKDQLTGVDAAIAIQVRADLAIARRRDILESVPGIGGTTAAVLLAELPELGAIDDKKIAALVGVAPVAHDSGTLRGQRHIAGGRSSVRCALYMATLSAVRCNPAIKIFHRRLRDSGKKPKVALVAAMRKLIILVNTLVRRDQLWKPA

SEQ ID NO: 327758 - protein, 349 aa, unidentified
MRIIGGLDVHRSQITYDWIDTDTGQHQRGQLAPAHREHLRVWLEQFRDRPAAFALEGCTGWRYVVEELQRAGIAAHLAEPADTSTLRGPKRHAKTDRTDARHLRGLLAAGRLPESWIPPAHVLEARTQVRCYKALLDEHTAWLQRVHATLFHHGVPAQRNLLAADRRARLERGSGLSPAARQLVAVALGTLDHLDAELDRLRAELTWFARRQPGCQALDGLYGIGPVTAVAIWAELGDPARFTSSRHAVRHTGLDITVYSSDGKRTPGHLARQGPPVLRWALFEAAKCAARPSSPDHAYYLQVKGRLGGNRATLAVARKLARRCYHTLGTLGDLAYAPPSDTPDLGRVA

SEQ ID NO: 327759 - protein, 360 aa, unidentified
MITIGVDFSKKRSDYHVLNEQGQKLQRRKLDNDPKVFRKFLREIPGPKQLAMEACRNWGLYYEHVWDLVDEFHLGHPKKMKIITESETKNDQKDAEMIAKLEHSGFLPKAHISSLDTRQLRSLLRFRHYLVNQRRSIRNQVAILIDRNVWPCDQPRSFKQPFCKKGFRWLKSLKLSDRERFILDQCLENFHELTRKIEDLETFIAKQTVNMPGLGYLRTTPGFQKSKVNAYIVLLEADGITRFHKARRFAHYAGLIPKEFSSGDKHRTGKLVKGANMHLRTAIIESTLAAIRTDPGLKAYYQQVKGRQGSGPAIVATARKLSYAIFYVLKEQRAYRPESFNPPAAVCHPSAAREKTTFAG

SEQ ID NO: 327760 - protein, 402 aa, unidentified
MNAVGIDVSKGKSMVAIMRPFGEIVSAPFEIKHTASDINSLVELINSVEGESRIVMEHTGRYYEVLAHQLSKANLFVSAINPKLIKDFDNDSLRKVKSDKADAVKIARYALDKWQNLKQYNVMDELRNQLKTMNRQFGFYMKHKTAMKNNLIGILDQTYPGVNTYFDSPARSDGSQKWVDFASTYWHVDCVRKMSLNAFIDHYQNWCKRKKYNFSQSKAEEIYGKAKELVPVLPKDDITKLIIKQAVNQLNSASTTVESLRTLMNETASKLPEYPVVMAMKGVGTSLGPQLIAEIGDVSRFTHKSAITAFAGVDPGVNESGSYEQKSVPTSKRGSSDLRKTLFQVMDVLIKTHPQDDPVYQFLDKKRAQGKPYYVYMTAGANKFLRIYYGRVKEYLSSLPES

SEQ ID NO: 327761 - protein, 350 aa, unidentified
MSMLCGLDLHRGQITYDTLIEETGEIWRGRIWSPDRTRFRRWLEVDVTKRANGAPVVMAVEGCTGWRYVVEEITAVGFEAHLAEPAETQAARGRKKRAKTDRTDACLQRELLQRGELPESWIPPHDVLEWRERTRLYKTLVDERRMWVQRIHAEMFQHGVALPAGEIRSEEVRTWLAGDEVQLSPAARQRIEVGYRVIDTIEGEVAILRRQLQRFASRQPACRALVQAHYGVGPLTAVVTWAELGDCRRFSLSMQVVRHCGLDVTVHESDRHRPGGHLSREGPPTLRWTLYEAGKCAARTKSPDYDYYRAAKKRRDGKLAALAVARKIARRCYWTLRTMDSDLVYAMPEV

SEQ ID NO: 327762 - protein, 412 aa, unidentified
MNIVYERCAGVDVHKRNVVVCAITPDEHGQRHQERCTFSTMMPDLLRMRHWLQSLGVTHVAMESTGSFWKPIFNVLEGHVEVFVVNAQHLKAVPGRKTDLTDAEWIAELLQHGLLRPSFVPPAFQRELRELTRYRTSVVEERSRTINRLQKILEDTNIKLSAVATDLMGRSAREMLAALVAGEADPAVLAQLARGKMRAKRDLLVQALQGQFQSHHRILISAQLAHSDALDEEIGHLSAEIAQRLRAYEPQLKRLETIPGIKRRLAAVILAEIGPDMQRFPSARHLASWAGMCPGNRESAGKRLSGKTRKGSPWLRTALVEAAHAATHGKESYLSAHYHRLVLRRGGKKATLALGHTLLVMVYHVLAEEKDYQELGGNYFDEQDRLAVQKRLVHRLEKLGYEVTLTPTSPAA

SEQ ID NO: 327763 - protein, 367 aa, unidentified
MKKVSKQMRKMEVANKKMEAAHKPEMTLGLDMGDRYSHYCLLNAEGDVVEEGRMQSTEAAFRRHFESEPPLRIALECGTHSPWVSRLLTALGHQVIVANARKIPAITGSESKNDRNDAEKLARFAACDARLLWPIEHRSPERQLDLNLIHARATLVRARTMIVNALRGLVKSAGGRLPACSTESLPTRAPAAIPAALATVARPLVEQIALLNAQIGGMDKQVEALAVKYPEIRLLRSVPGVGPIVAAAYVLTLGRPDVASNRSAGAFLGLRPAQSQSGDWDPQKRISKTGDGCLRSLLVQSAQYILGRFGPDSELRRWGLKLAATGGKRGKKRAVVAVARKLAVVLHAMWRNGECFQAFPQPVTVAA

SEQ ID NO: 327764 - protein, 425 aa, unidentified
MKALKTHVAGVDVHKEILAITVLIGAPEAEPVAQHFECSTFTEDLMAMGLKLKELGVLDVAMESTGIYWKPVFNVWNPLGICVVVGNATHIKNVPGRKTDMNDSQWIAELHRFGLIRPSFIPDGEFQRMRLLSRHRTNLTEDLSKVKNRVQKVLEDGNIKLGSVVSDVFGVSGVKILDLIAEGVTRADTLTAAVTTKIKRMEDVKKALTNCLTTEHCFVIAELMTQYRDIKARISSVERELYKKVEPYAHLVKALDEIPGIDEILAIGIIAEASTNMSSFRDERSFAAWAGVASGNNESAGKKKRSHCRQGNPGLRKILIQAAQGATHCKGSFYRSKYRKLSFRLGSKNKAKVAIANKLARVVYKILAGDQYKELGYMRGDPREQKIKNLLSQLRAMGVEINHHTHQMIYSKRTVKVESSGIVEN

SEQ ID NO: 327765 - protein, 372 aa, unidentified
MAKGIAYVGLDVHKDTIAVAVAVTKKAGEKEVRFLGTIPHQLPSLRRLVRRLRQRYDAIEVAYEAGPCGYGIYRFFKECNIPCKVVAPSRIPRKPADRIKTDRRDAVTLAGLLHSGDLTAVYVPHPEDEAMRDLLRAREAAVVAQRRAMQQLKSFLLRHGRNYGKGGRGWGPKFRRWLSEQRFEHSAQQLAFEEMIRAVEEGKARVERLTKAIRDHVEHWRLAPVVWALRSFRGIRLVVAATLVAELGDISRFDSPRQLMAFVGLVPSEHSSGGKVRRGPLTKDGNSHVRRAVGEAAWAYRLPARVGRTLVGRQRGVCEEVLQIAWKAQVRLHGRYVRMRARGKPKGVVVMAIARELMGFLWAAFQEVRMPA

SEQ ID NO: 327766 - protein, 453 aa, unidentified
MKEQNQISMDIVNPKAAGIDIGSRSHFVAVGQKEEHIREFGVYNEDLKAISNWLKENGIQSVAMESTGTYWQALYAVLLNDGFQVILCNGKFTKNIKGRKTDVQDCQWIQKLHSIGLLSGSFLPDLQTEQLRTYCRHRASLIDVAADTSKKMQKYLRLLNLRLDVIVKDICGLTGLKMIEAICNGETNPEKLAELRNGNCKKSEQEMAKALETNGRKDYLFGLKQELKMYKNLQIQIKECDVEIEKILQEQIDNDHNKKQHYTDPKIHKRINKNTPKNIDLNLMGYQYFEGVDLLKIEGFSYQTLLTLMSEVGLDGIKKFGTAKQFASWLRLTPNNKISGGKVLSSRIPKGSNRLKIALRNAANAIGNLKESTPLRDFFHRINFRKGRVSAISATARKLGVIIWNMVVKNIPYHNPKEYLYLDEKRKLAVQKRLQKQVENYQFSADDFSFTTT

SEQ ID NO: 327767 - protein, 341 aa, unidentified
MSDYSYFCGIDLAKNHFSIHAVDQNGKVILHKSVTRSKLLTTIANMPLMRIGFEACGGAHYWARTLNKLGHDARIMAVKYVVPYRTKGKNDLNDAVAICEAVQRPSTRFVPVKSPEQQAILSVHRMREHWVRERTALMNRMRALLSEFGLIIPVGRSSLMKHVPLMLEDAENELPHLARTVIADAYHHLGELNQRIADTEQVFDSFAKVSANVQRVMKVRGIGPQTATAILASIGNGSQFDKSRDFSAWLGLVPKQYSTGGKPRLGRITKHGDKYLRTLLVHGARTVIANLGDKQDKLSQWCRGVLERRGMNRAIVALAAKNARIIWSLLHNQTEYENYAA

SEQ ID NO: 327768 - protein, 341 aa, unidentified
MEYVGADVDINNVVCSVMSTHGKLKETFVVPSNPEGMDQLIEKMGNPRKWKILFESSTYSTDLHIYLAGRGIQSVTANAYNLRLINASKKKTDTNDSIALARYLRLWDRGELELSISNIVSGDDQKLRDLCRLREEYAQEKSRTIQRISAHMRRNGEYLDESKYSDMTAEKTLKFILETYADDSVLCERVRHYIYLKVRCNDIDSQLMLSRTHEDEVKLLSSIPGVGELSATQLMSAVVDVNRFETQGRFRSYFGMAPKVRDSGGKQHHGHITKMGDPMVRRILYRIIYTHMRCVPNGHITRYYGSCVNRMGKAKARTAAACKLLDLIFALLKRGTPYVHR

SEQ ID NO: 327769 - protein, 405 aa, unidentified
MTMMIGVDPHKGSHTAVVIGPGEEPLGELRVESSPGQAEDLLRWAAQWPDRTWAVEGAAGLGRLLAQQLVAAGELVLDVQPKLAARVRLLQAGDTGKNDPHDAQSVAVAALRSRACRPVAVEGHTVVLKIWARRHRDLARARNQVACRLHAVLCELVPGGVRKQITAGQAASVLERVTLSGPIGAARRELAAQFLEDLRRIDGQLREANKKLAAAVRASGTTVTEVFGVGPVNAGTIIGDVTDVNRFPTRDHFAAYNGTAPTEVSSGGRKVYRLSLRGNRRINHAIHMAAVTQIRHSHSDGRAYYQKKIAEGKTHKEALRCLKRKISDAIYVRLRADARMAARPVGEGPGGQTGNGSDSSAAGSHPEHRLFGQATPGPATTLRPPTRPARQQTRTRRIKDLEKTR

SEQ ID NO: 327770 - protein, 413 aa, unidentified
MCHAATESENSLARTAQTRPPELVFLFVIVQAFPSPESMIYCCLTNGMVRRLYLASSLCMRGLRRRRPMELHTIGIDLGKTVFHLVGLNSRGEVVMRKKFSRTQLLRFTANVHVGLIGMEACGGAHFLGRALREQGHEVRLIPAQYVKPYVKTNKSDYIDAEAIAEAVARPTMRFVPIKTDDQLDLQSLHRVRERWVMRRTAVINQIRGLLLERGITLRKGRCHVGAALPGILEDADAKLSGALRMLLAQLKLELDHLDLRIDEADEMIKKTARENEACQRLVAIPGIGPVTATALIAAIGNGGAFRKGREFAAWMGVVPREQSTGGKQKLLGISKRGNSYLRRLFVQGARAVMQQRTKQSSGLSRWLAQLTSRSHRNVAAVALANKIARMAWAVLAKNEQYRPPVLADVAAA

SEQ ID NO: 327771 - protein, 353 aa, unidentified
MTDFGGSVVAGVDAHTDEHHVAVVDAQGRLLGAAAFPTTAEGYAGLISWVRGYGEVDRVGVESTGAYAAGLVRALQTGGIRVVEVNQPHPHARQRRGKSDPLDAELAARAALSGTATAVPKQTSGIVEAIRQLRVVRVGALKARTAALQQLDDLVITAPEQLRRELRHGRTLKAKAALCLKLRPDIERIDEPAQAAKLALRSLARRIRELDTEILELDRQLEQLVNAAAPRTLQLFGVGTQGASQLLVTAGQNIQRLRNEAAFAKICGAAPIQASSGRTKRHRLDFGGDRQANRALHMIAVCRLRHCKRTRAYATKRTADGLNRREILRCLKRYIARETYHTLRADLEALNST

SEQ ID NO: 327772 - protein, 349 aa, unidentified
MRSFQPPADTRFYAGVDLHARSLYLVVLDRDGHARFARNLPAQPEPFLRAVQPFRDGLLVACECVHPWYWLADTCRDHHLPFVLGPAWAMKAVHGSKTKCDRQDAEAIARLLKGGNFPPAYAYPRERRGLRDLLRARLRLVRQRAELYGHVHTARRQANLPPVSNDVKYKSKRAAITAAIADPLVRRRVETDLALLEPLDTAIRRLEAEIEQAAQQHYPTELAVLQSTPGVGPVLSLTILLEIDTIDRFDTRQQFCSYARLCGAVQESAGKRVGIGNGKAGNAWLKWAFSEVAVLSAQKDERIGRLLERLAWRLGKPKALSALAHKLGRACYHLLHTKEVFDVNRFVRH

SEQ ID NO: 327773 - protein, 344 aa, unidentified
MNYYAGIDISLELSSVCIVDATGEIVKEAKVESHPDALVKFFKAFGLPLTVIGLEAGPLSQWIYAGLTEAGFVTILMETRHVKAALSATTVKTDRRDARGIAQLLRMGWFRPVHAKSAGSQEVRALLVARKQLQHKLKDIERSLRGILRGFGLKVGKVTDKTFEARIRELVTGHPMLEQIAEAMLAARATLLEQFKKLHKAVLKIVRHDEVCRRFMTTPSVGAIVAITYKSALDDPGRIKKSRNAGPLFGLTPKRYQSGETDITGGITRVGDEMVRTALYEAANVLLSRVTRFSALKRWGLEVAKRRGMKRAKVAVARKLAVILHRMWIDGSTFRWTKTEAAHA

SEQ ID NO: 327774 - protein, 400 aa, unidentified
MLSIGIDVSKGKSTVCGMKPGGEIVYAPFEVQHTREGMSELVSLLRSSGEEVRAVLESTGSYHCPVVAALLENGIFVSVVNSLRMKRFCSQSIRKVKTDRIDAMQIALYGLAYWQELQPTRLPENTYRELQLLARQYYQMTSLLIKAKVDFNALCDQVLPGMQELMNDHAGRHKLSDFVLRYRHTTHILEMGETRFRKDYCKWAEKKGYRNCERMAALIFATAQNGIPVLPNAPSTQIVITEAIRVLHTVEASRDAILTQMQALAKTLPEYSLVREMPCIGDTLAPRLIAEIGDVRRFHSKRALIAYAGIDAPPYQSGKFCANNRHISKRGNRYLRKTGYEVMQSYVMHKPANDPIFTFIEKKRGEGKSGKLAMVAGLNKFLRVYYGKVTELYRSLPAIE

SEQ ID NO: 327775 - protein, 417 aa, unidentified
MSKRVLSRLGRFIGLDVHLDFIEIAICEEGKVWSGGRVPSTPEGIKTLAESLLPTDRVALEVTGSSWEIAKLLKPHVRKVVVVSPGDTGIAQARAKTDRLDARMLARLLWTGELEAVWVPPEWIARMRRRLSRRGQLVRARSRVKNELHAVLMRRLKGRPPVSDLFGVKGREWLRGLELPLEEAETVEAGLRHIEFLDTEIEQVERLICQEALKSPQVRRLMTVPGVNVICAAIFLAAVGDIKRFKASRPVVAYLGLDPRVYQSGSGPARGGRISKQGSPQARWALVEAARSVAQQPGPLHAFYQRIRARKGHNAAVVAVARKLAVLFWCMLTREEDYAHQQPSLTAQKLRRLEVRAGAPTLEGKPTGVWATRERMRQAEKQLAAQAEASYKRSIADWKAASPKNEKAGASVTAGRA

SEQ ID NO: 327776 - protein, 312 aa, unidentified
MKNDTIGVDVSKDHLDAHRLADGATRRFANDKGGHKALIKWLAETPLNRVVFEPTGPYHRAVERALGASGVPFVKVNPRQARRFAEATGKLAKTDRLDAAILARMGALLELEARPARSELLFELKELYVAREALVKDRTAARNRGKALTLSLLKRQNAQRLEQIDRQIATVEAAILQIVEADESLADRFAILISIPGVSNITAFALLIAMPELGSLEAGQAANLAGLAPIARQSGRWTGRSFIRGGRADVRQALYMPALVAARFNPDMKAKYAHLIETGKPAKVALTAIMRKLVVLANALLKANRTWTPRTA

SEQ ID NO: 327777 - protein, 353 aa, unidentified
MACMSEAFVAFDTSKMRNAVAIAESGREGEVRYFGEFDNTGAATRKLVARLEGKYQPLTFCYEAGPTGYGLYRLIKSLGHDCMVIAPSMIPVKPGERVKTNRRDAVNLAKLLRAGDLTAVWVPDDQHEAMRDLTRARDAAAKDYRGKRQQVSSFLLRLGRHYPGKKTWGKTHLNWLTSQKLEHREQRIALEEHLFAVRQAKERIERLEQAMRESIADWSLAPVVEAVQAMRGIDLITAASFLAEIGDLQRFENPRQLMAFLGLTPSERSTGDTVKRGSITKAGNARARRLLIESAWSYRFPPRVSKEKQAKVEAAPRAVREIAWKAQTRLCGRFPDTHEERQAIDSYRHRHCP

SEQ ID NO: 327778 - protein, 316 aa, unidentified
MSITAVYVGIDVSKERLDICIQPENVHQAFAFDEDGVQTLVKFLKKRPVTLVVMEATGGLEKQAAAILADHFPVAIVNPRQIRDYARALGILAKTDTLDAFVIARFAQDIKPQPRELPDSQREALRELVARRSQLTHMRVSEINRRKRCGSDSIRDHIDQHLRFLDNQLDDLNQQIGRMVKQSPMWREMDDLLQSVTGVGPRTSQMLIAYLPELGLSNRRQIASLVGVAPFNRDSGKRTGQRAIRGGRQQVRNTLYMAAISAIQHNPDIKAFYTRLKGEGKPSKSAITACARKLLIHLNARAKQNIKNANLCLNAA

SEQ ID NO: 327779 - protein, 498 aa, unidentified
MATGESTTTQQAKQRKAYRRRKARGQARAARAQEAEAARVEGLPVTQAHAAGIDIGSRSHWVCVGCCGNDGDDLIQEFPAHTEGLHQILAYLRQHGVVTVALESSGVYWIPLYELLEANGFEVLLVDPSYTKQVKGRPKTDRRDCQWIYRLPGVGLLAGAFRLDEKTCQLRSYLRQRANLIRYAGQHIQHMEKALEQMNLKPTESVSDITGVTGRAIIQAILKGTRDPHKLAKLRNRRCKASEAEIAQALNGSYRDEHLFALRQAYEAWQFYQKQVGALEEQIELQLGRMKQDRALRPLKPRPGNGGRKPNQPRFDVRSALYYVVGIDLTELEGIGEQTALTIISEIGPEVSRFATVKHFCSWLGLCPQLQKTGGRVRSSRTRPGVNRAAVAFRLAANGLYASQGALGAFLRRQKARLGAPQAVTATAHKLARIVYLALKHGLAYVRQSQEEYEVRLRDQQIKAVKRKARQLDLEVIDKQASTPAAGAAAAGAAAARC

SEQ ID NO: 327780 - protein, 370 aa, unidentified
MPIGKPVPFTEDREGYDTLLRLLGPPPVLVAMEATGHHWKNLYAALVATGHHVALLNPLRTRRFQDSALERTKTDAIDAAGIARFAFEKRPEPTQLHDAAAEALRELVRHRDRVRQDFDDRVRQLHRLVDLGFPEFTRHVRGLDSMLATCLLAECPTARDFAQATPRRLAKLRHDGRHPVGPELATQLIEAAKRSVGQHHGPAYRLQARHICQDLDLWRRRLAEIERDIDGLLDSHEVGKLLLTIDGIGPQTAARIIAAVGDPARFKSAAAFAAHVGVVPGLKQSGKNPGRRAACAPMGNARLRRALWMPVVGAVRRNAWLKPFYEGLIARGKPPKPALVAAMRKLLHAVYSVAKNRKPFEIATEQARAA

SEQ ID NO: 327781 - protein, 359 aa, unidentified
MTTRSKENSFKGKNIYVGIDVHLKSWTATVLSDTLTLKTFRLDPSPEVLCAHLFNNYPEANYFSVYEAGFSGYSVHRRLCEMGVKNIVVNPADVPTTNKEKLRKTDSSDSAKLARSLRAGEIKPIYVPDTISQELRSLSRHLQAITKDKTRIKNRIKGHLRFLGIEIPQRFLRSANWSYDFIDWLKRVCTDTPYGKFVLDSHIRQLEEIRDKKLNLLRYMRAIAKEEPLATRVKLLLSVPGIGEVTSLRIASEVIDIKRFNGHDQLAAFIGIVPMCHKSGDDTKEDNGGITTRANRTLRSAIIEAAWIAAGKDPALTLAFENYCKRMKKTDAIVRIARKIVNRIYFVLKHEMPYVPSTY

SEQ ID NO: 327782 - protein, 342 aa, unidentified
MKQYVGLDVSQRETSVCVVNSDGVIVYEGKAKSDPGVLTELLRKRAPNAERIGFESGAMASWLWHELRRVDLPVVCIDARHAHAALSVRINKSDQNDAKGLAELVRVGWYREVKVKSEESQKVRAILVARSRLVSIRRDLENQVRSMIKEYGLLFRRAIGLQFRNQIVELVAEDHQLRAVVDPLLAIHEQVCRQQARFDEEVRRLAKSDETIRRLMTVPGVGVITALTFRHTIDDPSRFRSASKVGAYLGLTPRRNQSGETDRNGRISRWGDRLLRSYLFEAATVLLYRTKKWSSLKAWGMKLAKRIGMKKAKVAIARKIAVILHCIWVDGTSFEWGQQKTA

SEQ ID NO: 327783 - protein, 385 aa, unidentified
MQASNVCTPTWGHIGTIFVALELGQRSWLVTVHSPERDKISRHTVSGGNYVGLLALIERERERSTRALGASPAVASCYEAGYDGFWLHRLLTAAGITNHVFDPASIAVEQRARRVKTDRIDGELLLRTLMAHCRGEPRVVRIVRVPGPEQEDARRATRERDRLIKEQGAHINRIKALLRLLGFPVGNPRRRGWLTWLAAQRDWQGRAVPPHTLAEIRREYARLMLVREQLAALEERPEQAQFTPAAEMTRRRDHLSRLKGLGPAFSGTLSHEVFYKDFRNRRQVAAYLGLAPSPWQSGTTSRQQGISKAGNPRARRAAIELAWLWLRHQPDSALTQWFHARAVNASKRIKRIAIVALARKLMVTLWRYLTTGLVPEGAVLKPVKA

SEQ ID NO: 327784 - protein, 446 aa, unidentified
MPKARKRYVGLDVHKNVVEYCILDSEGKKLDGGNFICEQSVIADFAKKILSSKDHVALEATTSTWTVIDILEPFVEKIVVGNPLKTRIIAEAKVKTDKVDAMILAQLLRCDFLPSVWIPDKKTRELRRISSFRKSLVEEATATKNRIKGILNHLLIKHAVVWTNQGLEELKSLDLPPVERIIMDAEIAILKHLEVQVENIELEIQKLAYAEDNVRLLMTLPSVGYNTATVLLAVFGDISRFKDADHAASYLGLVPRVKQTADTCHYGPITKTGSALARAMLCEAAQSLFLNDGPLGVFIRRVRDKQGGSKAVVAGARKLATIAYHMLKNKEPYRYPTVFRTREKLRILRKKAGGEELHYPQYHMDEEVLQNRPEGDVAVRYVPPLADVYKNEGLPPALTFAELSSGEQRALKEMGVAEKVQANEKVGIIARPKKTKPTSSPLQSGK

SEQ ID NO: 327785 - protein, 369 aa, unidentified
MNQNILFIGMDVHKESIEIAISDGATQETRRYGKIGGTRDAMRKALHKLTASGRTLHFCYEAGPCGYELYRYLISEGHHCCVVAPSLIPKRAGDKVKTDKRDAVQLSRLFRAGELTPVYVPNPDDEAIRDLSRAREDAMLVQKAARQRLKSFLLRHDIRYTGKSSWTEKHLRWLADEVRCPSPAQQVVFQEYVNAVTEAKQRLLRLNDQIEIFVKQWRLYPVVEALMSMRGVQMIVAVTVVSELGDLSRFDNPKQLMSFLGLTPSEYSSGGRTSRGHITKTGNGHVRRILIEAAWCYRYPAKVSPEIQKRQEKLPLPIRKIAWQAQLRLSQRYRHMQRKGKPHNVTVVALARELAGFMWAIANKVTYPR

SEQ ID NO: 327786 - protein, 408 aa, unidentified
MNPLFVGIDVSSKNNVAYLMKPDGSKHSSFSVQNNLGGAKLLSERIVSALGSMQLERVVIGLEATSIYGDSLVYALREDGRLGRFQRKIHVLNPKQVRKFKEAYSDLPKNDWVDAFVIADHLRFGRINREVYMDDYRYKALQTLTRARFDVIQNLTREKQRFANYLFLKCSGMAQDKDIQNTSATTIALMEHFETVDDLANADLEELTAFITETGRGKFADPDATAKAVRAAAKGSYRLPKTVNDTVNQAMAVSIASMRALKGQVKVLDKAIEQQFEIIPNTLTSIPGIGKVYSAGIIAEIGDIHRFDSQAWVAKYAGLVWNRSQSGDFEAEHSRMIKSGNRYLRYYLLEAANSVRRCDSEFRRYYDLKFKEVNKYQHKRALALTARKLVRLVFRLLKDNRLYIPPEG

SEQ ID NO: 327787 - protein, 449 aa, unidentified
MHGAHIGGQRAGAFLELVGGVDPKRVLLVGVDVAKATWFVVASNLLGEVVVDGVRLVADRAGLAELERVLGAASARVNAAMVVVGIEAAGHHHQTLTAHLADRDELVVRVLNPAQVAAVRKQQGNRRRKTDWLDAAAICELLARGEGALVHLDGSAAAALRPLWSGRKDLVDTRSRLRQQAGALVDCLWPGCSATDTVAGVRPVLCDLFATKAGRVLLELLAQGWTPARVAATSVAALRGLFAVRGCRLTRPLATRLIGRAQAALPAHPAATAGKAATLAALLGTIDTLDREIACLEAAMAPLLARTQGAKLTQLRGVGVVAAAGFVAFVGSTDRWAEWSKVWRAAGLDPARSQSGPADARLGISREGSAWGRRAILDLAAAVCQQPGPWRDRLRTRTTQQHKPAKVALAATANAIGRTLFALMASGADFDPRFEAKRAAARKAGGQAA

SEQ ID NO: 327788 - protein, 338 aa, unidentified
MAAPASYDLVVGIDIAARTATVVELPHDGTPSRPHTIEQSPAGQAAFLQHLSSLNLPLARILVVMEATGSYWIALATTLAHAGLAVSVINPAQAHDFAKALLKRSKTDAIDAQTLARLGALLLPPCWTPPPAIYHELQQRLLHRDALLDLRQQVRNQLHALLQQPTVIASVRTHLETLDTTLTEQIAVVDAELASAVQLDEAWAATLARLQTIKGIGLLTAAWLLVTTLNFTVSRDAEQAAGYAGLVPRQHQSGTSVRGRPRLDHAGNSRLRRALYMATLSAARHNPVVQPFYKRLRAAGKPMKVARCAAARKLLTIAWAVATKQQDFAAPLVSQSQP

SEQ ID NO: 327789 - protein, 370 aa, unidentified
MDTIIAFDSHKRYTLASVETKDGQIIKDERISHFRGNIAGFLSGYQRGSPVAVETIGNWYWIVDEIERAGMTPRLVHARKAKLMLGSINKTDKLDVRGLNRLQRTGTLPTVWIPPGDLRDKRELPRTRMVFGRERTRLKNRIHSVLDKYGLQDQFEDITDIFGKAGRGRIERCMEFLPPQTRYTTQLLLEMLDVVQERIDGIENRMEDVFEQTDEVKLLKSMPGVGFILGVVISLEIGDIGRFCDAQRLASYCGVTPRVHASGDKVRYGRLRPDVNRYLKWAFSEAGNSVAVNRKRHPYRHVSRLYNRIRHQRGHAKAVGAVARHLAEATYWILRKGQPYREGGADNRVVKVSSRGHKRGDVMSPVRLAE

SEQ ID NO: 327790 - protein, 318 aa, unidentified
MTSIILGIDISKKTFDAALLIDKKNKNKKFDNASKGFHELNRWLKANKVGTAHVCMEATGSYGLKLAQYLYENQFKVSIVNPARVKGFAQSKLCRVKTDKADSELIAHFCKVMNPDLWQPTPLHIKELQDLVNRLESLIANKTQETNRLEKGLSALVEANVKSHITFLNQQIKEMEKLIAAHIKSHNDLSDQYILLTSIPGVGEKTIAIVLAFLSNVQKFDSAKQMVAFVGLNPKPRQSGTSVRGTSRISKTGDADLRRAFYMPAIVSLKFNPIIKDFTERLSRAGKSKMVIVVAAMRKLLHIIYGVLKNNTPFNKNI

SEQ ID NO: 327791 - protein, 457 aa, unidentified
MPRKPKNPRLGGVSSAHAIDPNAAGIDIGATEIYIAVPVDRDPHPVRRFSNFTEDLLAAADWLQRCRVITVAMESTGVYWIPLFQILEARGLKVCLVNARHVKNVPGRKSDVCDCQWLQHLHSAGLLRPSFRPERQVCAVRSLVRYRDSLVQLSAVHLQHMQKALDQMNLQLHHVISYLGGKTGMAIIDVILAGQRDPHQLAKLRDPRTLASQETIAKSLVGDYRREHLFTLRQSLTGFRQNSQLIADCDLEIELLLKEFSSGDGPGAESVPEPQTELKRKPRRNEMNFDLRTQLHRIFAVDLTEIPGINTLTAHTLFTEVGRDLSKFANVAAFTSWMGLCPDNRVSGGKILRAQTRRVNNRVARALRMAAQALSRSHSWLGQYYRRMRAKLGGPKAVTAAAHKLARIVYHLLTTGQAYDETVFAQQEVQNKQRNEAHLRQQARKLGFELTQIPMEV

SEQ ID NO: 327792 - protein, 421 aa, unidentified
MKTWNEVTHFAGFDWAKDHHDVLVLDGTGKITSEFRFDHTATGWTLCQEKLKQFPELAIAVEAGHSAAIERLVVLGYRVYPVHPRSSKSYRTRKLPSGTKTDRRDCWALADALRLEGESWRVLTAPEPLVQQLRLLCRDEVTLIEQRTALINQLQQALYEYYPAALEAFPDWTHVSAWAFVERFPTPQALVQAGKRKWENFLHAQKLFHPEWNKKRLEIFTRADQFCGTTAAIAAKSALAVAVAKMLQTLEAQLARYRSLITECFKQHPDHALFTSLPGAGPKLAPRLLGELVALKPLADTPQALQCLAGMAPVSYQSGKVSVVYLRHQCNRFLRATIHLWVDLSRHYCDWARIYYEAHRKKGQSHACALRCLGMRWLKIIAAMIRNQTPYDAAVHTRNQLQHGSWVMQLQPVQIIKKDAS

SEQ ID NO: 327793 - protein, 433 aa, unidentified
MNLNRLQVGIDFSRQRADFCLLFPDGQPLVSHRAFANSRPGYQQARQLLLDSLQRYAFDGLDISGEATSYYWFPFFWQLAHDGALEARDLNLFLLNPRWVHWFKKSLPPDDKADSTDPFYIAERTRTRRPTGAWDPQDDWLPLRFYTRLRFHLAQTLTREKNYYLVHLFLLHNTYRRNQPFSDPFGVTSQQVLGGEQSLDELLHLPIEELAERLDDWSSGTLQDPLETAQQLQQVARDSFPLEEPLLTPVQHILEVTLQHIRFLENQIEQVEGWITSQIHARHPEALFLESVPGVGLVLAAGIVAEIGNLDRFFVTPKWDKKHNRSRHRTLREVEDAVAKLAGLWWPKADSGDFVAEDRRLAKTGNRYLRFYLVQAANGMRRHIPAYTSFYHRKFQEATRHKHKRALILTARKSVGLFVGLLHRKEPYRSKEV

SEQ ID NO: 327794 - protein, 334 aa, unidentified
MMNFQALGIDISKNKFDCALIRDIGSGKIKTKALPNRLEGFNQLTEWLYKNIGEDLSLLKVFMEATGVYHQALAEHLHEKGIAVYLLNPADSAHYAKYDSLHKTDKSDSQSLARAGIDRILNKKARQWQPAPAHIKHLNALLARLDTLESDLQRENNRMEKAEFGRAPKEVIQSISSMQAGLQQQISTLKQEIEQHIDQHPDLKKDRALLRSIPGVGEVISLRMMALYHSKEFASASQMAAYLGLVPRKRDSGKHKGKAMLSKRGNSTIRAKLYLAAVVAKRWNPDINAHYHRLKARHKTEMQTIGAAMRRLVQICFGVLKNQCEYQAKITIAA

SEQ ID NO: 327795 - protein, 355 aa, unidentified
MNSEKYIGLDVHQATISVAVADSQGKVIMESILETKASTILEFFAGLRGSLFVTFEEGTWAAWLYDLLKPHVTEVLVCNPRKIPLHKQGNKSDKIDARKLAERLRLHDLKPVYHGETGVRMLRELARSYLTVVKDLSRVMNRLKALYRSWAIPCAGRDVYYTRHRSQWLEKIPEAGTRRRAEQLYEQLDMLKHLRQQARRELLAESRKHVITAKLRKIPSLGPIRSALAVALIQTPHRFRSKRQLWTYSGLGLETRDSGEYHYVHGQVRRRKKQATVRGLNKDYNHDLKGLFKGAAIQASVKPGPLQQFYQRSLAKGIKPTMVRLTLARKIAAITLTLWKKGEDFDINKLNSQVA

SEQ ID NO: 327796 - protein, 377 aa, unidentified
MKRIKFVGLDVHAETIAVAVAEQDGEMRSLGVIPNREESIRKLVKKLGAEEELRFCYEAGPTGYVVYWQLTALGARCEVVAPTLVPVKSGDRVKTDRRDALKLARNYRAGELTPVWVPDAAHEALRDLARAREAAKKDQLRAKHRLSKFLLRHGRRPPMGVKAWTLKYLAWIEREVHFLQPAQEATLLDYFQEVEHMAARMARLDLAIEEAVKLTPPKMRAVIEALQALRGIAQISAVTIVAELGEVSRFTRARQLMGYGGIVASEHSSGEKTRRGGITKTGNAHLRRVVVEAAWAYRHRPGVGGVLRKRQELVSADVREIAWKAQHRLHTRYQKLTARGKNKGKVVTAVGRELLGFIWAIGVKVEAMHKEPLRQAA

SEQ ID NO: 327797 - protein, 340 aa, unidentified
MKEVITVGLDIAKHVFQVHGVDQKGDTVLRRKLRRSEIISFFDHLPPCLIGVEACATAHHWARVLINLGHEVRLMPASYVKPYVKRQKNDASDAEAICEAVTRPTMRFVPVKSEEQQSVLMLHRARELLVRQRTMLINALRAHLAELGIVMRQGPTGVSTLIGLIEDDEHDLIPAFTRRALTPLVEQLRDLYCRISELDHEIIQWHRTSELSRRLETIPGVGPVTASALSATIADASLFKSGRQMAAWLGLVPRQNSSGGKERLGRISKQGDPYVRKLLVIGAHAVLRFSRKEGTGPKKWAADLLVRKPYNVVAVALANKMARIAWAIMVSGERFRSIPA

SEQ ID NO: 327798 - protein, 355 aa, unidentified
MKIAKRESNTKPMHYVETAYYNHYVAIDWSTTVMSVARMSSNSNYPQISKDLPATISSIKKYIKDLKGKIILTIEETTGAQWLYVELKDFVEKIIICDPYRNSLLREGPKNDPKDATELCRLLRAGMLKEVYHSNDENYRIRKLASSYNDLIKAGVRAKNQLSAIYRGFCLNYKKDTFNIEDSTAAFIIEEKRRYIKLYEEEKKEYIKLFRKLKKNNRTITHLTGISGIDVINAVKLFSVVIDANRFPDKYKYWSYSGLVKPKMESGGKVYGKRNPNYNRILKEVYKTATLAALRGNNDIREYYEVLLKERFSEKEAKNRITRYIAKSTLAMMKNDTKYKPYSWRAKKTKSKVDN

SEQ ID NO: 327799 - protein, 330 aa, unidentified
MNHYVGIDVSLEASSLCVVDANGKIVREGKVASEPDALIAWLRGLKLELTRIGLEAGPLSQWLYAAMRQAGLAVELLETRHVHTALETMPVKSDRNDARGIAQLMRLGWFRPVHCKSMAAQETRALLTARKLLQTKLHDLELSLRGILRGFGLKVGPTTPAHFEERIRELVAGHPSLEVIADGLLTARVALRREFDRFEKQVRDAARCDTRARLLMSIPGVGAIVSLTFTAAIDDPARFKSSKQVGAYFGLTPTKYQSGETDIDGRISKIGDAWVRAALYEGAHIILTKPLKGCTTLKSWAMKIAKRSGMKKAKVTLARKLAVIMSSDAG

SEQ ID NO: 327800 - protein, 344 aa, unidentified
MNKYAGLDVSLEETAIAVVDESGRVVREGKVASEIEAIDGWLRASGAVIVRLGLEAGPLSSWLYAGLRACGWPVVCIETRRLRAVTQAMPVKSDRKDAEAIAQVMRTSWYRPVHVKSDDSQRLRVLLRHRQILQAKRQDIDNELRGTLKAFGLKLGKVGQAGFAARVMELVAGEPWLERLTQPMLAARAALRQSFAELHKLLLTIVREDTVCRRLMTAPGIGAVNALAYKTAIDDPTRFRHSADVGPHFGLTPRLYQSGETEYSGRISKCGDAMVRSLLFEAATALLHRVKAASPLKLWARRLAKKIGVRKATVALARRLAVIMHRMWVDGTDFNPELGRAAAH

SEQ ID NO: 327801 - protein, 465 aa, unidentified
MKSKIRKSQKQKKKIVIDPAWELINPDAAGLDIGFREHWACVPAGRAEKNVRSFGTFTADLEALADWFQQCGVKTVAMEATGVYWIPVFQILERRGFQVILVNARQTKNVAGRKSDVQDCQWIQRLHTYGLLQGSFRPQDPYCVLRAYLRYRDEMVSARATQCQHLQKALQQMNVQLHQVLSDVTGVSGLTIIGAILEGQRDPVKLAAMVDRRVRASQPTIQKALTGDYRPEHLFVLKTAFELYHTYEAKIEACDEQMVAEAAQLPDVVDVKVKPLPARKEGRPACADKMLDQDMRAALYPKLGVDLTAIEGIGVLTELVFLTEVGPDLSRFPSEKHFASWLGLCPDQRISGGKVLSSRTRRVINRVSDALRMAAVSLERSQTAMGSFYRRMKAKLGAAEAVTATAHKLARLIYRLLKHGEAYVRQGMEDYQKRHQERMLSILKKKAAAMGFELVGKQQVAQGVS

SEQ ID NO: 327802 - protein, 341 aa, unidentified
MKYSTVGVDIAKNVFQLHWVDAGTGEIVNKQLKRAAFLEHFANREPCLIGMEACGGAQHWARRLIEMGHQVKLMPAKFVKAFNIGNKNDPADARAIWMATQMPSKPVAVKTEAQQAVLALHRLRQQKIKVRTMQMNSLRGWLTEYGEVMAKSRAALDRAIPGVLAKLAERLPAMLIDSLRELWNDLDRLDKQIADIERRLQTWMKEDKACKAIAAIPGVGLLTATATVATMGDAKAFRSGREFAAWLGLVPKQIGTGGKVQLLGISRRGDTYVRTLLIHGARSVLFHAKHAGGWVEQIRTRRPSNVVAVALANKMARTIWAVLAHDIPYSSDHVSLRGVRN

SEQ ID NO: 327803 - protein, 398 aa, unidentified
MNAVGIDVSKGKSKVAIIRAYGEVVCKPFDITHYPDQLAELAEYIHSLEGESRVVMEHTGKYSEPIAKFLCDAGIFVCMVNAKLTHDYGGDTIRRDKTDKVDALKIAGYCLDKWAKLSRYEPAPDNRKMLKTYNRQLSEYTKIKTMLKNNLISLLDQTFPGANELFSSPAREKDGHEKWIDFVAAFPHCFCVTSISKRAFATKYEKWCRKNGYNFCPDKAEWVYSAALNCLPTLPNNDFAQTLVIQTVNQLNNLCQTVAAVKSEMTKLASALPEYDTVLAMHGVGKVLAPQFIAEIGDIRNFPKRSSLARFAGIEPPENQSGTYNQHSRRISKQGSPHWRKALFQVMCCVLQKSNIDEPTFQFIDRKRSEGKPYKVYMIAGANKFLRIYYARVSECFA

SEQ ID NO: 327804 - protein, 384 aa, unidentified
MDQTTSTLSANTLHCALELSKNSWLLAIQFRDREQPSLYPIEGGNTDKLMAKLAAARNCWARVNGALPVITLCYEVGHDAFWLARFLKARGIECLVIDPGSLQVNRRARRVKTDRVDVKMLLRTLIAWCRGERHVWSLVRIPSVDEEDLRRSHRERSRLVRERTAHINRIKGLLFAQGVRGINIKSQYKTLAVDQLVTGDGHHLPPRLVCEVAREIQRLAMVQEQIAKIERERDTAPTPCEATERKRRLLLRLRSIGPAISALLSREVYYRQFANRRQVGSFLGLTPSPYSSGEEERCQGISRAGRGHVRAIMIEAAWLWIRHQPKSALTRWFLERTAGQSTRIRKTMIVAVARKLAIALWRYVEHGLVPQGAILNPSTTGNAR

SEQ ID NO: 327805 - protein, 343 aa, unidentified
MHSISTIGLDIAKSVFQVHGVDGAGQVVLRRQLRRRQVLAFFQKLPPCLVGIEACASSHHWSRELQALGHTVRLMPPAYVKPYVKRQKNDTTDAEAICEAVARPNMRYVPTKTVEQQSCLMLHRARHLFIRQQTAVINSIRAYLAEFGIVAPVGRRGVEHLLEVIADTSDRRLPDVARACLAALGSQLRALKAQILEFDRRIIAWHRSSATSKRLDAIPGVGPALATALVASIADPKAFRSGRDFSAWVGLVPKQNSSGGKDKLGSISKQGDRYLRSLFTAGALAVIRYAKIHGTGHRPWLTALLARRPTKVVAIALANKLARMAWAMMARNERYKEPAALRA

SEQ ID NO: 327806 - protein, 379 aa, unidentified
MKRWEYLFIIKMQSITQHNKRRLTMKNTKVDFSNQTLYIGLDIHKKRWTVSIYSEHIELKTFNQPPEPDKLISHLQRNYPNATYKAVYEAGHFGFWIYDALQLRGVDCIIVNPADIPTKQKERRHKNDRVDSRKLARELRDKSLTGIHVPEPSVRADRSLIRTRTQKVRKQTRCKNQIKSLLSYYGIKMDPDTPYKHWSRRYITSLQEIEFQHDELRTSLGHLIDELLYHRQSILKLTRQIRQLSRTPRYADNVRLLLSVPGIGLLSAMVFLTEIININRFQSLDELASYFGLIPTEDSSGENQDDGSITPCGNKYLKHIIVEATWTAIRKDPFLTLKFEKLVKRMKKQRAIVVCAKNLLNRIRFVLKNRQKYVTCVAA

SEQ ID NO: 327807 - protein, 418 aa, unidentified
MTHVDLLTRPGGVVVSVHVAPVTSSTIVVAVDVGKTSALFSVTDATRHRLVGPSEFAMTGSGLTAAAARATAVVPPAGRVKVGVEAAGHYHRPVLDHQWPDGWEVLELNPAQVAEQRRVQGRRRVKTDVVDLEAITELVLAGYGRPVTDRDVVIGEVNAWALHRSRRVATRSATKNQLLGQLDRAFPGLTLALPDVLGTRIGRLVAAEFADPARLAGLGVNRLIRFAATRDLQLRRPVAERLVAAARDALPTRDAVIARQILAADLVLLADLDDQIHAAETALGLLLPRSPYATLTSVPGWGMVRVSNYAAALGDPQRWPGPRQIYRASGLSPMQYESAHKRRDGGISREGSVALRRALIDLGIGLWLNEPAAKNYAHRLKGRGKHGGIIACALAHRANRIAHALVRDHATYEPTRWA

SEQ ID NO: 327808 - protein, 422 aa, unidentified
MRILEPLQIFILEESVMLNAVGIDVSKERSTVAVLQPGGVIVHKPFDVPHKSRNLHDLAQYIGSLEGDTRVVMESTGRYHEPIRNVLFKAGLFVCTVNPHLIKNYGNNTIRKVKTDSADAKKIARYTLDNWAELREYTSMDTTRTQLKTLNSQFSFFMKQKTAAKTNLIALLDTTYPGVNKLFDSPVRADGSEKWVDFAYSFWHVDCVRKAGITAFTDRYKRFCKHHGYEFQEAKANAIYKDSKELIATLPKEAVYKELIQESIRQLNLLSENVEHIRKTMNELASTLPEYNTVMSMYGVGPTFGPQLMAEIGDISKFQHREALTAYAGVDPGKNDSGQEVHNSSHASKCGPSRLRHTLFQIMTTMLQTGGKKDDAVSSFLFKKKAENKPYLVYMTAGANKFLRVYYGKVKECLRNQEQAEE

SEQ ID NO: 327809 - protein, 345 aa, unidentified
MMVTLGTDAHKKSHTIVAVDEVGAEIASVTVPATPQGHMRLVKWAARWEQRRWAIEDCRQLSRRLEADLLRIGDQVVRVPPKLMAGVRRSARTRGKSDPIDALAVARAALREPDLPVARLDGPSREVRLLVDYRESLVKDRTAAQNRLRWRLHELEPGYDPPPGSLNRYKTLDHIDQLLGAHSSMVAVLAHREVTRIRELTREANQLERDITQRVTDLVPSLLKIPGCGALSAAKLIGEAADIARFKSRDAYAMWAGVAPIPVWSANPQRFRLNRGGNRQTNAALHRIAITQLRIHPDAQAFIKRRLETGSTKREALRLLKRKLANVVYRNLLKDTKQTPLATAA

SEQ ID NO: 327810 - protein, 323 aa, unidentified
MTCVIGIDIAKHTFDIAKPLERDKYRTKAKVANTPEGFKQFDQWLEKHAEPHCWVLMEATSVYHEALATHLHQQGYQVCVINPARIAKYAQSELRRVKTDKTDAKLIARYAQRHLEELRPWEPEPESIRQLRGLVRRLADLKALAQMERNRLDVSAESAQASIRIHLEHLDGQIALINTAINDHIDKDPDLREQKRLMKSIDGVSDGTAATLLAELGSPLRFDSARQLAAFCGLNPRLQESGIYRGKSTISRTGSGRLRAALYMPALSAMTYNPVIKAMKVRLAERGKTGRLVVCAAMRKLLHLIYGVLKSGQPFDPIRALAH

SEQ ID NO: 327811 - protein, 347 aa, unidentified
MAHFVGLDVSVKETSVCVVDDAGKVILEQQVLTEPADIIALLTSLGVPFGRIGIEAGPLSQWLVNALTAADLPVICVETRHMKALLTAQQINKTDRNDARGIAQMMRVGLFKPVHVKTLVAQQQRMLLTSRKLLQRKLLDVEADLRGTLRNFGLKVGAVSGSRYEARVRELVEGFPGLAAIAEPLLNVRRVMRQQFAVLHKMLLDRVRGDPVCRRLMTAPGVGAVVALTYRATVDQPQRFVHSRAVGAHVGLTPKRYQSGEIDYDGRVSKCGDALLRTMLYEAAQSLLTHSTKWSWLKAWGMRVAQRRGIRRAIVAVARRLAVVLHRMWVDGSEFRWRKDSAVPAAA

SEQ ID NO: 327812 - protein, 392 aa, unidentified
MMVSVGIDVSKDKHDCFIVNSEGEILADVFTIPNNMDGFHYLLQRIQDCANTQNKIKVGLEATGHYSYNLLGFLLDNGLPTYVLNPLRTNLYRKSLSLRKTKTDRVDARTIAAMLLSDAGLKPYTNTAYHNEELKSLTRYRFDKVKERAKLKSSIARLVCILFPELEKLVPSLHIASVYALLEEFPGAKQIAAAHLTRLKTLLETASKGHYKRDMALEIRDAARNSIGSWMPAKSLELQHTIRLIRELDDEIAEIEKQIQAIMDELNSPITTIPGLGFRMAAMIFAEVGDFNRFDSPDKLLAYAGMSPSTYQSGQLKNCYPHMEKRGSRYLRYALYNATKYVCHWDPTFAAYLAKKRAEGKHYNVALSHAAKKLVRLIFAMEKSRRPYCLAA

SEQ ID NO: 327813 - protein, 360 aa, unidentified
MAKARTLVGLDVHATKIVAAVLDAETGQLQTFSMSGETAKVAAFCAGLPRPVRVAYEAGPTGYGLARELAKRGVECVVAAPSKIPRASGDRVKTDRRDAEHLVRLLLAGKLHAVRVPGDEEEALRDLVRARDAVRMDLMRCRHRLSKLLLRHGIRFDDGHAWTERHRQWLATVALEWPAAQATMLDARGALDALAHRRDGLEREIVAMLPSSPWTVQVARLRCLRGIDTLSAVGLCAEIGDFERFARAEQLMSYVGLVPSESTTGQQRRLGSITKTGSGHARRLLVEASWHYRSRPSIGRALTDRQADQPQEAIAVAWSAQRRLHRTWTRLEARAKRRTIIAVAAARELVGFAWSITQIE

SEQ ID NO: 327814 - protein, 440 aa, unidentified
MKRVRKSIKMELLHPYSAGIDVSKDEHVVAVNPELTKDSVQSFGCFTQDLKSLSTWLASLGIQTVAMESTGVYWLSLYLQLQSDGFEVYLVNAKHVKNVKGKKTDESDAQWIQRLHSCGLLENSFQPDLEIRELRYYMRMRKDLLEVQKQHTAHMQKALEQMNLKLGSVLTDITGKSGQRIIAAIVEGERDAKKLATLTHSRVKASKEKIELALEGQWHEMYLFELEQSYSFYLIYESKRERLDAKIQEWLERSAPKNMTLVEKNRPKSKNGFQFDVAAHLESLLGIDILKVWGISEINAMEIISEIGTDMSKWPSAKHFASWLGLAPNTKISGGKVLSSRLPKKRNRAGQTFRMAAYALQRSDHYLGDFYRRKRSKLGPKGAIAATARKLATYVYKILDEKVEFSAELLNELNLLNEQRKLKGLAKKANKLGFVLQPTV

SEQ ID NO: 327815 - protein, 352 aa, unidentified
MEKNNKLDFGGQHIYVGMDVHKKSWSVSIHTEQFEHKTFTQPPEVEKLTYYLERTFPGATYHTVYEAGFSGFWLHDKLREKGIDCMVVNPADVPTKDKERAGKTDRVDCRKLARGLRNGEIKGIYVPPRVKVEDRTLVRTRQSMVRKQTRCKNQITSILFFYGIVIPEEGRWSRRFINWIESIRMERASGDFALKAHLEELKHLRQIIANLNKAILSLSRAEEYMADVLLLKSVPGISTLTAMILLTELADLSRFSSLDKLASYAGVVPDIRSSGETEYVAGITFRRNAALRALLIESSWIAVRKDPALIMVFNKLSVRMKKTKAIVHIARKLLNRIRFVLKNRQEYVPAVV

SEQ ID NO: 327816 - protein, 348 aa, unidentified
MNATPKSVVGVDTAKIVFQLYTVDKETGEVMNQQIKRAQFLRWFANRAPCLVGMEACGGSQHWARKLQELGHEVKLMSGKMVKAFVCGNKNDAADARAIYMAAQQPEVKCVAIKTEAQQAVLAMHRIRQQLVKIRTAQINALRGLLAEYGEVFGTGRKAFDAGIKAALERLAERLPMPLIDTLRDQWNELARLDERVARIEASLLAWMRQDRAAKAISAIPGVGLLTATAAVAAMGDAKAFRSGREFAAWIGLIPGQTGSGGKVRLLGISKRGDTYLRTLLIPGARAVLRHAKTPSPWLQQLSQRRPPNVAIVALANKMARTIWAVLAHERAYDKDHVSLRPHAGAAT

SEQ ID NO: 327817 - protein, 425 aa, unidentified
MLEEKELEKPIRAWIGIDWADEKHDVSLYDVATGKQEAFVIAQSPEALQEWLGQLRSRYEDGYVAVVLEQGRGGLLNALMGCEFLVLYIINPKSLSSFREAFYGSGATSDPVDAELMRDMVRQNPSRFRAWRPDDVMTRSLRLLTEGRRHLVNQSTALTNQLTALLKGYYPQALAWVGTLDTAWACDFLEQWPTLQRLQASSRRQILRFYEKHPRASLDLSDQLKQIQDARALTRDEAVLESSALMVQALVSQLRPLLASIAEFDRKIAMIFRKHPDRPIFESFPGAGAALAPRLTAAFGTDRDRFQAATEMQELAGVAPVTEKSGKKIFVHWRYACPKFIRQTFQEFADHSRRWCKWAKAHYELLRRRGKSHNAAVRALAYKWIRILFRCWKDRQPYQDEVYTKALLKHGSPLSPLLAQYVENP

SEQ ID NO: 327818 - protein, 410 aa, unidentified
MPEPTYALYVGVDWGNQTHQVAVLDTARGLRGERGGAHDGPGLHALASWLAELAAPGTVAVAIEVPHGAVVDTLRERGFAVYALNPRPMDRFRDRDTVAGAKDDRRDAQVLAAALLTDRPAFRRLHVDDPQVVQLRELTRIEAELREALRRLANRLRAQLLRFYAQALELCPAADEPWFWALLTQLPRPPAAARRRRGPVAALLREYRIRRLTADEVLTVLRRTPLTVAPGTLEAATEHIALVLPRLELIATQRRACAPRVETMLAVLAAAGQQQGHRDVTIRRSFPGVGRVVAATMLAEASQLLAARAYHRLRASGGAAPVTRQSGKQRGVPMRSAWNPRLRNALYYWAFIAARHDPATRQHYEGLRARGHSQGRALRGVADRLLAVLIVMLKTQTLYDPSRREAKFAA

SEQ ID NO: 327819 - protein, 342 aa, unidentified
MYYIGLDVHKKTISYCVKDAAGKVHQEGKIGSTRRELDAWIKTLPQPRMMAMEATIFTGWIYDHLLPHAEKVKVAHPLMLRAIAAAKRKNDKIDASKIADCLRCDFLPECYMTSTEIRDRRRTLRYRGLLVKQMVQMKNRISGLLMETGVSYNKQRLHKVGYFAELMSSSEEIDCVRPLLKLSRETITRSQKLDYALVSSLERDPLLAERLDRLRTVPGVGPITALTWALEIGDVARFQSIKQAISYCGLCGAEKSSADKVMRTPISKQRNKHIQQVLIEAAKLAPRQSHELALIYEKEKQRGNRNRATLAVARKMVAWLVAVERRKQDFVPAEKFGGMRAA

SEQ ID NO: 327820 - protein, 347 aa, unidentified
MRFYNNSHPYYCGIDLHARLLYVCIIDSKGEVVVHKKIGADKDDLLLILEPYIGNVIVGVECMHCWYWVSDWCAELGIDFVLGHALYMKAIHGGKTKNDKVDSFKIATLLRGGNFPIAYDYPSEMRAARDLLRRRMKIVRHGAMLKGHVVNTNSQYNLPATDLNLKNISARQKLREQYQDPIVQRNIDLDMALLDCYAKELAQVEWFIEKQAKNHNPVYLELLKTVPGIGKVLSLTILYEIGDIARFESVQKFASYSRLVKCKAESAGKTYGTNGNKIGNAHLKWAFSEAAVLYLRGNDKARNYLNQLQKRMSKAKALSALAHKLGRCVYFMLKNKTVFDEQRFLKG

SEQ ID NO: 327821 - protein, 342 aa, unidentified
MGEVSIIGVDLAKNVFQVHGAAADGSVLFRKKLSRPQFARFMAEQPPCRVAMEACASAHHWAREMSPHGHEVRLIAPHYVKPFIKRQKNDAADAEAIVEAALRPTMRFVEPKSADQQARAVAFRTREQLVKQRTEAVNALRSHLYEFGHVAPEGIGYVPRLAKVVEDPDTGIPDLARDICNMLLEQIAHLTKRIDALKARIAALSNEADLPRQLQTMPGVGPITALAVETFAPPMEQFRRGRDFAAWLGLVPKQHSTGGKQRLGKTSKMGQRDIRRLLVIGATAVIRWTSRRGAPKGSWLARMLERKPIPVVAVALANKMARGIWAMLTRGESYRGPVLIGA

SEQ ID NO: 327822 - protein, 399 aa, unidentified
MKNYIIVGADLSDKSMLLEIAHNDRNLGRRSFDNGSDGWMAMASYLKERARQCHGAKIALAYEAGPHGAGLHDFLTGQGISCYMFAPTKMQRSSKMCKQKTDAGDAEALLETLRAHLLAGNKLPNVWVPDPQLRDDREIVRGLLDARVKLRKAHTQVQSLLKRWNVKKPASVGKSWTQTHRCWLRGLSGGTTPLGTGTQAQLASLLRQGEALESEARLLEEAMVRLAVLDRYRDSVQALDAEVGVGVLTAMVFLTELGDPARFPNRRKVAAYFGLVPSCHDTGVRTDCKGHITRQGSARVRWVICQAYHAEARTDPKEKERYGRLAERNPKRKRIAVVAGMRRKVIRLWHVALNVKGSAPNGTPPSRPPEGGKRHFTLPAIPRKHCRRSPEREERRLAV

SEQ ID NO: 327823 - protein, 449 aa, unidentified
MTDKMELEVINPRCAGIDVGSRSHFVATGQNLNEVKEFGVYADDLTAICLWLKEKGITSVAMESTGPYWQNLYVELSKHGFELVLTNGKFTKHVQGKKTDVKDCQWIQKLHTLGLLTSSFLPDETTEQLRTYCRQRTNWLNLAVEASSKMQKYLKLLNLRLDVVVKDVCGLTGLAIIADICSGNLDPKTLAEHRHYTCKKSKEEIAKALVGNNRQDYLFGLKQEYESYQFFQSKIADCDKAIETFMKTEIRTDPIKKKLQTTEKKYKRVGKNAPNFDLNQLAFQYFGGIDLMAIEGVSHATILTLISEIGPDGFKKFPTAKHFSSWLRLAPNNKISGGRVLSHRTPKGSNRLKIGLRQAANSIGNLKDTHLSDFFRRVAYRKGRPAAISATARKLAIIIWNMQVKKVPYMPAKEYLFLDQKRHLKLVTRIRKQITKFEIKPEQLGFATS

SEQ ID NO: 327824 - protein, 355 aa, unidentified
MNPVSCVGIDVAKAKFDVALLKPDGKYRSKVFSNNPEGFRQFLDWLEKQEALKAHLCMETTGAYGRSLARFLAQQQLLISVMNPALIHAFGKTELSRAKTDKADARLIARYCQMHRPAPWVPPAEAIVTLQALVQRLDDLLGMQNMENNRLEMAEPAARASIEALLLTIHQQIDVVRRQIQDHMDDHPDLKSQKALLLSIPGIGEVTAAMLLAFLSPLTRFHSAKQVVAYAGLNPRIRESGQWAGKSHIAKAGNVLLRKALYLPAVVAKRYNPAIAAFCDRLLIWSWVGTDHYWTIPPSEPCVRLSPHTAQASTKTPCGIRWLPLPIFEFAPDCNIGDGAKHGSGVCPARRPLYG

SEQ ID NO: 327825 - protein, 319 aa, unidentified
MSTPIVFAADVAKAHLVIRCYPPGQSALSIRNDRQAIATWLRSLSAGSIVGMEATGSYHRLLAELAYAAGMRVYVLNPRDVYYYARGIGARAKTDPQDAGVIARYLAREYEHLHPFVPAAPTSAQLTTLLDRRATLVRTRGALALSLADVDCLQAGARRLLKELDALIGAVDAQLRELIAEDPRLQPLYARLHTITGIGPLTGTMLTALFTRVPFANAQALVAYLGLDPRPDQSGRHEGRRRLSKRGHPEWRRLLVAAAMSAARTALWKSFVTGQRAKGLPSTAVHVILARKLARIAFSLFKSQQTFDPQRYMPACQTP

SEQ ID NO: 327826 - protein, 490 aa, unidentified
MSKKSSKKAKSQRSRERALLNKVHLNAAGIDVGADTHWVAVPEDRDQRPVRNFGVFTSDLIALCQWLKACQIQSVAMESTGVYWIPLFQMLEREGFEVQLVNAKHVKNVPGRKTDVKDCQWLQQLHTFGMLGGSFRPQAQMCVVRSYLRLRDTLSKDCNSLVQRMQKALTEMNIQVHRVISDITGLTGMSILRAILAGERDCIKLAQLKHPQIKSSTQQIAKALEGDYCQEHLFALQTALELYDNYQLKIMECDKRVEEAMGVFEAKVQVAAPDLSRLRSAQKRQEALRRHHLEQMTGADLTKLPGLDLLAVQRILSEVGLDMSRWPSEKHFCAWLNVAPNNRISGGKILSSKPRKNANRAAAALRLAAQSAMQSKTAIGAFIRRMKVRLGAPTAINAGAHKLARLLYRMLKFGKAYVETVQEAYERLFKERTIRNLQRKARELGFHLTPATPGALIKDALHGHANSFVVLIDRSGILWAARFAPALGGG

SEQ ID NO: 327827 - protein, 336 aa, unidentified
MNIKRIGLDLAKLVFQLHGVDHHERVVLRKTLRRSQMLVFFAQLEPCLIGIEACGSSHYWARELTRLGHSVRIIPPRFVKPYLKGNKNDANDAEAICEAVSRPGMRYVAVKSEAQQSMQAEHRVRARLLRDRTALSNEIRGMLGEFGLALPVGIAALRRALPEILSQQEQWDNRFIRLLCELAEELQILDDRLARYDRRLKQLAQEDERIRRLQEISGIGPVTASALVAAVGDARQFKNGREMAAWLGLVPRQHSSGGKNRLGHISKRGDSYLRTLLIHGARAVLNACGNKEDRRSQWLQSVAERRNRNVATVAMANKNARIAWAVLSREEEYRVM

SEQ ID NO: 327828 - protein, 406 aa, unidentified
MKKFSAVGVEEVTTVTGLAGVERALERAGDLYAAYIGLDVHKETIAVAIAECGRAEPQYDGEIANKPAKVGKWIERLSRRYGGERLLFVYEAGPCGYGLYRQLVASGHACEVVAPSLIPRKAGDRVKTDRRDALGLARLSRSGELTAVWVPEPEQEAIRDLTRAREDMKAIETKARQRLGAFLLRHGQRYDQGKSRWTQAHFRWLEGVKFDSPVQQLVLVEYIEAVKEAQRRVAGLEREMEQALRGWSLRPAVEGLMALRGVSLITAMTVLAELGDISRFDSPRQLMAYLGLVPSEHSTGATRRQGPITKAGNGHVRRVLVESAWSYRFPARKSRCIERRAERSPAAVQVIAWAGQKRLCARYRQLIEAGKVTQQVTTAVARELAGFIWAIVCEVMGKAHGSRATA

SEQ ID NO: 327829 - protein, 376 aa, unidentified
MEHNSEAFIGIDTSKLKNAIAIAESGRDGEVRYLGEIETTDAATRKLVKKLATKYRKVTFCYEAGPTGYGLYRLITSLGHECSVVAPSLVPKKPGDRVKTNRRDAVGLAKNLRAGELTAVWVPDTRHEAMRDLSRAREAAVDDLKSKRQQISSLLLRLGLHYPGEKTWGKSHRNWLASLKLDQREQRIVLEELFGAERQAQERVDRLVSAIIDAVPEWSLAKIVTALMAVRGIDLVAAVTIMAELGDLSRFASPRELMAFLGLVPSESSTGDSVKRGGITKAGNRRARRILVESAWSYRYPPRISRDKLAKVAAAPEPVRAIAWKAQTRLSSRYRALIKRGKRPTIVATAIARELCGFIWAIHRAVTAPGGRQLAS

SEQ ID NO: 327830 - protein, 391 aa, unidentified
MTKRKTEAVNDLSRCLDPLDMDATLIVVIEMSQSSWLVAGIVPGVERQPLKKLAIDEHALLNLLSRWRAEAEKKGHRITRIAVAFEAGHDGFWLARWLAARGVEAHVIHASSVAVTREHRRAKTDRLDTELLKRGFLGWLRGERGHCKMVAVPTLAEEDAKRPSRERETLVGEASRIITRLKAAFVRLGIRSFNPKLKAAAEHLGTLRTPEGELIPPNTLAALKRDLERHQIVKKQIREIEQMRLEHLAQAPAKGPNVMVLLLARVVGIGVETADMLVQEVLSRNMRDRRAVARYAGLTGSPDESGAKRREKGLARSGNARVRRGMIQLAWRFLMFQKDSALAEWYRQRTANASSARKTFVVALARKLLIALWRLAHDGVVPEGMRLRPAA

SEQ ID NO: 327831 - protein, 374 aa, unidentified
MKEKLRFLGLDVHAETIAVAVAESDGDVRSLGTIPNRAEYIRKLIKKLGPADKLRACYEAGPTGYVVYWQLAELGVECEVVAPTLVPVKAGDRVKTDRRDAEKLARCYRSGDLTAVWVPDEGSEALRDLVRAREAAKQDQTRARHRLTKFLLRSGQRPPSGVRSWTRPYLIWVAQLRFSQIAQEFTRQDYLHEVEHMRERVKRLEEAITEAVKLASPELQQVINDLQALRGIADISAVTIAAELGQVSRFESARQLMGYCGVVPSEDSSGKRTRRGGITKTGNAHLRRIVVEAAWSYRRPPGVWYGLRRRQESISEETKEIAWKAQHRLHKRYMKLGAAGKDQRKIVTAVARELLGFIWAIGTKAETAVRQQAA

SEQ ID NO: 327832 - protein, 477 aa, unidentified
MSRAKSTIPSLAQGEIRSTEGLPVVNPHAAGADIGAQEIYVCIPGPDQTQIVRPFGTYTADLHAIADWLVENGIQTIALESTGVYWIPLFEVLEGRGIHCCLISGNLARRLPARHKTDVLDCQWIQTLHSLGLLTESFRPDADLIALRSLLRHRAQLIEHRSPHILHMQKALIHMNIRLDQAVSDPTGDTGLRIIRAIVAGERDPHKLAALRHPHCKKSEAEIARALTGTWREEHLFVLNQSLELYDFYTRQIEACDAEIERTYSTIRPHWPDPDPNDQDPLPPNKRGSNSKNLPKNSPVNVRQHLRRITGINLTTVDGLSLDLAQKIVAEIGTDMSRFPTVKHFTSWLKLCPNNQITGGKIIRSSTGKSHNRARQAFLQAAASVARSNCAFGAFYRRLKARLGPAQAQVATAHKIARAVYHLLKFKVEYSQMSAQEYEQQFRERETRYLQRKAARLDFVLTPTLSVSWQPWLCGLL

SEQ ID NO: 327833 - protein, 387 aa, unidentified
MVDKVTEAAVVGGVDTHKDLHVAAVVDQNNKVLGTQYFSTTRQGYRQMLAWMTSFGTLKRIGVECTGTYGSGLLRYFQNAGLEVLEVTAPDRMERRKRGKSDTIDAECAAHAAFSGIRTVTPKTRDGMIESLRVLKTCRKTAISARRVALQIIHSNIISAPDELREQLRNMTRMQLIRTLGSWRPDASEYRNVTNVYRISLKSLARRYLELHDEIADLDVMIAAIVDELAPELIKRNAIGYESASQLLITAGDNPQRLRSESGFAALCGVSPVPVSSGKTNRYRLNRGGDRAANSALHIIAIGRLRTDAKTKEYVARRVAEGHTKNGSDTLSKAIYLPRSLHVTAQSKQADQQYPDNSLTLRRASRVVIIRAGSSGSYCGDTRSRRV

SEQ ID NO: 327834 - protein, 412 aa, unidentified
MIKREKIELVKGSDIYAGIDVSCDIHRVRFIDNFGEEIIKGISFSNDREGFNKLEEHMKKYRIDHNIIFGLEPTGDYWKPIGYYLKNKGYKVVLVNPYHIKRTKEIIDNSQQKDDRKDSYLIADLVKQGKYFFPIIPEGIYGEMREISISWRRTKQQITRLRCYLSNFLAKYFPEYKRVFSDILGKSSFYILSHYPLPEDIRRIGKGRLTRIIKRVSKGKIKQEKIDRLYEIAKDTVGIKEGRETARMFLKETLKELERLIRRRERLREKMKELLMRSGYGDYLLSIKGVGVVSACLFLGEIGDPRRYKKSSQIEKLAGYNLVEESSGKKGGEKQISKRGRETLRYVGYLVANVAIAKNKEIRELYRYKVDVLKKNKINVMVGIAAKMLRIMFAVCKNKEYYNSEKIRGNFI

SEQ ID NO: 327835 - protein, 316 aa, unidentified
MNKSKSEPSPTYVGIDISKDALDISLAGESPSRSTNDTAGIAQLVKVLEKLPEPAWVICEPSGGYERDLLEALWAAGIVVSLVNAARIRAFARARGLLAKTDQIDAAVLRAYGELLTPAVVAAPSLLRERLSALGRRREQLVEILATEQQRLNQSRNDSVQKMGRQLGKILGKQIAQLDAMIAALIASDETLQKQDARLQQVQGVGPVTSATLLAELPELGELEDKQIGALAGLVPYNRDSGQQRGRRVIHGGRVQVRRVLYMAALTATRYNPILKEFYQRLVAAGKPKKLALTAVMRKLVVLLNRLIKNPKFNLA

SEQ ID NO: 327836 - protein, 344 aa, unidentified
MPGFILFCFIAFTGSHKTLYSGSMETVSFEQVVSRGCGLDVHKETVVATIDGEGLKRTTLEFGTFTSSLTKLKDWLVENKITHVAMESTGVYWKPVYNILEPTGITVWIVNARHVKNVPGHKTDKKDSRWICKLLLAGLLKPSFIPPREQRELRDLTRYRKKLIQDVASNKNRIIRILEDCNVKLSSVLSDTSGITATKLINKLCDGKKVTPEDIDEVYHKKIRATKEEIWEACNGNITDHHIYLMGAIRSNNRHIESSIEELNQKIRQILSPYENVMELLREIPGLSHKTADDLIAEIGLDMEVFPSEKHLASWVGVSPGNNESAGKKKATEQPTVTSRQKQH

SEQ ID NO: 327837 - protein, 388 aa, unidentified
MQFAADRLEAPTAIRTDLGAIFISLELSRSSWVVTSLSPGGGEKMSKHTVRGGDVAGLLKRFAQLREKAKGRTGKVFPLIVIQEAGLDGFWIDRVVQNEGIESHVVDPASIATSRRRRRAKTDGIDGEALVRALLAYKRGEPRVCSMVRLPTPEDEDRRRLCRERKVLIAERVKHVNRIKGLLFSQGVSGYEPLRRDRRERLDALQTGDGRPLPPHLKAQVHRELDRLELLIAQIKTVEAERDALLAAEQTKAPVPPAMLLGVKGIGPEFAAVLWSEGLSRPFENRRQIAAYAGLAPTPWQSGSVDREQGISQSGNPRLRTTMIQLAWLWLRHQPDSALALWFHDRVKRNGGRLRKTTIVALARKLLVALWKYVTAGVVIEGAVMKTA

SEQ ID NO: 327838 - protein, 350 aa, unidentified
MLIIGCDLHTRNEQVAMLDTDTGELVERRLEHENGEVRAFYASLPRPARVGIEATAPAQWFERMLAELGHELWVGDAARIRAQVVRQQKTDRNDAAHLLELLATERFPRIWIPSAAERDVRQLLRHRHKLVGMRTAVENQLQALAMSQGLCRRKKLWSGRGRAELEKLALGPWASRRRAELLKLLDQLEASIQPLDRAVEKEARQNAEAVRLMSHWGVGPVTALAFVLTIGPVDRFPCSKQVVSYLGLNPREHSSGGRQRLGSISKQGNTMMRWLLVEAGQTAARFDPELRRFYQRLKFRRGSQVAKVAVARKLAVRLYWMLRHPVDQAPPVRMSGSPSSAVVPTVGSRD

SEQ ID NO: 327839 - protein, 410 aa, unidentified
MPKIVYPICCGIDVHKSFVVACIATTDEQLVTSHKVKRFSTFTGDLRRLADWLLQNDCRDVCMESTGKYWIPVWNILEPTCRLVLTHPKYVKAIKGKKTDKRDAKWIADMFKHDLLNGSFIPPADIRQLRDLVRYRFKLTSYTTGEKNRAQNCLTVSNIKLDDVFSDVFGKNATAITSRILENPNESFDVAPFVDKRCKKPIEEIQAAVDGMMCANQAEKLRIIRSHMDSLDLCKANLESEILAVAEKFLPQINLVLTVPGIQTFSAIAIIGEIGVDMSVFETARHLCSWAGLTPQNDQSAGKKKTTRISRAGAYIKPLLVQCALAAIKSSKHPEVRNRYNAIKKRRGHKKAIIAVARMLLTAIYNIIKKNEPYNAELYRLSDKPPVKREVTVEQAIFVLQRQGYLVTTA

SEQ ID NO: 327840 - protein, 326 aa, unidentified
MKAVTWIGVDIAKDSCVVAQRCPEGFQTEEFPITPQGLKALGNWLPQQPRLQIVLEATGPYWRAFTSGFNSVAPEIPIAVVNPRRVRDFAKASPHASKTDLLDAQVLVHFAETFQPGLMEASANRADRQLRALTRHALQLTQQRDQVRDQMEKATADPDTPKFVLRSLKRHLQHLEKALKLCWSQARVNLDQDPQLTQTSRLLLSIPGIGEKTALTLISEYGAGLLQVGPKQLTRYAGLDVVFFQSGSSVYRLPRISKQGNWRIRRALYMAALSAIRHNPIVRSYYLKLVANGRPKKSALVAAMRKLLHQCYGVLKNQSPFDPTYA

SEQ ID NO: 327841 - protein, 455 aa, unidentified
MEGSYAGVDWASDKHDVLVADAAGEKLLAATFKHDETGLRSLCRQLVRLKVRLVAVERPDGLLVERLLDAGLRVLALHPNQVAATRDRFRVSGGKSDGFDAFVLCELARTDHRRFRVLEPDSDATKAIRALTRGREDLVGARTALVNQLRAELERFWPGPVGLFSDLHSQISLAFLERYPSPADARGLGEARLQAFLARERYSGGQKPAQLLAKLKAAPTGRVGALELATRRQLVRGLVTMIKALNGQISELERQIATAIREHPDGAIFTSLFKSAVITAAELLAEMGDCRARYPARDTLAGDAGQAAVAIESGKRKAACFRWGCNKRLRQAFHTLADTSRHRNPWAQDLYAQAIARGHDHPRALRTVGRAWCRIVWQCWQDGVPYDPARHRALQRHVTVTIPTPSGPVPDIAATQRMSGSAVTRRAARRAERAALDRKPTSAKPAARPAKRRRA

SEQ ID NO: 327842 - protein, 422 aa, unidentified
MEAFNISGFAALIGIDWADRKHDICEINRDTNTQHLSVISSEPKSINAWALELKQRYNGRPVAVACELKKGPLIYALSKFKHIILFVINPSSVAKYRAAFSHSGAKDDPTDAIIQVEILQLHMDKLTVIRPDSEEVRCLAQLVEYRRKLVQDRVNLTNKIATTLKNYYPHVIDWFKEKDTQIFCDFLLRWPSLTHAKKARKQTLLDFFNQHNSRYPLVNEKRIKEIKDAEILTDDMAVITPNLLLIECLVPQLKHLMQAITRFDDEIKTLYKQHKDRAIFDSLPGAGPQLAPRLLAAMGSNRDRYKCAADIQKYAGIAPVTERSGKKEWIHWRYSCTKFLRQTFVEWAGLSVRYSFWAKAYYRQQEAKGKPHNTIIRSLAFKWIRILFRCWKTHTPYDESTYLIALKSKGSPLLKFAVESEL

SEQ ID NO: 327843 - protein, 355 aa, unidentified
MQVVAGVDCHQDTHSIVFLDSVGKLVRELTVSTSLEGYQAALQVAATFTEVTWGLESTGCYGSAFAKMLADCGSIVYEVPGSFTKRHRKHASQTGKSDVLDARAIAEAVLREAERLPRFEWSAEREAIRIRYDQRDRLVRDRTKHINRLRNAALRLDLKLLPKDLSKIPALAMVRENVTQLQGRDVATAALVDEALFAIEDITRNLERIAAIETLLRPLLRRVAPELLAIYGVSTIIAAGLIGHAGNPRNIRDAAAFAMRCGTAPVSWSSGRNSSVRINTGGNRQLNRLLHMVALCQLRSADHVGRIYYDRKRAEGKTRRSALRSLKRQLSTVVYFRLRQCRITAKDSIEPAIAA

SEQ ID NO: 327844 - protein, 389 aa, unidentified
MKKNTTTKKSPKKAQVKEQQKQIRQMAAKQKLTVGIDLGDQSSRYCILDEAGEVVSEGQVPTTKAGLDSLFAKMASSRIALEVGTHSPWVSRQLAAMGHEVIVANAHKVKLITQSVRKNDRIDARQLARLARVDPKLLSPIRHRGEQAQRDLAVIRGRAELMESRTQLVNSARGLVKPLGERLKQCDADQVGVDLGGSLSEGAQAVIGPLLQTIETMSEQIGQYDEQIAEIEKRYPETKLLRQVYGVGPLIALTFVLTLDDAGRFAHSRDVGPYLGLVPKEHASGGSQPELRISKAGDGLLRSLLVQGAHCMLRKKAPESDLRTWGLGKMGSGGKRGKKCAIVAVARKLAVLLHHLWVTGEVYDPQYNRKAAEAAAAKAAAKGNAKVAA

SEQ ID NO: 327845 - protein, 403 aa, unidentified
MRFIGIDVHRDFCEVCVLDGKSGEEQRRRIATRPTELEAFARELDRGDVVALETSSPATAVARALEPRAGRVMVIDPRRLVRAGARAKTDRLDARTLARLLAAGVLTEIWTPDEATRALRRLVSRRAAVVRARTRLKNEVQAVLARNLCPRPPVSDAFGKAGRRWLASLELPEEEQLTVRGCLRQIDALEADVGELEVALAKRLNGSRELRRLLSVPGINLVVAATFLAYVGDIRRFPSPKHLVGYLGLDPRVNQSGNEVARGGRISKQGAAEVRHVLSEAAWRGARVPGPLRGFYERIRVRRGPQIAITATARKLAVLVWHLLTREQDYAFAMPSTTQRKRRALELLAGAPAHHGRPGPEGPCRPAAALREREREIALAAEHAYQRMLADWQRQPARSAVRT

SEQ ID NO: 327846 - protein, 410 aa, unidentified
MEAMIERCAGLDVHQETIVACALFGPLDKKPEKTIQSFSTTTAGLLELNDWLASFKVTDLVMESTGVYWKPVWNILESDFQLILANAKHVKNVPGRKTDVKDAEWLAKLLKSGLIESNFVPPEDIRDLRDLTRYRKKMTHQRTAEQNRIHKILQDANIKLTSVLSDIFGLSGRRILEAIINGEKIEMKELQEMVHWRTKASLPDIAKAINGRLRRHHRDMLQYHWDHMLYVEKMIQDLEEQIDQCLEPYRKEVELLDTIPGVDQSGAATFIAEMGVDMSVFKSSKHLASWAGLSPGNNESAGKKKGSKTSKGNKALQTMAVQCALTTARQNNRISAHQRRIMKRQGKKKAHFASAHLIVTIAYNILKNGEPYQELGPEYVHQKKQQKEQKMIEYLKKKGYTISNADPETA

SEQ ID NO: 327847 - protein, 367 aa, unidentified
MEVINTIAIDLAKNVFAVCGADAAGRVIWRKELRRAQLLGFMRKMAPCLIGMEAGGGAHYWARQLISLGHQVRLVSPALVTPYRKGNKTDRNDAEAILEAVTRPSMRFVAIKSLAQQDLLALHRVRSQLLKSRTALCNQLRGLLRERGVAVRAGVMALKRALPTILAEENIEISGEVRVLLSEMGEWLRTFELRIASCDEKLARQFKTDERCKRLAQVPGVGPLAATALVAAVGNAHEFRNGRELSAFLGLVPRQHSSGGKRVLLGITKRGDRYLRTLLIHGARASLRWSVSKTDPYSRWATRIRIERGPNVAAVAMANKNARILWALLNRGDRFRFDKSQHRAVSRPGSPTSIERARAAKLRLAQG

SEQ ID NO: 327848 - protein, 344 aa, unidentified
MSKVITIGLDIAKHVFHAHGADGRGLALFSKRISRGKVLEFFAAQPSCTVALEACGGAHHWARQLTELGHEVRLIPPAYVKPFVKRQKNDAVDAEAICEAAQRPSVRFVAVKSEEQQAAGLVFRTRDLLVRQRTQLINAVRGHLTEYGWVAPKGPSHMARLADLIEEEEMISSLPEAAHAMFRLMLDLLAGLNDRIADLDKEIARRAREDEVSRRLMTIPGIGPISATAIAALAPPAETFAKGRDFAAWLGLTPLQRSTGGKQKLGGTSKMGERTLRRLLIIGSSAVVQQASKRGAPKGSWLEQMLARKPRMLVTVALANKIARIVWALLVKQENYRAPVAAKA

SEQ ID NO: 327849 - protein, 412 aa, unidentified
MLFIGDDWAEGHHDVVAQDDAGKTLARRRLPEGTDGIARFHELVASCLGEDAEPDPARVIVVIETDRGPWVKALAAAGYRVYPANPKQAARHKETIANSGKKDDFFDAGALADMGRTRRHQLRELAADSDIAEAVKIAARAHQKLVWERTRHLLRMRSALREYFPAALEAYADLTLTGPDALELLGRAPDPDSAARLTVTQITAALKRAGRRGDLPQRARDIQAALRAPHLPQPAVIAEAYAASGQAGAAVIRALNEQCKILEAKVSELFRRHPDAGLYLSQPGIGDITGARILGEFGDAPGRYATAKARKNYAGTSPLTIQSGKKKTVHARYTRNRHLIDALHAQALSALTASRGARAYYDELRAHDAGHDDALRRVASRLVGILHGCVKTGCEYDETTAWSHRAESPQAA

SEQ ID NO: 327850 - protein, 366 aa, unidentified
MRILSCDWATKKALKIYDSQTKKVKTIQNSIDEFEKFLKTLEGSAVNKLNNSNVYVPSPKVLFLFEHGGGDTFKILVFRAGHAVLQVPGKRIKDYRESKGKEKSDEGDAKLIFDFYKEADAAAPLIKNYKDSMPRLDENNHGGSAAARMRNFADVLPPPFSIFTEQNADIAEIKILFREHEDLKKEMVREKLKRIAFKRKFKIAQVADDRIKKMLFHKEAAIVAKEKEVEQIKKILAEKVKQFRVWKNYLENVKGIGPVIAAGLIGELGGREFESDESLKHYAGMLPRNDSHNFNRYVKVVLFQFVECIIKARTPSWREMYDSMKIFYWKKHGDWRPGKVDAYAKKFVETKFLLKFWREWNRCEME

SEQ ID NO: 327851 - protein, 394 aa, unidentified
MPNIYLGMDVHQRSITLAILPADATAPTAIEQVPNEPGPLRRRLARLTEAGPVQACYEASAAGFVLHRALTSWGHACTVIAPSLIPTKPGVQRKHDRYDAVQLARLFRAGELTAVRVPDPAAEAIRDLVRCRETVQRELLKSKHYLLKFLARRGLVYRAGTLWTLPHLAWLEGLTRPASPLTGDDHTTFEEYWALFQFKRERRLVLDRRLAERATDPALAPAVQRLQCFRGLQVHSAMVLATEIGDWRRFTNPGQLMAYLGLVPREHSSGGREWRGGITKAGNSHCRHVLVQAAWSYRHRPKVAAALRARQRHQPAPVVAHAWKAQQRLHTLFQHLSYRKESRIAAVAVARELVGFLWAVMQDTPTAPAPAGRGTSPEQKGDGGCSGHDLGEPS

SEQ ID NO: 327852 - protein, 387 aa, unidentified
MSHANDMSRCLAALDQDTTIIAVVELSLRTWLVAGIVPGLGRHPLKKLYQPDAAALFLLLQRWREEATKAGRTIKRIAVAFEAGRDGFWLARWLRKVGIEAYVIHPSSVSVSREHRRAKSDRLDTAQLKRAFHGWLRGESDHCRMAEIPTLEQEDAKRPNREHESLVSERTRVINRMKACMVRLGIRGFNSKLRKAPELLAGLRTPEGQPVPPNMQAELKHQMERLQLIRKQIIEVEKARFARLQVAPRTEPHAQVRLLCRVVGIGIETADMLVHEVLWRKLRDRRAVARYAGLTGAPDQSGEKSHEKGLAKAGNARVRRGMIQLAWRFIRFQPDSALAKWFYARTADGRKKTRKTMIVALARKLLIALWRLVTTGEVPTGVMLRAA

SEQ ID NO: 327853 - protein, 377 aa, unidentified
MSNLRFVGLDVHAETIAVAVAEPDGEVRSLGVIPNRSESIQKLVKKLGPPALLRVCYEAGPTGYVVYWQLAALEVACQVVAPSLVPVKPGDRVKTDRRDAEKLARSYRSGDLTPVWVPDAAHEALRDLVRAREAAKTDQLRARHRLGKFLLRHGRRPPTLMKAWTQTHLTWVKSAVHFAHAAQEATLLDYIHEVDHVAGRIERLERAIDEAVQTAPRPMRAVIAALQALRGIALLSAVTIVTEVGQLSRFVKPRQLMGYSGTVPSEDSSGPRIHRFAITKTGNAHLRRIIVEAAWAYRHRPSVGPTLRKRQATLDPAVIAIAWKAQHRLHARYRRLTAQGKTPHSAVTAVGRELLGFIWAIGTTVEAQQHDAPPAAA

SEQ ID NO: 327854 - protein, 335 aa, unidentified
MKHEHFIGIDISKQSLDISLHTLDGQQAELNCLNERDNILKALESLLNDYDLDKVTTLICAEYTGHFGNKLIDICVKSGFKLWMESPYNIIHSQGLTRGKNDKIDARRIMEYARRFSDKAVLYRHSSVNIEALKRLSAERDLIVKDIAKYQGQLSQESGFFDTTYFERKVKRVKHLIGSNRKMLVEIESEIDEIIECDQEIKNNIDKILSIDGVGRQTALVTIIATGNFTKFQNARQFVCHAGCAPFKYESGTSRSSRNKVSHRANKNLKRIFHMAAVSTLRTKGELRQYYDRKVAEGKNKMSVINAIRAKLIGRIFAVVKEDRKYDKIYMHPLV

SEQ ID NO: 327855 - protein, 341 aa, unidentified
MRYLGVDLHTNMFETCWRSESGSERMTTHKTTCILDFVWKLKKDDVIAVEATGNALWFVDSVKAHVKKVVVVDPNKFQVIKKSTNMNDEKAAKTLAFFLSKDMLPKARLKMGKDAELSSVVATRDRLVKLRTVLYNKIHNILNAHGDKSRKKEYGTEKGLASLEKRLETAMISSMTKIELEVVISEIRSLNVNIKKLEACMVDEGSKMDGHANLASIKGIGDKAATILLTEIGNVNDFEDENKLAAYFGMVPKVSRSNETVHYGRITRKGSKIGRTTMVQCGLIAKRYSPYLAKFYERIRKRRGTAKAIIAVARKLLTIVYYTLKEKRIYTDFAKYEFVTT

SEQ ID NO: 327856 - protein, 312 aa, unidentified
MAELFIGIDIAKRHLDVHSHTEGVNGRFNNDNKAIASLVRQLIKLNPTCVVIEATGGYEAMLVAELHLAKLPVSVVNPRQVRDFARATGRLAKTDSIDAEVLALFAQAIKPRLTPVPDVTTQAIRRLVVRRRQLKAIYQAEANHTEHARDKFIVRSIGRILRTVKTELDKIERKLQEVIAASPIWKIKADLLESVPGLGKTTAAALLAELPELGSLNRRQVAALVGVAPINRDSGMMRGKRTTGGGRRSVRKALFMPTLVAIRHNPKIEAFYIHLLANGKAKMTAVVACMRKLLITINAMLRDQTQWNPKIT

SEQ ID NO: 327857 - protein, 351 aa, unidentified
MDRYIGLDAHSSSCTVAVVGPSGRRLQSKVLETNARVLIDFLKSIPRSRHLCLEEGTHSAWLYDELAPHLDEIVVVGVGRRRGTKSDSVDALRLAESLRVGSIERRVYKGLGEWEVLRQLSRAYRMVVRDSVRVQCRIKSLFRSRGIATGGAKVYRESVRKEWKKKLPVAMHSLAEILYEELDAIRELQQRAEKEMLSESHRHGISRILETCPGLGPIRIAQLLPVVVTPYRFSSKRAFWSYVGLGIVMRSSSDWVRANDGRWVRAPVQQTRGLNRNFNRTLKQVFKGAATTVIQWAQQDDPLYQHYRQLLDGGTKPNLAKLTLARQIASVVLSMWRSEEVYNPSKLKTAA

SEQ ID NO: 327858 - protein, 348 aa, unidentified
MQIAVLGIDLGKNSCSVAGLDTSGRVVLRRRLHRDSVMKLASRLPACVMAMEACCGAHHLGRALQACGHEVRMMSPEYVQPYVKAQKNDERDAEAIAEAATRPTMRFVELKSEKQLDMQSLHRARSRLVGERTALINQLRAVLLERGITVAQGRSRLERYLALALDGDDAPPLPLSPRMRQLIDDMRAQWRELDRRIAAFDAEFVATARSDEAARRLSTIPGIGVLNATALVAAVGDARNFARARDLAAWLGLIPRQATTGGRPRLLGITKRGNKYLRTLLIHGARAALPSLATTEGQLGNWLRGLSARAHRNTVIVALASKLARIAWAVLRSAATYNATIGSQPAAA

SEQ ID NO: 327859 - protein, 329 aa, unidentified
MKKRVIIGTDVSKLTLDHAIKTSEAHLKTANNPKGYREWLKWALGYGNKEDLWVVMEHTGYYSYQFELFLHEQEILYTKVSALEIKRSVGLVRGKSDKVDAFTISRYGWMRREELQVQKVPAVLITELKDLITLRDKLVRERSGYKARLKEQHATRKYAKVHIQNRIPLRRIKQLTEDIKEVEAAIKSIINQSEAVQENYKLLTSIKGVGFVTAAYMIAYTDNFQKFASSRQFSCYAGVVPFEHSSGTSIRGKSRVSHYANKKAKRLLNLAASVAIQHNKELKQYYQRRVAEGKSKMSALNIIRNKLVDRMFAVIKRQTPYQEILSIAA

SEQ ID NO: 327860 - protein, 413 aa, unidentified
MQDILTCAMGLDIHRDIIVACLIRGELNTKPDSEIRTFTTLHSGMQELRLWVEETECRNVAMESTGIYWQPIYEILESCFSGEIRLLVVNARHMKNVPGRKTDMRDSEWIATLLRAGLLKGSFIPEKDFRELRHLTRYRKCIVHDITKQKNRVDKFLQSSGFRFAAFLADIFGASGRNIIRHLIQHGSIDREGLDLCLKAKARNRIDEILVSLNGTLSKHQCDFLKMIFEHLEDLEKHKRFVEDAICEEVKKHSEMFSLLCSIPGIEITSGASILAEIGGDMTAFADSQHICSWAGLSPGNNESAGKRKSAHINKGNAYLKAMLCEVAWVIASHRELYLSGWYWKVKQRKGAKRAVVALARKLLSLIYTILRTRTPYNEERFNIRRKQCERKRANRMVYELQRLGYTVSLPRT

SEQ ID NO: 327861 - protein, 372 aa, unidentified
MSDRTATSSAPAKESSTTTTSHVILALDLGKFKSVACRYDPVTGEHAFETIATTPPAVHDLLIEASPAVLVIEACSASGWISDLAESLGIAVRVANTLGEAWKWKRVKRKTDRDDALKLAKLAASDQLPQVHVPALSVRQHRSLIKHRHALIDRRTGIKNTIRSLLDAQGLSMPMRSRGWTIESINELKKLARPLSECDARTLWRGQLDLELRLLEAVSTLIKEADKKLDAIASQDERVKRLKTIPQVGSRLAELVVSTLDDAKRFKTARQVSAYAGLVPKQYQSGQMNRLGRITGQGPGLLRRVLVQVAWGLQRREETRGHAVFERLCHGQRTRRKQAAVALARKILIWCWAILRDESVWDDTRDRRLTVT

SEQ ID NO: 327862 - protein, 386 aa, unidentified
MKRIAEVVSMFLGLDVHAETIAVAVAEADGGEVRSLGVIPNRPGSVSKLIRKLGDAQAIKACYEAGPCGYDLYWQLVSLGVHCDVVAPTLIPVKAGDRVKTDRRDATKLARLYRSGELTAAWVPDKAHEALRDVVRAREAAKKDQLRARHRLSKFLLRKGLRPPEELTVWSDKYMQWVKGLSMSLAAEEAVRLDYVNEVDHAAARIERLERAIEEAVVAAPKDIQAVIQALQAFRGVQRLSAATIAAEAGSISRFARAKQLMGYAGIVSSEKSSGERRRRGAITKAGNAHLRRIVVEAAWSYRHKPSLSKRLRERQKDLPPEICEIAWKAQHRLHKRYMTLLLKGKSKQQVVVAVGRELVGFIWDVGRRVEAAHQRTAPATTRAVA

SEQ ID NO: 327863 - protein, 340 aa, unidentified
MPLYGGIDLHANNRVVVLLNEQDQVVYEKRLPNHLPTVLDLLDPYRAEIMGFVVASTYNWYWLVDGLMEAGYRVHLANPAAMQQYSGLKDTDDHSDARWLAHLLRLGVFPEGYIYPKAERAVRDLLRKRAHLVRQHTANVLSVQNIIVRNTGTRLSIKRIRELTKQELEGLLPEVDQVLAVTSRLAVLDCLSHQIKTLEQTVHKRLKHTPSYEQLLTVDGIGTILAPTIALETGTIGRFPTVGHSASYCRCVDRSKIRNGKRKGQGNVKNGNRYLGWASMEAAQFALRFHPSAQRFYQRKLAKSNNNTTLARKAVAHKLSRACYDSMRDRVPFDALKAFG

SEQ ID NO: 327864 - protein, 402 aa, unidentified
MNAVGIDVSKSKSVVAIMRPFGEIVSTPFEIKHTANDIHSLIELINSVEGESRIVMEHTGRYYEVLAHQLLEANLFVSAINPKLIKDFDNDSLRKVKSDKADAVKIARYALDKWQNLKQYNVMDELRNQLKTMNRQFGFYMKHKTAMKNNLIGILDQTYPGVNTYFDSPARSDGSQKWVDFASTYWHVDCVRKMSLNAFIDHYQNWCKRKKYNFSQSKAEEIYGKAKELVPVLPKDAITKLIIKQAVDQLNSASTTVESLRTLMNETASKLPEYPVVMAMKGVGTSLGPQLMAEIGNVSRFTHKSAITAFAGVDPGVNESGTYEQKSVPTSKRGSADLRKTLFQVMDVLIKTHPQDDPVYQFLDKKRAQGKPYYVYMTAGANKFLRIYYGRVKEYLASLPES

SEQ ID NO: 327865 - protein, 411 aa, unidentified
MRIVHQRCCALDVHKRNITACVLVWDGKQLVKERKQEFGTTKKQLGRLRFWLMACKVTEVAMESAGVYWKPVWHVLEKGNQFQLKLVNAQHYHGVDGQKSDQIDASWLAELLQCGLLKGSFVPSQWQRELRDLTRLRVALLQDQNRIQNRIEKLLEDANIKLGSVVANTLGTSGRKILKALIAGDKDPGWMADYAQGRLRAKREELTEALFGFVTDHHRTLLDMLLRQIESLDRDIASLEADIRRRLAPHQDLVERLAEIPGFGEITAWTVIAELGLDMNVFGTPERAASWSGLCPGNRKSAGKRGHGRTRKGNRWIRRGLTQSALAASHDQDTYLRSFYWRISSKRGPKKARVATAHKQLTIAFFIIRDGVRYNDLGPDHFDRRQPERTQRYLIKRLEGLGLKVTVEPAA

SEQ ID NO: 327866 - protein, 309 aa, unidentified
MAKAVQQFTLGIDVSKHELIIHGWESGEYTTLSNEPDAIRSWLSSLVGPVRLAVEPTSTYHVEIVDQAHAHGHAVYLVNPRQLAHYRESVNLRHKSDPDDAWLLARFLDKEAEELRRFAPQSRQAQALWTLLKRRAVVVRARTQLQQSLRELQLAHQGVMTQFKRLIARIDQRIKALISKLGWQDDYRRCLSVPGLGPVNAAALVCAFNRGSFAGSDAFVAYLGLDVRRRESGLFKGKRKLSKRGEPELRRLLYCAAKPARCHPHFNHYHRAQINKGYSKIAANVILARKLARIAFALMTRKQTFNKQL

SEQ ID NO: 327867 - protein, 454 aa, unidentified
MKLKKSSKNKVKRIKKHLEQINLYAAGIDVGSREHFVSVPESLDDQPVRHFGCFTIDLENMADWLVRIGITTVAMESTGIYWIPLFEILEGRGLQVILVNAHHVKNVSGRKSDVKDCQWLQQLHTYGLLAGAFRPEDEYCALRAYMRQRGTLVSTLSTHIQHMQKALRQMNILLDNVVSDITSKTGMSILRAILSGERNAEKLASYRDRRCKNSVEVIAKSLMGNYRKEHLFSLKQSIELYDFYHEKLRDCDQEIEQQLTQLEKQSDLTEEQRPTKKRNKKHERNAMQFDVANYLYDLCGTDLTDIDGLDEGSVLKVLSETGTDMTKWKTASHFVSWMGLSPNNKISGGKVLSSKTVKTRNRAKQAFKLAAWGLSNSKSGLAAHYRRLRARIGAPKAINATARKIAVIFYNMLKNKTAYISQSQEEYDKAHKQRILKQLQQKAVQFGLELVPIV

SEQ ID NO: 327868 - protein, 313 aa, unidentified
MTEITIGVDISKSHLDVFRLQDEAARRFENSAAGFRALVKWLGKSAVARIVFEPTGPYHRAFETALSGKFPLVKINPLQARRFAEACGTRTKTDAVDARMLARMGAALALEPDAPVNEKLNELRDLQVARTGLIKERTRLHNRGHVQANPVLKRQTKARLTLVERQIAELDAEIARQIAEDQPTARKRQILCSVPGLGPIAAALILTFLPEIGTLDRKQAGSLAGLAPHSRESGQWKGKSFISGGRKPLRDALYMPALVAMRFNPDLKAKYTALRAAGKPAKVAIVAIMRKLLETANALVKADHLWAKKSSCS

SEQ ID NO: 327869 - protein, 341 aa, unidentified
MNYIGIDHHKQYSHMTVMDEKGKVIKTSKVGNFRCEVEGFLEGLGPEMEAVIEAGHSSYTMIDLLEELGVKVKIAHPLQVKAIAKAKIKTDKRDSKILAHLLRSDLIPEVYHRDKENRGFQRILRQRVFFVATRTRVKNRITSLIAQQSEEVRGQACQLNDLFNKTGMEFLQSIKLSSSDQKLLDELLKLNRHLERRIKESNDLVESLYTRMEEARLIRTVPGFGRFFSVLVATEIGDVGRFERAEKLHSYAGVIPSTYTSGERSYHGRMIKQGNKWLRWAAVEAVWPAVRSDFDLKLFYQRRLRRKSANSAKMATAKRLLTIIYRVLQERREYIPYKRIK

SEQ ID NO: 327870 - protein, 336 aa, unidentified
MKPMPVGVDIAKNIMQVHYVDMETGEVINKAIKRARFPEFFANLPSCLIGMEACGGAHHWARQLSKMGHQVKLMPGEFVKAFNIRNKNDTADAQAIWRAVQQPGKAVAVKTEQQQAMLALHRIRSQLMKFRLMQTNELHGLLAEYGEVMAKGYASLVRSVPEILDRLSGRLPAALIDSLGEQLSEIDRVDKRITDIERRIRELSKNDPGVKAISDIPGVGLLTATAAIASMGDAKAFRSGREFAAWIGLVPRQTGTGGKILLQGISKRGDKYLRKLLVNGAHSVIQNASEPGPWVTELQKRRPVNVVSVALANKMARIIWAVLAHDRPYQRNYAFS

SEQ ID NO: 327871 - protein, 388 aa, unidentified
MPQSNDLSRSLAAFDQDRTLIAVIEMSQSNWLVAGLVPGLERRPLKKLSPDEDALLKLVQRWRNEAAQAGREITRIVVAYEAGRDGFWLARWLRRRGIEAYVIHPSSVAVSREHRRAKTDRLDTELLMRAVLGWLRGEKRHCSMAAIPTIEDEDAKRPSREHEKLVGDRTRLVNRMKAMLARFGIRTFKPTLRKAADRLGDLRTAEGTPLPENTRAELRRDMMRLRMVREQIKEIEQERLRKLTAAPAEKGPPTMVRFIARIIGIGIETADMLVSEILSRGLRDSKAVARYAGLTGAPDESGRRRREKGLAKAGNARVRRGMIQLAWRLLIFQKDSALAQWYRARTANARGATRKRMIVALARKLLIALWRMATTGEIPEGISLRAAT

SEQ ID NO: 327872 - protein, 375 aa, unidentified
MSQRDYNKQVAKRQRIRRATLIVGVDIGNAFNAVGFMNKEGNFLGSCAKLYNNWDGFEEFINLIEGLKAKHHLRDVLIGMEPTGHYWRKLAYFAKDHGYEVRFVRTTSLKHHREIDESSSAKSDQRDALTIANITREGKYIDTIIEDGLLRQLRTLSKARERLLRYSVSAKNSLHAALDDYFPELHELFWSMGSRSLWTILDLCPFPQDVMLMEVSTLQDLIARSSRKKTGSIHKAEKLIEAAQKSIGVKQIGNADRYRVQMCLEEVKRTVLSLKDIDKQLKLLLKETTAASYLMSIPGIGPLSAAVFLGELGDPAHFHNARQIVKYAGYDPQESDSGSRIGRKFISKKGRWLLRKYLFFMRRVVWVLRTGNRDL

SEQ ID NO: 327873 - protein, 411 aa, unidentified
MDVVNARCAGLDVHKAPVVAGVRVPGPQPGARRGETKTFATTTRGLRDLTNWLLTHGVTVVTMESTGVYWRPVYEALEGLVQLVVVNARHVKMVPGRKTDVKDCEWLAQLLECGLLRGSFVPPRAVRDLRDLTRLRKALIRERGHHVNRIAKTLELAHLKLSCVVTDLMGKTGRASLQALSAGIDDPERLAACAQGVLRKKQAALREALGGRLTPHYAFLLQQHLSLIDGLDAHIATLDTRIEAAMAPFAEAAALVQTMPGVAARAAQAILAETGVDMDLFPTPAHFASWARLCPGNHESAGKRQNTTTGKGAPWLRATLQETAWAAVRSKKSYYRALYHRLKGRRGAKRAIVAVQHAMIVALWHMLKHRVAHQDLGADSFERRNIARIRRHHVRRLEQLGYDVTLRGKAA

SEQ ID NO: 327874 - protein, 407 aa, unidentified
MFVGIDVAKNSLVACAMDDQGEDVFPSYSVENNRPGCLKLINLIADNANLLQSDIIKVGMEATNVFWEHCYRLIKNHEKLNSNFKLQLYTVNPKVVSNFKKAYTDLPKNDSVDAWVIADRIRFGRVESSSSPEALYRALRQITRHKFKLAQHIKAEKARALNLVFLKFSDFTQKSPFGTFTKASMALLENYTLREIVNTDVLELAEFLHQNSNNRLGGSTPIEKITTALKKAARNSYRLKPEIDQAITQTLSMTFDNIRFYQSQSKRLKKVLKRQLKAIPQTLITVDGIGPVLTAGIISEVGDINRFDKETNLASYAGLTWSQYQSGSFTAEETHLTKKGNKYLRYYLVEAANSLRVHNDRYKSYYYKKYNEVPKHKHKRALVLTARKFVRLVFALLSKGEIYQPRR

SEQ ID NO: 327875 - protein, 405 aa, unidentified
MRHFVGLDWGGTGHAVCVVDEGGRDVLRFSVAHTSDGLAELRRRLARLGPAAGLPVAIERPSGLVVDTLLDAGHPVVPVHPNAAKAARPRYRASGAKSDGADALLLADLLRTDGHRFRPLRPQSDELRALRALVRGRDDLVAARVQLANQLRALLEAYWPGAAAIFAEIDSPIALAFVRRYPTPASAKHLGERRLAGFLAAHAYCGRRTPAELLARLRAAPAGHAGEAEEDARGEVAAALAATLERLGSQVALLTARIGHAVAALPEGRIVMSFPRAGRICAAQIAAELGGVRERFPSPDALAMEAGCAPVTRQSGKSRSVVFRWACNKRLRAAVTCFADNSRHASAWAADLYRRARTRGCDHPHAVRVLARAWLRVLWRAWQDGRPYDPQTHTAAARAARPRPG

SEQ ID NO: 327876 - protein, 423 aa, unidentified
MENIMPPDYQVAAGLDVHKKFIQTTILWLNGTKVQQKVPRTHDGLLGLKDLIFEHKCDVVACESTSDYWVCIYDLLVDHVPVIIGNAHDIKALSHKKTDKIDSEMIALLALKGMITPSRVMPRHHRDFRKMVRLRHFLVRKRTDIKNRIHSILDGELFHLSRLLSDIFGASGKRIMQGIVNGASVDEILRSIPPHIRTKKEAELRDLLNQTISPGALMQLGHCLRVVRQLDEEIESITDEVRTYALQKYPREFQILKSVPGIGDIAAITLLAEIGDFKEFLTGDRLASWIGIVPKVYQSANHVVKCSITKRGSRLARWILIQAAHAAARTRDTVLHDWYEAKKAVIGAGKAIVGLARKMITIIWHLIVNDEEYVDKYTESKPQKPQKVHTIRIPTSPDYTLEEVLALVTDALGFLKKRDPDPI

SEQ ID NO: 327877 - protein, 367 aa, unidentified
MADPLRSEKDLHEVQVSLQELEEVLMRMVGGLDIHRQQVTFDWVDLDTGEAKRGRITPADRVGFRKWLAQFDGEVEVVMEGCTGWRFIAEECAAAGAKVHVADPAEVAARRSSKRRAKTDPIDARQLRQLLERGEVPESWIPPKVVLEVRERVRLYLDLLEDKQAWQHRIHATLFHHGVPKVDGKLLAGGRAEHGRDDPDLSDAGRDAVETALRIIAALDADLTRIRAELVAFGRRHPGPRELAHEYGLGALLATAVWEELGDTRRFSASRHAVRHAGLDISVYDSDGKHKGRPTLTRQGPPALRWALYEGAVHAHKKTSPDHAYYTRLARRIGSGRARLSVARKLARRCHHRLRALGDQAWVDLPG

SEQ ID NO: 327878 - protein, 354 aa, unidentified
MLPLSSRIAAIGIDIGKNSFHVVGQDQRGAIVLRQKWSRGQVEARLANLPPCLIGMEACVGAHHLSRKLQALGHDARLMPAKYVRPYSKGQKNDFRDAEAIAEAVQRPTMKFVATKTAEQLDLQALHRVRERQVGQRTGIINQIRAFLLERGIAVRQGLRFLRAELPTILATRSDVLSPRMLRLIEDLTGDWRRLDERIEAISGEIEALARQDQACERLMTVPGIGPIISSAMVAAIGSGDAFSKGRDFGAWLGLVPKQISTGDRTILGPISKRGNRYLRALFVQAAWVVLVKLGKKWQRYGLSAWIEAAKKRLHHNVLAIALANKLARIAWAVLHKGRAFECAKIDALSVRPI

SEQ ID NO: 327879 - protein, 342 aa, unidentified
MQNDTRIAVDLAKAVFEIAVSDRPGRVGRRERLPRAQFLSFFAQRPAATVVMEACGSAHYWGRRIEGLGHRVVLLPPYHVRPYVRRNKTDRTDAKGILEASRNEDIRPVPVKTVSQQVLTSLHRLRSGWMSERTARINCLRGLLRELGVFIPAGARQVIPAVWTLVEDADADVPDALRPFLAELCLEIREIEARIDRVEKQLQAMAQQLPVVGQLLTIPGVGLLTATALLAFIGDIRRFPSARHLASYIGLTPREYSSGLRRHLGRISKRGDGYLRTLLIHGARSVLLRARADQSDRLRDWAHRIGKTHVHNKAAVAVANKMARVVWAVWTHARPYQPTLAA

SEQ ID NO: 327880 - protein, 320 aa, unidentified
MMAQNDLVVVGIDVAKDKVDLCIRALALRQTCPNTAQGRRKLVAWLRKHQVGKAVMEASGGYEREWRKVLYDADIEVRIVDPKRVRSFAQSAGRLAKNDTIDAEMIAWFAETFSQTPSQRHDVAQEELAALVKARLALVELKIRLQSQSAHAAPGPAQKAQARVLKTLVAEIEKLEFAIAAKVKATPHLAERAEIVESVPGFAETTSAILVAGMPELGQVSDKIAAALVGIAPYDDDSGKRRGERHIKGGRRWVRNAIYMPCLGAATQNNPVAKAFYRRLIAKGKQPKVALVACMRKLICILNVMIARRQKWQAPHHAPT

SEQ ID NO: 327881 - protein, 345 aa, unidentified
MKIIGCDFHPSFQQIAMCDSETGEFQERKLSHADGQAERFYLELGGPALIGIEATGNSQWFLDLVGRLGYEIRVGDAAKIRASYVRKQSTDKRDARHLLTLLLEKRFPQLWTPSAAMRDQRQLLRHRDKLVEIRTKVKNSLQHLAMNRGMQKKSRLWTRLGMEQFQQLAMPGWAGVRREDLSHLLKQLNCQIETLDRAVEQAACQHPQAQLLMSQPGVGPVTALAFVLTIGEVTRFAGSKQLSSYLGLVPSEHSSGSKRRLGAITKQGNRFLRKLLVEAAQTAVRKDEGFRKEYQHRCRRRPKGVAKVAAARKLAVRLYWMLRSNVSYPEIVRVESNPRVPLGDV

SEQ ID NO: 327882 - protein, 319 aa, unidentified
MSETVCVGIDVSKDKLDVADSRSRKVKQYPNDDKGIARLVEQMQKLSPECIVVEATGGYETTMLVAMAEVKLPVALMNPRQIRDYAKSKGILAKTDAIDALVLAEYADKERPEVRPLPDCDLRELRALMVRREQLSAMLQMERTRLHQATGRARDSIEDLIEHLDHQIRELDDELDDLIRRSPIWQEKCELLKSVPGVGQRLASTLIAFMPELGDMNRKQVAALVGVAPFNCDSGKHRGERHIWGGRKRVRDTLYMATISAIRHNPHIRQFSERLSDNKKEGKVRVVACMRKLVTMLNAMCATNTHYQHPTATTATATP

SEQ ID NO: 327883 - protein, 464 aa, unidentified
MERFYLGVDASKGYADFTILDSNEQTVMANFQLDDTPAGHEQLYKLLGAFSKEHSDCRLYAGIESTGGYENNWFHCLLGFRDPLNLKAARLNPCGVSNNSKAGLKRMGTDKISAHGVAQYLIDHPEKVNYTYQDQTAGLRKRYKVINMLIKQKGQLLNHLESMLYAAHPQLMIYFSNDTPKWILALLKKYPSAVRLARAKAKSVAQIPFITKARAEELIADAKKSVASCCDPDTEEAIKLTVGHIQHLQKTEETQKKKLATDCSLPEVELLKSFKGISDYSAIGLMLEIQNISRFVSAKKLAAFFGVHPMYKESGDKTGRMRMSKMGRKEPRRILYMVALSAIGCNPLIRDFYEKQLEKGMVKMAAVGACMHKILRIVYGMLVNNSPFDPRIDEANQQKRKPAKNKIKKDRNRRYQEIDPKAPVSRRQGLKRRGNGSQSQSDGVTKCGITAPVSTNDSNPNTTG

SEQ ID NO: 327884 - protein, 364 aa, unidentified
MKEEKRRYVGIDLGKFDYTMAIIGKKGKMSIHKGKTSPQGRSALYGLLEKSDKIALEAGNLAFIVAREIGQRVGSEVRVLNSAKLPFIWDAPTKTDKEDAIKLAKLVEERRDEKLPIVPLPSEEEMERREIVSNYSREMQGRTKVINTLHSLFVKQGITTVVRKNLATVEKAREAIKELKGQLREDAESQLRHLELYENRIKELKAKMKKEAETDEDMRQLQTIAGVGLIVAYVFVAYVGNGSRFSKGAQVSNYLGFVPRLYYSGTIERQGHITKRGNSYLRGLLIQAAWAMVRSKKGGSLKERFIYLTKIQGKSKKKTIVSIGRRMAELMYTILREKTNYEERPWKRLQQNTPEGMAKEAMSA

SEQ ID NO: 327885 - protein, 419 aa, unidentified
MKTYLLRNPNAVEPQIERLTAPVDPVAAAITSDIVAAYQPPGTSPRLILYVGLDVHNDSIAVSLAPSDSTEVRRYGIIGGSHDEMLKLSKKLQAAHPGTELKFCYEAGPRGYPLCRFIRAHSFSCILVAPSKVPRKPGDRVRTDRRDADQLARLYRAGELEGIYVPEPHDEAVRDLVRARFQISQQQHRGRQQLKMFLLRHNIRYAGQTSWTPAHLRWLATIKMPFAEQQFVFQEMVNVISEAGQRLERYEAQLPGVVAGWRLEPVVRALMSLRGLALLNATVLVAELGDLQRFATAGQLMSYLGLVPSEDTTSDDRKQGGITKMGNGFARRALIEAAWHYRQPARISRGVLARQEGLSKAVTDRAWAAQSRLHQRYKHLTGRGRKKPQVAAAALARELSGFVWDIGRLVKPHAIKAQA

SEQ ID NO: 327886 - protein, 363 aa, unidentified
MFTERTSVGLDVHARSVAAAAIDGVTGELFQAKLTPSHEHIRSWVQALPGPVAVTYEAGPTGFDLCRGLTAAGIRCEVAAPSKLQKPAGERVKTDAKDAIHLAKLLRLDQITAVAIPSVEQESARDLVRAREDCRGDLMCARHRLSKLLLRHRIVYYGGKAWTGKHDTWLRHDALGQLSLRATRMAFDSDYETVLAVKARRDRLDAAIDQMAAESEFTPLVRRLGCLRGVRTLTGFALAVEIGDWHRFTGNTIGSFVGLVPSEHSSGSSRVQGSITKTGNTHVRRLLVEAAWHHRARYTVGKTMRDRWELAPAAARVRGDEGNRRLHHRWVKFIERRKRPTVANVAIARELAGWCWSLAMLEE

SEQ ID NO: 327887 - protein, 454 aa, unidentified
MSRSRGRRQHLSIVNPNAAGIDVGSAEHWVAVPPDRDPKPVRRFGAFTGDLEAIAEWLKRSGVDTVAMEATGVYWISLFQILETRGFKVMVVNARHLRRVSGRKTDFNDCQWIQELHTLGLLNASFRPENDVCALRSLVRHRENLVHSAAQQVQLMQKSLIQMNLLLQKVVTDITGVTGRRIIDDILAGQRDPKLLAQHRNPHIKASEEDIARHLKGDYREEHLFTLRQAVDAYDFFMRQLDDCHQSALRILGRFKTKLPPQALALDSPAPTRRKPSKNAPPKEFHDLLFQCAGSDLTKVPGIEVSTALTVVSEIGLDMSRFPNEKRFASWIGLAPSPKVSGGKTIGHDRPNIRNRAAQALRMAASTLRKSPTALGAQFRRFNARLGPAKTIKAMAHKLAKIVYRLLKYGTAYVDAGDQAYQEQFRARRIRALKRNAADLGLALVPMPAGEPVS

SEQ ID NO: 327888 - protein, 473 aa, unidentified
MQLNEKLLLSMATFGNIAATRGCCAKPAGGYWRRSKISLDLLSVSVIERRRKSTHMVKNRIPVCHVAVYLRYVACLTTNTMKATKEKINRIIGLDMHPDVFTAAALEKTTADLSKVLWVQDRLPTANLEDWAKKYLKHGDLLVLEASGNSFEVAGRFHQLGYTCLVLESAQVAKIKENFCNDDRHSSIKLARVYLSGLAKIVWQPDEQTREMREVFFTHRAAVKDCTRLRNRIRTFLNEHCVRLPKGTPLTQQKGLDKALSMHTWSSLQVALITETFEQLWQTEARRKRLEELMVEQLLERPEWAKLWRLMGVRHIVAFALMAMIGDVHRFPTAKKLVGYFGLSPRKVQSGNNVKGYERGMGNTGRGDVRALLTQAAQNALMQRNSPLHKWGWKLAMKKDRNIAVAAVARKLTVAIWHLLKGHFTPLLELNKHLETKLLKIATVLGTENLKEAGFKTRNEFIQHYFKKIQLST

SEQ ID NO: 327889 - protein, 366 aa, unidentified
MEEVITSVGIDAHKRELHVAMLIGAAATPVTWTVENEPKAIERLHRKLERDAPGPVRVCYEAGPCGYALQRQLTKGRVSCVVIAPALMPRKPGDRVKTDKRDARKLAELFRAGLLTEVRPPTPAEEAVRDLARARDDARDDVQRARHRLGKLLLRRGLQFSGRKNWTQAHRRWIKTIQWEHAAERAVVDDYLLAIDQVESRLVDLDVQLTETAQTEPYREPVGWLRCFRGIDTLTAMLILAELHDFRRFPSARALMAYLGLVPSEDSSGERHRRGRITKTGNTLVRRVLIEASWHYQHRPGVGPGLAGRRKGQPARVIAIADKAQQRLCRRFRRLTAKDKPSTKVVVAVARELAGFIWAALQSPAA

SEQ ID NO: 327890 - protein, 403 aa, unidentified
MISVGIDVSKGKSTVCIMKPGGEVLSAPFEITHTKSELLDLINIIKSQNEEVRVVMEDTGHYHLPVATLLVDNDIFVCSVNALRMKKYCSQSIRRAKTDKIDSVHIASYGIAYWNELQSIPCSDDIYKELQLLARQYYQSVALLVKAKVNFSNLLDRVMPNIQSIITDNSSNSKLTDFVARYWHFSRILEMGEKRFISDYCKWAKKKGYRMCECNAKEIFALAQNGIPVLPSSQSTKIVITEAVRVIHELESSRDTILAQMQSFAKTLPEYSVVREMPCIGDVLAPRIIAEIGDVRRFKNQHSLIAYAGIDAPPYQSGSFNATERHISKRGNSYLRKTGYEIMQSLIKHKPENDSVYDFIVKKRCEGKCAKEVMIAGLNKFLRVYYGKVTELYDNLEYCNLTA

SEQ ID NO: 327891 - protein, 418 aa, unidentified
MKVVFPTCCGVDVHKSFLVATIIKTPENSLQPSYQKKRFSSFNSDLNRFADWLYENDCMDVCMESTGKYWVPVFNILEKREIRVVIANPKWVKAVKGNKDDTKDSKWIGGLFRIGLVKSSFIPDKDIRVLRELTRYRYKLTSMKSSEKNRFQNAFTVCNVALDSVVSDMFGKSVAAITDYLTSDENFNAKHCVSLLQGSLKKKADDVLQSIEGYEITVEQKTRIGIVRDHLRYIDTLIDRVDSCINTMVDKYEGYIVLLCTIPGVDRSSAITILSEIGVDMAQFGSSKRLCCWAGLTPGNNESAGKKKSVRISRAGVYLKPALVQIAHAAVKDKSSPYYALKYERIAKRRGKKRAIIAIARMILTTVFVMLSNLEEWNPVDLYRVDMPEPLKEKQLAKAVKQAVRFLETQGIAVLDSA

SEQ ID NO: 327892 - protein, 343 aa, unidentified
MPNCTSLIGIDISKYSFELWGVDDHGHQTLHKRLHRDNLMLFFSNFPQCTVAMESCSGSQYWARQLKQLGHDVILIPAQHVVAFRQGPKNDRNDAAAIAEAARRPRLRPVPVKSIPQQDMQSLHRVRERLVQQRTSLISEIRGLLLEYGIVCARGINRFLCWLRTDFTHQVESLSPMAQETFLALRDEFQQLQERLDKVDRRIKDIFKSHPVCRQLATVPGVGPLIATALIASITDPQRLKNGRQFAAYLGLVPRQHTTGGKPKLLGISKVGNRYLRMLLIHGARSIIFHHRGKEDSRSKWVRKLVERRGWHKANVALANKNARVLWKLLTTPGSEFKQEFAD

SEQ ID NO: 327893 - protein, 363 aa, unidentified
MRSIYYVGMDVHKESISIAVFKDTDKEPETTVTMTNNLSKIKKFMSKLNSKGTVLACYEAGFSGFKLYRELTAMEVQCVVAAPGLLPKQPAKRIKTDRLDAIALAKNLRNGDITSIYVPSDEDEAVRDYLRMHEDFKIDLKKAKQRLLAFLHRYGLSYDGNNWTGKHEIWLKSLKFPNPIRQKAFDEYFYRIKDMEGKIDMLFYEIEKISQKEPYKEKVDMLRCFKGIDTLIAISFVIELGDFRRFMTASEFMSFLGLVPSEKSSGNKRRQGSITKAGNSHLRKLLVEASWHYRSYKPSKRLNQRRKGMSRELISYADKAGNRLSKKFNRLLFNKFKKSQIVVVAVARELAGFVWGMMVGAIN

SEQ ID NO: 327894 - protein, 363 aa, unidentified
MEYIAFDAHKHYTLASVARPDGQVVREERIEHDRGALHQFLKRCEPGSPVAVETIGNWYWIVDEIEAAGCVPKLVHARKAKLMMGEINKTDRLDVRGLNRLQQNGTLPTVWIPPGELRDQRDLPRTRMVLVRQRTQLKNRIHATLAKYALHDSEVSDIFGVRGRALLRQRLALLPPHTAYASQQLLEQVESLDRQVRAFEHRIQGAFKPTPAIQLLLTVPGVGLTLAVVIALEVGEVTRFATAEKLAAYAGTTPRVHASGGKTRFGPSRPDVNRYLKWAFVEAANAICITHGRAPQRHVSRLYVRIARRKGHAKAIGAVARHLAEATFWILSKHEPYREPKASAVSSTGDKRGWPLSSRRLDR

SEQ ID NO: 327895 - protein, 448 aa, unidentified
MSKSKTKPGTVKRISQLSVINPRVAGVDVSDKEMIVAFPIEDSHLEVRSFPCFTSDLESLASCLKENGIESVAMESTGVYWETLFRLLQAHGFEVCLVNAKHVKNVTGRKEDESDAEWIQKLHSCGLLHASFQPDNQTRALRSIVRHRQNLVRTATTYLNRMQKAMELMNIKLHTVISDIDGKTGLRIIQAILEGEHNPQVLAQMTDPRIKASREEIIKSLEGHWAPEHLLELRHCYELYSIHQQKIQECDREMESQLHTQIAANHDGVLPTIPSVPRKRSSKHQVSFNLTANLIELNEVDVTQVTGISEISALTIFSEVGPDMSKWKTEHHFTSWLGLAPNTKKSGGKVISSRIPKKKHYAGQAFRVAASSLYHSKTPLGDYYRRIRAQAGPNKAVVATARKLAIIVYKMVQNKSAFNPQALSDYQQKYKQKKINQLKKKIASLEAA

SEQ ID NO: 327896 - protein, 343 aa, unidentified
MKSLKQSIGIDVAKDTLVCCIGGSDQNEQFSFSKTKTFSNDIKGFAQLMQWVTPSKGNDVVFVMEATGVYYENLAYWLDSKGEKLSVLLPNKVKHYAKSLNLKTKTDGVDAQLLSRIGLERKLTLWTIPSKIMREVKFLSRAYREDKAKLVIVKNQLHAKEHAHGCPASVIKRLKKQIAFLQAQLLETEAELRVTVMSDSLLSDKVTKISTIPGISFMTIISILAETNAFALVENAKQLVSYAGLDIQQNQSGAKEGKTRISKKGNSYIRNALYMPALCASKHNPDMKVFYNRIIEKKPAKKIGITAVARKLLILTYILWKNDTEFVGTCKVSRQPIRVAYTG

SEQ ID NO: 327897 - protein, 386 aa, unidentified
MQKFDDLSRSLTTLEPGGTLIAVIEMSLSSWLVAGIVPGVERRRLKKLAIDESALLKLLHRWREEAKKAGRRIERIAVAFEAGRDGFWLARWLKARGIEAYVIHASSIAVSREHRRAKTDRLDTELLKRSFLGWLRGERDHCKMVDIPTMKDEDAKRPNRERDSLIGERSRIINRMKSALVRLGIRGFNPKLKRAAARLDDLRTPEGEPIPPNTQAELRRDMERRRLVSDHIRQIEEARLERIEQAPSSGPHAMVRLLARVMGVGIETADMLVHEVLSRNMRDRRALARYAGLTGSPDESGRKRREKGLARSGNARVRRGMIQLAWRFLLHQKDSALTKWFRSRTENARGTRKPMIVALARKLLIALWRLVREGVVPDGVVMRPAQ

SEQ ID NO: 327898 - protein, 342 aa, unidentified
MEQVSVVGLDLAKSVFQVHGVNAQGEAVLRRRLTRGQLLKLFEKLPPCLVGMEACASSHYWARELTALGHEVKLMPAQYVKPYVKRGKNDAADAEAICEAVTRPTMRFVGAKSPDQQSTMMLHRVRKILTRQRTQISNALRAHMAEFGITAAIGRGGLDRLIAVIADQDDARLPNEARACLAVLCTQLDMIKEQILDNDRCILADARRTEAGRRLMKIPGIGPLLASAIVACVPDPSTFDSGRSLSAWIGLTPRQNSSGGKERLGSITKAGNTYLRELLVVGAMAVVRRAKQSSTKWPWVAQLLERKKPKVAAVALANKNARIIWAMMATGEPYREPEFAAA

SEQ ID NO: 327899 - protein, 405 aa, unidentified
MFEIEDVGVFLGLDVGKTAHHGHGLTPAGKKVFDKPLPNSEPKLRAVFDKLTAKFGTVLVIVDQPASIGALPLTVARDAGCRVAYLPGLAMRRIADLYPGEAKTDAKDAAVIADAARTMPHTLRSLELTDEITAELTVLTGFDQDLAAEATRTSNRIRGLLTQFHPSLERVLGPRLDHQAVTWLLERHGSPAALRKAGRRRLVELIRPKAPRMAVRLIDEVFDALDEQTVVVPGTGTLDIVIPSLAASLTAVHTQRRAMEAQINALLEAHPLSPVLTSMPGVGVRTAAVLLTTVGDGTGFPTAAHLASYAGLAPTTKSSGTSIHGEHAPRGGNRQLKRAMFLSAFACMNADTASRAYYDKQRARGKTHTQALLRLARQRISVLFAMLRDGTFYEPRTPRDVELAA

SEQ ID NO: 327900 - protein, 349 aa, unidentified
MSEIATIGLDIAKNVFQLHAVDRSGKIVLRKALRRSQVQGFFSRLPPCLIGMEACATAHHWARTLMAFGHDVRLIPPAYVKPYLRRQKNDAADAAAICEAVTRPSMRFVPVKSPQQQSTLMLHRARDLLIGQRTALINALRGHFAELGIVVAQGARNTRQLLAFLHEEANLDFPTAARIALQPLATMLLGIETQIARLDKAILAAHRSDPISVRLAAIPGIGPIVASCLSASVPDASLFQGSREFAAYLGLVPRQHSTGGKARLGSISKMGNRHLRKLLVVGAHAALYSMKSGKTRTDLADWARSLLAKKPFKVVAVALANKIARIAWAVMARSTAYEPGSTGIAASAA

SEQ ID NO: 327901 - protein, 465 aa, unidentified
MTPYDRILWLPKHTELSPLIKNYVMSKIMNPNAAGIDISSKEHYVAVPEERSKESVRCFQSFTRDLHKLANWLKECKVETIAMESTGVYWYHLYTVLLDYGFEVYLVNAYHVKNVPGRKSDVSDARWLQQLHSFGLLRGCFQPDNQTRSLRNYVRQRKQLVTQMSRETQRMQKALEQMNIKLNNVIRDIQGKTGMAIISSILEGERDPQVLAQFRDPRIRASKEKLIKSLEGNWREEQIFNLKQAYDHYFFLQGQLTECDKECERLVEGMSDNDVPGKEIKSGKNQKNSPDFNVSQHLYNALGVDITQIYGMKSINALAVFSETGPDLKEKFPTEKQFLSWLNVVPDNKITGGKVIYSRVKRKKNKAGQAFRDAASSLWKAKNPLGEYLRRKKAISGGRQAVVATARKIASIYYKMVTENVEFDPQVLKFKTQEYLNKRLRYLEKSLQKTKMLLADSVFVSEVVI

SEQ ID NO: 327902 - protein, 380 aa, unidentified
MPEAVIGLDVGKSSHWACVATRDGEVLLSAPVANREGDLDSLFGRFPDALVVVDQSRNIGALALARARAAGMSAAYLPGLAAHGAARLFAGDAKTDERDAMVIAKTALGIPDALLPVGDPGPTVAAARALAAQRNFLTCENTRNKNRLRSILLESCPAFEALVDLSGGSQLRLMASLGGAWSVADAGPRRAAALTRGAARGKIEALVRSTASSTRPDASAIAAEDRAVRLLARRISENSAEIEAITAEISALLEGDDTYRCLLTVPGIGPKTASELAISIDIEDFPSHDRLASYCGLAPRNRQSGTSISSVTASRQGNKRLKNLLIFSCNCLTRTEGRWGDYYTRCRERGMSHGKALKALARKRLKVIYAVMRDRVPYAA

SEQ ID NO: 327903 - protein, 350 aa, unidentified
MSQTLNTAIAVTGIDIGKNSFHIVGLDARGSIVLRQRWSRGQVEARFANMPPCLIGMEACVGAHHLSRKLNSLGHDARLMPAKYVRPYSKGQKNDFRDAEAIAEAVQRPTMKWVATKTADQLDLQALHRVRERLVSQRTGITNQIRAFLLERGIAVRQGQRFLRAELPRILATPPDVLSPRMVRVIEGLAGDWRRLDERIEGLSGEIEAIARQEPGCERLMSVPGIGPIISSAMVAAIGTGDAFSKGRDFAAWLGLVPKQMSTGDRTILGKISKRGNRYLRVLFVQAAWVVLIKPMSWERHGLKPWIEAAKKRLHRNVLAIALANKLARIAWSVLRHDKAFDTHLETAAI

SEQ ID NO: 327904 - protein, 362 aa, unidentified
MTSMPQDHLDRYCIIGIDTHKDVHVAVALDQLGRRLEELHIPTSTVGYTQLENWAIALGSVKAFAIEGTGSYGAGLTRFLSDRGHRVVEINRPDRATRHRLGKSDPIDAEMAARSVLCGVASGTPKDSRGNVEMIRMLKMAKDSGVKARTQSINQIKAILITAPAELRESLAGLPVGVLLDRCAAFRPGKLTSTTAVAKHTLRLLARRNFGLRVEIAELGQQIRTLADVAAPQLIKVFGIGPDNAARFLMTAGENPDRLRSEAAFAALCGSNPIPASSGKTNRHRLNRGGDRQANAALHRVVVIRLRWHEPTRAYMSRRLAEGKTKAEVIRCLKRYVAREIYNVLCPRNTDANTQTTLVQAA

SEQ ID NO: 327905 - protein, 420 aa, unidentified
MYYCGIDIAKREHEACVLNDRGQEVFHQRFKNRRLDANRFVRQLQEKLGAKPEEVTVVMEATGHYWLNLYGFLTQRGFQVRVLNPIQSDAARNLYLRKTKTDARDAFILADLLRMDRVSDSRQPNDGLLRLQALERFRYELVSRIGSLKQRVLGILDRIFPEYETLFSEPFVRSSRELLMNYPTPEELAAADLSELAALLSKASRGRLGEEKALEVQNLARNSFGITLGLDSFALELKLLLAQIEFLEGQVETVEAAIDQALTEVCAQDKVEEKKTETTAEKLPRHVLETVPGVGPVVLATFLGEVPDISTFTNPRRFVAFAGIDASVKESGEFQGTRMHISKRGSPYLRRALWFCAQAAKRCDERFNAYYQRKLQEGKHPKVATVALMRKLAVVIYYIWRSGKPYDPEYVWKPTPSLSN

SEQ ID NO: 327906 - protein, 579 aa, unidentified
MSTMSLSPTAAIGVGFDTARYGHHVTFLRDDLQPACPAFEFVESRQGYDRLLLQFRQLHERLPTVHFHMRLDAAGQYACNLEAFLRGLPFSKTITVGEPARNQHYRKALFPKRKADPVESLCAARFALLEKPAASHATTADHHALREIVQRLEGQCRQSTRLTNQLHNLLARVFPELALLVADVQARWFLQLLDKYPTPLTLSRARQTTLAALPFLTEDKAQKLHAAAAQSIASFTGDTAAALVRALVAQLQDSLTAENQLKELMAAVYQKLPEPNHLDSIPGIGTATAAVLTAKMVDCKRFPTPAHLVSYFGIFPQQDASGMDKDGQAKPGRHSHMSRQGNDLVRKYLWNAAKSAIVHNPAVRPLYKRLRCRGTRGDVALGHCMRKLLHLALAVWKTGKPFDPEHYPWDTAKPAKVPEKTAGHNQDASPERPVVTAADSTVTEHATPDKADLVSASPPVADTREPSAGGIDYAALRQQVSMEQVLAHLGCLSKLKGTGVQRRGPCPLHDSQDPRKRSFSVNFDKKVFQCFHPPCGAHGNVLDLWAAVHRLPLYEAAQQLAQTFHLQLTSPSGTAKRNP

SEQ ID NO: 327907 - protein, 337 aa, unidentified
MQPTVPLFVGLDYSQHKVQVCALDPQGKVLGNRAVPDSADAIDQAVRRLGAVQGAALEACTGAADLAEELADRFGWPMHLGHPGFVSRMKQSPDKSDFSDARVLADLERVGYLPRVWIAPKQLRELRTRVRDRQQLVAQRRNLKLAITALLREHRQRCEHQRWTAAWRAWVAQQAQLPEQARWVMTQRLRRLEWVVAEVHAVERRLEEVTKDDGTVRRLRAIKGLGPVTAWTVRAEVGRFDRFRTGKQRARFCGLSPCNRSSGDKAADAGLIRAADPELRRVFVEAAWVLIRCQPRWRQRAQRLRAQGKPRTVVTAAVANRFVRWLDHEGVRQQAVA

SEQ ID NO: 327908 - protein, 328 aa, unidentified
MTIYAGLDIHKKKCHGVIMEEDGEILEDEEFENSLLGVKEFFRGYKHAQVVIEASYSWRPTYERLEEMGLEVKLAHPHKVRAIAEAKIKTDSIDARTLAHLLRADLIPESYIPRKEIRELRDKTRLRAKLGNERTRMKCKIRAELEKNRITTLKNPFTKSGKEKLREIEIDSVDHCLAILDIIEERIGILENEFEEISRDNEEAKLLMTIPGISHFSALLILSEIGDIDRFQSPEKLCSYAGVVPTVRQSGDSIRIGEIKKDSDKFLRWILVECVWIHVGNADSQLSKYYRKKKREKDSKRAAIATAKKMLTAIYFMLKREEEYHLEG

SEQ ID NO: 327909 - protein, 348 aa, unidentified
MRFYTKTHKHYCGIDLHAKKMFLCILDADGVVLLHRNIATSPEDFLRVITPFREDLVVGVECMFAWYWLSDLCCKEGIEFVLGHALYMKAVHGGKVKNDKIDSHKIAGLLRGGMFPMAYVYPPEMRATRDLLRRRNFLVRRRADLFAHVHNMAIQYNLPEIGARLAIESNRIGVEEHFPDPEVRKIVQFDLAMIDAYDDVIGVLEHQLETSARRHDWHTLMLLRSIHGIGRILALVLLYEIHDINRFESVQDFASYCRMVKCPHESAGKKKGTGGAKIGNAHLKWAFSEAAVSFLRHNAPGKKLVAKLAKKHGKGKALSILAHKLARAIYYMLKNNAPFNMEKFIATA

SEQ ID NO: 327910 - protein, 365 aa, unidentified
MESVAYVGMDVDKEKIAVAVLQDYEDQPRLQRIIRNRADAIEKFFGEVTGRYDQVLACYEAGACGFELYRRVTEAGAVCVVAAPASMPKKANDRVKTDRRDARKLASAFRNGDLSPVYVPSRRDESGRDLLRLYDDVKGDLKRAKQRLLHFLLRREIRYEDGQNWTGKHWRWLRSLGFDCPVARETFDEYLAEVARLQERRTRIGERVEALGEDDRYSEAVKRLRAFKGIGTLTAISFVLEIGDFRRFARAEQFMAFLGLVPSEHSSGEKRRVGNITKAGNSHLRKLLVEAAWVSRRYGTPSKRLIRDRAEVPAQIVGYAERAGKRLQKKYWRLVHAGRPPQVAATAVARELAGFIWGAMVGATS

SEQ ID NO: 327911 - protein, 427 aa, unidentified
MNTDEATRYADFCQFKTEIRLSKDYLIVGIDVAKDKHHAFFGTATGRTLLRRLIFDNNRNGFEQLITRASQLGLEHGLSRIVYGLEPTGNYHKPLAGWLIGNEQMLVLVSNKAIADNRQTMDGRWDKNDTKDSANVADLMGQGKCQFFEIPDLALVQVRNLLSLRRRLKRDEHALRMKIRNGLVTKYFPELDRHWGSSLTENLAIVRWCLDPRKISSMGFEDFVRQVTRTDRGLRQLKRLKRIYEAAGLSIGCPVDEGAEFEARLLVDRLEVIREQMDSTETEIKQICLGFASYRRLLTIPGFGPYVASIVLARIGDPHRFKGRKQVIRLAGYDLNAKRSGKGSKDAVPVISKRGNSELRYALYQAALIATYHNDRFRALFTRYLKGREKERGIKTKMRVKLAVKMLVIAWTMMKTDSEFNPSLIEV

SEQ ID NO: 327912 - protein, 423 aa, unidentified
MMKLKYSICCGLDVHKNVIVATIVTTNKDGISEYLQKSFSTINSDIQRFHNWLIENNCYHVCMESTGKYWIPIFNYLENDIDICLTHPKYVKAIKGKKTDKKDSKWIADLYKFDLVRCSFIPPKDFRQLRELARYRFKLVCMKSSEKNRIQNCMTISNVGIASVLSDPFGKTATEIISYLLEHTADSMDEKAVRKLIKKGAKSKSDEIIEAIKGYTIETDQAKKLELARGHLEYLDDMITQTEVELYVRIKPYYEFVEFVSTMPGMTELSSTIVLAETGVDMDIFDDAKHLCSWCGLSPANNESAGKKKSVRIAKAGDYLKPMMVQCALAAIKSKKQPYFAIKYGRIKKRRGHKKAIIAIARMMMVCIYHMVSEKKPFTPTDYEELMNPQNHVERVVLNENNVFAYLESLGYDSSKLVKRNDN

SEQ ID NO: 327913 - protein, 357 aa, unidentified
MSKIARIGIDTSKSVFQLHGVDEAEKVVLRRKVRRAQFLAFFATQEATQVGLEACGASHHWARELGKLGHEVVLIPPQYVKAYVARGKNDAKDAEAICEAMSRPRVRKRSVAVKSAEQSAAQMVLGIRENLISRRTQLSNTIRGHAAEFGVVVAKGLDKIEGLLLQLAEDPAIPALAKEMFAILGQEFAKLEPRLATVERRLKAWHRANELSQRLAEVPTIGPIGACQLSIKITNPKAFGNGRTCAAWVGLTPKDHSTAGKQKLGGITRAGDESLRATLVAGATAYIQQVKRGRTKPSAWLADLLRRKPAKLVAVALANKTVRIAWRLMVSGQRYDPNHVPTARRPATPAKGEPIAA

SEQ ID NO: 327914 - protein, 330 aa, unidentified
MKKWNVILGVDVSKLTLDISCAEQGLHIKIDNCSKGFDVFRKWGKTNNIDLKEALMVMEYTGGYEYRFIQFCTSKSISFCRLPGLEIKQSMGMVRGKNDKADSFRIGRYGEEKRDRLTASKPLDNNILNLKQLLSFRKRLVREKAGMQSTVKERKHMYELKKTDTITRIAQAKIKADEKYISQVEQEIRELIKINEGMFQNYRIITSIKGIGEVNGWMTIAYTENFTSFTDARTYGVYVGVIPFGHTSGTSIKGRKRVSHIAHKELKSELNQAAKAAIAHDPQMHVYAERKLKNKDYGLVLNNVKFKLILRMFSLIKRQEMYVENYRRSA

SEQ ID NO: 327915 - protein, 402 aa, unidentified
MPTTGRDNRMVFLVSGHSVVVNTKVVVGVDAHKLSHTLVAVDQAGLKLAQKTIATTSAAHADAVRWATAQFGSGILWAVEDCRTMTARLEDDLLAAGQRVVRVPPHLMSRTRSSARERGKSDPIDALAVARTALREPNLPVAVHDPVSMKLRLLVDRRDDLVGQNTATINRLMGRIHLLDPGHPTPHNWKVQKAHRELRDWLITQDGLVAEFARDELDDIIRLNTVILDLRRRIIRTVRPVAPDLIALQGCAELTAARIVAEVANIDRFRSEAAFARYAGLAPVPHTSGSTAVRLRPTRQGNRRLNAAIHHIALIQTIHDGPGRTYFQRRIAEGDSRHRALRCLKRRITRVVYNRLKAASRPATNGDACRSDRQLPKVFLLPLADLQPGRERRAASRARTSA

SEQ ID NO: 327916 - protein, 412 aa, unidentified
MQDILTCAMGLDIHRDVIVACLAKGELGTDPEIEIRSFSTLIPEMRKLRDWVLEAECRYVAMESTGIYWQPIYEMLEPCFDGQINILVVNARHMKNVPGRKTDMRDAQWIATLLRAGLLKGSFIPDKTFRELRHLTRYRKSIVRDITAQKNRIDKFLQSSGFRFTAFLSDAFGASGRNIIRHLMEYGNISREALDRCLKTQTRKRIDEILIALNGSLSEHQRGFLRMIFGHLEALEQHRHTVEDAITKEITKHEEALSLLCSIPGIDVTAAAAIIAEIGTDMSAFPDSQHICSWAGLSPGNNESAGKRKSAHINKGNPYLKSMLYEVGWVISGKRSLYLSGWYWRIKQRKGAKRATIALARKLLALIYTMLKTGSPYNEDCFEIRRKQSERKRASRMVNELQKLGYFVVAPS

SEQ ID NO: 327917 - protein, 360 aa, unidentified
MAIVAQTHPFVIGVDTHARNHAVSILACPHGEILDEAEFPATSAGLARAVSWAGRRTGGDLGALWVIEGTGTYGARLARAAADAAYAVVEAPRMNARANRGIGKSDPLDARRIAGAALPLHETQLRHPRADDGIRAAVRVLLASRDHMSTERTATINALTALLRVSDLGVDARRPLTAGQITTIAAWRSRDEALATATARWETIRLAKRVAALDNDLKEITKRITDLVHQSPARTLLEQPGIGPVTAAVALTTWSHLGRIRSEAAFASLAGVNPIPASSGNTVRHRINRGGDRRLNRALHMAVVTRMRMDPATRAYVERRTAEGRTLREIRRCLKRYLARQIYRHLNSAAATEERQPATT

SEQ ID NO: 327918 - protein, 348 aa, unidentified
METAYDGRQVVGMDLHRRRSVLVRMTEDGRRLGTARITNSPAELRAAIAEAGAAPRVVLEATYGWYWAADVLAAAGSEVHLAHPLGVKAFSYRRVKNDERDAADLADLLRMGRLPEAWIAPREIRELRELTRYRHKLVGLRTSCKEQVHAVLAKLGIPVTASDIFGAGGELWLDGLALPQPYKGKVASLRMLAGELNREIALLDTVIASLLERHDGYHAIQALPGIGPVLGAVIVAEIGDVRRFATAGRLCSWAGLTPRHRESDVKVARGHITKQGSPILRWAMVEAIQRLPADTPIRARRDAIIARRGKEARNIAKTAAARQLLACVFYALRDGHVRSLDRHLRQAA

SEQ ID NO: 327919 - protein, 345 aa, unidentified
MTESKIVAFDLAKRIVQACVIDGTGAVIAEERMGPERVLSFTARHPHATVALEACGGAHHWGRALERQGHRVLLLPPQRVKSYGDPACKDDRRDARAIAEAASRSYLRPVPVKSEGQQALQSLDRVAALLARQRTQTVNALHGHLSEFGITLPKGPHLLKRRFTELEASPRWRELPEELRAAMGELFAAFLALEDRLSAIKARLAKGAKQSKLGRLLLEIPGIGPMTAVSLEAAIGDDPGRFASGRQFAAWLGLTPRVSASGERRQLARITKRGSARLRSLLVVCAQAMLRQYRQGRHGDPLACWARHLLARKRWNVAVVALANKLARIVWKVASSGAAYQARTA

SEQ ID NO: 327920 - protein, 350 aa, unidentified
MLIIGCDYHPSFQQIAFVDTETGELGERRLVHREQAEQFYSKLKEQNVKVRVGMEASGHARWFERLLHDLQFELWIGNAAEIRTKRVRKQKTDRQDAQLLLQLMMEDRFPRIWVVDAENRDLRQLLWHRHRLVQMRTRVMNQLHVVALNEGLQRKKALWRPAGRNELEALVLAPWASRRRQDLLELLDQLAPKIAELTRALEDEVEKRPVTRRLMTHPGVGPLTALAFELVIGTPERFHCGKQIASYVGLVPEEKSSGNRRRLGHISKQGNALLRYLLVEAAQVTVRSQAQWRSRFFHLAMRRGRKIAKVAMARKLAVHLYWMWRQGWDYGQWQKLGSHAGEPGNLYGGK

SEQ ID NO: 327921 - protein, 343 aa, unidentified
MEHFAGLDVSVNETSVCIVDETGKIVREVKVASEPDALLTVLKNRAYHFKRIGLEAGPLSQWLYSALAEAELPVVCVETRHMQAVLKAQINKTDRNDARGIAQMMRVGLYRPVHVKTLRSQKLRMLLTHRKLMLSKAIAIENDLRGTLRNFGLKVGMVGTVKFEARIKELIENLPDLAVLVEPLLVVRRVLREQIGILHRRLLVIVRDDAVCRRLMTVPGVGPVVALTYRATVDVPARFRNSKAVGAVFGLTPSKYQSGEINRTGAISKCGDEMMRVMLYEAAQVMLTRTNKWSWLKAWAMKIARHRGMRKAIVALARRLAVILHRIWVDGTEFRWTREVAAA

SEQ ID NO: 327922 - protein, 334 aa, unidentified
MKKDHYIGVDISKKTIDVAIFVKDTHRSTSLPHESFQNSEEGFKDMKRWLRKQNVALSKSLVCMEATGTYTYELCLFLERQGVSYSVQSPLHLKRSFGLTHGKNDKVDAARIAYYAYLHRDDIKLSKLAAESIRRLKSLVAERKSLVVEIARCKTQLKEAGEHAPSLGTIKRTESLQKFLEEQVGAIEEEMDQTIETDESMNTNYHLLLSVDGIGTVNAINTIIATHNFEMFDNARQYASYIGVAPFEHTSGTSVRGRTHVEPGAKMLKADLTGAVRTCINHDKEIKHYYERKMAEGKAFGVVANAIKFKLLLRMFAVIKRQTPFVRKPDFIFN

SEQ ID NO: 327923 - protein, 339 aa, unidentified
MAILYVGIDLAKNVFAVHGVDEHGKAMLVRPSVARAKLHELIATLPACTIGMEACSGAHHWARLFAAHGHVLRLMAPKFVAPYRMSGKRGKNDAADAMAICEAVQRPNMRFVPVKSQDEQARLCVHRVRQGLVEQRTATINRIRGLLSEFGIVLPQRAATVRREATVHLEDLPGWANTAIGDSLSDVHRLDERIAQYDHHVLQMARDDQRSRALMQLSGIGNTTASALVSTIGNAHDFKNGRQLAAWLGLVPGQYSSGGKTRLGSITKAGDRYLRTLLVLGARAVLAAARTKVDRLSRWALALEERRGYWKAVVAIAAKNARMAWAVLAKGENFKLLEA

SEQ ID NO: 327924 - protein, 374 aa, unidentified
MQITTIGIDLAKNVFQVHGANEHGKPVLRKQLKRDQVVVFFANLSPCLIGMEACGGAHHWARKLEALGHTVKLIAPQYVKPYVKSNKNDVADAEAICEAVGRPTMRFVPIKNIEQQSVLALHRARQGFVKARTAQANQIRGLLAEFGLVVPQGIAHIASRVPDLIEDATQQLTGDFRRLIDRLLDHLKVLDTQVDEIEVQIKAWHRNSEVSKRLEKVPGIGPLTATALAATVGDAKNFDTGRQMAAWLGLVPRQSSSGGKTNLLGMSKRGDAYLRTLLIHGARSVIYRAGQRADAQSWLFKLINRRNINVAAVALANKTARTVWALLAHGREFEASWTKATGLAWPFLISSSNFRRACTRQPASMRFPSLKTGS

SEQ ID NO: 327925 - protein, 386 aa, unidentified
MPRLNDLSRSLVTLEQDATLIAVIEMSLTSWLVAGIVPGVERQPLKKLGVDERALLKLLHRWREEAEKAGHRIKRIAVAFEAGRDGFWLARWLRAYGIEARVIHASSVAVSREHRRAKTDRLDTELLKRAFLGWLRGERDHCRMVAIPTIEEEDAKRPNRERESLVGEQSRIVNRMKAALIRLGIRGFNPKLKKAAERLDGLRTPEGDPIPPNTLAELRRDMVRRRLVSDQIRQIENARLERLEHACGDGPHAMVRLLARVIGVGTETADMLVQEVLSRNMRDRRAVARYAGLTGSPDESGKKRHEKGLARSGNARVRRGMIQLAWRFLMFQKDSALAQWFRARTENARGTRKTMIVALARKLLIALWWLVREGVVPDGVVLRPAQ

SEQ ID NO: 327926 - protein, 341 aa, unidentified
MQVATVGIDIAKHVFQLHGVSATGEVLFRKRLRRVDLLPFLQQLEPCLIGMEACGTSHHWARELSRLGHTVKLMPPSYVKAYVRRNKNDAADAEAICEAVTRPAMRFVPIKNMEQQAVLMMHRIRAVLVRQRTMMANALRGHMAEFGIIAPQGLKAVRDLGRLIEDPSLAIPDLARATLKALVAQLGSVEEGIRPIEARITAWHRADETSQRLASIPGVGPITASAIAATVPDPSQFRSGREFAAWLGIVPRQRASGMKNVLGGISKRGDRYIRRLLISGAVAILRYTRSKPTPERAWMKALLQRRPPKVAAVALANKTARIVWALMKRKEFYQAPSAVSV

SEQ ID NO: 327927 - protein, 331 aa, unidentified
MNYIGMDVHKRFTYAVVKDEQGNDLAKERFDNNKANFESFLKPFAPEKTRVVMESTGVWEYVYGILEQIGYSAKLANPAKTKAIAYAKVKTDAVDASTLADLLRANLVAESYVPTKEIRNLREIVRLRKMALKQSNQSINRLHALLTRKGIFLPKKSLCKTSINFLLKEIEKQPAIKGYLEVIDFHKKKLAEINAQIIELAEKDAQAQLLMTIPGISGIRAITLIAEIGDISRFPAADKLCSYAGLVSSVHQSGSTLYFGRLMQQASKALKHVMIQTAWTNIRLLESNPIKEHYKKLEQKKGKQKAICAATRKLCTVVYAVLRNKEKCRYS

SEQ ID NO: 327928 - protein, 302 aa, unidentified
MSYFLGFDAAKAKLDWSLINEQGIEQSYDKVANDELAIASLLLTISSNYPDIDITCVVESTGIYHYALTETSYALDIPCLVCNPIITKQQVKATIRGKKTDKTDATMIARLGLRGEGRLYTPEPYRATKHLARSVQKLSIFGDSFKRYDNHITNLLEDKLSLEAQELMKGIQTAIADARAQLTQDLASSAKGDDFRLLQTIKGVGPYIAASLIGEIQDIHNFSSSKALIAFAGLDPRIRQSGKVLNSTGRLTKRGSTYLRRSIFIAASVARQHDPQFRALYDRSEPRVKAILWLPVWSLESY

SEQ ID NO: 327929 - protein, 427 aa, unidentified
MRVLYDRVAAMDVHKDMVKVAVRVPGSKRGTRKTDVLEYRTFYGVLQAMARELRRRGVTHVVMEASGVYTEPVYYALTELDFTEVLVINPAHAKALKGHKTDAKDAVRLLDLYECGALLRGSYIPAPDLKEVRDLARYRMKTVQARASEIQRLQKTLETAGIKLDSVVSDITGMSSTAMIEALIDGERRGGVLADLALGRMRTAGKLADLSMALTGRFTDHHALMCRLHRDRISMFDDAIGELDAKIAPLVARYAREADLLKTLPGFGEVVAAGWLGAIGPAPHRHFGTAERLASWVTLCPGNYISARKSRNGRTGDGGSHIKPLLVQAAWAAIRTPGRLQAKFHRLVRKFGGPKNKGARKRAIIAIAHALLKIAYAVLKTGKPYQEPGADFYTRRESAQAREEYLLRQLQKLNPGCVITITPAEAA

SEQ ID NO: 327930 - protein, 370 aa, unidentified
MKKNIVYVGLDVHKNTIDAAIADDRSVSQVRSYGKIDNTVEALNKLLKKLQSKGSELSVVYEAGPCGYQIHRQLTSKAIRCSVVAPSLIPKRSGVRIKTDKRDAINLVRLFRAGELTCIYIPTREDEAMRDLIRCRDDIKQLQRRVRQRLLAFLLRHGFRYGGKKNWTKAHMNWLAKVKMDHRAQQIVLQEYIDAVNECTQRVQRITDQIQSLLPQWSRFAFVRAYQALRGVSLIVATTVVAEIGDMNRFKNPKELMAYLGLVPSEHSSGDKVHRGSITRTGNGHVRRVLIEAAWTYRMRARKSVTILKRQQDLPKTICDISWKAQLRLCKRYRHLYAKGKSKQAAVTAIARELSAFIWAIDREVQQTIY

SEQ ID NO: 327931 - protein, 331 aa, unidentified
MAEVLHTAAVLDAHEQLVSEIRIRADRSQRDRLLAFAASFEPRCWAIEGATGTGALLAQQLVAVGETVLDVPPKLSARVRLLDNERSDKTDAHDARSAAVVALRHSKLRVVTIEDHSAVLRLLAKRHHDLVAHRTRAICRLHTVLCQLIAGGLPKHLSASRAATELRRIRPGDPIGLERRRLANELLHEVHRADTDLIELKTRIAAAVNHAATTVTDVFGVGPIMAAYLIGYSGDVRRFPTAGHYARYNATAPIEASSGPNPRHRLNPRGNRQLNHALHIAAVTQVRNDTPGRAYYLRKQAEGKTRKEAMRALKRRISDAVYHQLRADATR

SEQ ID NO: 327932 - protein, 351 aa, unidentified
MTQQSATEAIATIGIDLGKTTFHLIGMNARGRIVLRRKVSRGQLLSCLANLPACVIGLEACAGAHHVGRQLAALGHDVRLLPAQYVKPFLKGHKNDYRDAEAIAEAAQRPTMRPVPLKSAEQLDLQALHRVRSRRIGQRTAIINQIRGFLLECGIAVRQSPAGLREALPTLLARRTDVLSPRMIHLIEDLAEDWRQLDGRIAAISRDIAALAGQEAGCRRLMTIPGVGVITASAMVAAVGTGAAFARGRDFAAWLGLVPKQISTGDRTILGGLSKRGNRYLRTLFVSGAQALLRYQGRWQSHGFGRWLQAAEVRLHRNVLAAALANKLARIAWSVLFHGCGYEMEFATHRA

SEQ ID NO: 327933 - protein, 334 aa, unidentified
MEHYIGIDAHCEYCDVVVVNEAGRLVSHRSVRTSAKNLIEAVCMVKDKRIVVIEESTLAGWLQRTLAPYAEHVAIVDPRRNALISRSEDKSDRNDAHRLALLYRGGYTHVIHHTLDAGFLELKEMVLHYHDTVDQVTRFKNKLKAVYRKHGLIRMSEEVYDPVGGLECIKRLPFPSSRHRARSILSMITQTEKMKLRAHNKIRRMSARFPAIEMFVAIPGVGLIVAATVVAIVETPHRFPTKENLWKYATLAVAKPGSAGKTQGRYASREGNKVLKKVLMLAAHNAAKGDHRFGRAFRRHREKSLSNAQRTVARMILSTMYGMWKTGECYRETA

SEQ ID NO: 327934 - protein, 414 aa, unidentified
MDIVHDRCCGLDIHKKTVVACLIAPGPDGKPKKEIRSFGTMTGDLLGLADWLQRAGCTHVAMESTGVYWKPIYNVLEDRFNLLLANTKHLKMVPGRKTDVKDCAWIAELLRVGLLQPSFVPERAERELRELTRYRSSLVRERTAEINRLQKTLEGANIKLASVASEVMGKSGRAMLEALVAGTTDPTVLADLALGQLRRKIPELQRALVGRFGAHQCFLVVEQLAHIDELDERIERVSQEIRERMRPFETEIALLDTIPGVNRWTAEVLLAEIGFDLSRFPSAGHLVSWAGLCPGNRESAGKRKSGRTRKGSPWLRVALTESAHATGRGKTYLAAQLHRLIPRIGLKKAAIAVGHSILVIVYHVLTRHQPFHDLGALYFDHRHRASLEQRLIHRLEALGNTVTIERTQAPASAA

SEQ ID NO: 327935 - protein, 346 aa, unidentified
MKITTIGIDLAKIVFQIHGVDERGKVGVRKQLKRAEMSVYFSNLEPCLIGMEACGSAHYWARKFEGYGHTVKLMAPQFVKPYVKTNKNDMADAEAICEAVARPNMRFVAIKTVEQQAILSVHRARQGFVKARTAQGNQIRGLLSEFGIIIPQGIRSITKQIPEILEDGENGLPGTMRNLLERLTDNLKEMDRQVSELEAKIQSWHRENAASRKLAEIPGLGPITASAIVATVGDAREFKNGRQLAAWMGLVPKQHSSGGKQNLLGISKRGDTYLRTLMIHGARAVIRFVESKAEPESWLRKLMARRNKNVAAVALANKNARIVWALLANDRMFRPDYTPAAVVAGM

SEQ ID NO: 327936 - protein, 316 aa, unidentified
MTPQECYVGIDVSKKHLDIAMRPGDEHWTVANDEDGIDELVTRLRSIGPRLVVLEATGGIELAATGRLAGAGLLVAVVNPRQVRDFARAIGKLAKTDRLDAQVIARFAEVVQPTPRPMRDAEAQALSALLSRRRQLVGMLTQEKNRLHAAQPSVQHDIRGHIVYMEKRLAKLDDDLGSTLRKSPMWRERDDLLRGVPGVGQVLSVTLLAEVPELGKLNRKQIAALVGVAPLNRDSGLLRGRRTVWGGRARVRATLYMATLTATRYNPVIRVFYKRLCASGKAKKLALTACMRKLLTILNSMFRHHTAWQPDYALNA

SEQ ID NO: 327937 - protein, 345 aa, unidentified
MESMYYIGLDVHKKTISYCIKDASGQVLQEGKIGATRGELDGWMKTLPQPWSVAMEATIFTGWIYDHLLPHAAQVKVAHPLMLRAIAAAKKKNDRIDAGKIADGLRCDFLPECHMAPTEIRDRRRILRYRHLLVRQMVQLKNRVSGLLMETGVSYNKQKLHKVGYFRELLSSNQEIHPNIRPLLKLSRDAIVRLQKTEYALVSSLQRDPLLADRIKRLRTVPGVGPITALTWALEMGEVSRFPSIKQAISYCGLCGDEKSSADKVIRTPLSKQRNKHIQRVLVEAAKLAPRENHELALVYETEKQKGNANRATLAVARKMVAYLLAVDRGRRNFVPTEDHRGVAA

SEQ ID NO: 327938 - protein, 397 aa, unidentified
MKTLFIGVDVSKDDFKVAVKDDRNNLVMSVKTYKHNRLGMESLDRDIGALKEQFRCGAIYGMEATGIYHLSIYQHLLDRKEHIKVFNGLELKRFKGRIRKTKTDNLDAQSIAEALLLVREPSYHPTDKTELIHIRELCRLRERLVKKATQCKNQTIRNMDILCRGYSSLFRDILAPSSIAIMKATVRMTKLFDIDKETLEELLNKFMSKSTARTKAAKLYDLVQKVVIPEHMKDICVLELHMLIQQFELLKQQQKRVEYRIENQIKKIDTQLQTIPGIGVLTAGIILGELGDLNRFDSPNQLTAYAGLDPSIMESGRSRRTGHISKRGSPMLRKALYDAALSASRVNPVCKQFYQRLKAKDKHHKICMVAIARKLLHIAYSVEKKKRDFYVPSYINE

SEQ ID NO: 327939 - protein, 406 aa, unidentified
MKQIVSVGIDVSKGKSTVCAMIHPYTIIKESFEVLHTVEEMSMLADYIGSLDGEIRIVMESTGHYHLPVAQFLYQKGFFVCVENAYIIRQFSRIMLHGAKTDPLDAKKLAKYGLAYWSELKPYKFHPSCYTELSLLSKQYQTYIKLLIAAKQNVIHLMDEMLPGFKEALDTASSVQFSKVKYVDFAKEFYHVDMIKSMGKEIFRENYKQWCKEKGYRFQSEKADELFHLAEDGIPTLPTEFPSTRLCMEVATEQVSQLGYALEQILSQMQNLAKTLPEYQTIRQMGGMGEKLCVRFIADIGDVRRFHNGKALVAYAGIDAPPYQSGQYTGTKRRISKRGNSALRKTGYEVMKSLKSHPPKTDTRVYDFIIKKENEGKSKKQAKIAGLNKFLQIYYARVMEIYKNIA

SEQ ID NO: 327940 - protein, 338 aa, unidentified
MALYAAIDLHSNNSVLCVLDEGDRTVFSKRLPNDLAAIERALRSCAGAVVGVAVESTYNWYWLVDGLHDAGFAVHLVNTCAVKQYEGLKRSGDFEDARHLAHLLRLGILPEGYIYPRQERALRDLLRKRSQLVRQRTSQVLSMQNLLARNLGAQASGNEIKRLDDADIDALPLLPEQALALKANRAVMDCLDAQVRHLESAILAQARPRADYQALNTVPGIGKTLAMTIALESGDMARFADAGHFASYARTVDSRRESNGKKKGSGNAKCGNRHLAWAFIEAAHFAVRYDQTIRRWFQKKCAKTLQVVAIKAVAHKLARASFHVMKSGEPFDAARAFG

SEQ ID NO: 327941 - protein, 381 aa, unidentified
MKKNSIARLQVTKSQIRRMAAKQRLTVGLDLGDRSSRYCILDEAGEKASEDQLPTSKAGLDMLFAKMAPCRIALEVGTHSPWVSRHLAAMGHEVIVANPRKVRLITQSVKKNDRMDAEQLARLARVDPKLLAPIRHRGPEAQADLAVIRGRGELVEGRTKLINAAGGLTKPMGERLKSCDADTVKESMADGLSEATQKVIRPLLKSVEVITQQIKVYDEQIQEIEKRYPETKLLKQVHGVGPLVSLAFILTLEDAERFEHSRDVGPYLGLTRKQRESGESAPELGISKAGDELVRRLLVQAAHCILRQGAPDSDLKAWGLTKVGAGAGKKGSKKRKKKAAVAVARKLAVLLHHLWVTGEVYDPQYNRKAAEASKGSKKAAA

SEQ ID NO: 327942 - protein, 428 aa, unidentified
MTDCSKVTTYSSWLAIDIAKDFNVVMLETIDGNKKRFRMANSAKDHDRLIELIHQLPQPCRIGFEATGNYHRTLAYRLVTEGFQVNLISSLASARYREVIYNSWDKNDPKDAGILLELLKQGVTQIYIDPVQSGFHDVQELSKTFANITLSRTRLQHSILNHYIPLYFPEMGAWWNSTRSAWWVNYLLRFPTPAAVTCLDLQEFIKIATPLVGRKVNKAAKLLELYTIAQQSMGLPLPEASPACHTFRLQLQRYQELNRIRQELESQAQSTLERNPDYIVLKTIPGIGPIVALTILAEGGDIRRFAHHRQFLKYCGLDLAKSQSGTFRSQEKISKRGNARLRLALYIASTVAIRQRENSFRDKFDRYTKLTPADADCKRKAMTAVMAKMARVIHGLIKSNQPYQSYFEVSPSGSIPLLGPLGPQGPRR

SEQ ID NO: 327943 - protein, 371 aa, unidentified
MKTKTTPPVVSNSLTPALVVCGGFTLGLDLGDRSHHVCVLDATGQIIREGALTNTRPALAQLLVEFPHATVAIEAGMHSPWISRYLTELGATVLVANPRKLHAISRSERKCDRRDAQMLARLARVDPALLHPIQHGSAQAQHDLLGLKLRDALVRTRVNLINAVRFTLKSLGHSVRNPSSESFHKMVLADVPADCLPVVQPLLTVLAQVTEQIKGMERDLIARSKHVYPATQRLQQIAGVGPLTALCFVLKIGDPQRFSRGRDVGAYLGLCPRRDQSGGTDKQLRISKCGDGLMRRLLVSAAHYVLGPFGPACALREHGQRLTGTGSAREKKRAVIAVARKLAVLLLSLWKHGTDYEPRVTPSPALVMIPA

SEQ ID NO: 327944 - protein, 363 aa, unidentified
MIVIGTDTHKQTHTAAAVFAGSGQLAGELTAPAREPGFRELLAWGRSHDEERIWAIEDCRHVSGSFERFLVAAGERVVRVAPKLMGESRRAERSAGKSDPIDALAVARAALREGPETLPGAHLDEDALQVKLLLDHREDLVKARSEDQQRLRWHLHDLWPELEIPAAALNGIRRLDRLARKLSRAEQCTRVQIARELVAEIRRRTRRVNELEREIRALVKELAPQLLGLEGCAALTAAKLIAETAGAGRLSSDAKFARLAGVAPIPASSGKRVRHRLDRGGNRQLNCALHRIAVTQGRVHAPAREFLARKQAEGKSKMEALRCLKRHLARRVWRLLIDSEIDRSMTTVDTQRGMLSPQIAVAA

SEQ ID NO: 327945 - protein, 342 aa, unidentified
MNITTIGLDLAKNVFAIHGIDETGRVVVKRELRRSQVLPFFAKQAPCLVGVEASAGAHYWGRELIKLGHRVRLMPAAYVKAYVKRGKTDAADAEAICEAVTRPTMRFVPVKSKEQQGVLCLHRARDVLVRQRTQTINVLRSLCAEFGVIAAKGKTPLAQLEALIANQASDKLPEEAYLALMPLNDQIQSLSHHIVLLEREIVSRARTNEANARLRTIPGVGPITASALLATLGDPMRFATARDLAAWIGLTPKAHASGGKERRCPISKQGDPYLRRLLVQGASAVIRTARNPRSNVPAWLKTLLARRPPKVALLALANKMARIVWAILVKGGVYRRSETIAA

SEQ ID NO: 327946 - protein, 338 aa, unidentified
MNIVFLGIDLAKNVFQLCGLNQAGKPVYTKRTGRKELLQTLANIPACLIGIEASSGAFYWQREFEKLGHKVKVISPQYVKPFVRGQKNDGNDAQAIAVALMQPTMQFVPPKSPEQQDIQALHRARQRIVNHRTATVCQIRGLLLDRGIPIGSAVSRVRRAIPLILEDAENGLSSRMRRTIAELYELFNDLGRRIHFFDKEIETVFRQSEACQRIARVKGIGPKTATAVVAAIGKGTEFKNGRHFAAWLGLVPRQHSSGDRQVLMNMTKKGDKHLRTLFIHGARAVVRVATNNNDGHMNQWVNQLKERRGFNKTTVAVANKNARIIWSMLRNETEYQVV

SEQ ID NO: 327947 - protein, 354 aa, unidentified
MGHKDRRDQRTSPITILNANGRRVIKAAYTIQRLNQDKEDTMMSMILESYWGIDVSKNWLDIAVGTQVTRIDQTEAAIEEFLSQNPTDEKRTLITLESTGGYEQLAVDVFSKKGFIVHVAHPTKIKSFARAKGRLAKTDSIDAKLLREYGRFIDSSEIRDLPSKMTRELNSLSSRLEQLKEMHHQESCRQGIASEQFTQRSISIILTAIKNEIGKVEKEMLEKIDCSIELKEKYTLLRTMKGVGPTLALALVSSLPELGIANKKEIAALVGVAPITNQSGQKTGKAMIRYGRHGVRKILYMGALVACRYNDKFKYFYKKLIDAGKAKKVAIVAVMRKMIVTLNAMIMSKKAFSG

SEQ ID NO: 327948 - protein, 316 aa, unidentified
MDEPRPACCVGIDVSKDRLDVHLRPSDEAFAVARDGKGLENLVERLAALDVSLVVLEATGGFETTVAAALAGAGLPIAVVNPRQIRDFARALGKLAKTDAIDAKVIAIFAEKIRPQARPIASQEAQRLAELVARRRQIVEMIGMEANRRKRAADKRLGKKIDRHLAFLEKELAEVDADIDAGVRASPAWRETEDLLTSVPGIGPVTARTLIAELPELGRLDRRKLAALVGVAPFNRDSGTWRGHRIIGGGRTSVRNALYMAALVATRYNPLVKANYQRLVARGRPKKVAIIACLRQLLTILNAIVRDAKPWAVQKA

SEQ ID NO: 327949 - protein, 393 aa, unidentified
MRTKSNLTQIGWDSHRKFSKVTARDARHRVVWRQRVDHGDRMGMQEKLKTWPAGTPVVLESTFGWGWISDALSAAGLDPHLANSRKVAAWRDARGLAKSDRVDADLLSELWSQPSRWWEVWLAPPEVRDQREWLRYRMSLVAIQTGLKNRIHAILHRHGIVNEHSDLFGTAGRRFLSLLVGPGDITLRESARATLKGYLQLLDHVRRQIAKVTQEFRRQLVRTPEGQRLMTLPGIGQILAYTIVAEVGQIERFASGRNLAAYSLLVPRANDSAQEGEEESPKGRHVGHAGRRTLKWGWIEAAHGAVKRGGRFREIFDHRTNGGVRDKNRGYIAVARELCRVAYAMWKKETDYREDRPARPGSAILRTELSSGNGPARPPYGRCRRQRRLQTSK

SEQ ID NO: 327950 - protein, 355 aa, unidentified
MNDTKYIGMDVHRESISIAALNSAGKIVLECVVETKASIILQFIDGLRGELHVTFEEGTWAAWLYDLLKPHVRELVVCDPRKNASMKQGNKSDKIDARQLAELLRLDHLNPVYHGEHGLRSLKELVRSYLSITKDVGRVMSRVKAIYRSWGIACSGKQVYAPQHRVEWLAKITEPGVRRRAEFYYQQLDALRSLRREVRRELLEESKKHQAWKRLCQIPSIGPIRAAVLLGILQTPHRFRTKRQLWTFGGLGIETYSSADHRYVEGQLKRSKKPALIRGLNENCNHDVKNLLKGAAIIASTKPGPFQEFYTALLAKGMRPEMARLTLARKIATIVLIVWKRGVSFDAQHLKPQTA

SEQ ID NO: 327951 - protein, 345 aa, unidentified
MTEAYDGRQVVGMDLHRRRSVLVRMTEDGQKLETVRIENSPAALRAVIARAGEKPRVVIEATYGWYWAVDVLQAAGAEVHLAHPLGVKAFSYRRVKNDERDCIDLADLLRMGKLPEAWIAPAETRGLREVTRYRHKLVGQRTSCKDQVHAVLAKSGIPVTRSDIFGPGGGIWLDGLPLGQPYAGKVASLRALIAVLDGEIGRLEELAAAMMAGDRGYAAIRQLPGIGPVLGAVIAAEIGDITRFRKPGQLCSWAGLTPRHYESDTRVIRGHVSKQGSRMLRWALVEAIQRQPAGTRPRQARDAILARRGDQARGIAKTAAARSLLAQVFYAMRDGHVRRGPSQAA

SEQ ID NO: 327952 - protein, 338 aa, unidentified
MTTGLAAGTYELFVGIDIAATTAEVATQRPGAKASRSFQIDQTPEGFNRLVKKLQATGHDPSHILVVMEATGSYWISLATRLVHDGFRVSVINPAQAHHFAKALLKRAKTDAIDAQTLAQLAMILQPEPWMPPPQIYYELQQRLAQRDDLLNLRQQVRNQLHALMQHPEVIEPVRLRMECLLSTFQLQIDEIEAEITAALNQDSAWAAAAERLQSIKGVGWVTAAWTLVTTLNFTACDSVDSLTAYAGLAPMPRQSGSSVWHRPSIGHSGNGRLRTAYYMATLTAARFNPAIKTFYSRLIAAGKPEKVARCAAARKLLHIAWAVVKKDQPFDPNYAQG

SEQ ID NO: 327953 - protein, 467 aa, unidentified
MNKAIGIDPDSKGYVCYLVDTGERRTTQKGFLTTVPDLESLIRWIKNEWEVIVAIEGSNGHSRPIEKAFREAEVVFYSFRPSDVHKFRKAVLGQNKNNEKDAESVARYALALQNQGKLEQFRRVWFPDESLRLLSRGYERKSKELTEEVNRMWKVLRIASPDLYLALGGFNPEVEISDNVLQNQGILSLLAQKPDLFEWRSLSAEGFWTAMGGRNYRGREKLIEAMQKLSAIFTPISPAVSLMIKNSAQTILQIKGQMVEMQKMIRKITTENPAVRALGEYRGISVITAATMVAEIIDIRRFVNDDRLASYVGLARVEYSTGDRSKMITSWQFNHRLKDIFMTAARNFVRYNPDSHLAGYFRNLVKSGMKLTEAYKRVARALVRMIFRKLSSLNAEISEEEKRRESDMASGSDIRSDISHVSNISLSSPKENDIEHVKKIKRGKKGNLEKETMTVLVEKSENSTCLL

SEQ ID NO: 327954 - protein, 444 aa, unidentified
MARKNPQQRFEVVHSDCAGIDIGSREHWVGVNPAQHAHPVQRFETFTDDLSRLADWLESLNIKVVAMEATGVYWIPLFELLDARGFDVYLVNSRATRQITGRKSDVLDCQWIWQLMTHGLLRGAFRPADAICSLRSLVRQRANRVRDQAQTLNRMQKALSQMNIQLANVISDISGVTGMKILRAIIAGERCPEKLATLRDGRIKAGQDTIARSLHGNWRLEHLHALAQEVALYDFLEQQIAGCDKAIGQALEFLPALEAAPQPATKVLRSPHRSTAEQAMLHQALYRVLGVDLTAIPTIGVDTALVLASEIGPDLSRFPSSQHFCSWLGLAPPTRISGGRQLGGGGPKIINWAAQSLKQAASNARNEKGFIGASHRARLSRMDTSCAIKATAHQLARLIYSMLTKGQAYVEQGIEAYESRSQERQFRALLRKARKLGMDLVKAA

SEQ ID NO: 327955 - protein, 341 aa, unidentified
MKNKSFIGIDISKNVIDASIFCKGAPIKDFPHAVFNNSHKGFGEMCTWLKKNHVVLLNSLFGMEFTGSYSMELEKFLNARNYQFCMLSTHVVKHYPMGPKDKSDKIDSAKIADFLYRYDGTECVKPYKMPDKTMQRLKALTKERKFLVEQRTCFMNRRQLCTTKEATQLYDGYIKEFSHDIENIELKMQNLLEADDSLSTTYKNLLTIPGIGFVNAMNVIVITRNFTAFETARQYASYIGVAPHFHTSGTSVKWRPRPSARCDGQAKADLSMAASVAVQCDAELQSFYNRKLGGKQDSDTKRKALNAVKFKLVLRMFAIGKQNREWEPLDSKSSNEKLAIS

SEQ ID NO: 327956 - protein, 368 aa, unidentified
MNEYKLKAAPTAVSKEQNSQKNPKANRILIGVDAHLKSYEAARKIDNGAVGVAQSFRSKEAFLLYVEKQREQAEEVVVVYEAGPLGYTLYRELKASDIECLVCAPRSGEQKRKRRKNNSIDARTLSSDLFNYLSGNEQALQAVRVPSEAQEQARVESRQHDALVEERKRIGAMGNSLLLSQGYGSWSNWWRPKAFERLSKGVAPWIVKHLGRWVGILRELDQQIQQAKAELTQHYQGPRPKGMGAPSLAQLNAEVLDWTLYSSRRKIGCLAGMVPSEWSTGEGQRLGAITKVGVPAIRRIITEMVWRMILFQPEYKAVQKWREVLEGPNRGLKKKAVVAIGRQLIVDIWRLQTGRISAQELNLIMVEG

SEQ ID NO: 327957 - protein, 340 aa, unidentified
MEKRYIGIDLHRNRFTCCLRLENERTYVTEWELEDLGRFVKKLRPSDEIAVEITGNTRLFYDAVVPHVARVVVVNTTQFKVIRQSVKKTDPHDARALALYLSKNMLPEVRMKDKEHGQLASLTQTRDTLVKLRTALKNKVNNILSARGLNLPKEALGSEKALNEVLELPFDEIVRIELRVIVEQIRSLNKSIAELEKTIGEEGSKLEGHKGLTSIKGIGKITGAILLSVIGDVNDFPDEGRLASYFGIVPRVSNSNETEHSGRIHKRGTKLGRTALVQSALIAANYSPYLKRFYEQVKARRGAGKAIIALARKFLGIIYRTLKNKWVFQDFPNFVLAEAS

SEQ ID NO: 327958 - protein, 326 aa, unidentified
MNLPIVGVDISKDWFDVDIPQFQHKEKFEQNVSGFKLLLKRFKKFGMGKARICMEATGLYFEKLAEFLHAHGHDVVVVNPQCIKAFSRSELRRSKSDPLDASLIAVFCKQKYDQLHIWQPLSPHYKQAREMLRRRQALVEFRTAEKNRLKAGFSSPEVLDSIRQLIATLDNQIKEIEQLVFKIVDADSELKEFVDLADSIGGISRLTAAILLVEVPRVLWTGRLAATFAGVIPAKESSGKTLARSYLSRIGSARLRQALYMPAVVASQKNPVLKPFYTSLLARGLKKKQAIVAVMRKLLHLVFGVLKTRKRFDPLYESKRRALQQA

SEQ ID NO: 327959 - protein, 424 aa, unidentified
MKVTYQTCCGVDVHKSFLVATIVKTTGGIEPSYQKKRFSTFNNSILEFKQWLLDNGCHDVCMESTGKYWVPVFNLLEDDINVVIANPKWVKAVKGNKDDTKDSKWIGDLFRLGLVKGSYIPCKIVRILREYTRYRYKLVSCRSSEKNRYQNALTVCNVALDSIVSDIFGKSSTSIIDYLLEQSGTSINHEEIASKLLRSLKSKEDAVIESVEGYQMTDAQKYRMRLVRAHMDYITAEINDVDKMIENMISSNPDFENAVQFLCTIPGVKRDSAITIISEIGTDMSQFSSSRRLCCWAGLTPGSNESAGKKKSVRITRAGVYLKPALVQCAHAAVKSDKSPYYKKKYESLVKRRGKKRAIIAIARMILTAIYQMLSTGEQWNPSDLYKIDMPVALVEKQKAKAIKQAKKLLQREGLFPPDEPLAS

SEQ ID NO: 327960 - protein, 337 aa, unidentified
MPDVHVLAIDLAKRSFQVCGTDRGGAVLFNRTVSRSKLIQLLNAQPPCIVAMEACATSHYWGRVAQGLGHDVRLVPPIYVKPFVKRQKNDAADAAAIAEAALRPNMHCVAVKSAEHQARAVAFRTHQCFVRQRTQLINALRGHLAEFGLVVAQGPAHLKQIIELLAEAGAEVPDTVREIVQLYLDQIDVLTGKIEELHGRLRDATRENAEMRRLCTVPGVGPVTAGAVLAFAPDLRAFSSGRNFAAWLGLVPKQRSTGGKTRLGGVSKMGRTDIRKLLIVGAMSRIRWIIRKGILPDSWLGRLVGRKPRMVAAVALANKMARIVWAIMTREQNYRMA

SEQ ID NO: 327961 - protein, 415 aa, unidentified
MALKIVYKICCGIDVHKTFVVACIASTNDKGVTSYESHRFSTYTSGLKTLLQWLLDRNCKDVCMESTGKYWIPVYNILEKDCSIVLAHPKYVKAIRGKKTDKKDAKWIADLFKHDLVAGSFMPPADIRQLRDLMRYRFKLTCFKSSEKNRLQNCLTVSNIQLGNVVSDTFGKSAQAILDKLLENPADTSFDLEPLVYKSLKKKLPELRDAIDGYITPEQAGKLKVIKAHYENLESRKAELEELILALAAPYQQELTILQTAPGISSPFTAIGIISEIGTNMEAFPSAKHLCSWAGLTPTNNESAGKKKSVRVSKAGCYIKPLLVQCANAVVASKKHPEIRNRYLRLKKRRGHKKAIIAIARMLLTALYHMLKSGENYNAELYRKSDLPPVNREITVEQALMIARNQGYKIKSATA

SEQ ID NO: 327962 - protein, 363 aa, unidentified
MNATAGLPIVGVDLAKSVFQLAVADGTWKVSEQHRLTRTQMERWFANRAVGLVVMEACGSAHHWARWLNGLGIEVRLLPAAYIRAYVKRNKTDAADACALLEAARCAEIIPVRVKSIEQQALQGLHRTRSLWMGTRTSRINALRGFCREFGIAIAQGSRLGVEQIGRVLADPHSAVPLLIRRSMSLLVEEIRLLEVRIAQLERELTALARQSPACTTLLSIPGVGLLTATAMVAATSGAVGHFRDARHFASWFGLTPKEHSSGGTRHLGRISKRGDRYLRMLLTHGARAVLRAATVAQRSGKTLDDLRHWALAVQGRSNHNKATCALANKLARICYATMRDGEPYGTARLQKKVARTAFALPA

SEQ ID NO: 327963 - protein, 323 aa, unidentified
MNAIIGIDVSKDTLDANCARGQRRQSKTFDNSPDGWKLLLAWLKAMGSKQAHVCMEATGRYSLGVALALHDAGHVVSVVNPAQIRDFARTKLGRNKTDKVDATLIREYAELFKPAPWAPPSPAMRRLCELQTVRAGIVSNRAEWKNRIGSGLGDRTATTLAGATIDHLTAQLEAVDKAISETIDQDTELRGRRDLLLSVIGVGETLAALLLTELPEPGVLRRSGEVVAYAGLNPSHHRSGSSIDRPTRISKIGNATLRSSLYMPALSAMRFNPPVAALVARLKSAGRLKPKQIVVAAMRKLLVLCFGVLKTGKRFDPAIAMPA

SEQ ID NO: 327964 - protein, 387 aa, unidentified
MGVIIGMDPHKSSATIEVIDEHGKMLAARRFATDKAGYRDMLLEARRFPQRIWAIEGCNGIGKHIAHRLVHDGETVLDVPPKLSAQVRVFATGNGCKTDPVDAHSVAIAALYSAGLVRVEVDDDLVVMGMLADRREELGRARTQTVNRLHRLLLQLIPGGAKRFLSAAQARALIVTVKPRDLPGKTRRRIAVELIGELDTIDRKIKALEKELAALVIERDSTLLDLPGIGPSGAARLLADVGDIHRFADRNRFASWNGTAPLDASSGNQQRHRLSRVGNRRINRVLHMMAIVQLRHPGDGRTYYDRRRAGGMPSLMAVRALKRRLSNIVYARMLADQPRRETTSPGGHSGNDSVSSAADSHPGIDSSDKPHPGLATTHPRTEVLAAS

SEQ ID NO: 327965 - protein, 336 aa, unidentified
MNPSPLYIGVDVHERESQVAVFEPDGKLLQEKRVLTKRLPKFISSLPSSEKHVGIESVGFIYPVYDALVKTGCDVAVANPNNVQLIARTKIKHDRVDSIVLGELLRTNFFPRSHMVDEETREKRLLVGDRARYGVKRANTKNSIKGLLKRNGIHVKKPLSLEGRNEIRSLGLPEFEHRLREFEALDSIVDELDKRIANAVSKDKRAQLVDTIPGVGPYTALFLSSALDDVNRFTDSNHACAYVGLVPSLHQSGDLSYSGHITRQGNKWLRRNLLECTRWSIRKDPGIKQFNLRIARKRGKKKARVAVARKLVSYAYWTLQRNLTYEELNPWNQNSS

SEQ ID NO: 327966 - protein, 407 aa, unidentified
MNPRRYARFCGIDVAKKAHVARIIDRDGNTLVKPKSFGNDIEGYRQLAQRLTDAGGPQKVLVGMEATGHYWLSLHEFLARQGYHVAVLNPIQTAQQAKKGIRTAKTDKIDTEPIAVLLKNGEYRPALIPGELAFTCRQLTRLRYALIAHSARIRQQLWSRLHPVWPEYEAIFSDPFAPTGRHLLKAAPAPQDVLAIPPEDLADMLRRASRGKHAAAKAREVRQAAEQSIGMLRGLDAARIGIRTLLSCLEALRPIRKDLEAQIELVARRLPPYILTLPGIDPIKAASLFGETDPITAFPTADQLVAFAGLDLGAWQTGQYKAPQRHISKRGCPYLRKTLWHMAYRAVYEEGQLRDYWLAKRSQGLKHLSAVTATSIKLCRVCWRILTDQRDYVPEGRPTPSLGTANS

SEQ ID NO: 327967 - protein, 346 aa, unidentified
MVKIHVLGVNLGKNVCSLVGFDEAGAVVLRRRAKRETLIALAAKLPPCIIGMEACCGAHHLGRLFANLGHKVRLMSPEYVRPYIKAQKNDDRDAKGIAEAATRPTMRFVDLKSQEQLDLQTLHRSRDRLVAERTALINQVRAILMERGIIVPQSKRALEKHLAAVTDGSDDATALSPRIRMLVLDARAQWQELDRRIAAFDAEFAAFVKESEDARRLVTIPGVGVMIASALIAAIGKGESFEHGRDLAAWLGLVPRQSTTGGRPRLLGVSKRGNTYLRTLLIHGARAALPHVAERDTPLGRWAKGLLARAHHNVAVVALANKLARIAWAVLRRGDKFAAAGSPVPA

SEQ ID NO: 327968 - protein, 465 aa, unidentified
MPNTRKKHAKPQRSPDPTAGLPPLNLNAAGIDVGSAEHYVAVPPDRSPEPVRRFASFTADLHALADWLHACHIDTVVMESTGVYWIPLFQILEARGFAVHLVNARHAKNLPGRKTDIADCQWLQKLHTFGLLNSSFRPTDDICVLRSYLRQRDTLISAAATCIQHMQKALIEMNVQLANVISDISGVTGLAILRALLAGERDPAVLAAFKDYRIKASTHTIAKSLEGNWREELLFNLRQSLELYECYQQKIAECDTQIEAHLLTFDSKIEGSAPPLPTPKRRPKKARRHEPHFDLHTQLYRISGVDLTRIDGIEVLTAQTLIAEIGLDMSRWKSEKHFASWLGLCPDNRISGGKVLTRGTRDVVNRAADALRLAAQNLLHSKSALGANYRRLRARLGAPKAITAMAHKLARLVYRLLKFGQQYVDKGMEHYEARFRQQRLQWLQRQARELNLQLVPNQPVPSPVS

SEQ ID NO: 327969 - protein, 355 aa, unidentified
MTFVGFDLHKRYITACALDAAGESIAEVRQLSTALEAVTAWLNTPPRPVTVGLEATLYWEWLATRLAEQGHTVHIAHAFHVKLIWQARAKTDPIDARTLAELLRVNLFPAIWIPDVETRRRRQRLRGRAFLVRERTRLKNRIHGHLTSENLVAPGADLYGKGGRAWLATAPLSPVLRAQTERLLTLHDAITREIAGLDGEVKRAAKGNPIVKQLATMPGVGVFSALFVQAEIGSIDRFRSSYELAAYAGLVPTTRSSGEKTAYGGLGKASNRWLKWILIEIVVTLKLAPGPVGTYYRHLLRAKGKPKAQAAAARKLCCYLYWMMKEGWTYEQWLQQHVHSQRSEVRPVQRMGAVA

SEQ ID NO: 327970 - protein, 362 aa, unidentified
MTVNVGVDLHKTQFTVCMPKNGKHVFEAYPTNGTGYAAFLKNVKRWQRSGKDVRIGVESTGNTRYFKNVMENAGVGVTVINTLKFKVVNESVKKTDKHDAATIAEFLEKDMLPESRLCSETSEQLRRLLKVRTTLVRTIVVVKNQIHALLTAIGMEDAKGSLQSKKGRQKVLDALNERENGLVVQPLFETIERLEENVNRIEKELEVLGKNDPVVDLLLTIPGCGKIGAWTIRAYTDDIKRFSSAKKYAAYAGLVPWVQNSNEVVRHGKITKRGPVELRTALVQVVLGMRRSKKKTLHWRLMARYEAMKSAKGSGKSIIATARKVATIIWVMLHQNTEFDQTRMTDKKLIRKAASMRAASLN

SEQ ID NO: 327971 - protein, 426 aa, unidentified
MNENELSKIERFRQFRKEVRGSQRHLIVGIDVAKNKHHAFLGTATGNTVFRRLIVENSASGFEHLLAHVQFYMTRDGFDQIVFGLEPTSTYHKPLAEFLIKQGFLVVYITNLAVKKNRDLLDGRWDKNDSKDAANVADLISQGKCQYYDLPDMPLRDLRSLLLLRKRLKKQEHGLRVRIRNNLVAQYFPELDKYWDKSEKENLAIVRWCLAPEKINRLEFRDFFQMVTTRCRGNSQHQRLSKIWEMAPQSIGCQAGEGLELEAKIMVEGLKQIQDQVAEIEKKIQDICVSFTEYDLLLTIPGFGPYVSAVVLGAIGNPHRFESANQVLRLAGLDLSASRSGEKSSSAIPVISKRGKADLRYALYQAALIASCSNAGFIAYYSKILKGRERERGIRTKMRVKLAAKLLIIAWTMMKKGEAFSPGYLG

SEQ ID NO: 327972 - protein, 428 aa, unidentified
MEKKNEIKFPQVVKVGCGIDVHKNIIVATIRKSNEEYETRKFTSYTGSLTSLRDWCKSEGVTHIAMESTGIYWKPVFNVLEEDFEIILVNARHVKNVPGHKTDKKDSIWLSKLLLSGLLKGSFIPPKDIRELRDLVRYKKKLVAQVASEKNRIIKILEDANIKLSSVLSNVDGAVGTKIINSLIEGQTDVNELAKFYHGKMKVSKGEFKMALEGRITQHHRFMLQLHKDSIAEKERLIARIEAEIDEATKAYQVEIELLETIPGVGKDSAISIISEIGTDMSKFPDEKHLSSWAGMSPGNNESGGKKKVAKTIHGNKYLQSTLVECAWGATRKKDSFLKRKYESLVGRRGKKKALVAVGHKIIVASYHIIKNKEAYKEPVLHNNPKKTKKQIRNYLNRIKNLGIEISVESFQDIVGRFFTEQQTVSRL

SEQ ID NO: 327973 - protein, 351 aa, unidentified
MRFYTKQHRFYCGIDLHTRWMYLCILNQEGEVLLHRNMKTDPAAFLKAIEPYREDVVVAVECMFSWYWLADLCTRESIPFVLGHALYMKAIHGAKVKNDKVDSRKISGLLRASMIPQAYAYPAAMRSTRDLLRRRNYLARKRADLLSHIQNTNAQYNLPEFGRKITYRSHREGVAEQFTDPDVRRSIEVDLELIDHIDHLKWGLERHILKNAKHHDPDTLMLLRSIHGVGPILSMVMLYEIHQINRFPRVQDFASYARLVKCAKESAGKRQGYGGKKIGNAHLKWAFSEAAVLFLKNNPAGMKYKKRLEKKHGKSKSLSILAHKLGRAVYFILKRGKAFNMNLFLGGECQA

SEQ ID NO: 327974 - protein, 411 aa, unidentified
MADIAVDISDIGLFLGLDLGKEFHHAHGLTEQGKTVHDKRLPNTEARLRELFDRLRAKFGTVLVIVDQVANIGALPLTVARATGCRVAYLPGLSMRRAADLYPGEAKTDARDAFIIADTARSMPHTLRAVDRDDEVLAELTMLTGYDNDLAGEVNRTTNRLRGLLSQIHPTLERVLGPRLSYPYVQALLQRHGSPARLKKLGRARCEALLKAHGSRKAHHLTTEIFDALAEQTLVVPGTEASALIVPGLAAQLAAAHTQRRATEQEIAALLEALPLFHLLTSLPGLGVRTTAAVIVAIGDGTAFPTAGHLASYAGLAPATKSSGTSIRGEHAPHRGNRLLKRALFQAAFAAIGCKTDPSSRTYYDRQRARGKTHTQAILRLARQRVNVIHAMIRTGALYEPRTPSDVDLAA

SEQ ID NO: 327975 - protein, 413 aa, unidentified
MDVLHLRCCGLDVHKSSISACILLREAGRVQKHQRRFGAMTQELQELAEWLRQFGVTQVAMESSGVYWKPVWNILEGQFTVVLANAQHIKNVPGRKTDQKDAEWIAQLLQYGLLRASYIPCEIIRDLRDLTRMRASLSQEASRISSRIQKVLEDANVKLASVATNALGKSGRAMLEDIIAGEDDPEHLASLALGHLRVKIPQLRLALEGKIRSHHRFLLRRLLDQLQFVEHEIALLEERLEDIGGQRPELSQAVARWDTIPGVDRVAAWALLAEVGDNMAQFPTAEQLASWAALCPGNHESAGKRLRGATRQGSPWLRRMACQCAWAAARTKNTYLSSQFRRLAARRGKKRAIIAVAHTLIVIGYHLQKNQSNYDDLGGNYFDRIHSDGLKRYLVKRLEQLGHKVTLEPIQTA

SEQ ID NO: 327976 - protein, 412 aa, unidentified
MKDLLEISCGLDIHKEKIVACILTGPLGKPTHSEIREFTTLIPDMLALRDWIISENCHHIAMESTGIYWIPIYEILEDAFSGDITLLVVNARHMKNVPGKKTDIRDSEWISTLLRAGLLNASFIPEKRIREFRDLNRYRKSIIRDITSQKNRVEKFLQSSGFRLSSFISDIFGASGRNIILHLMEHGQIDKMSLDSYLKTKTRKRIDEILMSVNGTLSEHQKSFLKILMCHYDSMKEHLIEIETHLQEDMLPFALQIEQLNTIYGISTTASCAIIAEIGTDMKPFKTAEHICSWAGLCPGNNESAGKRKSTSITKGNPYIKSMLCEIAWVIAGKRNTYLSAWYWRIKQKKGARKAIVALARKLLVIIYTMLKQGTNFDENCFEVRRKNCEQKQLSRYIRELEKHGYTVEAQV

SEQ ID NO: 327977 - protein, 364 aa, unidentified
MEVLVDRCAGLDVHQKTVMACVRTSARNGGRAQQVREFRTFTDDLRRLRDWLVGEGVTQVAMEATGVYWRPVWHVLEDEPSLELLLVNAQHVKAVPGRKTDVADASWLAQLLECGLLRGSFVPPPVIARLRDLTRYRKKLVEDRAKETQRIQKLLEDAGIKLDSVVSDVLGKSAREMLEALIAGQRDPDALADMARTRMRPKIPELRRALAGRFGEHHALLLQVHLDHIDHLSSAVDRLDAEVEKVIAPFDEQVRRLCTIPGVGVRTAEVLIAEIGVDMSRFPTAHHLASWAGLCPGNHESAGKRRSGRARKGDAALRSGLCEAAWAAVRTKDTYLSAQFRRFLRRFGKKGEGKRILARRSRCW

SEQ ID NO: 327978 - protein, 359 aa, unidentified
MTSMQDAPRRRRVVVGVDTHKHIHVAVALDELGGRIEARSFAADRSGYEQLIDWASSLGREVMFGVEGTGSYGAGLASAIRRRSIGVLEVLRTDRRDRRLRGKSDTIDAENAARAVLNGQASAVPKSADGTVEMIRLVKVAKDVAVKARTSAMISLKAVLVNAPAELREQLQPLTKMALIRRCAALRPGPVTDPMTAAKHTLRAIARRWLALDAEIKAHEQVLNRLTTELVPDLVAAFGVGADIAAEMLIVAGDNPERVHSEPAFARLCGVAPIPASSGMTTRHRLNRGGHRQANAALYRAVIVRLQYHQPTQAYYQRRTAEGRTKAEIIRCLKRLLAREIWSYLRPLRQARQPLVLAA

SEQ ID NO: 327979 - protein, 430 aa, unidentified
MQEVDEQDLYVDRVAALDLGKAGLEACVRVPHEDRPGRRLQEIRAYATTTAALLEMADWMRCQGVSRVVMESTSDYWKGVFWLLEAEGFDCWLVNARQVKNVPGRAKTDRADAVWLAKVAERGMCRPSLVQPAPIRKLRDLTRYRRSLIEDRTREMQRVEKLLEDAQVKLSSVISDIFGVSGRQMLQALIDGQRDPKVLAGMARGSMRGKIPLLEEALRGFFTDHHAVLLRIMLANIDRLSEQAALLDAEIEQAMAPFSAQAAQLDEITGVGQVAAQELIAEIGVEMSRFPTAAHLVSWAKFCPQTHESAGRKKGKGRGKGNRWLAGTLGRIVFSFSKSDTFLGERYRRIARRRGKSKALVAAGNSVLTVVYQLLSDPHAHFHDLGADYYDSRINKDRRARSLASQLQALTGQKIVIRNGKAVLIEPEPT

SEQ ID NO: 327980 - protein, 453 aa, unidentified
MAQRNRSLSVKAGNSRAALTITHPNAAGIDIGSASHFVAVPPDRDDEPVREFPSFTVDLNALADWLKACGVDTVAMESTGVYWIPLFELLESRGFTVLLVNARHVKNVSGRKSDVLDCQWLQQLMTYGLLRGAFRPADAVCVLRSLWRQRAMLLRDQGRHVQHMQKALTQMNIQLTNVISDVAGETGQKILRAIVAGERNAQVLAAMKNVRIRASQDEIAKSLQGNWRGEHLFALKQALAAFDFIGTQLVECDREIEAQLQSLQIHEGEPAKGKKRGRARNAPRFDLRTQLFKMCGVDLTRIDGIDVTTALAVISETGADMSRFASVGHFASWLGLCQGTKITGGKVMSGKTRRVANRAAQALRLAAAALRSSQSALGAYFRRLCARMDKPKAVTAAAHKLARLIYTMLTKGEEYTDQGQDYYEERYRQRVLHQLSRRAEKLGMKLVATGQPA

SEQ ID NO: 327981 - protein, 345 aa, unidentified
MNYAGWDLHQQFSQVVVGTKDGKERKSIKFSHFPGMFEHPDLKKFLQPPIEVAVEASSSWYWVVDKLEEMGAKVHLVHPLKTKLIAESRVKTDKIDANVLFDLLRTGFLPESYIPSNEVRENREIQRHRAALVKIRTSAKNRVHSILAKLGIFFKISDVFGIKGRKDLEKVIPNLKPVYKEEITRFLLLIDWLDKEIGKIEKKIRSLAKDNSLTKLLMTIPGISYYSALLILSEIGDINRFAHPKKLISFSGLNPGVNKSGKHFYNLPITKQGNTWLRWILIQIAPLAARKDERLNQIFQRIARRKGNNTAKVTVAREILGAVYWVLKKRVPYCPKPVTPQLAMV

SEQ ID NO: 327982 - protein, 328 aa, unidentified
MINMYLGIDVSKDWLDVVLVREGLPVEKGQFDNSSQGFRQLQHFLKKRKVRELHACLEATGYYGAEAALFLHHAGYKVSVVNPARIKAYAESQLSRTKTDVGDAALIADFCRTQQPNAWTPPPLEQQELQALVRHLETLKDMRQQEVNRRQAGIPSETILKTLDAHIAFLDQQITDLLRLIHDHIERHPHLRQQRDLLISIPGIGDLTAFKLLAEIVDVQSFDSARQLAAFAGLTPRERRSGSSVRGRTRLSKRGTPRLRSALYFPAIVAQQHNPILHVFAQRLLQAGKSKLQVIAAVMRKLLHLVFGILKSGQPFDPHFLEKRALLT

SEQ ID NO: 327983 - protein, 309 aa, unidentified
MQTYDLVAVDIGKDSLQIQTTSQAFILPNTPQGLRKLLAHLPTLPHPLVVFEASGGYERKLLDALREASIAHRLINPARIRAFALSEGIKAKTDPIDARLILRFAQEKKLQAGAPLSARQQILADLLDRRNHLSEQSGREKNRLEKASKTTAGFIRKMLKAVEGQMQAVERAIRLHIGSDSKLASQVREMTSVEGVGEVTAWTVLAYLPEITTIGRNQLVALAGVAPFNRDSGHTQGKRFIFGGRAKLRRVLYMATLSGATHNTVIRDYVHALLARGKAFKSALVAGMRKLLLHLQSRLKQLEQKTLAA

SEQ ID NO: 327984 - protein, 383 aa, unidentified
MSSRAAVESAARSIIYLGLDVHKESLTIAVLPEGAKAPTRVERLPNELPKLKRWLERAARSGELRACYEASGAGYVLHRALREWGYACDVIAPSLIPKRSGVQRKHDARDAADLARLYRAGELTAVRIPSEADERVRDVVRCRETFQREILKSRHYILKFLARRGFVFREGTNWCTPHLKWLQHLTTDQSPLARHDRLVYREYHALLMYKLQRRDELDRHIEQLAELPTLAPMVRQLQCFRGISLHSAMVLATEIVDWRRFERPAQLACYLGLVSREASSGDRQRLGSITKAGNSHCRHVLVQAAWSYRHRPQTSVDLKRRQQGQPPAVITHAWKAQQRLHHRFTHLSYRKRPQIAVVAVARELVGFLWAVMQEVSPAAQHVA

SEQ ID NO: 327985 - protein, 489 aa, unidentified
MSKPSQQQQGKKDATLNAKAPKRKARGSHRPQGEGDQRRSQLRITNPDAAGIDIGSQVHYVAVPEGRAERAVRSFGAFSAQLDEIAQWLKECAVKTVAMESTGIYWVPLYQKLEEAGFEVLLVDARQAKHVPGRKSDVQDCQWLRQLHTYGLLRAAFRPEDSICRLRTLQRHRKNLVEGAGVWVQHMQKALNEMNLHLHHVLSDISGYSGLAILDAILAGERDPRKLASLADYRVKKSRAQIEAALTGDYRPELLFVLNQSLQDYRQIQQQLAQCDLSIEKQLAQIADCANPSQDCGPRPQGPGSAGGKRVKIKPKDALEVSLAGHLKRILGVDLTTIPGLNVLAILTLVSEIGTNMAKWRNEKAFVSWLGISPNNKISGQRVLSSRTRKVVNRAATTLRLAAMVLGHTNTPLGSFYRRKRAQLGAPKAITATARKLGCLIYRLIKNGESYQEPDLHAYELKYKAQILNSLRKRANSFGFDLVEVPKAA

SEQ ID NO: 327986 - protein, 409 aa, unidentified
MGPAFDDTAGFIAGVDTHDQTHTLAILTNTGGVESTTTFDADKHGYQALIDTLTTTGNILAIGVEGTNSYGAGLTRALVDAGYGVTEVLRPTRQVRRLHGKSDPIDAIAAARTVLAGDGTSRAKDTQTPAEALRFLLTARTQLVHAMTAMISCIRSLLVTAPEELRATYRGMPTARLISRLATSRPGTQPTTPATAAAYSLKQMAQTYRDHQKRADELDEQMNGLLIDAYPNLLAIYGASTVTAAELAVTAGGNPKRIRSEAAFASLCGVAPIPASSGKTNRHRVNHGGDRRGNKALHRIALVRMRHDSCTQAYVQRRLGEGKTKKDVLRCLKRTIAREVYKALIRPQVMDTTAAEGQQLADERVRRHISLSRAAQALNTYPARISDIEKHRRPLPVLTDQYKKWLEAA

SEQ ID NO: 327987 - protein, 341 aa, unidentified
MQITTIGLDIAKNVFQVHGIDANERVVVRKQLRRGQVMKFFAALPPCLVGMEACATAHYWARELTKLGHEVRLMPAKDVKAYVKRNKNDAADAEAICEAVRRPTMRFVRAKSAEQQGRLMQHRTRDLLLRQQTQAINALRAHLAELGIVAAQGREGLKELLAIIADQADARLPVDARASLIILAAQLQALQTLIKSIEKRLLVQHRANEASKRLENIPGIGIIGASAIAATVTDPKAFRSGRDFAAWIGLVPRQDSTGGKQKLGPISKQGDRYLRRILVVGAHSVLRRAKQNPEKYLWLTQLLARRPFKVVAIALANKMARIAWALLASGAKYRAPRLAAA

SEQ ID NO: 327988 - protein, 360 aa, unidentified
MNAATAPAPESSTGPDVVIGVDTHKHTHMAVALGANGGLLGSLKLDAKRSGYQELIRWAAEFGSRPVFAVEGTGCYGAGLCRALQTAGLEMVEVNRPDRSTRRRLGKDDTIDAEAAARSFIAGKATVIPKAGDDLVEMIRMLKVAKDSATDNRTAALNQLHAIVVTAPAALRERLQRLKGKELVECCSGLRSGDISTPLAAAKMTLRTLARRIQQLDQELKETVAQLDRLTMQHCPELRNTYGIGVDISATLVVAVGDNQERLKSEASFAALCGVNPLPASSGKVVRHRLNRSGNRQANCALHRIVICRLQRHQQTRDYVERRTAEGRTMKEIIRCLKRFVAREVFSILRGGPAVRTAPA

SEQ ID NO: 327989 - protein, 420 aa, unidentified
MPDDRCRLGSDDVVIGLDLASAEHQVVVLTADGQRLTRFKIPHSRVGLEELLRRTMPAALSRPGGSRVFAFEATGHVWEAVAYILRARGERYVVINPLTTFRVREARQLSREKTDLTDAEQIAELCRTGLVTRTQLEAGPYLALRRAWGEYRRLREERARLKVLVAHQLYGLFPEFLRVWADLLQPGALAVLRTGLTPATMAALSLGEFVARVREHRAGRRVWRFKLAQVHRYAEHTIACPDGVDVLAREVQRAVARMDVLTAQMTAVATEVDALLADLEETPYLRTIPGLGWASVAGLLAHVGAITKYRHGRQLIKLAGTNPSRRDTGQTVGRGQTMSRRGRAGLREVMYLATISCLQHNPRIRAHYDRLIQRADRPLSKMQALGACMNKLLLYAFAVMSRREAFQLDHDWQRTMSRVA

SEQ ID NO: 327990 - protein, 345 aa, unidentified
MAHGEIVLGVDTHKDIHVAAIVDEVGRLLGTAEFQVSERGGRRMLAWARHYGAVRRAGVEGTGSYGYGLARQLEAAGVKVREVNRPNRSLRRLRGKSDPVDAEVAARAVLSGQASAIPKDRDGPVGQLRALMVARRGAVKARTQTSNQIKALLVTSDEAVRSRLQGRRDGELARCCGRLRSTDGTKTALRSLGRRWLHLDEEARALQAEITRIVCSIAPKLILRPGVGVLSAAQLLITAGDNPGRLRSEAAFAALCGAAPVDASSGKTTRKRLSRGGDRSANAALWMIAHVRMVRDPRTRDYAARRVQRGNTRKEILRILKRYIARELFPIVLESLSAPTCTAVV

SEQ ID NO: 327991 - protein, 347 aa, unidentified
MLYAGIDLHKKTITVCVVNQERQVVHNRRLYCSEPDTILQFFGKLGEFEAVVEATASYEWFVRLIEPLAKRIILAHPGKLRIIAESTRKSDQVDANLLATFLALDMIPQAHRPTPRQREHRVLVRHRCYLQRRLTSVRNKVRRILSNYNADRPDLFTSEGLVYLAEVRAWFSESDRFAVKQLMVEFCFYLGQLKALAAQLKSFVAQAPAAEAEGRKVLRSIPGVGPVTTEVVLSELADPKRFRSAKCVTAYAGLVPGHRESAGKRKDLHLEKAGSKLLRWVLVEAAWQLVRRTNRWRVTFESLSARVGRKKAIVAIARRLLGVMLALLKSGRPYEHGYQPQPAVVPG

SEQ ID NO: 327992 - protein, 373 aa, unidentified
MAVSAGEQPLGQLRIRASAAQARRLLEWAAPWPERSWAVEGAGGLGHLLAQQLVAAGERVLDVQPKLAARVRLLADEAVNKNDPNDARAIAVTALRSRTVREVTPDDHCAVLKMWSRRQHDLGRNRTRIACRLHAALCELVPGGIGKEITIAHAARVLAQVTPSGAVQLARAELAADLLDDLRRADEQVRETKKKLAAAVRATGTSLTEIFGVGPVIAATVIGETGDVSRFASRDAFAAYNGTAPVEVSSGRRTVFRLSRRGNRRLNHAAHMTAVTQIRYPGSEGRAYFDKKTAEGKTAKEALRALKRQVSDAFYKHLKADAVRAARGSSSPGGHAGNDSDASAAGSHPRTPALRPSHSRTKNHRTPMTLARK

SEQ ID NO: 327993 - protein, 363 aa, unidentified
MMIIGVDYHPSFQAIAFFVEETGECGEQELNHGDGQAEKFYRELKQRGICVRVGMEATGYSRWFERLLAELGFEVWMGDPAEIKAKRIKKQKTDRKDAQLLLRLMMEKNFPQIWVPSPENRDLRQLLWHRHRLVQMRTRIMNQLQALAMNEGYRWKKKLFSEQGRAQLEKLTLAPWASRRRQELLELLDRMNPTIEELTAAAEQEVKKRPEALRLMTHPGVGPLTALAYVLIIGKPERFHCGKQIGTYVGMIPSEDSSARKQRLGHISKQGNSLLRFLLVEAAQAAARRNPGWRRRYIHLAMRRHKSIAKVAMGRKLGVRLYWMWRNGCEYSPSLEFGSYAGQLGIVHGMKQDVVHLNGHPAP

SEQ ID NO: 327994 - protein, 402 aa, unidentified
MNAVGIDVSKGKSMVAIMRPFGEIVSTPFEIKHTTSDINSLVELINSVEGKSRIVMEHTGRYYEVLAHQLSAANLFVSAINPKLIKDFDNDSLRKVKSDKADAVKIARYALDKWQNLKQYSVMDELRNQLKTMNRQFSFYMKHKTAMKNNLIGILDQTYPGVNTCFDSHARSDGSQKWVDFVSTYWHVDCVRKMSINAFIDHYQNWCKRKKYNFSRSKAEEIYGKAKELVPVLPKDDITKLIIKQAVDQLNSASATVESLRTLMNETASQLPEYPVVMTMKGVGISLGPQLMAEIGDVSRFTHKGAITAFAGVDPGVNESGSYEQKSVPTTKRGSSDLRKTLFQVMDVLIKTHPQDDPVYQFIDKKRAQGKPYYVYMTAGANKFLRIYYGRVKEYLSSLPES

SEQ ID NO: 327995 - protein, 363 aa, unidentified
MAAARARQQTATPATEVVGGVDTHKDTHTAAVVDIAGRVLGSAQFAADAAGYRALLAWLRAFGTLLLVGVEGTGVYGAGLARLLASENVAMVEVDRPDRKARRWQGKSDPVDAEAAARAALARVRTGVPKQRDGRVEALRALRVARRSAVAQRADVQRQIKALIVTAPESLRARLRGLKDRELIGWCAGMRPDKACAGDPMTATKIALRSLARRHQGLSVEVGDLDELLAPLVADINPDLLAMKGVGTEVAGQLLVTAGENVDRLQSEAAFAMLCGVAPIPASSGKTNRHRLNRGGDRQANCAIWRIVITRMGTDQRTKDYLARRTAEGLTKPEIIRCLKRYIARELFNRLVASPAQALTPAA

SEQ ID NO: 327996 - protein, 338 aa, unidentified
MNTNAPQLGIDVSKLKLDVALLLPTGAHAATFANTPKGFLALARWLARFPVQPRVCLEATGTYALPVAHYLHGRGLVVSIVNPMAIHFFARTRMSRNKTDAHDATLIAHFAQQHQPRAWRPPTPAQAQLQPLVRVREQVLESRVVAQQHLESAPAATAKYFRAQIRLLDRQLRALAGQIEQVLQAHPTLKESAALLSTIPGVGTVTAATVLAIIPEIDQLDNARQLAAFAGVTPSQRQSGTLTGRTRMSKLGHRRLRKALYFPAITALRCNPRVQALAIRLAQKGKAKMVIVGAAMRLLAHLIFGVLKNRTAFDPAYQRRRANTSNSRAAASLQLAPG

SEQ ID NO: 327997 - protein, 398 aa, unidentified
MTESSDYESVQVFIGVDVGKDTHHAVAINRSGKRLFDKALPNDENKLRSLISDLKQHGQILLVVDQPATIGALPVAVARSEGVLVGYLPGLAMRRIADLHAGEAKTDARDAAIIAEAARTLPHALRTLKLADEQIAELSMLCGFDDDLAAQTTQANNRIRGLLSQIHPALERVLGPRLDHPAVLDLLQRYPSPEKLASLGEKKLAAQLCKLAPRLGKRLAADIAQALAEQTVVVPGTNAAAVVLPRLALQLITLRKQRDEVALEVEQRVLAHSLYPVLTSMPGVGVRTAARLLTEVACRAFASAAHLAAYAGLAPVTRRSGSSIRGEHPSRRGNKALKRALFLSAFAALRDPISRAYYTRKMSQGKRHNQALIALARRRCDVLFAMMRDGTFYTPQAS

SEQ ID NO: 327998 - protein, 438 aa, unidentified
MECHRNIEVIWLLRTLKIPWGVDSDQFCEQTEVVYPLNPWRRPMSLDHHREGPTAIRTNLGAIFVSLELSRSTSLITSVSPGGGEKMSKHSVSAGDTAALLSRFSELKQKAFARAGKSLPIIVIQDAGLDGFWIHRVLRSEGIESYVVDPASIATSRRRRRAKTDRIDGEALVLALLAYKRGEPRVCAMARAPTPEDEDSRRLCRERKTLTIERVQHVNRVQGLLFSQGASGYEPLRRNRRQRLDELKTGDGRSLPPHLKAQINRELDRLELLLEQIKAVETERDAMLASATKPEGMNADSKRAPQAMLLDLNGIGAGIAAVLCSEGLYRSFANRKQVAAYAGLAPTPWRSGSVAHEQGVSIAGNPRLRTTMVQLTWLWLRHQPDSALARWFHERVKRNGGRLRKTTIVALARRLLVALWKYVTAGVVIEGAVMKAAP

SEQ ID NO: 327999 - protein, 402 aa, unidentified
MTFPFVEQIRVAVDVGCHRHRVAVAGPENRVLEEFDIEHSAQGIGAFFRRVEAHERRLGLPVAVAMEGFNGWARPLDAEILVRGWRLFNVNNLKLARFKEIFPGPAKSDPIDTRKMLELFELRAHLPLAKDVLQEIAVVPVENEKLKRITRRRRQLVNERMRVINRLQADLQAVSPGLCSITAKVDNLWFLRFLTCREHLDQLMRVQRRTVLNIQGIGQRYADIIQKWQKQAHFSAAVDYVGAMIIADARRILELKDQINVLENAMEALLLQSTIARLVDTIPGYGVVCSAELAGEIGTIERFSFESSLALYLGMAPLDNKSGKYHGSKSPRQVNARAKAAMMTGVDRHRKQVPESQRYYEKKRAEGKTHNQAIRALGRHLVRVIWSMLTKNRDYQLKIKTD

SEQ ID NO: 328000 - protein, 370 aa, unidentified
MSQSRTLFIGMDVHKDSIAVAYVAQDHGAEVTYLGARGTRQCDIDQLVCKMQSKAKHLLFVYEAGPCGYWLYRYLPRKGSDCWVVAPSLIPHKPGDRVNTDRRDARQLARLARSGDLTVVYVPKVEEEAIRALSRAREDAISDLKDAKFRLKAFLLRQDIRYVGRAHWGPAHLRWLSEVVCPTPAQQIVFQEYVRAVQEHTERLQRLEQELQEQVNAWRLNPVVEALQALRGVQFTVAVTMVAEIGDLTRFDTPRELMQFLGLIPSAYSSGEQRRQGSIPKAGKTHARKAVVEGAWAYRYPAKVSRHLQLRLEKPPKMIQDLSWKAQVRLCTRYRRLVSRGKHATVVTVAMARELVGCMWAIATQVPLTA

SEQ ID NO: 328001 - protein, 381 aa, unidentified
MTTPSTYNGQENTTEATLFVAFELSEKNWKLGFTTGAGQKPRERGMTARHQERMLDEIAQAKRRFGLPETTPVVSCYEAGREGFWLHRFLLAHGITNHVVDSSAIEVSRRQRRAKSDGLDVRKLLSMLIRYHGGERQVWHVVNAPSVEAEDQRHLHRDLETLKQERGDTTRRIKGLLSSQGLRVKTLSNLPEQLDALRLWDGSPLPPGLRRRLLRVYAHHMFLSQQIAEVEAERRAQLQTATEARIEKVRQLMQLKGIGINGAWVLVMEFFGWRELKNRREVGGLAGLTPTPYQSGERAREQGITKSGNRRVRWMIMELAWGWLRFQPDSALSAWFRERFGDGGQRLRRIGIVAVARKLLIALWRFLKTGALPEGAELKAV

SEQ ID NO: 328002 - protein, 337 aa, unidentified
MKHYLGVDLHKDKFTVCYLDQQDKKVIKEFRLENLDRFKKTLNPEDEIAVEAVGNSRYFCEELVTLVDKVLLVAPNKFKVISESSNKTDPNDAVKLAEFLKLGKLPEARIMSKEQAIIKSLLNTRSKFVKQRTQCKNKIHNILNSHGVCIKTQALFTKKGIESLKKMKFEPLVEKEIELLLQHISLLNGSIQSIEEELKKPENQLPGHQNLTSITGIGNVSASILLCSIGDISDFPDKKKLNAFFGMVPTVRCSNNTVHYGHITKRGNRLVRATLVQCAFVIIKYNPIFREFYLRLKQKKGNGKAIIATARKLLEFVHFTLTENIIWEDSNQGIIKI

SEQ ID NO: 328003 - protein, 270 aa, unidentified
MHYLYYVGLDVSKETFDASLVAFEDANEMAHRKFANSRKGICSCLHWVEKRHGIRLDDVIFCAEDMGSYISEMAVCASDRTLNFNFSLISPLVIKYSMGIARGKTDRVDARRIAEYAITHYRKIALYLPAEKELCQLRTWLILRAHLAKQRVAKLVLLEKLDYKEKFADVSIQRSMLQEEIAYAETHMKTIEREMKELIAADSNICRNYKLLTSIKGVGPITAIVMLCSTLNFTKITDHRKFACYCGLAPFEHSSGTSVCGGCHTSSMER

SEQ ID NO: 328004 - protein, 356 aa, unidentified
MTSATKYIGMDVHKESISIAVRNAGGKIAMESVIEAKTNTILEFIDGLRGEVHVTFEEGTWSEWLYDLLKPHVRKLVVCDPRRNALLKEGNQNDRVDARKLAELLQNNQLRPVYHANHGLRAMKELVRSYLTITKDLSRVMTRVKAIYRSWGIPCSGTQVYSSSHRSEWLDKIAEPGVRRRAEHYYQELDALRLLRVEVRKDLLAESKQHAIWKRLRQIPSIGPIRAAVLLGIVQTAQRFRTKRQLWTYSGLGIEGHSSADHQVINGQLQRRKKPIEIRGLNKNCNHHLKNVFKGAAIIASTKPGPFQEFYTALVAKGIRPEMARLTLARKIATIVLIVWKRGVFFDANHLKPQTA

SEQ ID NO: 328005 - protein, 323 aa, unidentified
MDKITNFFGIDISKDVFDVIDMKGKHYQFPNNLKGFRKFLKLLDKNSHCVMESTALYHLRLAYFLVDHNLKVSVENPIAVKRFIQMKLSKIKTDKSDAKMICLYAQHVQLKLWTGNSQNQIKCMQIIRLLDLYKKQSTALKNKIHGENTIGNPSSEVVKSLKRSLNQIKKEQLKLETKLNELVKEEHQTLLTNLESIPGLGRKTSIMLIVLTDGFERFQTAAGLCSYSGLTPIIKKSGKSVRGKPRISKMGNKKLRNLLFMCSFTACEHNKACKDIYQRITAKGKCKKLALMAVCNKLLKQAFAIAKSGIPYDPEYRSRFVVK

SEQ ID NO: 328006 - protein, 467 aa, unidentified
MTPQKGKKFRTSAGAERIQRLEVTNPHAAGIDVHSAVHFVAVNPADVPAGYVPEDPQLPAGVRKFGAFTCDLEALAAWLKDCRVQTIAMESTGVYWIALFELLERQGFTVILVDPRQTKHAPGRPKSDVQDCQWIQRLHSYGLLTASFRPSDEVVAWRGYQRQREMLIRYAGQHVQHMQKALEEMNVKLTEVVSDIVGLTGMKIIKDIVRGVRDPAKLAKHRHGRCRSSEEKIAKSLCGNWRSEHLFALGQALQMYEFSHRQLRDCDAKIATCLRAFADKSGGEVLTEKPRTRRTNATAFDARALLFHMAGVDLTVIEGISELTALTILSEIGTDMSRFPSERHFVSWLGLCPNHRGSAGKIFNRRVRKGANRAARALRMAGQGCHHAKNALGAFYRRIQARCGGPKAVVATARKIAERVYRLLKHGVEYVRQGEQVYEEAYRVRTLKGMARKAESLGYKLVPQTTE

SEQ ID NO: 328007 - protein, 344 aa, unidentified
MKDITTIGVDLAKNVIQVHGVDQRGQVVLKRQLPRGRFVDFFANLAPCLVGMEACSSAHHWARQVEKLGHQVKLMAPQFVKPYVKTNKNDAADAEAICEAVSRPNMRFVPIKNGEQQAVLAVHRARAGFVKARTAQANQIRGLLGEYGIVIPQGIGHLTKRLPAILEDGENELPGAFRRLLVRLGEHLKELDRQVGELEAQIQDWHRENAASRKLAQIPGIGPLTASALVATIGDANSFKNARQLAAWLGLVPRQHSSGGKTLLLGISKRGDAYLRTLLIHGARSVVRVAEGKAGDSPTWLTQLIGRRHKNVAAVALANKNARIVWALLAHGRAYQAEYLPVAA

SEQ ID NO: 328008 - protein, 438 aa, unidentified
MSNKVIFNLDELFISVGIDVGADFSWMSIALPNQQFVGKPYKILHNSIDSLTTAVSKIKEAEELYSLESRIFLESTGIYHYPLFCYLRDKGFNCSVINPIITKNSTNINIRKVHNDRFDSKKAALVGLKPDLKVSLMPSDLALNCRNLCREYYDLMDNRSAYVNKLQGELRMAFPQYLGIFSKVTINTSLTLLETYTSPSAFLKADKQEIIDIIKSTARFGLTYAQNKYNAIIQAATDANQFGYIIDSNIKRIRLYISFIRKYDEEINNILESLHELVDANEDADFVKQIHLIETFKGAGFLSAVSIMGEIGDFSAFSKPKQLFVYFGLDPAVKQSGKFEGTKVQMSKRGSSIARRVIHTLTLQSISISRNGEAKNPVLREYYLKKCDSKPKLVAMGAVSHKVCNMIFAILRDNKSFEIITPQEHIKQYNASKCDMAA

SEQ ID NO: 328009 - protein, 409 aa, unidentified
MQEATQHDAVDVFVGVDVDVDVDVDVGKGRHHAVALDRNGKRLYNKALPNDEVKLRALIAELKTHRRLLFVVDQPSTIGALPVAVARAEGVLVAYLPGLAMRRIADLHAGEAKTDARDAAIIAEAARSMPHTLRSLRLADEQLAELTMLRGFDDDLAAQVTQTSNRIRGLLTQIHPALERVLGPRLDHPAVLDLLERYPSPSALAAANEKTLANRLTKLAPRLGKNWAAEIVQVLNEQAVIVPGTQAAAIVMPRLAQQLAALRKQRDEIAAEVERLVLAHPLWPVLTSMPGVGVRTAARRLTEAAPKAFATAAHLAAYVGLAPVTRRSGSSIRGEHPSRRGNKVLKRALFLSAFAALRDPVSRAYSSRKIQQGKRHNQALIALARRRCDVLFAMLRDGTIYPPKSAPDA

SEQ ID NO: 328010 - protein, 332 aa, unidentified
MMAQNDGVVVGIDVSKDKVDASIRALALRQTCPSTSPGRRKLVAWLRKHQVKKAVMEASGGYERDWAKTLREAGLLVRVVDPKRVRNFARSAGQLAKNDAIDAEMIAWFAETFDQATCQACDVQRERLTQIVYARQALLDVQTELQNRGEHSVPDVVQRVQMRLLKKIGAELATLEAAMVAMVKATPRFTEIAEIIESVPGLAEITSAGLIAAMSELGQVSNKAAASLLGVAPYDDDSGKRRGERHIKGGRRKVRNLFYMACVGASTRHNPVLKAFYRRLIARGKEPKVALTACMRKLIVILNTMIARRQKWDATRYHMSHCARLPQSACAT

SEQ ID NO: 328011 - protein, 295 aa, unidentified
MQVSTIGLDIAKNLFQIHGVDADGNTVIRKRLGRSNMLSFFANLPRCVVGMEACATAHYWARELLAMGYQVKLMPPAYVKPYIKRGKNDAADAEAICEAVMRPTMRFVPIKSAEQQSALMLHRSRDLLIRQRTMLANALRSHFAELGIVIAQGLRNLPKLIELVVHDADGRIPAIARKVLGVLVAQIEDVQHRIENLERALLSWHRSNQASLRLETIPGIGFITASAIAATVTDPSQFVSGRQFAAWLGLVLAKTPAAARSGSAVSPKWETSTFVVFWSSVPPPSFASHEIGRRL

SEQ ID NO: 328012 - protein, 418 aa, unidentified
MEVMYARCAGLDVHKETVVACVRIVEGGEVSRSVRTFATTTASLIELGEWLEVNGCTHVAMEATGVYWKPVWQVLADSSFELVLANAAQVKNVPGRKTDVNDAAWLSELLAHGLVRARFVPEPAIQELRGLLRTRKQLVREKASHVQRLQKTLEEANIKLETVLSDVMGRSGRAMIQALIDGETDPAKLAALAHWKVRASAATLREALHGRIKRHHRFLLRLHLQQVDALDAAIAEIDREADAGLACFRDAVKQLSTIPGVSELSAQVILSEIGTDMGRFASAAHLRSWAGLCRATTKVPASAGRLACAGESPGSRPCSFNALGLPRAPKLPTYTRNLCDCAVDAGRRKRSALLLPPSSRPPITCSKTARSMKISEPFTSIVGGPRRKRAASSNASPNSAFPSNSSPWPPSHEQSVSL

SEQ ID NO: 328013 - protein, 334 aa, unidentified
MAFKFLAIDLGKRSFHIHGIDSDGLIISRKTSRANLIEMIEELAPETIAMEACTSAHYWGRRFVAAGHRVLLINPRFVKPFVKGSKNDAADAEGIYEAAMRPTMRFVPVKSIEQQDLQSLHRTRDRIVCARTALINHMRGLLGEYGIVLPQGAWHFLMRAQDAIADAELSDLARALFGDMIDELGCLDLRLEKLDRQLAAICRTNEACRRLSKLPGVGPVVATALVAAVDDGRHFRSGRELAAWIGLVPRQYTTGGKPRLGGIGRRANHYLRRQMIHGARSVMFRVAKHDNRRSQWLKGLAARRGFNRTVVAVANKTARVAWALLTRKENYVAA

SEQ ID NO: 328014 - protein, 458 aa, unidentified
MTRKRSKRKAAVRDVPTLEALKQINLNAAGLDIGDDEIYVAVPEGRDEVSVRVFRTFTVDLYALAKWLGSCGVDTVAMESTGVYWIPIYEILETLGFEVHLVNARHVKNVTGRKTDILDCQWIQQLHTYGLLRASFRPPEEICALRALTRHRDTLIRSCAREIQHMQKALQQMNVKLTNVISDITGTTGMLIIRDIVAGERGPQILARHRDPHCRKSEEEIAKSLHGHYKPEHVFALRQALEIYDFYQKQVKVCDAEIEKRYALFEPQVDVSEKPLPPSKKKKNRPRNAPAFNLRQYLYQWAGVDLTQIDGLNTLTIQKVLTETGVDMSPWPTVKHFTSWLSLCPHNDKTGGKVIKSHTKKTQNRAAAALRVAAQTLLRSKSALGSYHRRMRTKLGGPQAVTATAHKLARIIYSMLKNQTEYVDLGESHDEEQARQRAIKGLKRKAKNLGFELVSATD

SEQ ID NO: 328015 - protein, 411 aa, unidentified
MIEQVTVGIDVGCHKHRVAIVTPDGRVAEEFDMAPGKEGFEHFFARLDFYHKAFDMPVVVAMEGNGGYARPLDRCVQLQGYTLLNVNNLKLCRFKEIFPSPVKTDAIDARKIALLARAQVVLSPAKEVLQEVREIPQEHQVLKRLTRRRRQLVEEKVSISNRMQADLQAVSPGLADIVEYKDGVAFLNFLTHCPKLEGLSKLDKRELLSIRGIGEVFAQHVIKWQEEAYFSDEVAYVGPMIIEDARRIIELKKSIKEIEREIENIAGGSPLAEAIGSIPGFGVVCTAELVAEIGTMERFSSERSLALYLGMAPLDKSSGKCQGTKTATQVNKRGKAAMMTAVAHHIRKVDESKRYYQKKRGEGKSHNQAVRALGRHMVRVIWSIAKRNEAYQVRGEGGKIESDEACMAISA

SEQ ID NO: 328016 - protein, 358 aa, unidentified
MKHNNTNTQKSSSTKTAAKAKIIKLGIDVHADSFSVVRQIDNDTPPPAQKFTPEGFVKWVAKQLPAAEKVHRCYEAGPFGYSLHRQLLRMGVQNVVVRPQNWDELGRKVKTDRIDALALVQRLDRYVQGNRHALAVIAVPTPEQEQARGLGRHRQQLVQERQTHEAQGRSFLLYHGRRVQGQWWQPFAWEVLQQELEPWQCRILENFRAQILLADQQLAQVEKQVVAEAVSPAKGFGALTCQLLGREGLDWKRFANRRQVASLTGMCPSVHASGGHSRQGSITKHGNPRIRRLLVELAWRVVRFQPNYPPVQKWRPQLDNKRARGGRKKAAVAIGRHLAIDLWRMETGRSTAAQLHLT

SEQ ID NO: 328017 - protein, 353 aa, unidentified
MPCLPAEVILGVDTHRDSHAAVLIDPLGRFVAAETFSTTRRGLRALIRWAQRLGTVRRAGVEGTGSYGAGLTRALVLENIEVIEVTRTARIGRRHLGKNDTRDAEAAARSVLSGQATAVPKARDGIVESIRVLRNARASAVKARTQAIIHLKNLVITAPDPLRESLTTLNSKQLVARCAAMRRTDRLDATSATRCAMRTLARRHQLLDTEVAELDIKLAQLTKLAAPRLLREPGIGKEIAARLLLTAGDNPTRIRNDSALAALCGASPVEASSGKTTRHRLNRGGDRQANSALWLIANNRMIHHPKTRDYVARRTTEGKTNSEIRRCLMRHIARGIHPLLIADLTDAQQSPLT

SEQ ID NO: 328018 - protein, 382 aa, unidentified
MQASTESTPTAGHSGTIFVAIELSQKTWLVTLHSPDRERISRHKIEGGDHAELLAQLEKAKARAAAKLGSAPRVVSCYEAGYDGFWLHRLLQAAGITNFVFDAASIAVEQRSRRAKTDRIDGELMLRTLMAYLRGEPRVVRIVRVPSVAEEDARRASRDRDRLVTEQTAHTNRIKALLRLLGMAVGNPRRRNWLTFLEQQRDWQGQPLPPHLLAEVRREHARLILVREQLAALEQVQAAQARPIPAPMAERRSSLQRLKALGPAFTASLVGEVFYKDFRNRREVASYCGLAPSPWKSGGIDREQGISKAGNRRARNKAIELAWLWLRHQPDSALSRWFRTRTANAGTRAKRIAIVALARKLIVALWRYLTTGLIPEQATMKA

SEQ ID NO: 328019 - protein, 421 aa, unidentified
MAPTSHDTFAAFVGIDWADAKHDICLQAAGTAKRECFQLEHTPEAIDAWVTTLRTRFHSQPVAICLELSKEPLVFALRTYNFLVLFPTNPLTLARYREAFTPSRAKDDPTDAQLQLEVLLTHRDKLSPLQPQSPPMRALEQLVTHRRRVVGDKVRMINRLTSTLKNYFPQVLQWFQDKDTPIFCDFLSRWPTLKAAQLARRSTLETFFRDHHVRSADVIAQRLHAIKTATPLTTDEGVIAPNTLLVQALVAQLRVTLQAIADFDTAIAQRAQTHPDFPLFQALPGAGPVFAPRLLVAFGEQRARYAAAAELQKYAGIAPVTERSGKKAWVHWRLQCPKFLRQTFVEWAAESIRHSFWAQVYYQQQRDKGKTHQAAVRALAFKWIRILFRCWQERTPYDESVYLQALNRRGSSLIPKLVKAS

SEQ ID NO: 328020 - protein, 498 aa, unidentified
MRHIIRAAIALKACTLGTMFLMLTQMLHLRRQPPAGYFRRMNAYYARLHDMVVRDQPWLFLHPKKKGGEAVKKRKKIDHLSTLCVGLDIGSRKNFITAMNFDSERLIDMQSVPNAASGVEQLESMILAVLAVHAEFRYVLIAMESTSFYGVHVANYLSTSDALKPYHAEVFCLNPKEVANYKKSFAGIGKNDGIDSFVVADFIRVGRISIEPWRGAQYLALQRLTRQRKHISECIAREKNYALNNIFLKFSQFALLDGADTLLSNKFGSTAEAILTEFKTTEEIVNTPLEDLVTFISDHGRGRFAEPEEIARLLQKAARDSYRLDKSLYEPITTSISCSFNCIRANEKQLKALDKAIAELIAGLNPTEYQILRSIPGIGPVYAAGILAEMGSVRCFPDNNSLARYSGIVWKDNDSGEFEAEDRPMNKAGNRYLRYYLIQAAGSVAQYCPEYAVFYQKKYAEVPKHQHKRALALTARKLIRLIFGLLDKNQLYSPAKSK

SEQ ID NO: 328021 - protein, 376 aa, unidentified
MAEITRALIARVGVDLAKNVIQVHAVDGAGRRVVARSFKREGFLAWCAQLPAGCLVAMEACSGAHHFARRLRAMGLDVRLIAANFVSPYRMEGKSGKNDMTDAAAVCEAASRPTMRFVPIKSCVQQGVMSLHCLREAFKKQRTACINQIRGVLAEAGLVFGKSPKVLRAVMDDVIEDASNELSTLARLVLQQALAHWRALDEQMRWCDRQVGQHVRSSPAARRAAKIGGIGELGASAITASVVDFKQFKSGAQFGAWLGIVPRQNSSGGKASLGRITKRGDDYLRTLLIQGAKSAVMSAAKRDDPISRWLVQLTSRVGWQKACVAMANKNARILWSVMTREHDYDPHHVSVKPLAKQSVPPGPRPVQPVAPQACMA

SEQ ID NO: 328022 - protein, 410 aa, unidentified
MRTVALDVHKRFAEVAVHEHGEVRRLGRIETHELGAFAESLRADDHVVLESTSMTWAIAELLGRHAGRVTVSNPMRTKAIASAKVKTDKVDAKVLAQLAAADFLPAVWAPDEQTRALRRRVSHRASLVRQRTRLRNQVHAVLARNLVEAPVSDLFGQEGRRWLAGVDLPAHEREQVDSNLRLHDALDAELEAVDGQLAQRALADVDVRRLMTIPGVGPVTALSLLAVIGEVARFPSTRQLVGYLGLDPRVRQSGERPARTGHISRAGQAHARGLLVEAAHVAIRTPGPLRAFHARLKARRGPQVALCATARKLAVLSWHLLSKDEDYRYGAPTITQRKLRRLQHQAGDDGPKISLTGETRRRALERRLLEEAERNYRAHVAERARSGAGAATGEATLISPRGANDARQVQ

SEQ ID NO: 328023 - protein, 339 aa, unidentified
MNSMAVGVDIAKQVFQVHYVDQATGEIVNKPIKRARFLEHFANRARCLIGMEACGGAHHWARQLTQMGHEVRLMPAEFVKAFNIRNKNDAADARAIWLAVQQPSKPVAVKTEMQQAMLALHRMREQLVKFRTMQSNGLRGLLTEYGEVMSKGRAKLDKEIPAALGRIAERVPAALIDTLREQWNGLAKLDERIAEIERRMREWKKEDRAVKAISEIPGVGLLTATAAVAMMGDPKAFRSGREFAAWAGLVPKQTGSGGKVNLHGISKRGDTYLRTLLIHGARAVLTHVKEPGPWVEQMKKRRPVNVVIVALANKMARTIWAVLAHDRPYRKDYVSVKPA

SEQ ID NO: 328024 - protein, 345 aa, unidentified
MYDTIIGIDLAKHLIQICVVVNGTVISNKEITAQEFSSWLVNTQPAMIIFESCATSNYWQQVAKDAGHNACIISAKLVANIRQHQKTDKNDALAIVQASQLVDIKFINGKTFSQQELQSIMRMRELAVKHKVALRNQIEGLLLEFNIKVSRRKGGLSGTVQSVLEDAENNFCLPFRDALNATWQHYLHCVENIKTFDRLLSEVIKLHPDCEKLLALEGVSIINAIHLYIAIGCGEAGLFQSGRDAAACIGLTPIQHSSGGKVKLGSIGRFVKNVSLRSYLINGAMSVVYHVDKRAARTKKEKWLKDLLTRRSKKCAAVALANKTVRTAYAMLTKGTEYKAVPLEV

SEQ ID NO: 328025 - protein, 349 aa, unidentified
MLHVGLDLSRKRVDVCLISSDGELVDHFRARADRDGLYGLTRRVAVYDEPVRGVVESMNGARFVHDELVRCGWEVLVADAQRVKGLAPLACKTDKIDARVLAELSFRDLVPAIWLPTPELRAERERARWRLHLVKHRSILKNRVHASLIAFGHQVPMADLFGVAGRRLLTELDFPEPWLGHVQASLELIDDLDHRIGEIERWLHRSGADHRYIPLLMTAPGIGWVTGFTIAAEIGDINRFASPVKLTGYTGLCPRVNQSGEVDRRGPLSKHGPRYLRWGLMEAAIAASSHPLYKERYQRTKRRLGRQRGAKVAQIELARKLTEAIWYMLTRNQPFKPFAPAGAIFALTA

SEQ ID NO: 328026 - protein, 341 aa, unidentified
MDKELYFGVDVSKKTLDLAYYDGEAIDWKNAHIQVSNDDAGFKKIGSWVAKVGKDFATFLFCMEYTGLYNQNFRLWLESKEYIYGMVEPRKMHRFEPDLDDDQRSLDRIKTDELDAFRIAIYCEQNHKKILRNPSKLPSSVYFKLKRLLAERKQNTKQSVLYKQQLHDICAYDTDLSVERKKLLLKNMKENLKTIDKEIDCYIQEDASISKNYNLLTSIPGIGRIIALETIVLTENFTAISNPRKYACYIGIAPFKKESGTSVRKKTGVSKKGFSEAKADLSIAVLSAIRNNPSIRDYSIRKRKEKCGGIVLNAIKFKLVLRMFAVIKRGTPYVETDAYKN

SEQ ID NO: 328027 - protein, 401 aa, unidentified
MQDTQQHGTVDVFVGVDVGKGQHHAVALDRNGKRLYNKALPNDEVKLRALIAELKSHGQLLFVVDQPSTIGALPVAVARAEGVLVAYLPGLAMRRIADLHAGEAKTDARDAAIIAEAARSMPHTLRSLRLADEQLAELTMLCGFDDDLAAQVTQTSNRIRGLLTQIHPALERVLGPRLDHPAVLDLLERYPSPAALASTSEKTLANRLTKLAPRMGKGLAAEIVQALSEQAVTVPGTQAATIVMPRLAQQLAALRKQRDEVAAEVERLVLAHPLWPVLTSMPGVGVRTAARLLTEVAHKAFASAAHLAAYAGLAPVTRRSGSSIRGEHPSRRGNKVLKRALFLSAFAALRDPVSRAYYARKIQQGKRHNQALIALARRRCDVLFAMLRDGTIYQPKSAPNA

SEQ ID NO: 328028 - protein, 339 aa, unidentified
MRLYAGIDLHANSHYLGIIDGQNKVLFKHKITNDLKKTLDVLESFRSELKGVVVESTFNWYWLVDGLMDHGYRVHLANPAAIQQYEGLKHSDDERDAIWLANLLRLGILPEGYIYPKQERPLRDLLRKRLQLVRHRTSHILSIQNIVSRSLGIRMTSNEVKGLDEGQVAELFKEEHLFLAVRSSVGVVRYLGEKIKGIEKVVKGRVTLRQEFEKLLTLPGVGQILGLTIMLEAGDIRRFPAVGNYASYCRCVRSTRISNGKPKGEGNRKNGNKYLAWAYVEAAHFAIRDYSEVNRYYHRKAAGTNKVVAIKAISHKLARASYYIMRDQVEYDPDKLFHY

SEQ ID NO: 328029 - protein, 347 aa, unidentified
MKGAVHMQITTIGLDIAKNVFQVHGIDAAEKVIVRKQLRRGQVIGFFEALAPCLVGMEACATSHHWARELTKLGHEVRLMPAKDVKAYVKRNKNDAADAEAICEAVRRPTMRFVRIKSAEQQGQLMLHRARDLLMRQRTQLINALRAHLAEFGITAAQGREGIKELLAIVAQDEGSRLPVDAHASLTVLAAQLQAAQTMIGSIEKRIVAQHRSNEASKRLETIPGIGVIGATTITAVVTDPKAFRSGRDFAAWIGIVPRQDSTGGKQKLGPISKQGDQYLRRILIVGAHSVLRRARQQPEKYPWLTQLLARRPFKVVAVALANKMARIAWALLARGGTYRAPQLVAA

SEQ ID NO: 328030 - protein, 343 aa, unidentified
MQAVTTIGFDIAKSVFQVHGINAEGHGVIRQQLRRSRVLGFFKKLSPCVVGIEACASSHHWSRQLQALGHTVRLMPPAYVKPYVKRQKNDAADAEAICEAVQRPSMRFVPTKTPDQQACLMLHRTRHLFIRQQTAVINAIRAHLAEFGIVAPVGRNGVEELLDVVANPDDGRVPEIARECLEALGNQLRRLKGQILAFDRRINAWHRSNETSHRLDELPGVGPALATALVASIPDPRVFRSGRDFSAWIGLVPKQNSSGGKERLGNITKQGDRYLRSLFCAGALAVIRYAKIHGTKHRPWLAKLLERRPTKVAAIALANKLARMAWAMMAKGERYKEPVALAR

SEQ ID NO: 328031 - protein, 316 aa, unidentified
MAKEVTEITLGVDISKDTLVICDWDSGELTELANKADEIASWLDSLTGPVRLAVEPTSNYHLKMIDAAQRRGCTVYLVNPRQLAHYRQAVNARNKTDPADAWLLARYLAHEGEQLRPFEPASGKARELWALLSRRAVVVQSRNQLTQSFRESGFSTQRLMSEIKHVVRRLDERLLVLIKALGWEGDYRRALSIPGIGPLNAVALVATFHRGAFASADAFVAYLGLDVRIRESGSYKGKRKLTKRGPAELRRLLYCAARPARTYEPFADYHQNQLDKGLSKIAANCILARKLARIAFTLITRQQSFQKKEIAYSQAP

SEQ ID NO: 328032 - protein, 343 aa, unidentified
MQIRSVGIDLGKTTFHLVALGDNGKVLLKKKFTQRQLIAFTANLQTCLIGMEACSGAHFLGRTLRQQGHDVKLIPAQFVKPFVKSNKNDFIDAEAIAEAVDRENMRFVPIKTDDQLDLQALHRVRDRLIARRTSVINQLRAFLLERGLVFAKSPARLRERMPEILENADEDLTPRMRNLLALLWNEWKDLEQQLVDLNQEVERIASSDAACTRLRQIPGIGPLVATAIVAAIGNGAAFRKGREFAAWMGLVPKQYSTGGKAKLAGISKRGNRYLRKILIHGARAVVLRSKRDRIAMGQWMTALEARAPRNVLIVAMANKLARIAWAVLSSGQDYRAVQEPVVA

SEQ ID NO: 328033 - protein, 360 aa, unidentified
MSFNGTSVGLDVHALSVVAHAVDEQTGRVERARLCPDHGEILGWLNQLRAPVRVAYEAGPTGFGLARALAEAHIDCTVAAPSKLIRPAGDRVKTDARDAAHLTRLLRLGEVTAVSVPEREVEAARDLVRAREDARADLMRVRHRLSKLLLRQGRVYSGGQAWTGVHEIWLRRQRFDDRHTGAAFDHHFDAVLNATAARDRLDTQILEVAALPRFADTVNRLGCLRGISALTGLALTVEIGDWNRFTGSSIGAYVGLVPTEYSSGTSRVQGSITKAGNAHVRRLLIEAAWHHRASYRNPGPTMRARWAKVDPALKARGHAGNRRLHQQWCRFIERKKPHVVANVAIARELAGWCWSLATLQ

SEQ ID NO: 328034 - protein, 311 aa, unidentified
MYYIGIDVSKKDLSVFDGKDLNFINKEGLKSFKKYLKKKYRLSEIAIIFEPTGIYSLYLKEFCAENNIKAYIVNPKQSHNFARALGIRPKNDKIDARTLYKFHKLIEAKDIKVPKIDQQAKTLSSYLVSYEFALKQRVSLSNHLESLRDKRLIALMKKELKRAKKLEDKLFNDILEYVSKNQNLKEEYQRLLTISGVGDKTAIALLTLFKTYQGTNRAQITALAGLDPVRRESGTSVKYKVKISKNGKGIYRKIFYLPTICATVHNQKIRVFYQRLLANHKIKKLAIIASMRKMLLIAHAMYRDKTEYVAA

SEQ ID NO: 328035 - protein, 417 aa, unidentified
MEESSKARAIRYVALDIHKKYCVIAGVDREGRVVLQPVRVEHGDLEEWLKKNLRSTDRVVLESTTNAWHVYDLLKPLAERVVVANPIKVKQIASARVKTDIRDTLILARLLAANLVPDVWVPPLPVRELRQLLSQRRQLVEMHTQIVNRMHSVAHRHHLQHERGKRFNEKNTAWQKDKRLSKVEQFQLELEMENRAYIEKQISRIGKEVAKMSHRNPWAQDMTYLMQLPGFGVITGMTVLAAIGEVQRFDSAKKLASYSGLTGGLEQSGTKFIEKGITKEGRKELRWAMVEVAQRAVKADPRWTHKFQELHKHMHRNQAIVAVARQLLELVWHVLTRRQPYRHFSQERIAYKYLTWAWQMDDAARDGLTRQQFARYYLMRLGIGHDLTRIALNPKYPRKLASETELLALRPELNHLE

SEQ ID NO: 328036 - protein, 356 aa, unidentified
MMVVGVDPHKQTHTAVAADELGRRKAQKTVRARRGGHRELIAWARQACPGGRTWAVEDVRHVAGGLVRDLLAAGEAVVFVPPKLMAGARRGGRERGKSDPIDALAVARAALREEIALPAARLDGPVLEVRRLGDYRDDLVAERTRVINQLRWMVHDLDPALAPAPRSLGSARARAKLEAGLAALPACAGRAVALSQLARVAALSAEITGLEQDLAGLVTPLVPDLLAMTGVAVLTAAKILGEAGDIRRFTSPAAFARHDGTAPLPASSGTSDGASDGPHRLNRGGNRQLNAAIHRIALAQARCHPGARALLERRGQDKHETRKASFRALKRHLSDAVYHALKADAWRLDDTAQHAA

SEQ ID NO: 328037 - protein, 392 aa, unidentified
MVVSVGIDVSKDKHDCFIVSSEGEVLADAFIIPNTMDGFHYLLQRIRHCTAPQDKIKVGLEATGHYSYNLLGFLLDNGLTTYVLNPLRTNLYRKSLSLRKTKTDRVDARTIASMLLSDAGLKPYTDTAYHNEELKSLTRYRFDKVKERAKLKSSIARLVCILFPELEKLVPSLHIASVYALLEEFPGAKQVANTHLTRLKALLETASNGHYKRDMALEIRDTAKNSIGSQMPAKSLELQHTIRLIRELNREIDEIEEQIQSIMDELHSPITTIPGLGFRMAAMILAEVGDFTRFDSPDKLLAYAGMSPSTYQSGQLKNCYPHMEKRGSRYLRYALYNATKYVCHWDPAFADYLAKKRAEGKHYNIAISHAAKKLIRLIFAMEKSRQPYCSAA

SEQ ID NO: 328038 - protein, 338 aa, unidentified
MDKSAECGIDVAVRELVAVLRANGRCAAERRFANTPAGHKEVKRWLTRSAARVRVCLESTGLYGLDVALYLQADSRLEVMVANPRSVKDFARALLRRSKSDPLDAWVLAEYAGRMPFRPWQPPGSAALAVTALARRIHALTEAATREKNRLHALSVTATSLKILVTELKRSVQWIERSQARLTRQAHKIIEGDVQLARRFQLLLSLPGVAETSALQLLGELALVPADADVRQWVAYAGLDPRECSSGSSLHQRPRISKVGNRHLRRALFMPALTAVRHDRALAAYYGALQQRGKCKMVALVAVMRKLLHAAFGMLKHDTLFDGGRVFRSPAASAGAAA

SEQ ID NO: 328039 - protein, 365 aa, unidentified
MSSVPSAAELIHLGMDTSVKEIVAGVLRPGEDVPVITRIPGDQESVRRLIGRFPDRRLVSACYEAGPGGYELHRLLISMGVACDVVAPSLIPKGTSDRVKTDRRDAIRLALMHRAGLLTPVRVPSPAEEAVRDLVRARADLLDDRKRMQQRLNAMLLRHGRVWHGSKWTYEHRAWVARQVFEEPALAETFALYQAALDAREAELAAAEATMAGWAGRDPLAAPVARLGAYRGIAQLTGLTLSAEVVDWRRFACARAFMGFAGLTPTEYSSGGRDRRGHITKAGPEAVRTALIEAAWAYRYRPAIGATLKRRQAGQSPDTLTRSWKAQLRLHAKYKKMTARGKPPGVAVVAVARELAGFVWAEMTT

SEQ ID NO: 328040 - protein, 373 aa, unidentified
MNYTTVYVGMDVHKETFTLCCYTNEKEKAEYPQKVNGHYSKVLNYINAMRKHYGDDAVFVCGYEAGCLGFTLYHQLTEHNVDCVILAPTTMLKEQGKKKVKTDKRDAMLIARCLAHKDYSPVHIPTDIDEQVKEYVRMRDDHKLALKKVKQQIIAFCLRHDYRYTEGKSNWTEKHLQWLRSLEPDGVYAEILEEYLLTYEYLTSKLEMLESRIKELAELDEYKASVQKLRCFIGIDTITALSLVVEVGDFHRFATAGHFMSYIGLTPGEDSSGQDQNRLGITKAGNRHLRKLLSESSQCFSRGKVGAKSVALKKRQQGNPPAVIEYADKANIRLRKRFYHLVLNKGKHRNIAIIAVSRELAGFIWGMMTEQFA

SEQ ID NO: 328041 - protein, 449 aa, unidentified
MMEPVEVPDEEHEQILERVAAIDVAKATGMVCTRVPHDSRPGRRLTRVWEVPATTNAIIELGECLAGLGIERVTLESTSDYWRPFYYLLEAAGLDVQLVNAREARGVPGRPKSDKLDCVWQAKLTERGMLRPSFVPPAQIRQLRDYTRLRVDLTRDRSRHAQRLEKLLEDALIKLSTVATGIMGVSGRAMIEALIAGERDPQVLASLARGRMKVKHAALVQALTGRFDEHHGELARMLLDSYDALTAQAGKLTSRIEELIAAIPEARGVDAGGATGPGAGEGPDAAVRSAIARLDEIPGVGRHTAQVILAETGLDMARFPTAAHLASWAKLSPRTIQSGARSRGGKTGKGNPYLKGVLGEAAAAAAKTDTFLGERYRRIVRRRGKLKALVAVARSILVIVWHLLADPAATFHELGAGYYASRTDKDKKTRNHVRQLEALGFTVTLAQAA

SEQ ID NO: 328042 - protein, 408 aa, unidentified
MEVIRERCAGLDVHKDTVVACMRIQTEGQVRREVRSFGTMTQDLLTLADWLEEQNCTHAAMEATGVYWKPVWHMLEGHVELVLANAAHIRNVPGRKSDVNDATWIADLLAHGLIRSSFVPPKPIAELRDLTRTRKQLTREIVQHTQRIQRVLQEANVKLDSVISSVLGVSGRRILRAIIDGEQDPEVLASLGSPRLACSPKALVEALRGRVTAHHRFLLSQHLGLIESLEGTIQQFDEEIERAIHPFRELVQLLTAIPGISDVSSRAMVAEIGIQMEQFPTVGHLISWASLCPRLDESAGRTRSSRVRVGAAWLKPMLVQCAWAAVRSKDTYLQAQYLRLKGRRGPKKAIVAVAASILTAAYHMLKYGVEYRDLGGAYFRKRDSEKVAQRLAKRIRELGYDVNISKVA

SEQ ID NO: 328043 - protein, 351 aa, unidentified
MVEYVGIDWATRRAAWCALNVKGEIIGEGMVAADLDGVLRLVSRAGGEVRAAIEMMSGAAWVAETLQAAGWQVQVADSRRARALAPLAAKTDKIDARALAELARRDLVPAVWVPPFHDRELLEQLLRRMHLVRLRTSGKNRIFGILTQWGVRVPLNRLRKADGLVLLERRGVPEVWRDSVQELLATIDYLDERVSRLDAVLRPLARADERAQLLATIPGVGPLLALTIASVVGDVSRFPSAAQLVGYSGLVPRIHQSGESSRTGRLSKAGSPLLRWAAVEAAQHAWRPQNPWHRLYVDVRRRHGHGNAAKAAVARKVLIACWHVLARNQPFKPAAAAAPIVPASSSQPLAA

SEQ ID NO: 328044 - protein, 391 aa, unidentified
MIYIGIDVAKDKHDCFITNSDSEVLFKAFTIFNNLDGFNDLYQKIESVMDDVTKVKVGLEATGHYSYNLLGYLIDKGLPTYVINPLHTNLYRKSLSLRQTKTDKVDARTIASMLMSDVNLKSYSDTSYHNEELKSLTRYRFDKVKERAKLKTSVSRLVCILFPELEKLVPTLHMASVYALLSKFPSAKHVATAHLTRLTNLLSESSKGRYCKDTAITFRDAARASIGSNMPAKSLELKHTIKLIQELDSEIDEIENEIKIIMDGINSPILSIPGINYRMGAMIIAEICDFNRFDSPDKILAYAGFPPSTYQSGQLDGAYAHMEKRGSRYLRYALYNATKYVCHWDPTFAVYLAKKRAEGKHYNVAISHAVKKLVRVIYHLEKTKQQYIKAT

SEQ ID NO: 328045 - protein, 343 aa, unidentified
MDHFAGLDVSVKETSVCIVDDTGRIVREVKVASEPEALLPVLKNPAYHFKRIGLEAGPLSQWLFSALAEAGLPVICVETRHMRAVLKAQINKTDRNDARGMAQMMRAGLYRPVHVKTLRSQKLRMLLTHRKLLQSKAIAIDNDLRGTLRNFGLKVGMVGKVRFEARIRELVENLPDMAVLVEPLLIVRRALREQFCVLHRRLLAIVRDDEVCRRLMTTPGVGPVVALTYRATVDVPARFRKSKAVGAVFGLTCSKYQSGEIDRSGRISRCGDEMMRVMLYEAAQSMLLHSKKWSWLKAWAMQIATRRGMKKAIVALARRLAVIMHRIWVDGTEFRWTRDVAAA

SEQ ID NO: 328046 - protein, 384 aa, unidentified
MDVVVTSNPKPEGKHMKTEKYVGLDVHKDTTVIAVAEGDRCGEVRQFGAVSSDLRALEKALKKIGGEGITLHVVYEAGPTGYVVYRRLKRLKIDCIVVAPSRIPQANGARQKNDRRDALMLARLHRAGELTAIHIPDDVDEAIRDMTRARADAVHDLTRAKQRLKSFLLRQGMHYPGKASWSAEHQRYLRALQFPIPSLRAVLEEYLFAYDQIVQRVQRLEELLEVHVPQWRMYPAVQALMCMRGFRLTAAAMLVAELGDIRRFSHPRHVMAFLGLVPKQNSTGQTMRMGAITKAGNPHARWILVEVVQHALMTPKVSRQLGIRQEGQPALYRDLSWKAQVRLHKRGWHLLRRGVMKAKVNIALARELAGFVWDLLRQAPTPTA

SEQ ID NO: 328047 - protein, 393 aa, unidentified
MLLGAESCEAPAAIRYDLGAIFVSLELSRSKWLVTSLSPGGGEKMSKHVVAADDVAGLMGLFERLRAKARERTGRLYGMISIQEAGLDGYWIHRVLVAEGVESHIVDAASIAVSRRRRRVKTDRIDGEALLRTLMAWKRGEPRVCSMVRVPSPGQEDARRLIRERKTLVGERLTHVNRIKGLLYSQGISGYEPLRRDRRARLEELASGDGRPLGAHLKAQIVRELDRIELLIEQIRQVEAQRDALLARPDEAARPANGAPMPTAMLLELVGIGPEFAAVLWHEGLFRRFDNRRQLAAYAGLAPTPWQSGAIEREQGVSKAGNPRLRTTMIQLAWLWLRHQPDTALSHWFNARVKHNGRSRKTSIVALARKLLVALWKYATDGVVIDGARIKTA

SEQ ID NO: 328048 - protein, 357 aa, unidentified
MQSQARSLDFSGETFYIGLDIHKKRWVVSIRNNRTELNTFSMDPDPGQLNQYMRRNYPGGSYVSAYEAGYFGFWIHCKLEQFSFNNIVFHAADIPTSHKEKEIKTDPIDSRKIARELKNRSLKGIYIPDDFHQQLRSLCRLRHRHIRHQTRIKNRIKGHLSTYGIIVPEGIQFSNWSVRFINWLRGLEFYHTSARDYLAICLDEYAENRRRIARITNLLRGYIKENGLSDLIKKLCTIPGVAFVTAITFYTEIMDMNRFADEDHFCSYVGLVPSLHNSGEKESDRGMTKRRNSILRHMIVEASLVAIRKDPAMLMCFNEFCKRMKKQDAIIRIAKKLLRRMRHVWKNEKAYVYAVVA

SEQ ID NO: 328049 - protein, 339 aa, unidentified
MWHSGIDQHKQFCVITTYGPEGPRVKQSRVPSTPLEVARYFAEFPGPHRAVVESTGGWYWLADTLAGLGVELVLAHATRVKAIAAAKVKTDKVDSDTLALLLRADLIPLAHMIAPAQRGPRDLMRTRLRLVEKSVSAQNSIERLLEKFNLTSVTELEACYQLQASCHTAQLALLDTQIASLERALYPHLIPNADVQRLLWIPGLGKVNAFTIYTEIDGITRFPSARQFFSYCRLVPGADNSAGRTRHRSGSKAGNRYLKLAFSHAGIRAVQYHPEIRAFFKAKARKKPIRIARTLVALELARIVYHVLARHEDFNGQFKGRELSHRKHAKWPRRASPPA

SEQ ID NO: 328050 - protein, 319 aa, unidentified
MQSKLTFGMDIGKNEVVVACHEGAFAILKMANAVAGLRRWLGTVPAGSRLGLEATGGYHEPVAELAYSLGFTVYILNPKDVHFYARALGARGKTDRLDAQIIAAYVAEHCARLHPFTPLSADEKLLRELARRRATLVNAKSMLQQSLRVLPGFEREGRELLRAMGSFADRLERKLAQIAARSSERATLVKRLQTIDGVGTLTSIRCATLFTRVPFHSSDAVVAFFGLDPRPNDSGQHRGRRRLSKRGPSEDRRLLYNAAMSAIRTPAWRPLYLHLRNRGLASTEAIIIIARRIVRIAFAMYQNHSNFNPRLVPRPYCPA

SEQ ID NO: 328051 - protein, 317 aa, unidentified
MKTVPFEQVILRGCGIDVHKDMVVATISGEGLKTETRSYKTFSSSLTELKEWLLSSGITHVAMESTGVYWKPVYKILECPDMKVWIVNARHIKYVPGHKTDKKDSAWICKLLLAGLLKPSYIPKREQRELRDLTRYRNKLIQHVSSEKNRIVRILEDCNIKLSSVVCSLDGVVANKLIDMLIDKGHVTMDDITCIYHKKLEASPELLYQACEGFIEPHHIYMLQTIRKDMEQTKAIIADLTCRIKEVLSPYENVMELLQKIPGLSRKTVEDLIAEIGVDMEAFPTEKHLASWAGVCPGNNESAGKKKVVEPPMATNS

SEQ ID NO: 328052 - protein, 355 aa, unidentified
MKGEVQSKKVLVRGKEVYIGVDVHKESWHVTVRVEGEEAFHGRILSQYHSLQKLLDHFRDCRIKVAYEAGPCGFWLYDRLTEDGIETIVVPPSLIPIESGNRVKTDKRDSRKLAKLLESNMLKRVHVLTEEERMHRELLRTRHQVVAHRSDVARQIKSKLLFYGISSPFPSKHRWTLTYVEWLRSLSLSSQFLKESLEVLIDVYEYLTRQLMRINRKVVELSRSDKYRGRVKLLRTTPGVGLLTGMEVLVELQDVGRFKSSEEIASYIGLTPSEYSTGEYTRQGRITRSGNWRVRVALIESSWILITKDPGMRSRYMRLKSMKGSKRAIVAIARRLIIRLRSMLLHNVPYRMARA

SEQ ID NO: 328053 - protein, 313 aa, unidentified
MDTACYVGIDVAKDRLDVHIRPQAKAFAVANTTAGVAELAEILAPLRVEKVILEASGGYEKLAFMALVEAGHAVAIVNPRQVRDFAKGAGRMAKTDTIDAAVLAHFAEVFRPRTTAPLTPLEAQIDEYVVYRRYLIREMMGIRNQLRRLTTPSIRDVLEQRFAAAKRECKIIETQMSALVRSSDKRPLFDLLTGVPGVGALLACTLIASLRELGSLTRREIASLVGVAPMNNDSGRRRGHRFVMGGRSAIRNVLYMATLTASRFNTPIKAFYARLREAGKPAKVALTACMRKLLTILNAMVRDDQTWRASATN

SEQ ID NO: 328054 - protein, 320 aa, unidentified
MDSVLGIDIGKAKFHVTLLVSDGTRRRKACANSPAGCTDLLAWLVRHGAGRVHACLEATGAYGELLATTLVDAGHQVSILNPAIIHHYAKSRLSRAKTDPVDADIIAEYAAKEHPPTWTPLPREVRELQALVRRLDALMGMQTDERNRAQAGGLTAAVQESIEAVLGHLEAQIATVRHQIRRHMDQHPGLRAQRDLLTTIPGIGEATAALLLAELFNKAFTSARQAAAFAGVVPRPNDSGLHEGRRVMCKLGPARVRKALYFPAIAAIRFNPSLQPLARRLRAAGKPPMLIIGAAMRKLIHLAFGVLKSGRAYDPDLAKA

SEQ ID NO: 328055 - protein, 365 aa, unidentified
MEIMHWIGIDDHADKWTIAYFRGDAEKPTKEFELMPDESGYRKLIAFAKTLGKKVRIVYEAGPCGYELYRRLRKAGLQCEVAAPSLTPRKPGQRVKTNRRDAAKLARYLRSNDLTLIVVPDEQRESLRDLIRARAAAQKDLVSVRHQITKFLLRHGHRFRDGRAWTLRFWRWVGQATFEGEYGQFVLDDMVAVHTERLERVARYDEEIEAAAKKPEYAPYVAAMSVLRAIDTRSAMTILAELGDLRRFATAPQLMAAVGLVPAEHSTGDKNTRLSITKTGNAHVRHIVVQAAWHYQRRITSGSAIQRRRKNQPPELLQIAHRCDQRLNRKFFRMTSRGKRSTVAAIAVARELVGFIWAIGQVMYA

SEQ ID NO: 328056 - protein, 392 aa, unidentified
MRTIALDLGVRKIVLCEVRDGEVVHRKTARSLHELDDFLGADTPPARVAFEACREAWHVHDRLIALGHEPFLIDTTRVRQIGVGQHGRKNDRLDAEALARALAQGRVPRAHVLSPARRQLRAELSARNALVMTRAQYVTTVRGLARSEGVMLPTCATETFVARVRAASLSPAMTAIVAPVLVVLDLIGAQLAEVETRLETLARTEPVIALLATVPGVGLIVASTFVSALDEAGRFRDGHSVASYLGLAPSENTTGMAGRRLGAITKQGNPWARAALVQASHTILRVAPAEDALRLWGEAVIARRGKMIGVVALARRLAGVLWAMWRDDRPYDSARLAARSAEGLREDAYATLSQADRLAAIADAEKKIYARTTPRRPRRALARKTTEVTRPG

SEQ ID NO: 328057 - protein, 328 aa, unidentified
MHIASIGIDLGKTTFHLVALGERSKVLLRKKFSRAQLLAYTATLPHSLIGLEACAGAHFMGGRLREQGHQVRLIPAQFVKPYRKSNKNDFLDAEAIAEAVTKQNMRFAQLKTQEQLDWQAMHRVRDRLVQRRTALINEIRGFLLDRGITFPAQPIHLRKNLPTVVEDAEQNLSPRLRWLLNRMWQEWKQIDTEVQAITEEIERISKDDARCQQLRQIPGFGPLISTATVAAIGNGAAFRRGRNFAAWVGVVPRQHSTGGKQKLYGISKRGNVYLRRMLIHGARRDASCCRSLEHSFSTWAAQPGASAEAERVPCYRFVTEAIFCWPEV

SEQ ID NO: 328058 - protein, 340 aa, unidentified
MDEYVGRQYVGIDLHRRRSVIVRMTPEGERLGAAVRIDNDPFELARQVASWGESPEVVLEATYGWYWAADVLTEAGANVHLAHPLGVKGFAYRRVKNDERDAADLADLLRMGRLPEAWVAPPDVRGLREAVRHRCKLVALRSGLKAQVHAVLAKQGVRVPMSDLFGVAGTQLLDELALDAPFHARVLSLRRLIDAYTFEIDVLAKRTAGHLTRHPGFQAVQTIPGVGPVLGAVFVAEIGDVTRFPRAEKLCAWAGMTPRHRESDTKIHRGRITKQGNPLVRWAAVEAVQRLHGGAIGRTRARLTERRGANIATVAAARKLLTLVYYGLRDGHVRCLTRPA

SEQ ID NO: 328059 - protein, 343 aa, unidentified
MPHYVGLDVSQKTTAICVVDEQGKRLWRGVCATDPGAISARVSQHAGVDAKVGIETGSMTPWLVHGLRSAGLDVQCLDARKVKAALQMQLNKTDENDAEGLAQIMRTGWYRAVHVKSLDAHRARALLGARAQLVGMTTRLSNMIRGVLKTFGLLPGAGRGLRFDRKVEALLEGAPEIALVVRPLLATWRQLREQIAVFDKAVLQQVRADPICRLLMTVPGVGALSSLMYVSTVEDQSRFSRSRAVGAHFGLTPRRYQSGETDRSGHISRCGDGLARTLMYEAAVVILHRVKRPLHLKNWAEAIERRSGSGKARVALARKLSVILHSVWRSGEPFRWAAPALAA

SEQ ID NO: 328060 - protein, 364 aa, unidentified
MSKSKWVVAIDTGDALKPTVHVLPGFDTDGLLDLLSTSARETAGSSQHPADVVVCYESGYDGFWLQRLLTAEGHRAIVFDPVSFPVNRRAKQAKTDKIDAKQMVRFLKTWVESDPTICTAIRIPSPEEEDAKRFHRERGALVAERTRLAARCRALLALEGVHDIAPLAVTHVRRLDGLTTHDGRPFPAQKLAEVRRIFRRIKFINELIREVDAERDEAVQKDDARFPEAEKALQLERIKGIGRYSACLLASEIYNRDFTNRKQLASYLGLTPTPRASGDVEKCVGIDKAGNKIARTLLVELAWNWLRFQPDSALSKWYRTFTATRAPSSKKIAIVALARKIAVALWRYVGSGLIPTGVVMKAEA

SEQ ID NO: 328061 - protein, 394 aa, unidentified
MKLVGIDVGKNSHHFCVMDKETGKFNVTPTSFSNNKEGFDFLINSLKPYSKKSILIGMEDTGHYHVALLKFLLSNGYTVALINPKTTDLTRKMEGGITKNDKLDTITICDVLDTPERKKQYRITKVDRFDLYEQRQLTRHHHNLKEELNVYCNRLQKSIDLVFPEFNTLFSSKYSIVYMNLLKTFGSAEAIASTDIRTIRKCFEIKGRGNRISLTPEKLKECAKNSIGISSEVETIQIKHLVSQITLIKEQIAEIDKKIEEFSITNNSPILSIPGISHFSGTSILAELGDIGNYSKPSQIIKFAGVAPYHYESSQYNAQHTGITKKGSKYLRKTLYQIILTVINNNPVFKKYYRLKISQGKGHRCAQGHCIRKLLRIIYHLLETGQSFDPALLR

SEQ ID NO: 328062 - protein, 326 aa, unidentified
MEAGTSQPHTPTAIRTDLAAIFVSLELSRSTWLITSLSPGNGEKMSKHTVAGGDVAALLHRFAQLQEKVRSCTGNQVPIVSIQEAGLDGFWIDRVLKANGIESYVVDPASIATSRRRRRAKTDKLDGEALVRALLAFKRGEPRVCAMVNAPSPEEEDRRRICRERKVLIAERIKHVNRIKGLLFGQGMSGYEPLRKNRRKQLDELHTGDGRPLPTHLKTQISRELDRLELLLEQITAVENERDTLPAAQKDSVAATLIPAGAMLCDIKGIGLEFAAVLWTEWLFRHFDNRRQVAAYAGLAPTPWQSGTIDHEQGVSKAATRACAPR

SEQ ID NO: 328063 - protein, 408 aa, unidentified
MKRYYIGVDWGDRLHQVYVGDEEGKKVREMKVQESPQGLAEIGRWLDEKRAEGFELWAAIEKPAGRIVDFLLDHGVEVYPVNPKAVDRVRDRYRMSGSKSDAFDAYVLAEFLRTDQAHLKALRPSSEKAQELKMLSRDQRRVGRHKTRFLNQLTTTLKEYYARPLEVFEDLETEIALDFLKQYPTPAHLSALKRKEFNRFATKQHHLSKQRCEELWEKLNKPQLAVPEHVVRAKAQLLEVLIEQLRASIKAVKIYNHRVESFFASSPAAQFAKTLPGAKSGTLVAAIWAELGDAQGRWESSGHLQAEAGAVPVTKASGKSRVVHFRFACNKPLRHTMYWFSFVSLNQSEWANLYYRAQRDNGHSHHQALRALGAKWLKIIFVMWRDHKPYDENYHLANIARQKMRQAA

SEQ ID NO: 328064 - protein, 410 aa, unidentified
MELLHRRCCGLDVHKDTVVACLRLVSNGKVTTEVRTFRTITADLLKLSEWLAANDCTHVAMEATGVYWKPVWHILDDGEFVLVLANAAHVKNVPGRKTDVNDAMWLAELLAHGLIRASFVPDQTTQEMRNLMRTRKQLVREQSRHLQRVQKTLEDANIKLDSVLSSLMTKSGRAMIAALIAGETNPVKLARLADPRVKASPQDLSEALRGRVTDHHRFLLRLHLKQIDTLTAALAEVDAQVATNLEPFRTAVDLIKSIPGFDDIGSHVVVSEIGIDMSRVLSAPHLVSWAGICPRNDESAGKRRSNRLRKGAPWLKTTVVQCSWAAIKKKGSYLQALYHRIKARRGPKKAIIAVAASILTAIYHMLKDGTMYQDLGADHFNRRSTDRQKTRLVKRLADLGYAVELKPLAA

SEQ ID NO: 328065 - protein, 391 aa, unidentified
MFYIGIDIAKKNHEASIIDSSGKSLSKSISFPNSTKGIEKFNNFIAEFGVTTNNCIVGMEATGHYWISLFSYIVDLGFTCYVINPIQSDAFRKMYVRQTKNDSVDSFIIAQIMRFGEFSISNFSDENTFALRNLTRYRFALVDECSDWKRKLVAILDQVFPEYSSLFSNIYGVSSKELLSKYPLPEDMLSIPAEELGNLLYECSKGRLGINKAEEIQSRARETFGIKFAKRSFSFQIKQIISQISFLEEQLKEIEIEISYLLEDICPIITTITGIGSVLGASIVSEIGNISRFERANQLVAYAGLDTRIKQSGDFSATNTKLSKRGSPYLRRSIWLAATVAAFKDPALSIYYQGLRARGKAHGTAIGAVARKLTNIIFAVLRDQKPYTPNI

SEQ ID NO: 328066 - protein, 404 aa, unidentified
MNAVGIDVSKGRSTVAVVRPFGEVVRMPFDVLHTASELGELANFLQSLGGETRIVIEFTGKYYEPIAHALYESGLFVSVINPILINEYGNNSIRRAKTDARDALKIANYALTNWTALLRFVPEDELRRMLKVYNRQCSQYTKIRVMLKNNLISLLDQTFPGINELFKSPAREDGHEKWVDFAAKFWHCQCITSLTQRTFSERYAKWCRKHGYNYSESKAEGIYFSSAGHFNTLPMSDASKALVIQAVAQLNTVNETIAATKREMTAIASQLPEFDTVLAMHGVGKTLAPQLIAEIGDVRRFEKKSSLVCFAGVEPPENSSGNFVQKSRSMSKQGSPSLRKTLFIVMSCVLKLQHQEEPVFQFLDRKRAEGKPYRVYMVAGMNKFLRIYYARVKECLNAAEVADL

SEQ ID NO: 328067 - protein, 379 aa, unidentified
MRRVCGLDVHKDSIYMCILYENGSKIESVFGVLTPELDKLRDLLVSHHVCEVALESTSIYWIPIWNILSVDFSLKLVNPYFIKQLPGRKSDVKDAEWIATVLQKGLIRGSYVPDRMIQRLRQYERRNHELSKNIVHAEQRMDMILQRCNIRISNYVSCISCKGYQKVVNAIISGESNPKVLVTLIHKRTLNKHGRQVVEDSLNGFVSDTDRDILRQYRDERMQMEQHKSENKAKMQAICEAHYCEELELLQTLPGIKEESAANIIAEIGVDMKMFLTASAIVGWAGLKPRNDQSAGRIKSRKITHGNKYLRKILVEAAWSAARTKDSRFMKMYQRLLARGKSKQKALIAVARKLLVLIWNMLSKKEAFNPEYKRRIQAA

SEQ ID NO: 328068 - protein, 338 aa, unidentified
MIGVDLAKHVFQLHGATMTGHVQFRKKLSRPQFQRFMADHAPAVVVMEACSSAHHWARELRSLGHEVKLIAPQYVRPFVKRQKNDAADAEAIVIAAQRPEMRFVEPKSEQQQARSMLFRGRERLVRQRTELINALRSNLYEYGHIVPKGITQINRIAAIIEDPDNILPDIAREECHDLMAQIADKTARIDVRMKKIKAMAAETDTTRRLQTMPGVGPMTAMAVEAFAPDMTNFRSGRDFAAWLGLVPRQHSSGGKERLGRVSKAGQADIRRLLIIGAMSRLNWMGRRSIAQGSWLARMMAKKPRLLVAVALANKMARAIWAMLTRNEDYRDPAQAVHA

SEQ ID NO: 328069 - protein, 340 aa, unidentified
MKTLSVGVDVSEKTVDVAYWDQNENEPVFVGRFTNNHKGFQAIGRRIEKRRKDINAATIHLVMEPSGGYEQPLAHFVHQQGWRVSLPNPVYPKRWGESVGRRAKTDPQDARNLAHFGFVNDPLPWKPLPPEVEQLNHLLDRLDNLKKMLSQEKNRAHAAEYHVNGHEAVCDDLAEVISFLEQRIEHLQKVVKEHLKAHPHLKKQRKLLLTVSGVGVKNVLHILVMMHRWDVLTDGEGDASGLVAYLGLDPKPHVSGTSIRKRSGISRQGNRPMRSRLFMSALGGVKGKNSPLTAFYQRLVGRGKPKKLALVAAARKILVWSWAVFRTDTPFDAARFEASQ

SEQ ID NO: 328070 - protein, 409 aa, unidentified
MQVVHERCAGLDVHKRTVVVCVLVPEGREVRTFGTMTRELMEMVDWLLGKRVTHVAMESSGVYWRPLFNLLEGRGVELLVVNARHVKAVPGRKTDVKDAEWLADLLRHGLLRASFVPDRSQRELRELVRYRKTLVEERARMVTRIQKVLEGANIKLSSVASNVVGKSGKAMLEQLAAGNEDAEAMAELALSNLRSKRGQLREALFGSMGEHQRFMLKSHLHLVEELDAEIEAVNAQLGERMRPFESQIALLDQIPGIGTTSAQQILAEIGVDMSRFPTADHLASWARVCPGMNESGGKRHPASTGAGNPWLRSTLIEVALAAVKAGRRQPNFFSARYHRLSTRRGPKRAAMAVAHSLLIAIYNMLRNGSYFVDLGPTHYDQRRRNLIVKRSVRRLEDLGYKVSIEEAVA

SEQ ID NO: 328071 - protein, 366 aa, unidentified
MVLAKKVRQKVVKLNFKGTLITAGIDIHLKQWNVSVFVEDRHYKTFQQEPCPQKLYEYLEKHFPEGTYQSSYEAGYFGYHPHRELESLGINNMVINAGDVPTSDKDKRRKSDKVDAKKIAVAQVNKMTKSIYIPSEQMEADRKVLRFRTKTLRKEVTANKQRLKAFLVRLGVHKEIEGYGNSYWSKKIIEQIKQLDLAQANDRYMLDELIAKYTYLKAKLSRTNRHIVIMSRQDRYAELVERLRSIPGIGLLTAMCIITEIWDMKRFASLDKLSSFVGIVPDTSSSASREQVKGLTKRANVELRRLLIQSSWVASSRCRYMAKIYQDHKKKREQKGIIKVARKILSVIRAVWLKNENYSIDKMYIV

SEQ ID NO: 328072 - protein, 348 aa, unidentified
MLADQLDYVVGVDPHRDTHALAIVDVRTGGVVVEASVEASSIGYARALELARGQAPGRRSFAIEGAGSFGAGLSRFLSGEGERVLEVGRLRRERRSGGKNDALDAIRAARSVLAASRAAEPRAGGAREALRALMAAREGAVNARRAALCQLRALLITTPESLRSELRPLTRAQLLRRLGSARPERRRDVELRGTLRALRALARRVRQLTAEERELAGEIETLARALAPRLLDQAGVGPLTAAQLVISWSHQGRIRNEAAFARLAGCAPIPASSGQTIRYRLDRGGDRRLNRALHMILVTRRRSHPATIAYIERRVQEGKSSREASRCLKRYLARNLYRLLEHGAPLAT

SEQ ID NO: 328073 - protein, 353 aa, unidentified
MEHFIGCDAHKKFSIFASIDEKGEYGPTFRVRHDLEVFRKFLKELPARSKIALETSGCYYWMVDEMERAEHIPLLAHALTAKRRMEGRHKTNERDARGLAMLLRNGTLPVVWIPPAELRDQREMLRWRMCLSRMRTRVKNRIHGVLQRYNVDIAVSDLFGDAGRVELLARLHELPPYSRHSLLDQLLMVDTVETQISECEQVLEEMLYPSADRDLLDSLPCVGKILSAVMALEIGDVQRFGGPDRLVSYAGLVPVARESADWKRKDRCPRDCNMYLKWAYVEAANLISIHRGRWPERHVAQLYERVKQSTKMHGKATMAVARHLAEASYWMLRKQAVYQEPNSKRKVLSSTHG

SEQ ID NO: 328074 - protein, 341 aa, unidentified
MGETSERELVVGIDIAAQTVTAAWGSDVRQIGAAQTFSQTQSGHRQLVRALKATGCAPEKALVVLEATGTYWMRVAVALHRAGYPVSVINPRQAHHFAEALLKQAKTDAIDARTLAHLALALPVKRWQPPGEAWEALYQRLAEHDSLTDTRQRVSSQLHALQQRVHVDPAVEARQQQLIEMLDDQLKAVKQEIEGWLKQSEWAELAQRLQAIPGIGVLSAAWLLVVTNGFTTCDRAEQLASYLGLVPHPQQSGTSRRGYRPVGSSGHARARRILYQAGFSAVRFNPAVRAFYQRLIRQGKQVKVARCAAARKLVHIAFAVATKDQPYDPTYHLANHQPILA

SEQ ID NO: 328075 - protein, 343 aa, unidentified
MVYVGIDLHRKSSQLCALDEHGEQLLSRRVVNEPEALLAALAQLPERPAVALEAAFGWEWLADLLESEGIELHLAHPLRTRAIAAARVKTDAVDARTLAELLRARLLPEAYVAPRELRQLRQLLRQRICLTQLRTSLKNRVHALLAREGIQRRQATLFGPAGRAFLAGLPLRPPERARLEQLLRLIAVFDTEIAALAAEIEARAQSDPRVSVLTSLPGIGRYTALLVIAELGDVGRFASAAKLCSYAGLVPRVRASGGRVRLGAISHQGSPYLRWALVEAAQQASRRPGPLRRRYERIARRRGRNVAKVALARQLLTLCYYGLRDGEIRCLARASSAWDMAAA

SEQ ID NO: 328076 - protein, 391 aa, unidentified
MIYIGIDVAKDKHDCFITNSDSEVLFKAFTIFNNLDGFNDLYQKIESVMDDVTKVKVGLEATGHYSYNLLGYLIDKGLPTYVINPLHTNLYRKSLSLRQTKTDKVDARTIASMLMSDVNLKSYSDTSYHNEELKSLTRYRFDKVKERAKLKTSVSRLVCILFPELEKLVPTLHMASVYALLSKFPSAKHVATAHLTRLTNLLSESSKGRYCKDTAITFRDAARASIGSNMPAKSLELKHTIKLIQELDSEIDEIENEIKIIMDGINSPILSIPGINYRMGAMIIAEICDFNRFDSPDKILAYADFSPSTYQSGQLDGAYAHMEKRSSRYLRYALYNATKYVCHWDPTFAVYLAKKRAEGKHYNVAISHAVKKLVRVIYHLEKTKQQYIKAS

SEQ ID NO: 328077 - protein, 413 aa, unidentified
METLYRSVCGLDVHKKTVVACVRRLGERDRVWKEVRTFATMTHNLRALVAWLEQERVTHVAMESTGILWKPIYNLLEEHFTVLVVNARHLKQVPGRKTDVKDCEWIAHLLQCGLLRGSYVPARVYRELRDLTRHRTKLVQQHTQTVNRLHAVLQDANIKLSSVASNIVGVSGRDMIDALQQGEEDPTQLAELARGRLRAKIPQLRVALEGLVRDHHRFLLKVVLDQLDYLSTAIDQLSQRIEEISPTSFRDAVCLVSTVDGIHQRTAENILADTGIDMTQFPSAKHLSSWAGMCPGNNESAGKRKSGKTPKGHRWLRGALGEAAVAATRTKDTYFAAQFRRIAGRRGKKRAVVAVGHAQLTTIYHMLSTNTASKDLGPHHFDTLERLRLTRHHVRRLQALGYTVTLTPVQEAA

SEQ ID NO: 328078 - protein, 420 aa, unidentified
MAAATADKEIASEVPVEIWFQMLWRRAEPILFGSPNQSDGAAVMQPNDINSPTILLAIELSASTWLVAARVPGSEKPHLQRIDGGDTVALLALISSLQARVACRHAATINVVCCFEAGRDGFWLQRFLTQGVDTHVLEPTSILINRRARRAKTDRLDAVGMLRVLAAFLRGDRQSCSMVRVPTPDEEDAKRTHRERESLVQERVRIENRIEALLFTQGIRKRPSLRSWDRDLAVLRTGDGRRLPIHLRSELDRLRRRLVMTLELIGEVESERDEAAEATPQDQTCLKIAALGRIRGVGDNFAAVLTREVFYRSFDNRRQIASYVGITPMPYQSGSMDRDRRISRAGNPRARTTMIQLAWLWLRYQPGSELAKWFRNRVGTLAGRTRRIAIVAMARKLLIALWRYVETGVVPAGAEIRAEA

SEQ ID NO: 328079 - protein, 344 aa, unidentified
MGEVITVGLDIAKSVFQAHGVDEAGAVIIRKRVSRAKLLEFFARLQPCLVGIEACPAAHHWGRELQALGHTVKLMPPSYVKAYLKRSKNDANDAAAICEAVTRPSMRFVPIKTKEQQAALMLHRARQLLVRQRTMLSNAIRGHLAELGIVSAKGRKGTGALLEIIADAEDGRVPPAARGILDVLARQYSALGAEIGSIDRSILAWHRSCEASRRLEEIPGIGPIVATALVAEIGDWKAFGSGRNLAAWIGLVPKQQSTGGKDKLGNITKQGNRYLRWLLVAGAMAVIRYAQKHGTLKRPWLGRLMERRPTKLAAVALANKIARMAWAIIVHGDRYREPKPLLAA

SEQ ID NO: 328080 - protein, 404 aa, unidentified
MDTILERCAGIDVGKKIAVGCLITDQGRKAPTVQIRTYGTAVTQLDQLRDWLKQAGCTHVVMESTGSYWKPIFNVLEATMTVVLANPAHLKNVPGRKTDVKDCQWLAELLRHGLIRGSFIPPRPIRELRDLTRRRRRLIATGTSERNRIQKVLEDANVKLGCVLSDLFGVSGQDMLEALLEGNPTAEQVAQFARGTLKRKIPEIIASLEGHRLSDHHRFLIRQCLAHMDFLESQICDLDAEILRKLQPYQQQFELLQTIPGIKADAAASILAEIGSDMSQFPTAAHLASWAGVCPGNNESAGKQRSGKARKGNAWLRGTLSQSAWAAANTKNCSYKSRYRRLAARRGKKRAVVALVHALLRTSYYVLRRASPYQELGSDYLDERRREALIRYHTKRLHEPNVSA

SEQ ID NO: 328081 - protein, 417 aa, unidentified
MIYVGIDWADKNHWVFITDDTGSKLGSFSIENSPEGVQELFSRIRKVVKEQNQAIFALETSKGLLIDSILDAGYTVYPINPKAVDRYRDRYKVSGKKSDEFDALVLANILRTDRNNYQPLLPDSPLTRHLRTLTNEYKFLLRLKTKLSNQITSCLKDYYPVALSLFCKLGQQVSLNFLKKFDSPEAFEKLTKSKIKRFLSKNHYPGVEKKAEEVYHLSQEPQFNVEPSLASAKSLYMLTLVKQLETLLVSLETFEKEIEKLLNQHPDKDIFLSLPGSSTITSAKFISEFGDNRNRYKKISSVQAEAGTCPVTKQSGNQRFVYFRRACRKSFRDAACRFAFTSMKQSSWAKERYERYVGAGKKHPLALRCLANAWLEIIVPMWKNRTLYSEQRHLLKMVVKEQNLPLIKSGALVSVYY

SEQ ID NO: 328082 - protein, 376 aa, unidentified
MANVEKDFAKGKPVYVGLDVHKREWTITVLCQGEELYHATVVADCAGLVRLLRRFEASEVHTVYEAGPTGYWLHDALTEAGFDSIVTPPSLVPRIGGRVKTDKRDSRKLASLLASGFLKRVHILSSEERAYRQLLRTRNQIERHRKQTQAQIKSMLLFHGKKAPRTMLERWSQTHVDWIAHLEWDNPALKTSMDALVQLYRSLNDQLKAMTAAIEELAQTDKYRERAALLTQIPGMGIYTAMSILIELQDVERFRRAEQLASFLGLTPSQHSSGEHVRLGEITHCGNPRLRTRFVESSWTLIRYDMAMRTVYERIKHQTGSGKKAIVAVARRLALRVRRILLDRTAYRYGDGRRPQFARDKTREIKKLVVRRVHLV

SEQ ID NO: 328083 - protein, 391 aa, unidentified
MSMYFIGIDISKYKHDCCIISAANQKVVSKVTIENNKSGFEELLTIINSLSNPADIKIGFESTAHYALNLEIFLENSLLTFMEVNPVLISEYKKSKTLRRTKTDSVDCESIARWLMTVEYKPHPKGFYHAYSLKSLTRLRNKLVRQRSFYLVKITNVLDHTFPEFKPFFSERFSKTALYLLENYGSAEKMARMNSVSYEKLRSLSRGKFSPQQFLQLKELAANTVGVNNSIFDVELNSLLTLYKSLEKEIDILEKEIIKLIEEIHPHYMSIPGIGPLSAAVIYSEYGDISNFSNSGQMLAFAGIEPGINESGTESHGGKMVKRGSSQLRYTLINCCVPLIRFDMTFATYYAKKRGEGKPHRVAITHVAKKLIRVIYALERQDIDFNTQKLR

SEQ ID NO: 328084 - protein, 337 aa, unidentified
MEYFAGLDVSMEETHVCVVTRNGTVIHEAKVPSTPASIAATLARVPSCQRVLFETGRMAPMLYHGLSQLGLPVVCVESRQAYQALKSLATHKTDRNDARGLAHLARTGFFKPVHVKSLPAHAVRSLIIARKQLVGQRVTLENQIRGLAVVFGVRLPRALSPAFIRQALQASEGIPGLSAAMKGLVAARAAVLAAVVAIDGDIRKMARASAACRRLMDIPGVGQLTALAFTTAVDDPERFRRSRDIGAYLGLVPRRYQSGEVDYTGGISKCGDRRVRTLLYEAANVMLTRYKGPLKLKAWALAIAKRSTMRKARIALARRLAIIMHAMLRHGTEFKSA

SEQ ID NO: 328085 - protein, 398 aa, unidentified
MVGYDVVIGVDVGKHTHHACALDVEGERLLDQEVEASETAMREVFESACGHGEVLVVVDQLHSIGALAVTLAQSMGLEVAYLPGLSMRRLADLHPGKSKTDARDAFIIADAARTAPQSLRRLTLPHEAQAELSMLLGYDDDLAGQVTAAINRLRGLLVHIHPSLEKALAENISHEAVLHLLIKTGGPAGMTSWSKTRIDKQLAKYAPRMHARLAEDIWAALQSQTVTVPGTSAAAKVIPGLAEQILQLRNQRAAINRDVERVLDDHPLTQILTSMPGIGVKIAARILAETGGTITAFPTAAHLAAYAGLAPVTRRSGSSIRGEHVNRGGNKRLKNALFMAAFTSLRADPTSRAYYDRKRAQGKRHNAALICLARRKTDVLFAMLRDHQPYTPSIPVAA

SEQ ID NO: 328086 - protein, 352 aa, unidentified
MIIIGVDFHPEFQQIASVDTDTGEVQEKRLAHREEAEKFYRALAGQKVRVGMEASGHGRWFERLVAELQFELWIGDAADIRTRRVRKQKTDRQDAQLILRLLLEDRFPKIWVPSWENRDLRQLLWHRHRMVQARTRIMNQLQAVALNEGLRCKKRLWRIHGREQLESFRLAPWASRRRRDLLELMDRLNPTIAELSQAIEQEVEKCPEARRLMTHPGVGPLTALAFVLIIGEADRFQCGKQVASYLGLVPLEDSSGNRRRLGHITKQGSSMLRFLLVEAAQVTVRSLPEWRSKYLHLMMRRGRKIAKVAMARKLAVRLYWLMRQGWDYQQWVKFGSHAGQPGHRHGVQSNTE

SEQ ID NO: 328087 - protein, 373 aa, unidentified
MGSIAAAAVAVVEVVAGVDTHLDLHHAAVISTGGELLGTRSFATTRARYRAMLAWFRSHGEVIRVGVEQTGTYGAGLTRHLALAGIPVLEVTGPDRSERRAKGKDDTLDAISAATAALSGKRVSVAKDRAGQVEALRVLRTTRKTAVKCRRATLQQLRNTITAAPEEVRDQVRNLTRMQLLRTCAAWRPDQLAFRDPAVATKIALKSLARRLLELGDEISELDRLIAPLVTELAPNLLEKEGVGIENAGELLVTAGDNPQRLRSEPGFSMLCGASPLPASSGKTVRHRLNPGGNRQANSALHMIVVCRMRTDQRTRAYLARRLAEGKTKREIMRCLKRYVAREIYHALTQPAAGAPDEGKTLARTTKTTSKTT

SEQ ID NO: 328088 - protein, 358 aa, unidentified
MRSPACGSHIHCSKLEPLNERARLHRARLAFASMSQNNSTILYAGIDIAKDTLQLSLGGTSENLPNDARGHARILQLLGAAEAARPGGKIHVILEATGGYEAALCAALHAAGKVLSVIQPLRARHFARARGEQAKTDPIDAEVLAAFGEALRPAPTPAPSAAQTHLGALVGRRAQLIETRTAESNRAAHDTDKLLRRQSRALLALLARQIGQCDAAIAAQLAADAPMKARAARVQQVAGIGPVVAAILQAGMPELGTLNDGQAAALAGLAPYNRDSGPRQGVRSIRGGRASVRCALYMAALSAVRHDRILREFYQRLRAAGKKPMVAMAAAMRKLIVLLNRMLKKPLFHLLTSAARNP

SEQ ID NO: 328089 - protein, 340 aa, unidentified
MSEITTIGLDLAKHVFQVHGIDAEGTTVLRKRLRRNQVLGFFSRLPRCVVGLEACATAQYWARELGALGHEVRLMPAQYVKAYVKRNKNDAADAEAICEAVQRPTMRFVAVKTAEQQAAQLLHRGREQLVRQRTMLVNALRAHLAEFGMVAAQGLRNVARLIAIVRDASDLRLPDVARQVLQVLSAQLEHIEAAIAALEKQLMAWHKANAVSQRLASIPGIGPIIATAIATTVADPGVFRSGREFAAWLGLVPRQNSTGGKTRLGGITKRGNRYLRRLLINGASANLLRSKATKADPWVIGLRRRRPPLVVAVALANKTARIAWAVMLRKTEYQPRAVAA

SEQ ID NO: 328090 - protein, 386 aa, unidentified
MSRPSDILPRAINYDNTLVLAIELSNKSWVLAAQVPGLPQTKAQRTIEPDKNALLAAIDGYRARAAAVGYAVNRVITTYEAGWSGFWLARWLMAQGVEVHVVQPSSVPVDRRLRRAKSDGIDAELLLRTLLAWLRGEPRVCSMAPIPDEADEDARRCVRERTELLSDRVGLTNRIGAVLATLGVNDYNPLLQSRRRRLAELRTGLGEPIPPNALAKIERLLARLELVLAQIAELERERDEIAAADAPDRAGKMIQQLTSLRGIGVQSATVLVREAFVRHFSNGKALGSYAGLTSTPYSSGRTDREQGIGKAGNRRLRTVMVELAWLWQRYQPGAAQVVWFRERVGSTGRRIRKVMVVALARKLLIALWRFVIDGVMPEGAVMKPSI

SEQ ID NO: 328091 - protein, 325 aa, unidentified
MGEFSTIGVDLAKSVFQVHGADASGAVLFRKKLRRHQVLTFFAAQRPCTVAMEACGSAHHWAREIGRLGHTVRLIPPAYVKPFVKRQKNDTADAEAICEAAQRPTMRFVVPKSEQAQAAAVVFRARDLLVKQRTQIINALRGHLTEFGIVVAKGPAHVPQLVRAVEDGAEPIPELARPILQGLIEMLQALDDRIAGLDREIAQRAKEDETARRLMTVPGVGPVTATALAALAPPAETFKRGRDFAAWVGLTPLQHSTGGKQKLGTTSKMGERTLRRLLILGASGVLRWVARNGAPAGSWIARMVARKPPMLGKHPMSHADFERRA

SEQ ID NO: 328092 - protein, 416 aa, unidentified
MDTMYERCCGLDIHKKTIEACFRSGKKKTHMSFGTTSAELRKLTIWLVENDCQSVSMESTGSYWKPIFNILELSGTDMEIIVVNARHMKNVPGRKTDVNDAEWIAELLQYGLLRPSFIPDREQRELRELSRYRKSLVGERAREINRLQKMLEGGNIKLTSVVSEVTGYSSRRLLDRLLRNDEPMTEEVISGLVHTSLAGKSKELETALDGLLSELQKELLIKVLDHIDDMSRRIADLDDFCRKQMKKYEDALDKLDEIPGIARRTAETILIETGLDMSRFPTAKHFARWAGLAPGNNESAGKRSNGRTTKGNPTLKSTLIQSAKEAARKKDSFFKARYQKIAARRGANRASVAVAHSMLIAIYHILKSGERFKDLGEDYYNQFNKEKKKKYYLKKLTKLGVNLKEATLSISIQAAT

SEQ ID NO: 328093 - protein, 354 aa, unidentified
MKKIFIGIDFSKEKFDATLIQAEGLKECAPSVHEVFDNKTSGYRRLVKWVKTHAEGFTTDSWLFCGENTGGYSIGLSNYLYASGYDMWLECAYKIKHSAGIQRVKNDKADSRAIAEYAMRNYDKMILHKPQSASLTCLREIFLYRHSLVRQKVALQVRRDEKRLTQEKSDARAFMSFTSKHLITEVNKAIAKCDEKIKEIIASDDELREVFDIITSMPGIGVQNATCLMVYTDNFQKFDLNSRKIACYYGIAPFGRQSGTSVNGRPQVSPFANRMIKSLLSQAALAAIKFDMNVHSYYQRLIERGKHPLLVHNNIKNKMLHILVAMVRDRIKYNPDNVYRTSNEVSLAPQVLNI

SEQ ID NO: 328094 - protein, 311 aa, unidentified
MTEHTIGIDISKSYLDAFRLEDQTSLRFENSARGLRALTKWLGETTVSRIVFEPTGPYHRALEKALSGKFPLAKINPLQARRFAQACGTRAKTDAIDARILAQMGVALKLEPDAPVSENLLILKDLQVARTALVKERTRLCNRSHVQVNPVLTRQIKARLTLVKRQIAELDAEIKSHLAKDEALERKREILCSIPGIGTIAASLILTFLPEIGTLGRKQAGSLAGLAPHNRESGQWKGKSFISGGRKPLRDALYMPALVAMRFNPDLKAKYSALREAEKPAKVAIVALIRKLIETGNALIKDDRCWSPKSA

SEQ ID NO: 328095 - protein, 313 aa, unidentified
MVHLGIDVAKDEIVVWDGESVRTVPNRLESLSEWLSSHPEPGTLTVESTGGYEGALALLAFEAGWRVHVLQPAWVKAHARVLGGRSKSDAVDARVIRSYLRANEEALRPWRPREEGVEALRALLRQRQSLGEGIAKLRASLEGLGMAKARLDEALQGLLRVRERLDSEMRALLAQDPKARLLLAVPGVGVQTAAAVLVAFRGGEFPCAESFVAFAGLDPVARDSGKSSGQRRISKRGDRSLRRALFMAAFGATRLPCWKPRYEALRQRGMPPTKAQVALARKIAVVLYAVYHQDLEFDPERVQVKERKRAAGP

SEQ ID NO: 328096 - protein, 347 aa, unidentified
MAMTTIEAVRAVTGGVDTHGEVHVAAALDPVGGVLGTAAFDTTPAGYRQLLEWLRGFGPVSTVGVEGTGAYGCGLSRFLCRQGVVVVEVDRPNRQVRRKQGKSDPLDAVEAARAALSGRAGVAKTKDGAVEAIRVLVVTRRSATQARVKALVQMRHLIYTAPDQLRERLKGLSTPRLVVEAASLRAGRAPDPVTAATKTALHSLASRVRTFDKEIQAIDSLLGPLVATTAGELVALTGVGTVVAATLLVAAGDNPERLSSEAAWARLCGVAPLPASSGKVTRHRLDRGGNRQANSALWRIVIVRLTCDPNTQAYVERRLKEGRTKREVIRILKRYVAREVYRHLPRR

SEQ ID NO: 328097 - protein, 434 aa, unidentified
MIENFELDDTFEGHARLYELLRSFNQNHPQATIYAAVESTGGYENNWFQSLLKFQGSLPIKTAHLNPLGVSYNQKADLKRNVTDKISAQNVAEYMIAHPEKVSYQHQDALASLRKQWGFITMLTKQSTQLLNQLESLVYNANPEILMYCKDGTPQWVLKLLTAYPTALRLSKAKVKSVARIPYVSKDRAQQLVATAKKSVASASDNVTQQLIVATVKQIVGLNKTIKAQTKILTNECDMAEVELLKTFIGISDYSAIGLMLEIQSIQRFLVSKKLASFFGIHPAYKKSGDGTWKYRMSKKGRKEPRRILFMVAMSAIKSNPLIRSTYQQAVDRGMEKKAAVGLCMHKILRIIYGMLKHNQAFDPEIDRKNRQKKPLRQGKVRQDKDRRYQDFDSKAPISRRQKMKRKERKQSQNVSNVEYGINEASVPVIELTN

SEQ ID NO: 328098 - protein, 372 aa, unidentified
MPQSSTLYVGMDVHKDSIVVAYIAQEHGAEVVSLGPIGTRQCDIDKLIRQLQSKSKQLVFVYEAGPCGYWLYRYLTKKGYVCWVVAPSLIPKRAGDRVKTDRRDAIQLARLMRSGDLTPVYVPAVDDEAIRDLSRAREDTLHDLKAAKLRLKAFLLRHDIRYTGQANWSPAHLRWLSEVVCPTPAQQIVFQEYVHTVTEQTERLHRLECELHEQVHTWRLAPVVEALQALRGVQFTVAVTTVAELGDLTRFNNPRQLMNYLGLTPSEYSSGARRQQGAITKTGNSHARRALVEGAWAYRYSAKVSRHLQLRLEKLPKAIQAISWKAQVRLCKRYRQLMAKGKNANQVVVAIARELSAFMWAIAKQVPVPPAG

SEQ ID NO: 328099 - protein, 338 aa, unidentified
MSLYCGIDLHSTNCYLAVLDEQLRPVLGRRVANSLETILAALAPHQEQITAVAVESTFNWYWLVDGLMEAGYQVELVNTSAVRQYEGLKYVDDRHDARWLARLLQLGILPTGYIYPKEQRSLRDLLRRRTFLVNQRTANLLSIKNLYSRLTGTQVPTKDLKRLTIDQVAEQFPDPLLAQAITCGVTVADALKTEIAKLEKTILAQTRQRPEYALLESIPGIGQTLAMTILYETGSLSRFPDAAHFCSYCRCVPSKHLSNGKVKGKGNTRNGNRYLSWAFIEAAHFAIRFEPLAKKYYERKKARTNPILALRAVAHKMARACFYVMRDQVPFQAAQAFG

SEQ ID NO: 328100 - protein, 267 aa, unidentified
MENPQPFVGIDVSSQRLDVDTVPVSQPFSEPNHEDGIASLMKRLKPLNPQIVLLEATGGYEIAVAYALYEAGLPVVITNPKNVRHFAKAIGRLAKTDKLDAQVLALYAQRVHPPVQPLRGQEQLELANLMARRRQLQGMIVMEENRRRTCTPKVCANIDLSLAHLRRLLKDLDLDIQDSIHRTPLWHEKAEILQSFTGVGPKVSASLIADMPELGRLPGNKASALAGLAPMNQDSGKHRGKRMIKGAAPQCAGPYIWPPWWPPVIIQ

SEQ ID NO: 328101 - protein, 462 aa, unidentified
MAPRHKGNPPKVKKPRAKSAPQLPTLHPHAAGIDLGAREIYVAVPPGSDPRPVRHFPTFTEDLHSLRDWLKECGVTTVAMESTGVYWIPLFQILEAAGIEVCLVNARHCKNLPGRKTDVQDCQWLQYLHSVGLLRGSFRPEDQVCAVRTILRHRDALVRGAGRCVSHLHKALTQMNVQLHHVISDLTGVTGQAILNAILKGERDPHTLAALKDHRIKASRDVIAKSLRGDWRPEHLFTLKQTHALWQQHQSLIAECDAQIATMLQGFDSRAEIGSAPLAPAKAGHKKKAQRNEPQFAAREECYRVLGVDLTVVPGFATPTVLVLLCELGPEFAAKFATAKHFGSWLGLCPDNRITGGKIYSVRTRDVKSRVAEALRLAAQSLWQAKNYFGDLFRRWKARLGSPKAITAMAHKLARILWHLLKFKQPFNPEVFAKEEAKMKRQKLARLQNLAASLNYTLVQNQ

SEQ ID NO: 328102 - protein, 481 aa, unidentified
MARTQSTVTRNTPPPIPTLAHDALYVGIDIGKKRHLAGFVSSTLLSRHQRFEGCPALPFDNSREGFRLLIDRIRAYVPLEQCSVLMEKTGHYHKPLEGYLLDMDVTVYVMHVQSRPQGIVKTDKRDALGLANHLYNQLEKGIQVGDSAQLMRRALPPTEAAAALKTMMGHRFELVNEATKRRNQLTAICDQLFPEFTMIFVDPNKPIALAVRAAFPTAHAVATASAEALCHAKGGRGPNRADMAHLQELAARSIGITDGARVRSLAFEQGQLIRELTVIREHIAQIDAEIGQIVAHAREGRILLALPGIGVTSTAAILAAIGHIDNFPDAAHLKAYFGWAPKVTQSGMTKDSASLTRAGERTMKQVMYMVALRCIKDDTEFAPIYKRLVERKCAYDERTRAYKGKRVVIARIAGQLTRMVYAFLKADADLLARTPAGQQPPEPMLYDRVLHRSHIAGNYHSMKPCPVRGDLIQLPKRDVSS

SEQ ID NO: 328103 - protein, 408 aa, unidentified
MFYLGIDQHRKHLTVSLRDERGDVVLRRQVSTEWDRVMQFFEQLVELTHGDGGFLAIVEVCGFNGWLMEMLAEYGCRQTIVVQPEIRATKKTDRRDAGQLSQLLWVNRERLLAGKPVQGLRRVWLPSPEDAANRQLTALRKRLGDFRTRTLNKVQRLLLKHNLQQESPVKRIQTKAAREWLRELDLDGTDRLELNLLLRQWELWDEQMKSLEERIEQRQASNPVAQIVATVPGMQAYSSLAVASRMGSIDKFPRPGSLANYWGLTPGCRNSGDVTNRLGSITKQGSVLVRFILGQAILHVLRRDPQMKAWFLRIKKRRGAKIARVAAMRRLATILWHMVKHQQPYQIGRMMKSSLPARQNPTLPTAKPKGPGGDAAPEPPGFSQAWREQKNEKNTGGKAAPAARAARA

SEQ ID NO: 328104 - protein, 325 aa, unidentified
MTASLSSDNSFIGIDVGSTSFEAAWHRGGCAQYANRPDAIAAFLARLRAEPGIQRIAIEPTGGYEKLLVTALRRAELPVEMVHTSRFRAYRQLIGVRAKSDSSDARLLAAYAAAPDEIRRQDNRVVLPEDADREELAALGVRRDQLNRMIHAESCRLANVRSTLVRQGISRHLEALRQEVREIGVAMKAIVRQRQDLSRQKRLLRTIVGIGEVTAVMCLARAPELGRISNKAAAALIGVAPFVHESGGLSAPARIFGGRADVRRVFYMAAVTASQHNPVLATFYEQLIAAGKPPKVALIAVMRRLVVFANGVLRSDEPWKRGMAS

SEQ ID NO: 328105 - protein, 385 aa, unidentified
MVNNSTLFVGLDLGDKFSQVFILDGEGEVFEESRVPTTKAALQLKFASLRHSRIALEVGAHSRWVSHLLKDLGHEVLVADARKLRLIYHNPRKSDRVDAETLARLGRLDPKLLSPVHHRTPEAQAHLAIIRARDALVRARTLLINHVRGTVKSTGTPLPAGSAASFHNRIPPAIPESLHPALNPILDTIADLTHRIQAYDRQVEALCQQHYPETNLLRRPQGVGPVTALAYVLTLEDPHRFAHSRDVGPCLGLVPRRDQSGDRDPQLRITKTGDSYLRRLLVGSAQYILGPFGPDCDLRRWGLKLAARGGKYAKKRAVVALARKLAVLLHRLWLTGEIYDPFHSAHAPSPVTAAASPSPTGENSLVMRPPSDAKHLSEALIPLHP

SEQ ID NO: 328106 - protein, 351 aa, unidentified
MSRKTDAVVARTIGIDTGKNTLHLIGLDDKGAIVLREKLTRGRIAARLANVPKCLIGIEAGMATHCVARELIALGHEVKQVPPVYARPFRQGHKNDFRDAHAVAEAVQRPSTRCVPVKTDDQLDLQALHRVRSRLISERTAVINQIRGFLLEHGIPVRQGLRFLRQQLPDILAKRIDVLSSRIIRIIEDLSGDWRRLDERIKNVTDEIEELAHGTEGCRQLMTVPGIGPIIASAMVAAIGSGTAFARGRDFAAWLGLVPKQMSTDDRTILGRISKRGNRYLRTLFMQGARVILLRPANWAKHSFGPWLAAAAKRLHHNVLATAVANKLARIAWTVLVQARSYETRVTSEMA

SEQ ID NO: 328107 - protein, 418 aa, unidentified
MHSSKLENDRKGEAVIFVGIDWSERHHDVCVADAAGAALAKVRVPEGIEGVARLHATVAEHAEEPEDVIVGIETDRGLLVGALVAAGYRVFAINPMSVDRYRDRHRTSGAKSDPGDAKVLADIVRIDRGNHRSMAGDSELAESIKLLARTHQSFIWERQRHVMRLRSALREFYPAALLAFGTELGAPDAIAVLTLASTPELGRRLSRSKIAAALRRGGRQRNLEAQAAKIQAALRSEQLRATASLERTYGVIASSLVGLIAGLNTQIAGLEQDLHGAFEQHPDAEIIRSQPGLGSTLGARVLGEFGDDPTRYADARARRNYAGTSPITKASGTHRVVLARFARNERLSDACHLWAFASLSASPGARRYYDALRDRGKTNNQALRALGNRLVGIVHGCLTHGELYREEIAWPTQEADAA

SEQ ID NO: 328108 - protein, 410 aa, unidentified
MEVVHAHCAGLDVHKETVVACVRHMTDGKVTTTIKTFNTATQELLALSDWLSAENATHLAMEATGVYWKPVWNILSDGEFELVLGNAAHIKNVPGRKTDVKDAAWLADLMAHGLVSGSFVPDQTTQEMRDLLRTRKQLVRERTSHTQRIQKTLECANIKLDSVVSNVVGVSGRRMLEALISGQTDPKELAAMAHGRLQATPAELEAALRGRVTAHHRFMLKLHLDQIDSFDEAIARIDKEVKDNDNNFRAAVELLKSVPGVGSLAAEVIVSEIGIEMNRFATAGNLVSWAGLCPKNDESAGKRRSNRLKAGAPWLKTTLVQCAWGAARSKGTYLHAQYVRIRARRGNQKAICAVAASILTTVYHMLKDGTFYEDPGPDYFDKRNKDQQANKLVNRLQNLGFNVTIQPAAA

SEQ ID NO: 328109 - protein, 458 aa, unidentified
MKKSKKHKMFSTSEFKQINFNAAGIDIGAKVHYVSVPEGRDPESRNVRSFDTFTSDLYAIADWLKQCQIDTVAMESTGVYWIPLFEILESKGFDVKLVNPSFIKNVPGRKTDVVDCQWIRQLHAYGLLKGSFRPEDQICVLRSYLRQRALLVSYASHHIQHIQKALEQMNIKLNQVIRDITGQTGMRIIRAILAGERDPKKLAQLRNSRCKNDVKTIAKALYGNWRQDHLFSLQQAVELFDFYQNQIAACDLKIEEHLADFEDRSNGAPLGKSHRTTGRNKLSFDARTHLFRMTGVDLTKVDGLDSLTALKVISEIGLDMSRWPTVKHFASWLGLSPGSKISGGQVISAKTKKCASRAAHYLRLAAYSLHNSQTAIGAFFRRKKAQLGPAKAITATAHKLARIIYHILKSGTEYKDVGQDYYEQRYKSRVIANLKRRAKQFGYELTYVKEQQEVIQNV

SEQ ID NO: 328110 - protein, 322 aa, unidentified
MSDTGVYVGIDVSKAELEVAVGEEGFAVANDGAGIRSLAKRLKRMRPKLVVLEATGGHETAAVAELVAAGVPVVVANPRQVKEFGRSTGQLAKTDRMDARVLALFAERVRPKVRPVADEATRELAAFLSRRRQLIEMLVAEKNRLGTAPMSVKNGIRKHIRWLERQLTGVDHDLGLRIKESPVWRAKEDLLQSAPGVGPVVSRTLIGDLPELGALNRKEIAALVGVAPFARDSGRLRGKRMVWGGRSPVRAALYMATLSATRTNPPIAEFYERLSARGKPPKVALTACMRKLLTILNAMVRDGVPWDPASHLPEAQFAHSCC

SEQ ID NO: 328111 - protein, 360 aa, unidentified
MQNKVNEKLFDGQSIYVGIDCHKKNWTVTILGEQYEHKTMSQNPDPDILAAYLKRNFPGANYNAVYEAGFNGFYPCRQLRQLGINCSVIHAADVPTMNKEKIQKMDPVDSRKLARSLRSKEFEAIHVPEPFLEADRALVRQRFRVMKDVTRTKSRIRSLLFQFNINVPDRFTTSQTRSWSRVYINWLKGLQVGHESLKLTLDNYIRIGELQRKELLSVNRQVRSLSQTDAYRGSYNLLISIPGIGFLTAMTFLVQIGDIKRFERLDDLCDYIGLVPIMKGSGPKMYTGKMINRGRKELKIMIIEAAWEAVRLDPALMAKFNELIRRMNKNKAIIRIARKLVSRMRYVLMAQEPYKMGISE

SEQ ID NO: 328112 - protein, 416 aa, unidentified
MNAAGIDVSSRKSTVAVLRPFGEVVRLPFDVAHNTEGLASLAEQLKALDGETRVVLEHTGRYYEPVAKALHEAGLYVSAVNPLLIKEYGANSLRRVKTDKADAVKIARYALDNWADLRDYTPMDTIRYDLKTLNRQFQLASKQRTASANNLIALLEQSFPGIRKCFDSPVRSDGTQKWVDFIHTFWHVECVRKQSLNAFSERYRKWCKRHGYIFKQGNAVEVYSLAKNAVVLVPKSEVTKVLVQEAANQLTSISRSVETYRAEMERLASTLPEYPVVMAMYGVGKSFGPQLMAEIGDVRRFERKQSLVAFAGIDPMPNQSGDKNVRSNKSSKRGSPYLRRTLFNIMKVHLQRAPADEPVFQFMDKKRTEGKSYYVYITAAGNKFLRRYYGKVMAYFAALEDLPPVDMDSTGLHHTK

SEQ ID NO: 328113 - protein, 420 aa, unidentified
MNEITDEGAALVERVAALDIGKASLTVCVRVPHEGRPGARRQEVRTYATLTPALLELRDWLICQGVTLVVMEATSAYWKPPFYLMEDDIECWVVNARDVRNVPGRPKTDKLDAVWLCKLAERGMLRASFIPSRPQRQLRDLTRYRRTLTQERTREKQRAEKLLEDAQIKLSSVISDIFGASGRAMLDALIAGQGNPHELAALARKNIRAPASVLQEALTGHFNDHHAFMLAMMLARIDALTTQVNALTARIGEAIAPYAAQVAQLDEIPGIGITAAQDILAETGTDMSRFPTPGHLVSWAKFAPRARQSAGRSKAATTGKGNPWIGGTLGEAAAAAARTRTFLASRYKRIARRRGRNRAVVATGNSLLTIIWHLLSDPGARFTDLGPDWHDRLAPIRRKRQLIAELERLSGKKVTLEDAA

SEQ ID NO: 328114 - protein, 405 aa, unidentified
MSTEIFVGLDWAVHTHAVCVIDAAGAVLDRFEIAHDRDGLAELMLRLARFGERVRIAIERPSGLIVDALVEAGHHVFPIHPNAVKASRPRYRSHGAKSDASDAYLLADLLRTDGHRWRELSPQSDSIRALRALVRTRDDLVATRVALGNQLQSTLEAFWPGAACIFADITSPIGLAFLKRYPSPASAARLSEAALGRFCRSQHYSGRRSPAELMARLHSAAVGLAGPLTNEAAAQLVRSMVAVLHPLVEQIAQLTRRIERFVESLPDGQIIMSFPRAGHVCAAQILAELGDVRERFPSLDQLASEAGAVPVTYQSGKTRSVAFRWACNHRLRKAVTCLADNSRHANAWARGIYTAARGRGCDHPHAIRILARAWLRVIWRAWTDRIPYDPGLHVSAQKLASDQGG

SEQ ID NO: 328115 - protein, 351 aa, unidentified
MVVVGVDAHKRTHTLVAIDDAGRKLSEKTVAATPEGHLEAVEWAQRWPERQFALEDCRHVTRRLESDLLAVGEAVVRVPTRLMAGARKGGRELGKSDPIDALAVARAAQRESDLPVARLDGEARQVRLLVDHRDELVRERTRIQSRLRWHLHELFPGLEIPPKSLRRHHVLAELEARLANVAGTVAMIARELLVRCRELTVRANELEHEIAVLVKRLGPTLLALPGCGVLSAAKIIGEVAGAERFRSRAAFARWNGTAPVPVWSGNNTRFRLSRGGNRQVNAALHRIAITQWRGVGDQGRIYVDRRMAGGATKTEALRLLRRRLSDEVLRRLLVDERRLEATFFEGLVVAA

SEQ ID NO: 328116 - protein, 491 aa, unidentified
MAQKKTSIQERLRSGKLNRKQRKELVRRVYADDPGLEVVHRNVAGIDVGNESHFVAVPPGRDPQPVREFGCWTADLLRMAEWLKSCGIETVVMQSTGVYWIAVYDVLEKAGFKVWLSNARETKNLPGRKSDVQESQWLMKLHTYGLLRNSFRPPEQIRAVRTIWRLRDRNVRDAAREIQHMQKAMTTMNVQLANVLSDVAGVSGQAIIRAILGGERDPHVLAKLRDYRVKASQEEVARSLEGNWQADLLFELQQAVDRYDFCQQQIAKCDQQLEKYLAALPSRKGAVQAPVAKAEAGDAPHARPAAKKSKNRKKKRGKPRGNEPRLDLEAELRRICGVDLTTLDGVYVMTVLTFVSELGTDMSPWRTEDHFVSWLKLAPSRQISGGKVIKQERNRTRNRVANAMRMAASGLKDSDSYLGARFRQLRARLGPGKATKAMAAQLARLFYRMLTNGQEWVDRGTQEHEKRRVEREKQFLLRKAASLGYRLEPAA

SEQ ID NO: 328117 - protein, 303 aa, unidentified
MRCIPTDAAGITLGVDTHKDFHVALDALGRRLGTLSIPTTPAGYEELVEWANGFGPLEGVGIEGTGCFGAGLSRFLQAEGTKVFEVVRPKRREQYRSGKSDPIDAELAARAVLAPTATTQPKGADGKVEMIRTLRVTRRCAVKARAQSVNQLKNLLITAPEKLQSELRGLSTAKLVAKVSGFRPGANPSDVQAATKFALRSVARRHQRLSEEICELDEQLDRLVAEAAPELVALEGVGTDTAASLLIAAGDNPERLKNEAAFAHLCGAAPIPASSGKSVRHRLNRHGNRDARAGPSTSSLSAA

SEQ ID NO: 328118 - protein, 428 aa, unidentified
MDQATSPSSPVDPSSFTYVVGIDIGSQTCSFCVLKLDKSQVIKPTDFANAPAGFALLLDKLERLAVPADQILIGLEATSRYGENLYRFLESRGYQLCLLHPRQTHQFAQQRGLRAKTDKLDATTIARVLLSGEARRGYVPTDLIATYRELARLQTQLTEDVTRYRNEIHALLQGLFPEFSQVFADPCRPTALALLKLYPSAQAFVAAGVETLAARLHELAPRNYGLHTAQQLVSLAHHSVGSGIALSARTTSLKILCDQLEHTQTNLLQLEKELENLVKKDTGAKGLQSVPEFAGKTIAVLRAELGDVDRFACSSQAVAYAGLDIEVKQSGKSRGQAKLSKRGSGRIRRILYMAVVRCIRLKDSAFGAYYHHLVARGLPRRAAMMAVMRKMLMVAYRLLKTKEAYDPTKVFAQPVVQAPALEPQAAQP

SEQ ID NO: 328119 - protein, 344 aa, unidentified
MDYYSGIDVSLERSSVCVVDGSGKIARETKVASEPEALINWFGSLGFGLARIGLEAGPLSQWLYAAMKQAGLAVELLETRHVSDAFKAMPVKSDRNDARNIAQLMRLGWFRPVHCKSITAQEIRAMLTARKLVQSKLLDFENSLRGILRGFGLKVGKTTRTHFAGRIEELVKGHPNLQTITEALLRARAVLLAEFNGFEKRVRAMSRLHEKARLLMSTPAVGPIVSLTFACAIDDPSRFTSSKQAGPHFGLTPKKYQSGETDYTGRISKHGDASVREALYEAAHIMLTKPVRGCSELKSWAMRIARRAGTNKAKVALARKLAVIMLRMLKDNVPFNPAAKAATA

SEQ ID NO: 328120 - protein, 404 aa, unidentified
MLLIGIDQSPKKHDICITDAHGRQLAQGTVANALAGFEWIHQQCQRLAVAPQECLVALESAYDLVVDFLLDHGYQVYVVPGRAVNRYRDRYRQRRSCRDPGDALVLADILRTDRHRFVPLAADQPLTRQVCSLVRLLSTLKGNVVRVSNQLRQLLWRYYPVAADLFSKLDQPLTCTFIQAYPTPQAAQQLTLAQFRTFCHQQRYWHAGYIAQRYGQLQAAEIFATEAVANAYAQQAQSLARVLRYLVQEREATQKALTAAFEQHPDAHIYTSLPGAGEFLAPALLSKFRDCRAHFPSAAVVQAVAGTCPVTEQSGKRRKRVSFRRACDREFRWIATEFARCSIPNSAWAAAYFETVRPRVEKISHAYRCLANRWMSILWRLWTDRVAYDEAVHQRNRFVNRRRS

SEQ ID NO: 328121 - protein, 412 aa, unidentified
MKVVHEICCGVDVHAKMLVACLILADGKKEIHSFSTMTADLLRLRDWLVATGCTHVAIESTGVYWKPVFNILEDAVTVILINPDHARALRGRKTDVKDAEWLGDLLRHGLLKASFIPPLEIRELRELTRYRQSLVHEQSAVANRIQKVIESANIKLGQVASDALGASGRAILWELTRGETDPVKLASLAKGKLKEKRSELERSLQGRLTPNQRFVLRESLLHWEELERAEGRVTKEIDQYLKDRPKLSQARDNLDSIPGLATRAAENIVAEIGVEMEGNFPSDAHLASWAGMCPGNKSTGGKRLSGRTRKGNTYLRSALVQAAWGATMKKNCYLSSQYARLAKRLGRKKALVAVGHSLLIIIYHVLQSGQSYTELGGDYFDRNHVEQQRDYFIRRLQMLGLKVTIEESSAAA

SEQ ID NO: 328122 - protein, 422 aa, unidentified
MLGVGVDWAESFHDVALGWPGEGVVEQFRIEHGPAGVGRLVARCLELEPDPAEVRVVLETRHGLLVEALVDAGFTVLPVNPDLVARRRGPAKKKDDAEDARICCLLALDQYAELRRLIPHGETGTELRAIARDDERAARDERRIGNRLRADLLAVFPAAIDIAAGDLGAPVFLRLLERWPSAGALAAASRDEIEAFARSCRHGWPGRLADRVTAAMAAPRLAARPELARAKAGTIRLAAAQLLAIRAQRREWERRMGELLLGSPRYGRAKTPKDPDPGKAFPGGEIYLSMPGLGDRLAARVAGEIGEHFEQFTTPNALQCYAGRAPVTRRSGRSEFTIARRLAYNRHLGEAVQQWAFCSLSRSAWAREFYDAKIAAGDSHHAALRKLGNRWLEILWHCLHLSTRYNQTIHAANRNRARGIAA

SEQ ID NO: 328123 - protein, 344 aa, unidentified
MDNHTQYSGFAGVDLAKKVMQIHFVTEDGEITDKSAKRAEFLDFFRNREKCLIGMEACGSSQDWARKLEAMGHEVHLMSPKAVKPFVSGQKNDHNDAIGIYKAMFNGVRRVPVKSTEIRDLQTLRRIRSQVTKDKVKEINHVRGLLAEYGIVMGKSITAFNKGISSALESLKERGDVSPLVAEELQTTVESIKTKIERQKRLDREIEQLARGCKNYENFLKTPGVGPFTAAMLCVLLCDPAIFANGRQFAAYIGLAPRSRGSGGKNFIIGIPSKFNCDSESRAVFVECAQALARYKNKSPWVDGILRRKPKKVAVIAIANKLARQVWAMANKGESFKQMTILTA

SEQ ID NO: 328124 - protein, 422 aa, unidentified
MNSQPQSLSPVEPSFGAFVAIDWADQQHVWSLQAADSDQREHGEIQHTPEAIEAWVGGLFSRFPAQPIALAVEQSRGALVFMLSKYEHLHIYPIHPRAAAQFRAALYPSGAKDDPVDANLLLDLLVHHRGHLRRLSPDTEQTRLVQQLVEARRKLVNEKTRQGNRLTSKLKLYFPQILTWFDELDSALVGALLKRWPTLEALQKARQATLRSFFTQHNCRRAELIEQRLEQIRQAIPAIRDAAVIQSAVAMVSVLVSLIATLRQGIAALDRQIEQAAAAHPDFAIFDSFPGAGPVLAPRLLAAFGSQRDRYQSAAEIQQFSGIAPVLVRSGKTAWVHYRWACPKFLRQTFHEWAGHSIGFCDWARAYYEQQRNRGAGHHAAVRALAFKWIRIAFRCWKDRVPYDDSRYLQSLRQRGSPLAVR

SEQ ID NO: 328125 - protein, 475 aa, unidentified
MNFKGKKKKNQVIAANIFEQQEILKKMEAIKNNLKASTWHELETKGKFDKNEKLTFISDDMLVLGCDIGSETHYIRAIDTRGRELSKSAFPFSNTQEGFESAKDWAVEIAAANDKKQIVLGLEPTGHYWFCLATWMISNGISVVQVNPYAVKQTKELEDNSQLKDDIKDPKLIANLVKDGNFGMPYLPEKLYADLRRLSMFREQLNEDRIRFLNRLHREMKIYFPEYKDALGKFDGTFSLELLKTAPFPEDLVSLGTDGIRQIWHDAKLRGRGYSRAEEIMKYALKSVGMKDGTDASRMAVKWFVERIIELDEQLSEVEEQLNQKCMEIPHAENILEISGIGSNTLSGILAEMGDISRFDDVKEIQKLSGLGLVACSSGKHKGRTKISHRGRKRLRYWLFQAAKCVVVHSDEFKELHAYYTTRLENPLKKMQSLIAIACKVLRVIYTMLTNGTVYDPKKLKADIKRPTKLKAVAA

SEQ ID NO: 328126 - protein, 371 aa, unidentified
MKKDSTTKFIGLDVHSKTISVAIADEGREGEVRHYGTIENTFEAIDKVIKKLTATGVELKFIYEAGPCGFALYRYLTGNGFTCIVTSPAMIPRRKNVRIKNDRRDAMMLARLYRAGELTGIYVPEPEDEAVRDLARSRDDARVAERKAKQRLNSFLLRNNLIYPGKTKWNRTYFNWLGSVGMKYPAQKVALQEYIEAANECTGRVARLTEQIRMTVEEWRMAPMVKALQALRGVSLICATVTVAELGDLSRFQNPKELMAYLGLVPSEHSSGETIRRGGITKTGNGHARRVLVEGAWTYKHHARITPPLIKRQRDLPKSICQISWKAQLRLCARYRKMVARKKPNNVVVIAIARELAAFMWAIAQEVRAAA

SEQ ID NO: 328127 - protein, 418 aa, unidentified
MNAVGIDISKGKSMVAVLRPLGVVVAKPFEVEHTAKELEKLAEYLQNLEGETRVVMEHTGRYYESVAQVIHERGLFVSAVNPLLIREYGGNSLRRVKTDKADARKIAKYGLDNWAELREHTPMETTRYELKTLNRQFHLTSKNKVACSNNLIALLDQSFPGANRWFSSPARKDGSQKWVDFAMTFWHVDCVRSSTLSAFTERYRKWCGRNGYIFSQAKAERIHAEAKEMIPLIPKSPTTKLLIQEAAAQLASLSRMTEVLRAEMNRLASQLPEYPVVMSMRGVGESLGPQLIAEIGDIRRFAGKQSLVAFAGVDPMPNQSGAKDSRSNRSSKRGSPLLRKTLFNVMSALLKTSPADAPVYQFLDRKRSEGKHYYVYMTAGANKFLRIYFGKVRDYLAALDAQNPTMALPPTESPADPQ

SEQ ID NO: 328128 - protein, 357 aa, unidentified
MKIIGVDLHTRQQTIAMLDDQTGELVEKQLSHEGEEVREFYAGLSKPVLVGLEATGSMQWFLQLLEELSIEFRVGHPAKIRAAEPRKQKNDRRDARLLLTLLAEKRFPAIWMPSREQRDLQILLRHRDQFVRIRTRVQLSLQALALSHGLRRGHTLWTRVGQHTLRALPLTAHASEQRDTLLALYPQLQAPINELDREVEREAQQRAQSRRLMTHPGVGPITALATEVFLGDPRRFADGKAVASYIGIIPKEHSSGGRQHFGRISKQGNSLLRFLWGEAAIHAVRRDPELRRFYRRKLAQKGMGKARVAAARKLGIRLWIMLRDEIDYTEFCRRGHQRRQSGGGAACAGMLHVGQWS

SEQ ID NO: 328129 - protein, 343 aa, unidentified
MKVTTIGLDLAKNVIQVHGTDERGKAVLKKQLKRERVALFFAKLPPCLVGMEACGGAHYWARKLEKLAHQVKLMAPQFVRPYVKTNKHDAADAEAVCEAVSRPNMRFVPIKNGEQQAVLALHRARGGFVKARTAQANQIRGLLGEYGIVLPRGIGHITQRLPAILEDGENELPGVFRQLLARLADHLRHLDRQVDEQEQQIQLWHGENDASRRLAQIPGIGALTASALVATIGDAKQFKNARQLAAWLGLVPRQHSSGGKPMLLGISKRGDAYLRTLLIHGARSVVRVTERKSGEAQRWLTQLIDRRPPNVATVALANKNARIVWALLVKGQDYQFDYTPSAA

SEQ ID NO: 328130 - protein, 343 aa, unidentified
MNNNLIAIDIAKTSFHAVSLRNNKVGTDKAFTRQKLKEFLAKQASSHVVIEACGSSHYWARYAQSLGHTAQLISPKSVTPFRLGHKTDKNDALAIATASQQANIKPVGIKTVEQQALQSISRIRQHLTDNQTAVSNMLRGLLCEFGLPINKGEKAFTEGIARILTDNDNGLPETIRLQMVRMYESYLDSGEHLKTVSKQLESLVKQQEQCKQLMALEGIGPINALEVYLTLGDQGKSFSHGREASACIGLTPKQYSTGGVTILGGIGKSSGKKRLRANLIQGALSVVQVVDKRLPKNDKERWLKTLITRLGKRRAAVALANKTIRTAWAMLRHGENYRAPSMA

SEQ ID NO: 328131 - protein, 313 aa, unidentified
MDSTEIFIGIDISTKTLDVAQHGGPVSSFEHTPGNIAFLAQRLRGLQPRLVVLEATGGLEIALAAALVEAEIPVAVVNPRQVRDFARATGRLAKTDALDAKVIAHFAAGVRPPVRPLPDNAVRELHAMVLRRQQLTEMMTAEKNRLRTMPCPMDERVAAHIAWLEQELADLDRDLEDTIQKSPVWRAEDDLLQSTKGVGPVLSATLLANLPELGSLDRKQVAALVGVAPFNRDSGKFKGKRTVWGGRASVRAALYMSALSATRHNPAIRAFYQHLLAKGKLKKVALTACMHKLLIILNSMVKHKTYWEPNFCR

SEQ ID NO: 328132 - protein, 353 aa, unidentified
MNHLGIDVGKRKCRAALKDDKGKILDEFFFSNEGNGIHNLLSRIQSHGKCVAVLESTGNMWMRIHDMLEEIGIDTKLANPNKTRIIAEAKIKSDKLDARILSDLLLRTDLIYESYVPKRENRDKRSLVRHRITLSRTKTKLVNKVHSILDKYDYRTELTDIFGKSGIEWLKALSSQVTPVDRIILDTSIESIEAINRQIDTVSKEISKYARDNNDIKILLSITGIDIFSAMLISTEIVDIKRFSTPWKLVSYAGLAPSIRESSGKIKTGGITKQGSPWLRWILVQCALIAIKYDTHLRIFYDRIKNRRGHATAIVATAKELLVIIWYMLTRNELYRYMDKQRYERKIKKLEQR

SEQ ID NO: 328133 - protein, 369 aa, unidentified
MKKIGMDLGKRQTDVCVLDEQGNVEQRCRIKTRRSALSKLLANKEECEVAIESCRDSGWVHGHIKSLGHSVVVIDTTRARSIGIGLGRRKTDRRDAEALARALYAGVAPRAHVLSTQAQRLRDVLQARQQLVSHRVQIITMLRGQMQATGTQLPSCSTQSFGHMLRASDIPQVQLPHVQSLLKTLGELDVQIQMLEYQLTNLARQHEAFERLCTVPGVKLIVTLTFIATIDDPYRFGNAHQVQAFLGLVPSEHSTGGRRRTGGITRCGNALARRMLVQAALVMLRSKVAQDDPLVVWAKQIEKRRGHKKAAVALARRLAGVLWAMWIDGTEYDPKGLARESFQGMTRRQRLAEAETRQMRTAQMKAQSL

SEQ ID NO: 328134 - protein, 385 aa, unidentified
MFYVGIDIAKNKHDLACMDETGETVITNFRFANSYQGFHQLKLKLEQLSPITQDVQIALESTGHYNYNIVVFLRELGYNVFAYNPFIIKQFAKSQSLRKTKTDRKDALLIARKLRSDVTPEYYQTDKSMDELKELTRYQNRLIQSRSKCKNLYIRLLDIIFPELHRVVSNLHNHFVYELLTKYPSAQKIARARFSSLLKIKRLTADKARQIQEIAKQTIGNASTVLSLELVQLIESIQHYDKQINQVQEEINLLMIELNSPITSIPGIGSRLGAIILAEIKNIHHFKNPNQLQAFAGLDPAIYQSGQMDNTGHMVKRGSSYLRYALIQAAKLISMYSPHFKAYLRLKISQGKHYNVAVTLVAKKLIRIIYHLLKNNQTFDEAKLR

SEQ ID NO: 328135 - protein, 387 aa, unidentified
MARKRTLSTLDTSIAYEAVGLDLAKEDTAIAAFGPDHEGPYLIDRMPYDKLYELLADMAPTLVAMEPCSGAHQIAEQIQELGHEVMMISGRHVQAWVKDHCNGHKTDLNDAFAILNLAYDRWLTPIRGKTREECRLLALQSSYRQLKGQRTKTMVHVEATLHAWGFPIRTGSFNQKALHELIDANREAFGDEVVETLHLMINRVHDLDHDIATVLKLLTEATQRDPRASLLRSIPGFGVLTTSRWCAVVGDIARFDTPKQTMAFIGLVPNNRITGHHTETSSGREARGQGKMSKRGDKMLRSLCILGAGALCLMVRNDRLPDCPFVASIKERLASPRPWFKVLVYVAAKLVRIATALLKYGETFSFEKAGISKAVLKQWELEQAKAA

SEQ ID NO: 328136 - protein, 316 aa, unidentified
MLPEQNESYVGIDVSQDFLDIHVVPEERSCRVANDEVGLAALMDLLRPLRVNCVVLEATGKLEGAAAAALSDANVPVAVVNPRQVRDFARATGQLAKTDAIDARIIALFGRAVAIEPRPVKDEDARQISDLLARRRQITRMIAEEKNRLPRASGRARSDIKAHIQWLEKRLKRVDAELDADIKKSPVWREQDALFQSIKGVGPVLSRTLIAGLPEIQSLSRRALAKLVGVAPLNCDSGRMRGRRRIWGGRAHVRVALYMAVVSASQWNPVVKAYYEKLIASGKPRKVALVACMRKLLNILRAVVRSGVPWEARPVS

SEQ ID NO: 328137 - protein, 348 aa, unidentified
MSQSHYIGLDVSARTVNLCTVDHDGRVVHERKLSSDPEEIARHILSLPFSIVRVGLEAGMLSQYIYGRLAEANIPAVCVETRHMKAVLSAQLNKTDRHDARGIAQMMRVGLFKPVHVKTPTSQHLRTILTARQLLRNKFQDVENEIRGLIRNFGYHLGKVTVRDFEPRVRELVADTDLVIVADALLLARRALRDQFGRLDDMLIRLARQDEVTRRFMTVPGVGPLVALTFRATVDVPSRFARSRTVGAHFGLTPRKQQSGEVDRSGRISRWGDEMMRSLLYEAAQVLLTRVRRWSALKAWAAQISRRRGHKKAIIALARRIAVILHRMWIDGTEFDWGKRPEGVAPSA

SEQ ID NO: 328138 - protein, 373 aa, unidentified
MSEFNKFVGLDVHKSTIAISIASDDGAEVRYFGEIKNTKEALINFANKISQGSLKLSFCYEAGGCGYEVYRHLRNIGHDCMVVAPSLIPKKAGQRVKTDRRDSLNLARLHRAGELTGVWVPDAMNEALRDLTRAREDMKHLQRQAKQRLLAFLLRHGWTYSGKSNWTKDHFNWLETVKFQHAAQQIVFQEYVDTVKYCGKRVESVTQQIEICSRESAYWPVIESLMALKGIDLISAATIMAEIGDLTRFDSAPQLMSYLGLVPSEHSSGSSVRRGGITKTGNSHVRRVLVEAAWTYRFPARKTAHTQKRAKVTTEAVQEISWNAQKRLCQRYKELNANGKIKVQTCTAVARELAGFVWAIGQTVPLKQSANVQ

SEQ ID NO: 328139 - protein, 416 aa, unidentified
MQSAPTTLSSAPPNGLTCGIDWAKDDHAVAVVDSAGREVHRWTVEHTNAGLHGLLRRLARTGVAEVAIERSDGPVVDALLGGGLTVVVIAPSQLKNLRSRYGSAGNKDDRFDAFVLADTLRTDRARLRPLTPDSPATVTLRASCRARRDLVTHRVALANQLRAHLQTVFPAAVGLFRDLDSPISLRFLTRFDCQDRADWLSVNRLAAWLASVGYCGRVDPAVLHARLTAAPRGATGEHGTAAAHVTHALLAALTTLVEQIKALTEQIDEQLDLHADAHIFTSLPRSGRVRAARLLAEIGDCRARYPTPEALYCSAGAAPSTRQSGKHRAVTFRWACDKQLRDAVCDFAADSRHANPWAANLYQRAIDRGHDHPHAVRILARAWLYIIWHCWQHGVADDPAQHKALQRLTQDHQAAA

SEQ ID NO: 328140 - protein, 311 aa, unidentified
MSDKTTVGIDVSKFALDIFIDTSERLIHVENSASGIMQLLTELEGLRISGVIMEATSRYHSLAESMLISVGLPVAVINPRQIKNFARAMGKVAKSDSIDARIICEYGRRMKPEFRPVRNKELQDLALLLTRRRQLVQNRVMETNRLQEKNGMYIETGIAEHIAWLNSQIDTLDQEIKNQLNQNTALSPKRKMLEKVKGIGPVTQAAILSQLPELGALTRRQISALVGVCPYDRDSGQLRGRRAIWGGRAGLRATLYMAMLSAVRYNPQIKDFYTSLIARGKVKKVAITACIRKFITILNAMFRDQKDWIYS

SEQ ID NO: 328141 - protein, 364 aa, unidentified
MKRLVVVAGTGQEGVEARRRPEAGQDVWIGVDVSRSKWVYNVRWNGQEQRQLSTAGELHHLQALVEQYRDCPVHVVYEACGFGYEIAWWCQEKGIDVVVVAPSTIEQAPGSRVKTDRLDAGKLARDREQGRLKGVRIPTRVQHVHRQLSRTYAQAIKDTQRVQARVRSLMQEQGRLGPPPSAGWNAYLRWWNKQELPEPIAHCIKELLHLREAAFGSVKRLRTALHQLSAQPQYAPVVRGLVAQAGVGTLTAIRLVLELGDMRRFRTAGSFPRYLGLTPSEYSTGPTERRGHLTKCGPRFVRAWLIQCAWVSIRPRGDARLRAVFERLAPKIGKKRAIVAVGRRLALRLRARWLEVLTTQEVAA

SEQ ID NO: 328142 - protein, 321 aa, unidentified
MNSSNIIAGVDVSKSKLDIHIHPLEHYKIFENNVQSIDEMLDFLRLHNVTKVGLEATGGYEKLCAYTLLSNGFEVYIIQPRWVRDYAKSLGITTKTDKIDCSIISRYINNTDMRAIPLKVDNGNIDYLKQKLSRRNQLVEIAKIQKNQIQQITDTSIIKQIEELLAILQNQIKTLEDEIITFIDQNQELKKKYISITSIPGISKITATTLICHLPELGTLQKKQISSLVGLAPFNRDSGSSRGKRCIQGGRSQIRKVLHMCILSAQKVNSYIKPFFTRLYNQYKKPYKIASTAAMRKLLLLANSLVRDGRVFTEEYSPKSA

SEQ ID NO: 328143 - protein, 319 aa, unidentified
MPSAGPAFVGIDVAKAELVIAVCPSGERWTVPNDPAGIQALVERVGEHAPTLIVLEATGGYERAPVAALAAARLPVVVANPRQVRDFARATGQLAKTDRIDAGILALFAERVRPAPRPLPDDAAQALDALLTRRRQLLEMLIAERNRLEHAGPPVRRGITQHIRWLERQVHDVDQDLDTTIQSSPIWRAKDNLLRSAPGVGPVLSRTLIGELPELGTLPRKQIAALVGVAPLARDSGTLTHKRLVWGGRAPVRAALYMAALVGTRCNPVLQAFYGRLLAAGKPKKVALTACMRKLLTILNAMMRTNTPWHHLDHPAATS

SEQ ID NO: 328144 - protein, 351 aa, unidentified
MLIIGCDFHPRYQQIAMAEESTGELLCERRLENESGEAAAFYRNLHKPVRVGIEATGPIHWFERLLTELGHELWIGNSARIRASEVRKQKTDERDARLILDLMLAKRFPKIWVPTPAERDLRQLLWHRHKLVCLRTMLGNQLHFLAMSQGLCRKKKLFTKKGRVELTGLALGPWTRRRREELLKLLDQLDPAIAELDGAVLEEAQRRDDAVLLMTHPGIGPVTSLAFVLAIGPVTRFPGSKKIASYLGLNPSEESSGGRRRLGAISKQGNTMVRWLLIEAVYPAVRKDLALRQDYQRLKFRRGHAVAKVAIARKLAVRMYWMLRSGADYAQLVRRQGSPGATLVDASPSLG

SEQ ID NO: 328145 - protein, 408 aa, unidentified
MNAVGIDVSKGTSTVAIIRPFGEIIRKPFDVIHTPKALAELANLILSIEGESRVVLEHTGKYSDPVIKVLSEAGVFVCPVNAKLAHDYGGDTIRRDKTDPIDSLKLANFCLDKWAKLERYTPADELRKTLKTYNRQLDEYMRVKVMLKNNLISLTDQAFPGVNNLFSSVARESDGHEKWIDFLARFWHCECVTSLAEETFAKVYAKWCKRSGYNFSSTKVTQIYESASNQQATLSKNDFTKTLVLLAVEQLNSLCSTIAKLKSEMTKIAKTMPEYETVIGMHGVGKSLAPQLIAEIGDIRRYPKRASLTRYAGIEPPQNQSGSYNQHSRRISKQGPPQLRKALFQVMRCVLQLSNPDEDTFRFIARKRAEGKPFKVYMIAGANKFLRIYYARVKECLDFVEQNTTPVA

SEQ ID NO: 328146 - protein, 491 aa, unidentified
MPAVSGIDWAAEWHDVRVADEHSGQLLAERRFAHDEAGIEALIELLIAQRVARVAIERPEGLLVGRLLAAGIRVLALHPNQVAAARDRFRAAAGKSDRFDAFVICELCRTDHHRFAALAPSGDETIALQALVRTREDLVAVRVHLANQLRAQLDCFWPGAKLIFADADSPIALAFLARYPSPEAARGLGPKRLAAFLARNAYSGRRPVSELLERLRSAPVAAIGELEHEARHNAVAGLVAALAPIVSQISLLSSQIAGAVRAHPDGPIFLSFFRDPKSVVCAAGLLAEIGDNRARYPTADSLAADAGQAPVAKQSGKHRAVTFRWACDKRLRNHFGVLADATPPLAPLGPRRLPPRHRARRRTPTRHPHPRPRLDPRALALLARPHPLRPHTTRQPQPTPPTQGLTQGVSSDLQVGRSRKRRTVGAARETASGRTRGRSVASTIAAAAYLTSPCRCRSSSSRRPSGACRMAWCRSWSGRSAWCGRSGRRRL

SEQ ID NO: 328147 - protein, 355 aa, unidentified
MNTQITATPKIFIGLDIHKKSWTVSIQTDLFFHKTYSLPSVSEDLYQYVERTFPNYEVHLVYEAGCCGFSVARYFLNLGWHVLVVNPADVKTGDKERYQKTDALDSKNLSNQLKAGVLKGIYIPTEEQEQFMTLARHRTQITKKLRQTKSHIKSMLLFHGIKVPDQFDNSNWSKDFIIWLEQIKFSTSCGDLALQGKIRLYKFIKSEYLEIANQMRAYCRKNNKKDYYLLKSIPGIGGYLASVIIAECGDLRRFNTEGQFSSYIGLVPGIYNSGDSEKCLGITPRSRSQLRSYLIEAAWVAIRKDIEMQQYYRKHQGKNVKSIIVKVAHKMARRILSVIKTESPYQINRNLILTE

SEQ ID NO: 328148 - protein, 377 aa, unidentified
MGDYSEAFVGLDTSKLRNAVAIADGGRGGEVRFFGEIENTPAATAKLVRKLSVKYERLTFCYEAGPTGYGLHRQIKDLGFECVVVAPSLIPKRPGDKVKTNRRDALSLAKLLRADELTAVWVPDGRHEAMRDLTRARETAMLDLRTKRQHVSAFLLRLGRPYPESRKTWTKAHASWIASQKLEHPQQRLVLEEMMLAIRQAQERLQRLEQAIAAAVPEWSLAPVVTALMAMRGIDLISATTLLAEIGDLSRFRTPTELMAYLGLVPSEDSTGDTVKRGPITKAGNRRARRMLVECSWSYQHPPRVGQAKQPKVDAAPPAVREIAWKAQCRLYRRYRTLIRKGKLKTVAIVAIARELAGFIWAVARAATTAPVAAAPA

SEQ ID NO: 328149 - protein, 370 aa, unidentified
MKEATTSYVGLDIHKDSVAIAIASAGRTAPRFLGTTPATLAGVAKVLRRHCDSSHTLIVYEAGPCGYGWARYLNRQGWPCEVIAPARIARSPAERRIKTDRRDALLLARESRAGNLTKIVLPDVRDEAIRDLSRAREDAVAARMKVRHQLKAMLLRHGRHYTGGCSWTAAHERHLGKVTFDHPAQQIAFQEYRAAIKDANERIERLTQALRLQFEDWRMKPVVKALMCLRGFELIAAVTLIAELGDLNRFDHPKALMAYLGLVPSEYSSGNTRHQGPITKTGNRHARRILVESAWTYRFNPRVSRTIEIRQQGQPKVIRDIAWKAQLRLTYRFRKLNAGRKMTQNKCLIAVARELAGFVWDIARHAKVAL

SEQ ID NO: 328150 - protein, 407 aa, unidentified
MLEVKVERCAGIDVGKKFIDVCILIGPVHKKPAEEVRRFGTNVNDLEALRAWLQEKACTEVVMESTGSYWKPIFNILEGGLKVILANPEQVKALRGKKTDRKDCRWLAGLLRHGLVQASFIPPRDIRELRDLTRRRRTLLQNGTQERNRVHKVLEDANVKIGNVLSDIFGMSGQAMLEALLENKLNPEQVADLARSSLRRKIPQIVEALEGHRMNDHHRLLIRQSLKHMQFIEEMIEELDKQIQEKLVPYQQQMELACTVPGIRSEAAAGILAEIGMNMSDNGPFSSCHHLASWAGVCPGNNSSAGKRKSGRIRKGNRWLKATLTQTAWAGSNKKNSAFQFRYQRLKARRGVKRATIAVAHAQLISLYWVLRNGVPYQEQRQQLEQQRKDFLIRHHLQRLQQLGYSA

SEQ ID NO: 328151 - protein, 351 aa, unidentified
MMLLGVDYHPSFQQIAFFVEETGECGERQLNHSEGESERFYRDLQQRGIQVRIGMEATGYSRWFERLLAELGFELWIGDPAEIKSRRVKKQKTDRKDAQLLLRLMREGTFPKTWVPSPENRDLRQLLWHRHRLVQMRTRIMNQLQAIAMNEGKRRKTKLWSTQGRAELAKLVLAPWASRRRQELLELLDRIDPVIEELTKAAEQEAKKRPEVARLMTHPGVGFLTALAYVLIIGTPERFHCGKQVGTYVGLIPSEDSSAGKQRLGHISKQGNSLLRFLLVEAAQAAARVNQEWRRRYIHLAMRRHKSIAKVAMGRKLAVRLYWMWRNGREYSPALEFGSYVGQLGTGHSVR

SEQ ID NO: 328152 - protein, 347 aa, unidentified
MKEQNNRNKFTIGLDLGERRHRFCALNRKGEVAEEATLGNDRASLARLSARYRGAMAVMEAGAHSPWISRYLEGLGWEVIVSNPRKVRAIYQYERKSDQRDALMLARIGRMDRALLYPVRHGSEEAQQDLLRIKLRDSLVRARVALINSVRFSLKSLGYAVSNPSSERFHKVAMESVPEAVRQIIAPSVQALAELSARIKVLEREINVLARTKYPQTLWLQQVPGVGALTALYFVLKIEDPKRFKNVRDVGAYTGLCPRRDQSGENDPQLRISKRGDAYLRRLLVSAAQYILGPFGPPSALREYGLRLAADGTTRARKRAVVAVARKLCVLLLSLWRNQTSYQPYPA

SEQ ID NO: 328153 - protein, 343 aa, unidentified
MQVSTIGVDLAKNVFQVHGVDSAGKVVITRQLRRKQVIDFFSKIPPCLVGMEACGTAHHWAREVSKLGHTVRLMPPSYVKGYVKRSKNDAADAAAICEAVTRPSMRFVPIKSADQQALLMLHRTRDLLIRQRTQLINALRAHLAEFGLVAETGCEGLAQLAAIITDESNREALPSAMKQALQAIVDQLAALELQIGTLDRAIHAHHRANDMSCRLETVPGIGVIGATAIASTVTDARDFKTGRDFAAWIGLVPRQHSTGGKERLGGISKQGDRYLRRLLVIGATAVVRHARQHPQKHPWVMKLLGKKPAKLVAVAVANKMARIAWAIMAKGGYYRAPELAAAA

SEQ ID NO: 328154 - protein, 367 aa, unidentified
MNKISTAAVKQNRTFSGQKLTIGLDLGDRSSWYCVLDEAGGVLLEQRLSTTPKMVKEVFGSMPGCRIALETGTHSPWVSRALSELGHEVIVAHARNVRLIGESRKKDDRLDAQTLARLARIDPQLLCPVKHRSAKAQADLTVIRARAGLVRARTALVNTARGLAKSYGERLRGCNVRNMNAEKAEGLSPELRTALEPLLAGIESLSEQIREYNERIELLAQQSYPQVALLKQVKGVGTLIALTFLLTLEDAHRFRKSRDVGCYLGLQPGRRNSGQSEPQMHISKEGDPYLRTLLVQGAHHILGPFGADSDLRRWGLKLAERGGKSGKKRAIIAVARKLAVLLHHLWVSGEVYEPLRPSKPRAMPAAA

SEQ ID NO: 328155 - protein, 353 aa, unidentified
MPYRIAGVDVHKRMLAVVVGDVAVEGEFQFTRRMVGSSPGELRALAAWLVECEVEEVVMESTAQYWRPVWDALERYWQPWRRRRAGAGPVSGTLHVAQAQSNRGARGRKKDCPDAERLVKRLAAQELTLSVVPDVEQRLWRTVMRRKYQVTRNRVQLQHRLECLLEEAHLKLSSLVSDLKERAGLLSPYQPAVQRLAAVPGLGVDSAQQIIAEVGATAATFPSSKHLASWVGACPGAEESAGVNYSHRSPNGNRQMRRVLNQAANAAVTTKGSIFEMVYRRLVPRLGHAQAIGAIAHRLCRLIWKILNQGVSYEERGPAVTKHRAQRRAAKMIRELRSLGYRVELPTLSGTPA

SEQ ID NO: 328156 - protein, 350 aa, unidentified
MIIIGADYHPGFQQIAYVDTETGELQERRLQHREEAEKFYRELAAQGKKVRVGMEASGQARWFERLLGELNFELWIGDAAEIRTKRVRKQKTDRQDAQLILKLMLEDRFPQIWVPSWENRDVRQLLWHRHRMVQARTRIMNQLQAVALNEGLRAKKRLWREAGREQLTAIRLARWATRRRQDLLELLDRLNPIIGELTKAVEEEAEKCPEAQRLMTHPGVGPLTALAFVLVIGRAERFGCGKQIASYLGLVPSEDSSGERRRLGHISKQGNSLLRFLLVEAAQVTVRSNQEWRSTFFHLAMRRGRKIAKVAMARRLAICLYWMWRKRWNYEQLTKFGAHAGQPGNPHGVR

SEQ ID NO: 328157 - protein, 384 aa, unidentified
MIKHNILFIGLDTHKTFTEVAYIEDQRGAKSTHLGKILSNKAAFKKLARQLQSKYPDATLHFVYEAGPCGYWIYRLLTSLHHCCYVIAPSLIPKKPGERIKTDKRDALKLAKLLKSEALTPIYVPEPEDEAVRDLSRSRETAMKDLKDAKYQLKALLLRNNINSKIKDNWSLQHLRWLAELVLPHPCQQIVLQEAVSTITERLKRLKRLDNELTHQVKSWRYYPVVKAIQALRGVRLLVATGVIAELGDLTRFDHPRKLMSYLGLVPSEHSSGGKRHLGAITKCGNSRARRLLVEGAHSYKHNANISKEMQLRQEGLSKEIIEMAWQAQLRLCRRYNRLMHKGKHRNVVVTAIAREMIAYIWAISREVVLPVVDVKLRLARMPA

SEQ ID NO: 328158 - protein, 387 aa, unidentified
MNYCGIDVSKRSHTAVVIDDKGQVVQAACTVSNDREGLEKLESMLRVYRDQLLIGLESTGHYWVSLYDVLSHGGYVLSVVNPLQVHAYRHMDIRKRKTERVDALSIAGFMRFANPSPTNLQLPAMLQLRELSRFRFRLTQQIGDCKRKIISILDRVFPEYEKLFSSVFLQASRHLLQEAVTAEEFAELDLTELGVTLSTNSRGRFGREKAEQIQSAARRSVGVSFLTDAIRIEMRCLLEQIGLLEQQRKDVDAKIEEMMAQIPQYITTIPGIGLVTGAMLVAEIGDIQRFEGPEKLVAYAGIDASVKESGDSKSDRMHMSKRGSHYLRYALWQAAVASLLHNQEMAAFYHKKRTEGKPYGVAVGAVCRKLLGRVYIVLKEQRPYVIR

SEQ ID NO: 328159 - protein, 424 aa, unidentified
MNNTQNKKIAQVSDGTLVIGVDVGSNTHYARAIMARGYEVSKKPFDFENTRDGFDRFVSWANHLAVVYQLKKIFVAIEPTGHYWFNLADYLKAYDVTLVMVAPQHVKHSKEMDDNTQMKNDQKDPLVIARLVAEGRYMIPYIPEDVYAELRSAFNRRCDLVEALTRNTNRMIRWFDMYFPEYRTVYGKADAISGLLILKRAPLPSDILKLGVDGISRIWREAKLRGAGINRARKLVAAAESSIGLKGGEAIRQELWQHMEAHELFKKQLGDIMQMIDGLIAKIPGADRLLKVPGAGIVTVAGFLSEVGDISRFTDPKQIQKLAGLAVVENSSGKRKGKPGISRRGRSRLRWVLFQLAMTTVKSNKEMKAYHLYYTTRKNNPLKKMQSLMAIAGKMTRIFYGILKNGTEYDPAIVMKDFKKEVAV

SEQ ID NO: 328160 - protein, 355 aa, unidentified
MPSKADTAVARTIGIDTGKNTLHMIGLDEKGAIVLREKVSRTRIATRLANVPPCLIGIEAGMASHHVARELVALGHEVKQVPPAYSKPFRQGHKNDFRDAHAVAEAAGRPSTRCVPIKTDGQLDVQALHRVRSRLISNRTAVINQIRGFLLEHGIPVRQGHHFLRQQLPQLLAARADVLSPRMIRIIGDLIADWNYLDERIERLTDEIEALARADEGCQRLITVPGIGPLISSAMVAAIGNGAAFCKGRDFAAWLGLVPKQMSTGDRTILGRITKRGNRHLRMLFIQGARAILLRPASWAKHSFGSWLAAAARRLHRNVLSVALANKLARIAWTVLAQGRRYEARVEPRVEPATA

SEQ ID NO: 328161 - protein, 359 aa, unidentified
MASNVKGNRINFNGKMVNIGVDMHKQSWRITALVEGEVAFTGTLAKPNYDSFRKLLARFEGNCVRIAYEAGPGGFGLYDMLTADGIECMVTPPSLIPTESGSRVKTDKKDSLKLAKLLESNMLKRVWVLSPEERAHRQLVRTRRQIVDHRSDVMRQIKSLLFFHSMDIPFSSRQQWTVPFIKWLHELNLDDQCLNQSLKTLVHLFDYLSVEKKRLTHEVIELAKEEKYTQRVKLLNTIPGIGTLSGMEILVELQEITRFKTSDELAAYLGLTPSQYSSGEYVRMGHITHAGNDRVRTTLVESSWILIGKDPSMRRKYENIKHRRGGKRAIIAIARILSARLRRMLLDQVPYEIGFQKAA

SEQ ID NO: 328162 - protein, 421 aa, unidentified
MLAESVDDEEIIARVAALDVGKAELVCCVRVPGAGGGKRRSQEVSTHSTMTRSLGDLANRLVDLRVERVVMEATSDYWRPVFYMLEAHGLQPWLVNARDVRHLPGRPKTDVLDAVWLCKVAERQMLRSSFVPPRPIRRLRDLTRYRIDLVGTRTAEKNRVEKLLEDACIKLSVVASDLFGVSGRAMMAALIAGERDPKVLAELARTRMRVKIPQLVEAFTGHFDDHHRFLLAQMLARIDGIDADIAVLDAEIEAHLAPFELAVQRLDEIPGIGPVAAAVIIAEIGVDMTRFPTAGHLCSWAKFSPGIKSSAGKNKGNGSTGHGDRYLARVLGEAAPIAGRTDTFLGERYRRIARRRGKKKAIVAVGRSMLVIIWHLLSDPETRFNDLGADHFTRHVNTETKKRQHVRQLEALGYRVTLEAA

SEQ ID NO: 328163 - protein, 314 aa, unidentified
MNTPVCVGIDVSQSQLDVAVRPGICFSVTNDEPGWTTVVTQLRRLAPVRIVLEATGGLEVPLAGALAADGLPVVVVNPRQVRDFARATGQLAKTDALDAQILAHFAEVIRPQIRPLPDAQTQALAALATRRRQLIEMLTAEKNRLRTAAPSIRKSLRAHMVWLQRARTHTDTELAQAIQDSPVWREKDDLLRSVPGVGPVLTTTVLANLPELGTLTNKQMAALVGVAPLNRDSGTLHGKRMVWGGRAQVRATLYMAAIVATRYNPAIKTFYQRLCGVGKAKKVALVACMRKLLTMLNAMLKHRTRWRTNLPQHA

SEQ ID NO: 328164 - protein, 400 aa, unidentified
MLSPKRFIGIDIHKAYFVAVGVDDQKQVVFGPQTVPNHQLDTWVAKFLLPTDAVVAEMTVNTYLFHDIITPRVHSFIAVHPPNVTLVTGAKVKTDKKAAMALAQLHAVGMLEGVWIPPELVRGLRAAIAQREKMLRLSTQAKNRLSSLLHCRHLTFSGEGSQYAPEQKEWWLALPLTDLEKLIVQTNLETLEFARTQIETIEQALKREAAKDDRVPLLAQLPGVGVLTALTILAAIGIIDRFEDARHLVGYAGLGTRVHDSGQVHQNGRITKAGRRDLRRAMVNAANIAVQHHPFWKKEFARLEAHLGRSKAIVAIARRLLVAVWHILTRQEKDRHADERSVAASFINLAYKMGTKNLPNGINAKTFARQQMDRLKIGAGMTAVPWGSKRITLPPSQLKG

SEQ ID NO: 328165 - protein, 404 aa, unidentified
MSVHVAPVTSSTIVVAVDVGKTSALFSVSDAARHRLIGPSEFAMTGSGLTAAAARATAVVPPAGRVKVGVEAAGHYHRPVLDHRWPDGWEVLELNPAQVAEQRRVQGRRRVKTDVIDLEAITELVLAGYGRPVSDRDVVIGEVNAWAVHRSRRVATRTATKNQLLGRLDRAFPGLTLALPDVLATKIGRLVAAEFADPARLAGLGVNRLIRFAATRDLQLRRPVAERLVAAARDALPTRDAAIARQILAADLVLLADLDDQIRAAETALESLLPHSPYATLTSVPGWGVVRVSNYAAALGDPRRWPGPRQIYRASGLSPMQYESAHKRRDGGISREGSVALRRALIDLGMGLWLNEPAAKNYAKGLKARGKHGGVVACALAHRANRIAHALVRDHATYEPTRWA

SEQ ID NO: 328166 - protein, 312 aa, unidentified
MAMLSFCGIDVSKDRLDVVVLPEGWFFSVSNDTAGWAELVVRLRPLTVSAIGLEPSGGYERGIIRALLAAGLSVRRINPNKLRQFARARGVLAKNDRLDARLIAEYVAIMPTRVVQRDAAVERLAEIVTMRRQLCDEHVAAENQAAHLEDAMLRRLSKRRQTRLEADIRLLDKRLAEMVAANVALAQRYELLTSMPGVGPVLAFTLIALLPELGKMTRKQIAALVGLAPYDFDSGKLKGHRSIYGGRMPVRNVLYMAALSASRYSPALKAFHNRLADADKKSKVIIVAVMRKMITTLNAMLRDSAAWQPRSA

SEQ ID NO: 328167 - protein, 348 aa, unidentified
MTVTIVETRAITGGVDTHADAHVAAALDPIGGLLGVREFPATPAGYAGLLAWLGGFGTVCLVGIEGTGSYGAGLARHIAAADVRVVEVDRGDRQDRRRAGKSDPLDAVSAARAAQSGRAAGAPKGRDGAVEAIRALMVAKRSARSERTQTINQARALIVTGPDDLRARFTRHTPADLVAELASLRPRPGATVGYATAIALRELGRRARFLDGQLKRLDEFIVPLVAARAPGLLALYGVGPDTAAMLLVAAGDHPERLRSEAAWAHLCATAPLSASSGKVTRYRLNPGGDRQANHALYRIVITRLSSRPPTRAYADRRTKEGLSKKEIIRCLKRYVAREVYLHLRPPAG

SEQ ID NO: 328168 - protein, 346 aa, unidentified
MAIVIMGIDLAKNVFQLHGIDDKGCATLRKRLSRARFLPFLANIPPCTIAIEACGSANHWARKMRELGHSVRVISPQFVKPYVKSNKNDYNDAEAICEAVSRPGMRFVPIKGVEQQDVQTLHRIRERLIRERTALVNQTRGILREYEIFVPVGIRALRSAIPRALEDAENELTALTRELVADQYERLLDLDRRIAKCDQRIDAVFRNSRVCQRLAAIDGVGPMTATALVAAVGDVKEFQNGRHLAAWLGLVPRQRSSGERNRLLGISKRGNTYLRTLLIHGARSVVQRCSARTDVRGRWIQSLRARRGFNRTCVALANNNARALWALMVAEDAGRPATYGLVQTTP

SEQ ID NO: 328169 - protein, 409 aa, unidentified
MQRMKGKRSASSIVGCAPRCAEPHTETPRGVLTATIQRRQTVSKGITSFVGLDVHKDSTAIGEAEAGRETPRFIGTVGPDLGQLLKALKSLGKPETMLVVYEAGPCGYGLARQLRSRGYACEVVAASKIARRPGERIKTDRRDALALARLARSGDLVKVIVPDERDEAMRDLSRAREDGVRARLKARQQLKALLLRHGHRYGGKSSWTLAHERYLSAVSFAHPAQDIAFAEYRQAVREGHERVERLTQSLRTQTEHWRMQPLVAALASLRGIDFVAAVTLAAEIGDFSRFAHPSELMGFLGLVPSEFSTGETRRQGDITKTGNSHARRVLVEAAWNYRFPARISRILQVRQEGQSKVVREIAWRAQLRLAHRYRRLSSRKLHPNKICVAIARELAGFLWDIARQVKVAA

SEQ ID NO: 328170 - protein, 342 aa, unidentified
MYYIGLDVHKKTISYCVKDAAGKIQSEGKIGSTRRELDAWIKTLPQPRMMAMEATIFTGWIYDHLLPHAEKVKVAHPLMLRAIAAAKRKNDKIDASKIADCLRCDFLPECYMTSTEIRDRRRTLRYRGLLVKQMVQMKNRISGLLMETGVSYNKQRLHKVGYFTELMSGNEEINCVRPLLKLSRETINRTQKLDYALVSSLERDPLLAERLKRLRTVPGVGPITALTWVLEIGDVARFQSIKQAISYCGLCGAERSSADKVVRTPISKQRNKHIQQVLVEAAKLAPRYSHELALIYEKEMQRGNRNRATLAVARKMVAWMVAVERRKQDFVPAEKFGGTAAA

SEQ ID NO: 328171 - protein, 331 aa, unidentified
MIFTETVGIDISKSTFDAYLHNTRKYKQFSNKPKGFISFMKWVEKCTGRTFNEIGICFEHTGLYSLPLAIYLHKIDVLYSMVPAMEIKKSLGLVRGKNDKVDAQRIAEYAYLRRGTLEPYKLPSTQILKLQKLNSLRARMIKQRAGYKASLSEYKALLIRKNNLILFQEHERMIIHLDKVIKKLDNEIQNIIDQDEQLSQHSKLITSVKGIGPVLAAYFLVTTNCFSSFSDGRKYACYAGVAPFSYQSGTSLNSKAKVSHMANKRMKTLLNLAAGSAIQSDPELKAYYKRRIEAGKSKMSTLNIVRNKLINRVFAVVKRGTPYVPLYQFAA

SEQ ID NO: 328172 - protein, 370 aa, unidentified
MLDTTTFVGLDVHARSIKAVSLDVVTGEVRCATFGYDAGAVAEWVRSVDPKARCVYESGVTGFDLQKRLSGLGVDCVVGAVSKMIKPSADRRRKNDRNDAEFLARMLSVGNVVEVWVPDDECEAARDLTRALEDARDDLSRSKQRLSKFLLRHGLAFDERTPTGRRKGNWTRAHWSWIESIRFAEGADEEVLAYYVDAVRRAAEEKARLEGLVEAEARKPRWRRRVDSLRCLKGVDTATAADLVFEAGEFSRFGNARSFAAWVGLTPSEHSSGESDRRGAITKAGNKHLRKALVEAAWHYLTCSGRPKDLAKGQAPDRVARRHAAKGVRRLVERREALLARGVHGNKANVATARELACWVWAVGLMAEEA

SEQ ID NO: 328173 - protein, 345 aa, unidentified
MKKVMAGIDLHSNNVVIGIMDTDGKRVASGKLPCELKEIAKFLAPFKKRLEQVAVESTYNWYWLVDGLQALKYPVVLANPAAMQQYSGIKHADDTNDAFFLAELVRLKILPTGHIYDAQLRPVRDLLRRRMTLVHQRTALMLSFKSLYTRTTGQEMTLSQLKELEIKEAQDLYAHPANQMIAGMQIKHIEQLTESIEKIEKVVMASARELPSYGKLTTLPGVGIILGMTMTMEVGDIKRFASPGDFASYCRTVQAQRTSNSKKKGENNSKCGNKYLAWAFIEAANFARRFDEQCRKWYDRKAAKTSKMIATKALACKLAKAAWFLMSQGSEYDAQRMFGQPATTK

SEQ ID NO: 328174 - protein, 348 aa, unidentified
MPLYGGIDLHSNSNQAAILNEDRKRIMRRKLDNDPDAILRFWEPYKSDLAGIVVESTYNWYWLVDLLQDNGYRVHLANPAAIQKYSGMKHADDHHDAFWLAELLCLGILPEGYIYPKELRALRDLLRKRQQLVRVRTALILSLQNIVTRNGGTKLSSNDLTALKEDRVQVYLQENEDLLLAGSASKAAIDALTRQARRIEGAVVKKLNLQAPYPQLLTLPGVGRIVASTIMLETGPIERFPEVGGYASYCRKVNSQWTSNQKVKGHGNKKNGNKYLAWAFGEAAERARIFHPASREFFQRKMRQKKSPALAHGALAHKLARAAYYILRDNVPFDQEKMFGYPEEPLDN

SEQ ID NO: 328175 - protein, 312 aa, unidentified
MGFVGIDVAKAHLDVCVRPTGETFRVGNDDAGISELVGRLVAAAPTLVVLEATGGYEAPVVAALAVAVLPLAVINPRQVRDFAKATGKLAKTDLLDAAVLAQFAEVVRPEPRPLDDDQTLELQATLVRRRQLLDMLTAETNRMYTCRSTLRKSIYQHVAWLRRQLKDVDRDLDQQLRETPIWREKDDLLQSVPGVGPVLSRTLIAELPELGTLDRKQIAALVGVAPLNRDSGAMRGRRAIWGGRASVRAPLYMAALVATKHNPFIRATYQRLLAAGKAKKVALVACMRKLVVTLNAILRDRRPWLPPQQDSC

SEQ ID NO: 328176 - protein, 328 aa, unidentified
MKKQKVLHFIGIDISKLTFDVAIIVNNEKTTSYVFDNTTKGIKAFLRLLKNQKIGLRCMEHTGVYGKLIITKLVEQQANICVEMSLKIIRSLGVKRGKNDKVDAIRIAQYAAKNSNELELYQPIPEVLEKIKLLITIRERLVKSKTDLTKYPKELERFAPELAKLANKSIKKTLKTFTDEIKRIEYEIKELILSNDKLNKTISLATSVTGIGLFTALYLSIYTNLFTRYENPKQLACYCGVVPFEHSSGTSIKKRAKVHHMANKTLKKQLHLCALAALTHDPELKTYYHRKVEEGKSKMLVINNIRNKLILRVCAVIKRQQPYKKVAA

SEQ ID NO: 328177 - protein, 394 aa, unidentified
MKLVGIDVGKNSHHFCVMDKETGEFNVAPSSFSNNKEGFDFLINYLKPYSKKSILLGMEDTGHYHVALLKFLLSNGYTVALINPKTTDLTRKMEGGITKNDKLDTITICDVLDTPERKKQYRITKVDRFDLYEQRQLTRHHHNLKEELNVYCNRLQKSIDLVFPEFNTLFSSKYSIVYMNLLKTFGSAEAIASTDIRTIRKCFEIKGRGNRISLTPEKLKECAKNSIGISSEVETIQIKHLVSQITLIKEQIAEIDKKIEEFSITNNSPILSIPGISHFSGTSILAELGDIGNYSKPSQIIKFAGVAPYHYESSQYNAQHTGITKKGSKYLRKTLYQIILTVINNNPVFKKYYRLKISQGKGHRCAQGHCIRKLLRIIYHLLETGQSFDPALLR

SEQ ID NO: 328178 - protein, 422 aa, unidentified
MEAFNVSDFAALIGIDWADRKHDICEINRDTNTQHLSVISSDPKSINAWALELKQRYNGRPVAVACELKKGPLIYALSKFKHIVLFVINPSSVAKYRAAFTHSGAKDDPTDAIIQVEILQLHMDKLTVIRPDSEDVRCLAQLVEYRRKLVQDRVDLTNKIATTLKNYYPHVIDWFKEKDTQIFCDFLLRWPSLAHAKKARKQTLLDFFNQHNSRYPLVNEKRIKEIKDAEILTDDMAVITPNLLLIECLVPQLKQLMLAITRFDDEIKTLYKQHADRAIFDSLPGAGPQLAPRLLAAMGSNRDRYKCAADIQKYAGIAPVTERSGKKEWIHWRYSCTKFLRQTFVEWAGLSVRYSFWAKAYYRQQEGKGKPHNTIIRSLAFKWIRILFRCWKTHTPYDESTYLTALKSKGSPLLKFAVESEL

SEQ ID NO: 328179 - protein, 385 aa, unidentified
MVYIGIDIAKFKHFASVVSSDGKVIVKPFPFENSRQGFMKLIEEIENFHDCLIGLESTGHYAENLIFFLYQHGYQIGVINPIQTDALRDSNIRKTKTDKIDTKLIVQCLMLKKYSLVNSQDINIIKLRRLSRFRLETIQQQTRIKTQLTACLDIVFPELSSFFKGNLHLKVSYALLEKYSSAKAIAHCRIDGLTNLLYDNSKGHYNQDRALQLKDLAKQSIGLDNPAIELQIQCLIKQLRLYQKQIKDIDLAIMTLMELLNSPILTVPGVSYTLGAMIISEIGDIKRFSNPSKLLAFAGLDPVVKQSGDFQASSMKISKRGSTYLRYAIYRVAFLIIYNNETFHNYYISKCAQGKTHRVALGHICNKLVRVIFKILTDETPFNLS

SEQ ID NO: 328180 - protein, 391 aa, unidentified
MIYIGIDVAKDKHDCFITNSNGEILFNVFTIPNNSDGFHDLYQKISSLTKDFSNVKVGLEATGHYNYNLLGFLIDKGLPTFVINPLHTNLFRKSLSLRQTKTDKVDAHTIALMMMSGVNLQSYSDTSYHNEELKSLTRYRFDKVKERAKLKTSVSRLVNILFPELEKLVPTLHMASVYALLSELPSASQIASCHLTHLSKLLHDASKGRYDKEKAIEIRNAARQSIGSSMPAKSLELKHTIKLIQELTSEIAEIEISIKSIMDSIHSPILSIPGINYRMGAMIIAEIGDFNRFSSPDKILAYAGLSPSTYQSGQLDSSYSHMEKRGSRYLRYALFNATKFVCIWDNTFAAYLAKKRAEGKHYNVAISHAAKKLVRVIYQMEKTEQLYNRTA

SEQ ID NO: 328181 - protein, 338 aa, unidentified
MPLYGGIDLHANNSVIVLLDDQDQVVYQKRLPNDLPSLLQQLSPYQASLQGVVVESTYNWYWLVDGLMERGYMVHLANTAAIQQYAGLKYTDDHSDARWLAHLLRLGVLPEGYIYPKEGRAVRDLLRKRSQLVQHKTTHLLSIQNLLTRNTGRAMSGNRIKQLTVADVDGLLPEPELALAVKSNLAVMRCLETQIATIAQTVTQRVKLQAEFNDLLTVSGIGQILALTIMLETGDIRRFPAVGNFASYCRCVGSQKLSNGKRKGSGNTKNGNKYLAWAFVEAAHFAVRYNPCIKRFYQRKQAKTNTVVATKAVAHKLARACFYILRDQVPFDVSKAFQ

SEQ ID NO: 328182 - protein, 422 aa, unidentified
MIREEQAADRHERYGARVGFDWGDREHAWVIEWADTGQRERGRLEQTPEALDTCICQWMSRLNGRRMAVAIEQKHGAVVWMMLRYECVEIYPIHPQAAGQFRQALYPSGSKSDPTDAELLLDLLVHHRDRLRPLEREDEPTRRLLMLVEQRRHWVEERKRHGNRLSARLKVYFPQVLNWFDDIGAAPVLDLLSRWPSLEQLQRAQRKTLEAFLSQHRRSQEEAAAWAEQVRAAVPAVRDIAIMESYVLEVTALVALLKQMATSIKKFDEAIEEISRQHPNRAIANSLPGAGPVMAPRLLAAMGSGNRYETAFQMQCATGIAPVQMASGRTKTVQFRRACPKFLRQTFHEWAQHSMKSCRWARAYYDYLRAGGKQHHAAIRALAFKWQRILFRCWKDQAPYDESKYLAALKKRNSHLLAWLPA

SEQ ID NO: 328183 - protein, 371 aa, unidentified
MFHVGLDIHTKRIAICALDEKGQVVHRSQVRSIQDLVRVLTGLPDRFEVCYEASCGYGHFHDLLRPLATRVVVAHPGQLRLIFRSKHKNDRNDAERLAKLLYLGEVPAVHVPALEVRTWRELINCRSQVIAKRTRAKNTARALLRSAGVTPPNNPGLWTKKGLAWLRQLALPTASQQLRRDLLVEEIEGLIRQVRRVEQQLSRQAQQTPAVARLRSIPGVGIRTAEAVAAFIDDPQRFRDAKAVGSYFGLVPCQDQSGDRNRLGHITREGAPVVRQLVAEAAWQALRRSPTIRAYFERAQREDPQRKKIALVATAHYLVRVMWAMLRRGTEWQENPALANKPSSGSSGCPEANGGGASDGEAAGESLIESA

SEQ ID NO: 328184 - protein, 318 aa, unidentified
MTIAETPKVSVGIDVSKATLDIAIHETDDSWAVTNDSIGGAALVSKLKQLKPTSIVLEATGGFETLLTAMLSAADLPVIVVNPRQVRDFAKATGQLAKTDRLDSRVLAHFAAAIDPPVRPMKSDETQHLEALLDRRRQIVEMLVAEKNRLSNNRDRAVVKDLQAHITWLERRLKSSDDELQRVLKNCPAWRERDDLLRSVPGVGRVLSLTLLAELPELGRLNRREIAKLVGVAPFNWDSGQWRGSRHIWGGRTTVRSPLFMATLCAIRINPTIKSFYRRLIAAGKAPKVAIIACMRKLLTILNVMVKTQTSWRTACSS

SEQ ID NO: 328185 - protein, 342 aa, unidentified
MYYIGLDVHKKTISYCVKDAAGHVHREGKVGSTRRELDAWIPTLPQPRTIAMEATIFSGWIYDHLLPHAVAIKVAHPLMLRAIAAAKKKNDTIDASKIADCLRCDFLPECHMASTEIRNRRRVLRYRHLLVRQMVQTKNRVSGLLLETGVEHNKSRLHKVGYFRGLLATSNDIDDSIRPLLRLSRDTIERCQKTDYALVSLLQRDPLLADRIRRLRTVPGVGPITALTWALEMGDISRFRTIKQAISYCGLCGDEHSSADKVMRMPLSKQRNKHIQHVLVEAAKLAPRQSAELALIHQKALEKGNRNRATLAVARKMVAWLLAVDRENREFIPAEQGEIRAA

SEQ ID NO: 328186 - protein, 430 aa, unidentified
MKFNTQNKKIEAITETTLVLGIDVGSDTHFARAFDFRGIEYSKKPFKFTNDEAGFIDFAEWIQNLKELHGKDHVVPGMEPTGHYWFNLGKFLQKNGMKPVLVNPHHVKKSKELDDNNPTKNDRKDPKVIAGLVREGRYMIPYLPEGVYAELRTASNIRFQLQSELTRIQNRICRWFSIYFPEYRTVYGKPDAVSGMLILKEAPLPEDIMTLGVDGINQIWRNAKIRAVGIKRAQTLLTAAEHSIGCKEGVVTARLEIKMLFEDYESRKARLQEVMTLIEDLVMQIPMAEKLLAIKGVGMKTVSGFLAEVGDISRFSSPKELQKLAGLAVVENSSGKHKGKTTISRRGRKRLRYLLFEVAMSLVAKNKEFRDLHSYYTTRSCNPLRKMQSLMAISAKLIRVFYAMLTKGVTYDASKMVSDIKRPVEYMLAA

SEQ ID NO: 328187 - protein, 338 aa, unidentified
MQTYAGIDLHSSNNFIGVINEKDKILYGKRHPNRLDDVLRALDPFKDSLQGVVVESTFNWYWLVDGLQEQGYPVHLANPSAIQQYEGLKFTDDQWDSVWLAHMYRLGILPEGYIYPKEHRAVRDLLRRRLLFVQHSTSHILSLQSMISRNLGFKITNNEIRKLKPEDIEDMFACPNLVFMAHNSLAAIKFLKKISLDIEKKVKSQVKMRKEFEMLLTIPGIGNILGLTIMLEVGDIARFPKVSDYSSYCRCVESKRISNGKKKGENNKKNGNKYLAWAYVEAAQFARRYCVKAQSFYQSKEAKTKPVVAIKALSNKLSKASYYIMRDQVVFDEEKLFG

SEQ ID NO: 328188 - protein, 323 aa, unidentified
MEAVAQYVGVDVGGERLEVGVWPSDEHLSFANDPDGIARLLQRMVELAPAAVVMEATGGLEVLLASELVAAGWLVAVANPRQVREFARSLGNLGKTDRKDARTLAQYAQAAHSNRRLVAWRLPEQAQLELKALLTRRRQLLQMLVAESNRRLRAPKVIRASVVQSIRRLKRSVAAIDAQLRDKLAESPAQQAKATLLEAVPGVGPQLTLTLIAELPELGRLSRREIASLAGLAPHPFESGQFKGRRTIWGGRAQVRSMLYMAALSAVRFNPLLRASYQAMLARGKAKQLALVACMRKLLVILNAMLRDSAPWNPDHLDFQHSR

SEQ ID NO: 328189 - protein, 347 aa, unidentified
MNFYNNIHPYYCGIDLHARTLYVCIIDQDGNTCVHKEISADPNKLQPLLEPYIGNVVVGVECMHCWYWVADFCDGIGVDFILGHALYMKAIHGGKAKNDRIDSFKIANLIRGGNFPLAYVYPKEMRATRDLLRRRMKIVRHGADLKAHVANTTSQYNLPPNKVNLKNASAREHLKSTFPGLSVQKNIDLDMVILDCYAEQLSKVEWYIETQARQHKPIHLHLLKSISGIGRILSLTIIYEIGNIDRFNSVQNFSSYARLVKCKAESAGKSYGTQGNKIGNAHFKWAFSEAAVLCLRGNKKAQDYLVTLQKRMSKAKALSALAHKLGRCVYFMLKNETVFDESKFLKG

SEQ ID NO: 328190 - protein, 341 aa, unidentified
MPATRHIGIDLHRNQFTCCVRLENGRNYLTDWKLEDLPRFVKKLRPSDQIAVEVTGNTRLFHEAVAPYVKRVVAVDPNQFQVISHSVKKTDPNDARNLALYLDKDLLPEVRMKDKTQAQLASLTQTRDTLVKLRTALKNKVNNILSAHGINLEKEALSSEKKLNEVLAMSFDSMVKIELEVIVEEIRSLNQRVAKLEKTIADEGSKLEGHKNLTSIKGIGPLTGSILLSVIGDIDDFADEGKLAAYFGIVPRISNSNETERSGRITKRGSKLGRTALVQSALIAQRYSPYLKRYYEKIKARRGTGKAIIALARKLLGIIYRTLKNKWVFEDFANFVLAEAA

SEQ ID NO: 328191 - protein, 440 aa, unidentified
MKQFLECCAGIDIGKREMTVTILTGSVEVEPIPQMGTFGTTVQELNRCLEWLLGNHCSTVVVESTGTYWVPVWNVLHERVAVIVANPEHVKARRGEKTDPEDSRRLAERLRVGDVRGSFVPSAQIVELRDLTRRRKRLLSAANSERNRIQKLLEQANVKIGNVVTDVFGVSGQRILHALLQHPELTPAALADLAKGRLQHKRQALIETLQGHRLNDHVRWMIQHSLDHLVFLENQLTELSQRILLKLQPFEREYELLQTIPGIAAETAAVILAETGGNMAQFPSPKHLTSWAGVCPGNNRSAGKQKSASIKRANKWLLAALVQSAWATVRQRGSIFQKRFYRQMQHRGRKRALIAAARSLLEVVWQVLQRMTPYNEPANEVLQQQERGKKIRHHLQRLRQLGIDISDLQLPPLTPLIPSNGTRLLTGTPHPLGVLGIHAR

SEQ ID NO: 328192 - protein, 316 aa, unidentified
MQTILNLGADVDSRFIVVACAAGSFAPQRLSNDRQGIRSWLRSVPRGSRLGIESTGSYHELLADLAHAAGLQVFVLNPRILRRYAQSVGQRGKTDRIDAEMIARYVAREHAELHAYVPPTKEQRALARLINRRGTLVAARGTVTQSLRGVADIESELSHLEVCFERLLRQVEILMQEALQQLPAAKQAAQQIATIPGYGPLGSTCLGYTLTRLPYANSDAVIAQTGFDPRPDDSGQKHGRRRLSKRGPSEQRRILFNCARAASRTRHWQPYYAAQLAKGLSSTAATVILARKMVRVAFAVVKQNAPFDPERGYAHA

SEQ ID NO: 328193 - protein, 478 aa, unidentified
MIYSVGIDLHKGQHRVHCLDEKAQPCDAFSFETTPEGLATLERRIFRDGSNPIVVFEPAGLTWLMVAAYLRSCHPECRVVRAKGQKVAALRRYLRGPVKSDRIDAFTLAKMPFIDPERLDEVYLAPAKTHALQRLTRQRKRLEDQITTHKKRIGSIVDGYLPGVRQAFSHPWSVQVRAFLHSQINPFAVIRAGEEALHNFLTEAKPGNRGRRTESHLVYHACQNVLALQKLCAAAGMLNEEFFIDLQGEIDREMRLMEAEEAESKALDRRIEELYRELHPSDNLRTIPGVGEHTAPVFVANIGDPTRFPGQSEFINWTGVVPAARQSSGVESKGLRMTKAGPATVKWALYQAGQIGRRWDPQLASVYYRQMVYHGKNHKQAMGAVMSHIAARVFTVFREDRPYELKDTEGKSMSVLAARDLIMAKYQVPEDIRQARRKSKGRKANAPGLGKKRGTAAGREHEAAIAPQPATSLPSPVI

SEQ ID NO: 328194 - protein, 398 aa, unidentified
MTRKNTLKSLPTDTEFRVVGLDLAKSDVSVAAIPVDDNTPSLVDRMTYADLLDWAGKISPTLFAMEPCNGYSLLCLQLENLGHEIKVISGSTVSMWINTHLSGQKTDLNDAIALARLAVSDAELTPIRHKSITEIRIQTVQAVRQQLMSQRSKSIVSFKALAQQWGIPCAAGHRNLKKLRESIEAKVDLITRPVANAMLFLLDAVKSLDRQIGQLNQTLQELVMSDERGRLLQSVLGVGTQISARVITVVGNIERFNSPRSLVAYVGVAPRNFITGHKNLTKKKHGNCPDLSHKGQGKISRRGDKLLRSLFIQGAACLYMQFCKDQLPECQLKRWILKQLARQKTYGKLMVSLAAKLIRIVWAVLTYREKFNIQKAGMTRSMWSEMALETPLNKEVPA

SEQ ID NO: 328195 - protein, 441 aa, unidentified
MADTVSTTPEPAWAAFVALDWGGQKHAWILQPADGGKRKEGYVDNTPEAIAVWAADLHSRFGGQPIAVALEQKRGSVVNLLLPYAHLVLFPVPASMSASYRKTFVPSGAKDDPSDAGWILDLLLRHRDRLRRLEPDEANTRLLLMLVEDRRQLVDDKTRLTLRLQDCLKQYFPQLVQWFEMDTQLVADLLQRWPDLQQLQRCHDGTLRTFFRQHHCHENLTGERIAAIRAAVPATHDPAVLEACATKARHLSALIVTLRDQIKQLERRRDQLVASHPDATIFASFPGAGVATVPRLIAAFGTRRERYQSAFEVECDSGIAPVHIRSGKIDRVSMRHACQDFTRQTFHEFAGQTIPQCAWAKAFYQAHCHKPEQHHAAVRSLAFKWIRILFRCWKDRKPYDEQMYLTSLRRRSGLLGSGLASVTSIGWQTVAGFSKLSEKKA

SEQ ID NO: 328196 - protein, 323 aa, unidentified
MSQPNPLCVGIDVSKTTLDIATANNEFAQFTAGNDTDGFELIIAELRKHSVALVLMEATGGLEAAVACSLQAEGFDIAVINPRQARNFSRAMGYLAKTDRIDAKVLSQMAEVINRHPERERFIKAIPDAERQILAAMVVRRRQLITMLVAERNRLHPAHPQNRKSINTIIKALEDELSRIDEAMNNHIKTHFKELAARLSSIKGVGAMTVATLLSEVPELGSLSRREISALIGVAPVNRDSGTMRGRRTIFGGRAGVRTALYMAALVATRFNPVIKDFYTRLITAGKVRKVALVACMRKLLTILNAMIRKNEEWSDSYHKFSL

SEQ ID NO: 328197 - protein, 435 aa, unidentified
MCYVDDIRLEQFRQLKKEIRGSDEYLIIGIDVAKEKHRAFFGTAQGKTLLKNVVFDNTIEGFEKLDAYVDRIKVQYSLRKVVFGIEPTADYHKPLAEHLLKCGLMVVLVGGAAVKNNRQLLNGRWDKNDDKDSANIADLIAQGKCMFYEYPLMTLQNVRVLNAVKRRLKKREHGISAYIRNHILAQYFPELDTYYGSSETLAVVRECLDPSAIAGMEYDDFCRTVAPGKMTLARERRVGAIWRTAVNSVGCTMGEAAFHEAQIAVDSLNQVRQEIKAIEDKLENACLEFPEYTYLLSIPGFGPDVSAKVLGAIGDPHRFTSGKQVLRLAGLDLCAKRSGKTSNRATPIISKQGKADLRCALYQAAFIASIKSTDFIPYFTNKLVGRAKEKGIGTKMRVKLAAKLLIIAWTLMKKKECFDSKYLKLEKRVERKAAA

SEQ ID NO: 328198 - protein, 339 aa, unidentified
MDKSGSCGLEVSARELVVAEEAKSIQRYANTAAGHRKLVETLTRGGKRVRVVLEATGLYGLDVALALSGAEGIEVMVANPRSVRDFAKALMQRSKTDPLDAEVLREYGRRMPFRAWRRPSENRLALWAIVRRIQALTEICRAEKNRQHAVQLSVTTPACVRRDVQRNLRAQQRAMSRLREQARKCIAREAELEREYRLLVSVPGIAESSALQILGELAMLPEDRDIRQWVAYAGLDPSEYQSGESVRKRTRLSRTGNRHLRRALYMPALTAIRWEPHLRGFYEHLVNRGKRKKQALLAVARKLLHAIYGMFRTNSAYQGQLVFRLHQPQNVLARAQKNS

SEQ ID NO: 328199 - protein, 426 aa, unidentified
MKITLTAQKINLNQVVDVSVDVHKEILNFFFVIDGKEYSDECRNRTLLIEKRLRSYLAIAREEGRKNLRIICEPTGQYQNCLQRTARRLGCFTCFVNAESVAKFRVVESNDSGKTDSKDPRVIRTLGALGKVIKHRLIGEEYLMLRKLGKTYDDVEKETTRHRCKLDRLLVELFCDYSFKKDFLYSNSGLALIETYGCNPYRINAAGFSRFSKTMRRAAPRIRQETLERLWDDVQSSVLNVMPSGYIEVLEMHLYQLMEDYLRQFKRKEEIVARMIEIVGRLREKDPRIPPPTPGVISAKALARLLAETGPLSDFGHWRKLMRYFGLNIRMRQSGKYQGQNKISKKGRPLGRKVLSQIVLPLVKKAGLYGDFYHGKKEKDKMVGNKAMVVVSRQFLRKFYGWYRSGEAFDTNRFFKTEAECLKKAA

SEQ ID NO: 328200 - protein, 365 aa, unidentified
MNECTHIGLDVHKDTIAVATLRPVTGEIDERVVPNTPEAVRKLLRRHEPETTRLAYEAGPSGYDTHRLVSSLGFRCDMIAPSLIPRKSGSRVKTDRIDARNLARLHRAGELTSVRVPTAAEEAVRDLIRVREEVKCDRRIARQRIRSFLLRYGKRYPHGPDRWSQRFEVWARSLTFDEDLATEAFRNLLSAYFVRDAQLAEMGRRIEELAATEPFADSVARLSALRGIGTLSAMTILAETCDFARFGDAGSYMGFTGLTPSEHSSGASRHQGSITKTGNRHVKRVLVESAWAYRHAPAVRGKLRERLEGQAPEVAAYSWKAQVRLNSTFRRISARKGAHTAVVATARELSGFVWGLMTDNLGPAR

SEQ ID NO: 328201 - protein, 387 aa, unidentified
MSSPSASPSIIYLGLDVHKDSVTIAVLPADASAPTRIDKYPNDFAKLRRVFERLAKDGELRACYEASGAGYVLQRAMDGWGYHCDVIAPSLIPIKPGVQRKHDKYDAGQLARLYRAGELTVIRIPSEAEERVRDVVRCRETLQREVVKSRHYILKFLARRGFIYRGGVNWRPAHYTWLRQLTGTSSPLADEDRLVFGEYVALLEYKLSRRDALDQHIAALALTPAYAAAVATLQCFRGLQVHSAMVLATELVDWRRFASPRQLMAYLGFVPREHSSGARERRGSITKAGNSHCRHVLVQAAWAYRLHPKIGPALALRQRGQSPAVMLHAWKAQQRLYTMYHRLSLRRGPQIAVVAVARELVGYLWAVMRELDAARDPSPAITSPVAA

SEQ ID NO: 328202 - protein, 414 aa, unidentified
MFIKLAVASMFTNLFLLPLSLKPLPGVDPSYQKKRFSTFNNSILQFKNWLIENQCRDVCMESTGKYWVPVFNLLEDEMNVTIANPKWVKAVKGNKDDTKDSKWIGDLFRLGLVQGSYIPCKPIRILREFTRYRYKLTSCRTSEKNRYQNALTVCNVALDSVVSDIFGKSATSVIDCLIEQSGNSINHEEIASRLLRSLKKKSDSVIESIEGYQMTDPPKYRMRLVREHLDYITSTINDIDTMLDSLIAPYENAVQLLCTIPGVDRNSAITVISEIGTDMTPFSNSKRLCCWAGLTPGSNESAGKKKSVRITRAGVYLKPALVQVAHAAVKSDKSPYYKQKYERIMKRRGKKRAIIAIDRMILTAIYQMLSTGEAWNPTDLYKTDMPEPLKEKQKEKAIKQAKKLLIREGILSES

SEQ ID NO: 328203 - protein, 340 aa, unidentified
MNATTYGLDVAKRVFQMYWVDAQTGEISNRRFGRDDLIAFLAQRRAGRVALEACGSAHWWARKLRALGHEVVLLHAQFIRPFVQTNKTDAADARAIWTAVQQPGMRTVAAKTEDQQVMLSLHRMRSLLVKFRTMQVNQLRGFLYEFGVTFRAGRLAGLTEIRERMAQLEETLPRPIVRNLQDQLRRINAFEEDIDQLEKRIGAWQKQEAACRAISEVPGIGRLTATALVATMGDARTFKSGREFAAFLGLVPRQNGTGGKIRLGSISKRGDPYLRTLLIHGARSVLCHAKVPTAWQKGIQERRPGNVVAVALANKMARAAWAILAHESTYEASHVSVRPV

SEQ ID NO: 328204 - protein, 335 aa, unidentified
MDRAGKAALRKKVTRRQLLPLLADLGPSLVGMEACSGAHYWAREIEKLGHQVRLINPRFVTPYVKTNKNDANDAEAICEAVSRPAMRFVPIKSQAQQDALSVHRVRGLLMRQRSSLINQMRGLLAEYGIVIAKGTAALRRALPAILDDQTNTLSGLLRELLLELRDRLRLLEERLHGYDLRIENLARSSAQAGRLMTVPGVGPLTATALIAAVGNAQQFRNGRQLSAWLGLVPAQNSSGDRTVLLRISKRGDRYLRTLLIHGARIALHHSSGKIDPTSRWVNAIKQRRGYNVATVALANKNARVLWALLTRGESYSAACPAASHPSAPGRLRAAG

SEQ ID NO: 328205 - protein, 407 aa, unidentified
MISVGIDISKEKITVCALEEGSKIIWKPFDVYLNKSKVEELLKKLEKLKEEVKITMEATGKYHLPILYELKDRGYFVAVINPLKMKQYCRALNFRKAKNDKIDAKQIAEYGLMYWKELEEYKVDEENYRILKELNRSYQHYMELRIDQMNYIDQTIHQTFPGIKKLIPHNSGDFSKDKLLDFLEKWWHKDLVLEKTEEEFIEEYKRWAKEKRYHPNANKAKAIYKLAEDSISTQPSHNSKIETNIREGINLIKQINQILNRILSQMIEISEPLEEYQEAKKFSGISEKLAVQIVAEFGDLTKFKNKKSLISFIGIDSPPYESGNFKADQRKISKRGNAILRKVGYQAMKCMMSAKNPENEIYNYMIKKEKEGKAKKVCKFAGLNKFLRIYYARVMEAKAEKKGLKAA

SEQ ID NO: 328206 - protein, 371 aa, unidentified
MTHFIFVGCDLHKRTMVLRVAVDCEPSVRKNFAYSAAGRRAMLRWLRWKVEQMGEARVIVGYETGGQGFVLCDEVRAAGFECYVLATIHMEKSAKDRQNKNDDRDAERILEKLRSHFLAAQELPAVWVPDLETRLDREVVRSRVDLGEEVTAAKARVLSLLDRTGVEKPAGLGSNWTAKHRVWLEELASGEKLDWRLRVTLTSALARLAACEREETYLDEHVAAVARSERNAAAVAAMDRTKGVGLLVAIVVLVEMGDPARFRSRRQLGSYTGLTPSSHESGEASDRKGHITHQGPRRLRKLLAQAVQSWVRWDPVAAEAYGRLVARNPKKKRIAKVAMMRRLAIRLWHAALDARGPSRAEAVASAGTGCS

SEQ ID NO: 328207 - protein, 386 aa, unidentified
MQASNVSTPTANQYGTIFVAIELSQKKWLVTLHSPDQDKMSRHNLEGGNHAELLALIGRLRDRAARALGGVPAVASCYEAGYDGFWLHRLLLAAGITNYVFDPASIAVDQRARRVKTDRIDGERMLRTLMAYLRGEPRVVRIVRVPSAEQEDARRASRERDRLVKEQTGHTNRIKALLRLWGLAVGNPRRRDWLNWLATQRDWQGQAVPSQMLSEIRHEHARLMLVRERLDALAKEATAADPTPAAAQITERSELLLRLKCLGPAFATTLTHEVFYKNFRNRREVGSYFGLTPSPWQSGGIDRDQGISKAGNPRARCAAIELAWLWLRHQPDSKLTLEYRKRTLDAGKRIKRVAIVALARKLMVALWRYLTTGLVPDGAVLKAVKA

SEQ ID NO: 328208 - protein, 407 aa, unidentified
MEVERVAIEIGLEVDLGRETAARAAERLAMLPPCILPLPDAKHPAIVSMDGSPQPPRVREPEQKRGAPSIGSTGNPNSRLGRKPSPHSQGRVMEHLPAAPSFVGIDVSKDRLDVHILPTGQTLAVQRNEKGFEDLVSELRKLAPALIALEATGGLEVAVAAALASANLPVAVVNPRQIRDFARAVGRLAKTDALDAQAIALFAERVRPEPRPLADADSQSLAELVARRRQVVEMIGMETNRLHQARNPRIQRMLRATLKTLTAQLAQLDRDINDLIKRSSLWRAADDLLTSVPGVGDVTAHTLIADLPELGQLDRRRVAALVGVAPVNRDSGQLRGRRTIAGGRIGVRNTLYMATLSAIQWNPVISTHYHSLVNRGRPKKIALVACMRRLLGILNAIMRTKTPWQCA

SEQ ID NO: 328209 - protein, 423 aa, unidentified
MKFKSQARQNQLIEKITAQHLVVGIDIAQQTHVARAVNFRGIIIGDYLSFSNDEEGFHSLLLWIEKLQTTHRLSAAIIGMEPTGHYWLNVSRWLTERHFEVVLVNPHLVKKNKENRDNTPSKSDRKDALVIADMVKNGYYSFTRTTPEAFEDLRVLLSNLDFVVKRLVSAKNQIHRWVDVVFPELRHVFKDITCIGSLATLRLFPTPAEISKLQPQNLIQGWKTIMKRHSGAKKAKALIELASHSVGSQSAIQYYKLHLKQLLAEYDLACGQLVVVEKEISSVLERIPFAKSILAIKGISIISLAGILGEAGDLSGFVHGNALLRHAGLNLAEASSGKWTGQMKISKRGRSRLRRFLFMATMSLVMNNSEFQAMHKHNVQVKKMKKMRSIMKLCGKLARILVGMARSGLAYIPHKTLPLLQAA

SEQ ID NO: 328210 - protein, 310 aa, unidentified
MDRIIVGIDVSKDRLDVAVRPSGEAFAVSRDAAGVEQLVARLRKLSPHLVALEATGGFETVVAAALGAAGLPVVVVNPAQVRAFAKALGQRAKTDPIDAGVIAHFAEATNLEPRPLPDEQTRLLADLVGRRRQIVAMIGAERQREQRLTAPRLRKSIARLIKALEKELASLDADIDDAMKGSPAWRAKEELLTSVPGVGPVITRTLVAELPELGQLGHKQITALVGLAPFTRQSGKWRGKSFIGGGRTAVRAAIFMGAMVAKKHNPVLKAFFDRLVAAGKPKLVALIAVARKLLIILNAIVRDNRPWQTA

SEQ ID NO: 328211 - protein, 379 aa, unidentified
MKAAAARGQYSEAKETLYLALELAWTEWKLAFTVGLGQQPRLRTIRAGDLESLEKEVARAKARFGLAGSARVVSCFEAGRDGFWLHRYLVSQGIENRVVDSSSIEVSRRRRRAKTDRLDAAKLVAMLVRYEQGERRVWSVVRVPTVEQEDQRHLHRELDTLKKERTRQSNRIKGLLAGQGLRLLVDKHFLERLESACLWDGSPVPEGLRFRLEGEFERLEFIAGQIEELEHERRRLMKESRSVGAEKARRLTRLKAIGENSAWMFSLELFAWRKFENRKQLGGLLGFTPTPFNSGESSREQGISKAGNPRLRAMAIQIAWGWLRFQPQSQLSLWYQERFANGGPRLRKVGIVALARKLVIALWRFVELGIIPDGAELKA

SEQ ID NO: 328212 - protein, 352 aa, unidentified
MNKSAAQSVSEQVHWVGVDVAKRTFDAALVRGGQKWSFTPLSCVPVRSFARTRAGVREFLAWLDSLACGDKTPVSARAVMEATGRYSIELAVWMAELLPSLAPAIEPPQQTAAFMKSLGLRGKTDRMEARALGFYGAERQPRAYQPAGREETLLRDLVRYREFLVEQRVAEQNRAQEMKHCPLVAKMAGRRLARIDKDIEKVEQEMRKAAENDPGLSGDIGHLCTIYGVGFIVAATIRAELGDLRRFAKAKQLTAYAGLSPSVRQSGTSVNGRAHMDKRGNPRVRKALYLSAMVAVRGKNDLQQYYVKLRDEGKSPMSALGAVMRKLLVLMRAILISGKPFDPLWKTQPQCA

SEQ ID NO: 328213 - protein, 321 aa, unidentified
METVEFAQVVSRGCGLDVHKKTVVATIDGEGLQRSTREFGTFTSSLTELKDWLLENGITHVAMESTGVYWKPVYHVLEPSGIKVWIVNARHVKYVPGHKTDKKDSAWLCKLLLAGLLKPSYIPPKEQRELRDLTRYRKKLVQDIASNKNRIIRILEDCNVKLSSVLSDTSGVTATKLIDKLCEGKVVTMEDIDAVYYKKIEASKEELWEACNGIVEEHHIYLLQTIRENNRHIEHLIDELNQQIKKSLSPYDNALERLREIPGLSRKTVEDLIAEIGLDMSVFPTENHLSSWVGVSPGNNESAGKKKVDEPHTVTNKSNLY

SEQ ID NO: 328214 - protein, 361 aa, unidentified
MRKIALDLGVRKTAYCEVRDGAVVQRATVTSVESLASLLGPEKPPAVVAIEACREAWHVHDLLRSWGNDVVLVDTTRSRRLGIGQHGRKTDRIDAEILALALDRGGIPMAHVLSPHRRELRRWLGVRRALVESRANLITTCRGLAREQGVVLPKCAVPIFARKARRSAGIALAVLEPLLKQLDAINPELAAAESQLAQLCETEPVVKLLMTAPGVGPIIAACFVSVIDDAKRFRSPHHVESYVGLVPSEDSSGGKRRLGAISKKGNPYLRSLLIEGSWGILRHRDPKEPLRVWAEAVAERRSRKIAVTALARRLVGVLWAMWRDSKPYDPKLLATASSRGTRRLAHTLQLQARHLEVQLQP

SEQ ID NO: 328215 - protein, 326 aa, unidentified
MSNVLFYAGIDVSKNFFDVCVLAIDGKSTSKQMEYDKQGLNKLAEWLPPGAHCVMEATGPYYLRLACWLHQQGFTVSVINPLVIRRFSQMRLRRAKTDKTDAKMIAAYGQMETPPSWEPPAQYLINLQQLDAASEQLQKQCTAWRNQLEAFTAGGLMDKPMKKFLTRMITQAEKELLEIQSRIDKIIGDHHQQMLKNLTSIPGLGKKSASVLILITGGFTRFSDYKKLTAYVGLSPRIFESGSSIRGISRICKLGMSRVRALLYVCAWSAKRCNLACRELYERLVAKGKSKKLALIAVANKLIKLAFAIAIKNIPYDENIAKNICF

SEQ ID NO: 328216 - protein, 360 aa, unidentified
MRIIGCDLHARQQSVAMLDTASGEVVNRTLMHEGKEVREFYSQLPRPVLVGIEAIGPMQWFLQLLDELGIECRVGDATKIRAAEPRKQKHDRRDAELILKLLLENRFPAIWRPSQELLDLRALLLHRHQWVRLRTQIQNGLQAIALANGLRRGPGLWSYDGQAKIAFLPLPPHASYRRSMLQALYRQMEEEVEQLTAQVAEQAEQRSGARLLMTHPGVGPVTALATEVFLGDPQRFADGKALASYVGLIPREYSSGAHQRLGALTKQGSPFLRFLWNEAAAHAVRRDPDLQRFYRRKLVQKGLGKSRVAAARKLGIRLWIMLRDQIDYEEFCRRGQKQSSAACAGMPEVGYGANRHRPVG

SEQ ID NO: 328217 - protein, 398 aa, unidentified
MTRKNTLKSLPTDTDFRVVGLDLAKSDVSVAAIPVDDNTPSLVDRMTYADLLDWAGKISPTLFAMEPCNGYSLLCLQLENLGHEIKVISGWTVSMWINTHLSGQKTDLNDAIALARLAVSDAELTPIRHKSITEIRIQTVQAVRQQLMSQRSRSIVSFKALAQQWGIPCAAGHRNLKKLRESIEAKVDLITRPVANAMLFLLDAVKSLDRQIGQLNQTLQELVMSDERGRLLQSVLGVGTQISARVITVVGNIERFNSPRSLVAYVGVAPRNFITGHKNLTKKKHGNCPDLSHKGQGKISRRGDKLLRSLFIQGAACLYMQFCKDQLPECQLKRWILKQLARQKPYGKLIVSLAAKLIRIVWAVLTYREKFNIQKAGMTRSMWSEMALETPLNKEVPA

SEQ ID NO: 328218 - protein, 358 aa, unidentified
MTQVRQLDFSGTTIFCGVDVHKKSWRVNIQSSEFELEDFTQNPDAALLHRHLVKRYPGAAYKIGYEAGFSGFSMQRSLSQLGCDCLVINAADIPSSDKDKKQKQDKADARKLCHYLQSRQLKGIHIPQAEWEHARTLVRTRERIVTNQTRCKNRIWQLLHFSGLKASGDQQEGKYWSKRFISSLQTMDCGGSIHLQQSLQLHIKDYLQTRGLLLEATRAIRALCREEKYAAAIKLLRSIPGIGEINAAVILFELQDVSRFKRFDHLCSYVGLVPDTSDSGDTKRSKGITHRHNYYLRTALVESSWSVVRKDPALLMKYQWYCKKMNGNKAIIRIAKHLLSRINFVLKNKREYVTGVVA

SEQ ID NO: 328219 - protein, 344 aa, unidentified
MIYYAGLDVSLRTVNICVIDGEGELVAETKLASDVQDIIAYLDGLELDLAGVGLEAGTLTQYLTYGLQAAGFEVICMEARQVKGALSAMRNKTDKHDARGIAQILRSGWYSRVHVKSMQSHHIRMLLSSRKAVLSKCVDLENEVRGLFKIFGIKLPAKLGHGAFDAAVRDIIEFDETLSHALLPLLYARLVLYRTFRVLDNRTRKMAHADPVCVRLMSVPGVGFITALTFKAGVDDPARFKRSRTVGAHFGLTPRRFQSGEIDIDGHISKCGDADVRSTLYTAANALLTRSARWSPLKAWGMKLAKTRGHRRAVIAVARKLAVIMHRVWIDDTQFRWGTEAVRS

SEQ ID NO: 328220 - protein, 336 aa, unidentified
MEKYKIFVGIDISKHWIDVVVLQNQLPLHRQFTNNKKDYKVMLSWLKTFSTKNQMLLCMEHTGVYGLPLWNYLSQQQIPFVVETGLQIKSSMGIRRGKTDKADAYVIARYIRLHHTETSLHKVPAKIITRLKVLHSYRERLVKIKQQLAVADKEISGFMTRDLRKEMSKDTQSLVVIIEQRVTKINKVIEAVIASDAGTKRIYDLVKSVRGIGPVIATYLIIITENFTILNEGRKLSNYGGMAPHKNQSGIINRKAKVSHLCNKKIKSLLSNAVKSNLKHDTETKEYFARKAAEGKIEGLIFNNLKNKLIHKICAVVKRGTPYVDIKKYSTSKKTA

SEQ ID NO: 328221 - protein, 401 aa, unidentified
MTAVMIGVDPHKGSHTAVAIDATEAPLGKLRVRASAGQAQRLVTWAAAWPERTWAVEGAGGLGHLLAQQLVAAGERVLDVQPKLGARVRLLATGASNKNDPNDALSVAVAALRSRTRREVSADDHAAVLRVWSRRHRDLGRAKNQVACRLHAVLCELVPGGVPEEITAAQATRILRSATPSGTAGQARSDLAAELLEDMCRLDAQIRESKKKLATAVKASGTTVTEIFGAGPVIAATVIGDVADVARFATRDRFAAYNGTAPIEVSSGNRKIHRLSLRGNRRINHALHMAAITQIRHPHSDGRAYYERKIAEGKTHKEALRCLKRRISDAVYARLQADAQPAARAVMTGPGGQPGNDSDSSAAGSHPARQLFGKATPRPATPTLRPSTPPRPAAKEIRQTP

SEQ ID NO: 328222 - protein, 342 aa, unidentified
MYYIGLDVHKKTISYCVKEVSGQIHSEGALQATRAELDSWMKTLPQPWAAAMEATIFTGWIYDHLLPHAAELKVAHPLMLRAIALAKKKNDRIDAGKIADSLRCDFLPECHMASTAIRERRQTLRYRNLLVRQAVQLKNKISGLLMETGVSYNRQKLHKVGYFRELMATNQDVTARLRPLLKLCREALERSQKTEGALVRSLSRDPLLAQRVERLKTIPAVGPITALTWALEIGDVKRFPSLKQVISYCGLCGDEKSSANIAKRTRLSKQRNKHLQTVLVEAAKMAPRHSADLALIYEKEKQNGNANRATLAVARKIVAYLLAVDRGERDFVALENYKRTAA

SEQ ID NO: 328223 - protein, 423 aa, unidentified
MGEEVYYGRCAGIDVHKKVLVVCLRIGSKLEIREFGTLTDEIREMVAWLKTNGCQMAAMESTGSYWKPIYNIFEQEGMPVMVCNAYHIKNVPGRKTDVNDAQWIARCLSLGLLNPSFVPDREQRELRDMTRFRKAQIEERARNINRLQKFLECANIKLGSWLSDVEGKSATELLELVIGKPDFTVDDVAVHMHGRLKSSPKELFLSLKGSITPSQREFLTHVMAVIREQTVQIEKTDAMIRRSLSANYKAAVEALDTIPGVGRVSAEQIVAETSADMSHFRNQHSFSKWAGVCPGNNNSAGKRKSGRTTPGNKALKTTLTQCAKAAKNNKSSFFSAQYSRLVSHRGKNRATMAVAHSMLIAIFFVLNGAKYKDLGASYYNQFNRERKIRSHVKQLSKLGVDIPDKMLQDAFQRTLDPTNSRSA

SEQ ID NO: 328224 - protein, 323 aa, unidentified
MEQVQRNTKVAGIDISKLWLDVAVHGLDDFIRLDNTAAGFALLAAWLTARGVGRVGLEASGGYERGVTAALAGAGFEVVVHQPIEVRLFARMKRRRAKNDKIDARLIAAATAQVDAVKAASDPRLVELAERMTAYEQASDQLARLKTCREHVSLADLALQYDEQIRRLGLWKRQLADDLIARISADAELNARYLLLRSIPGFGRLVAAALVIRMPELGAMARGQAAALLGAAPFDHDSGKHQGRRFIWGGRARPRSLVYIAALAAKRVDPNFKAFAQRLIAAGKAPKLAIVAVMRKLIEAANLVLARRTPWRPTPNPLPLAGD

SEQ ID NO: 328225 - protein, 466 aa, unidentified
MARKQKSDKSKKNRRPIQSLETIQSNAAGIDLGSREHWVAGPPQEDKVPNVERFGTTTPELLRLADWLTQQGVKSVAMESTGVYWIPLFEILDSKGFEVLLANARQVTHVPGRKTDMLDCQWLQLLHACGLLRGSFRPSDDICRLRALFRERNTMVDQRSDWVRRMQKSLDQMNICVHHAVSDITGVTGMRIIRAIVDGERDPQALARMRDRRCRKSEKQIAAELTGNWRSEHLFNLRQALKMYDQLCTVVADYDSEILAYLQTLQPEDTNDTAVPAPASKAKARGIIKRGQEPLRQALYRFSGFDLTTIDGIGVDTASVVVTELGLDFTTFPGEGNFVSYLRLAPNLSISAGKKVPSKSKASTCTRVASALRMAALSLRNSKTALGAYYRRVARRKGASVAVFATARKLAQLIYRLVRYGQAYVDAGAKAYENRFNQRRLKFYTKALNDMGYNVEPLATAEANSG

SEQ ID NO: 328226 - protein, 347 aa, unidentified
MRFFTDPHQNYCGIDLHARSMYLCIQNREGKVVLHKNMRARPESFLKAIEPFREDIVVGVECIFTWYWLADLCAEHNIPFILGHALYMKAIHGGKAKNDRIDSRKIAALMRGGTFPVAYVYPAKMRATRDLLRRRNHLNRRRAELLAHIQNTNSQYNMEPFEKNISYKKNRAGVVEQFLDPDVRMSMQANFELIALYDDLKNRLELHITKNAKHHDPQALYRLRSVPGIGPILSLVMLYEIEDINRFARVQDFASYARLVKCARESAGKRYGTSGSKIGNVHLKWAFSEAAVLFLKGNPEGMKFKNRLEKKHGKGKALSILAHKLGRAVYYILKRDQAFDMNKFLKN

SEQ ID NO: 328227 - protein, 427 aa, unidentified
MNEAKPTRVDEFRQFKREVRSSKQYLIVGLDMAKRKHHAFFGDAGGRTLLKGLIVENSAEGLRHLLTQVRFYMNREGLGQVVFGLEPTSAYHKALAEQLIVNGYLVVYVTNEAIKKNRSLLDGRWDKNDTKDSANVADLVAQGKCHYYDLPEMRLRGLRSLLLVRKRLKKQLHGCRVRIRNNLVAQYFPELDQFWNNAAAENLTIVREYLDPATIRRLSCEQFIARVITHNGGLRQQRRLRHIWEAAGQSIGCRPGPAMKIEAEVMVEMLGAIQAQLDRVEEAIEQEAEGFEEYGYLKSIPGFGPYISAMTMAAIGDPHRFENRSQLIRLAGFDLSASRSGEKSRMAVPVISKKGKADLRYALYQAALVASSLTSHFRAYYSRLLEGRQREVGIRTKMLVKIASKMLVIAWTLMKRKERFNPACISI

SEQ ID NO: 328228 - protein, 315 aa, unidentified
MVEKVVVGIDVSKAKLDVALLPGGEQFTVSNDRHGIGELLRRVSPLAPSRVVLEATGKLEQLAVSELAAAGLPVVVINPAQVRHYAKARGKWAKTDPIDARLIAEFARDLEPELRPLPDAETQALAALCQRRNQLLEMEQMEKSRLQRAPRANQKSIKAMLRFVRRQVEQVEKQIEHSIRHSPLWQAKRELLESMPAIGKVNSSTLLARLPELGRFTRQKICALVGVAPYNDDSGQWHGRRHIAGGRAGVRQVLYMATLSAVRCNPALRDYYQRLLGRGVEPKAALIAVLRKMLTILNAMVRDNTPWRPPCPTPA

SEQ ID NO: 328229 - protein, 402 aa, unidentified
MAAVLWAGVDVGKEHHWVCVVDDTGTVVLSRKLVNDEQPIRALIGEVDSLGEGQVSWTVDLTTVYAALLLTVLADSGKSVHYLAGRAVWQASAVYRGGEAKTDAKDARVIADQSRMRGDDLPVLHPNDDLISELRLLTAHRADLVADRTRTINRLRQQLVAVCPALERAAQLSSDRGWVVLLARYQRPKAIRQSGVSRLTRILTDAGVRNAAAIAAAAVAAAKTQTVRLPAEEVAAALIADLAREVNALDDRIKTTDADIEDRFRRHPLADVITSMPGMGFRLGAEFLATVGDPTLIGSADQLAAWAGLAPVSRDSGKRTGRLHAPKRYSRRLRRVMYMSALTAIRCDPPSRAYYQRKRDQGKRPIPATICLARRRTNVLYALIRDNRAWQPDSPPITQSAA

SEQ ID NO: 328230 - protein, 402 aa, unidentified
MLRVACGVDVHRDGFVATILTNKGCETRKFVKDFKDIEAFKAWLRMNKCKAVVMESTGVYWIPLYAGLEEEFDVRLANAQRTRKVPGRKTDQSDSEWLAYLLRGGLIEACYVPDRKVRVLRELTRLRTKMVQNRTDYKNRVHKVLQRCNIRLGSKIRTVFGKAGMEVLRGLMDGKSLDEIVSQSRSRVLRERKNDLEKVVRNSLDEEDVFVLKRCLRMIERLDEEIWEVDARIAMLLGGWKDDAKRISGVPGVAQVSASAILAEIGDAKRFENGKKIASWAGLCPSVYQTADKNLTGRVKQGSKHLRRMMVQVAHAASRCRDSRLRRFYLRVAARRGKKKAIVALARKILVIIHHLLVNGEDYMEEGFVKLPRLRFKALARVPLEEMIEVLRDAGYVVWAPG

SEQ ID NO: 328231 - protein, 316 aa, unidentified
MLAPNPVAGVDVGKSFLDLDFDPAAKALRVRNDAPGIAALIEAMRRRGASRVALEAIGPYAWPLTAALVANGFEVGLADPRQVRAFRTAEGRIAKTDRLDAGLIARFARTMPERLRPAPEPQALALKALSTRRRQLTELVAMEKTRLAQAFDAGIAASHRAVIATLEAACAEVERRLEAAIAADPALARKREILTSIPGIGGRIAGVVIADMPELGSLDRKAAASLAGMAPHPDQSGTLPGRHAISGGRPCLRTAFYMAGMVAARCDPRLKAAYRAMRDAGKPPKVAIVATGRRLVTIANALVRDNKTFDQSRFVS

SEQ ID NO: 328232 - protein, 417 aa, unidentified
MESPYNLVAGLDIHKKTVVVVVLQNAQPEQDYASSTFGTTQFGLKELAAFLRQHGVTHVAMESTAQYWRPVWMTLEEEFTLTLAQARSTRARRGRKWDKADARRIAKRLLSGDLTVSYVPPPEQRNWRLLSRTQVAMRESLVRLRNQVEVLLEQAQIKLSSVVSDLFGKSGRRMLEALLQGMENPAELASLGDRRLHASKEQLADALTGQLTEAHRIVLRLLLQQIDQIEQHVIDLDRALAQALAAHQEAVERLCEIPGISVRTAQYLIAETGPGAEPFESPGKLASWVAICPGQQESAGVTVSNRSAKGNWMMRRTLSQTAWAAVASKGSEARRRFLAWRPRLGTQKAIWAVAHYQLRVVWKVLHDRVRYRSPDTEALSHRALMARATRVFNQLRNLGYDVSITPPSKPVYINSEG

SEQ ID NO: 328233 - protein, 412 aa, unidentified
MEGETVIAGVDTHKDVHVLCLLDGLGRKIWSGSFGADPEGYDRLAEAIGDPGSCMVVGVEGTASYGAGLTRRLVELGYNVVEVLRPKRDKARPGEGKSDPLDAERAARKAASGRGCSVPKSQDGWVEAVRQLYVARRLAVATSTSCVACAKSMLTTAPSALRERFRGRERPKDLMPLLARGRKAGDALEESVLASLRSVAAVWKEARSQVESLDERIRALLEANAPALLGIEGCGTTTAAALVVAAGDNPGRLKGEAAFSMLCGVSPIPASSGKTERHRLNRGGNRQANWALYEIAIKRMAYDERTRRYVAKRTSEGKSRREAVRCLKRYIAREVYRVLMDPNPDGAAPEGPELAKMRKAMRVTQKQAAAGLGMSAASLGHLEHGRRRSTKLERRYYELLCELKGALPQTAY

SEQ ID NO: 328234 - protein, 415 aa, unidentified
MKKHNYRAKKVNDINWPQLRQQFTGQELVFAIDVAKEQQFALLSNTELSESVLIQWNQLEQTVGLINELKQLNALITVVMESTSTYGDAMRYQFRQAGFTIHQASAKRVHDAKEIYDGVPSLHDAKAAWLIAHLYQDGLTKPWHELGDKERELNAYRREYELHESQHKRNQNRLEAFLSRHWPEVLPLLALDSVTLESLLIDYGSPEQIAACAEQAAKDMHRWGKHCLSTEKIDAVIHSAASTLGQPCVEAERRYLQALAEELRHNRTQAKNAKLALEAVVKAEPELKEMGLTVGMVTTAILIGLHLDPRHFGCARSYLKALGLNLKEKSSGQDHGKLKLTKRGSAQARKYLYFAALRLINSDPVISAWYQNKVDPRAKLKTVIALMRKLAKALWHVAHGQRFDARKLVMTTVVN

SEQ ID NO: 328235 - protein, 324 aa, unidentified
MHYLGIDVSKATLDVSDAAGVSRLSSPNSRTGTSKIIKWAQRIQEGELQFIIEPTGTYHHTLIDELSHANIPFTVINPARTKAYSLSLGKRAKTDRVDAQLLASLGQTQQIAPSHQPEKAQEKIKSLRRHRESVEQMIRSLRNQIEATTSSPWADGEVLRSLRSTIRHLEKQVESADRKLDSLVKEDERYSTLIDLLQTIPAIGPKTAQLLLSEMPPVWQCSSSRAWVAFAGVCPQPFQSGNINYSRLSRMGSRRVRAGMYMASVVAMKHNPLVAALVARLKERGKTGKLAVMAAMNKLIRICYGVIKNWKPFDPNFHKTPKIT

SEQ ID NO: 328236 - protein, 421 aa, unidentified
MNPDLLRSFPAEFVAFMGIDWADAEHVYCLVDRRTGQSRTGRVKSCPDAMAAWMAELKEAFPEGQIGICVEGHRGPLITFLLGYDFVALFLVNPHASADYRDSFRPSGAKDDYADAIMLVDYLIHHPEHLRPLIPDCEAVRMLASLCEDRRRTVEQRKEVTNRLLACLKSYYPQAVKLFDDCRSELACAFLGKWPELEALRKTTDKQLREFFYSHQVRREELIQERLGIIRSAVPLTRDRAVIVPGRMKMLGLIRMIRDLNRIVEEYDQEIARLYQELPDAQIFGSFPGAGAALGPRLLTAFGSNRGRFASPEDIQCLSATAPVTEQSGRSMWVHRRWQCNTFLHQTFHEFAAKSVQHSVWAAAFVKQQMARGKSFPTAVRALAFKWQRIMFACWQNHTPYDEARYLEALRRSGSPLVAEA

SEQ ID NO: 328237 - protein, 370 aa, unidentified
MRIDTFTIRNNIADFERFDAAIRSHICSTEEIVIAIDHTGHYSEPIVHFLQAKGYSVYYLESRAFKTARERLLDQENKSDTIDSIGAAYLLYLRDLHGVSFRISSMTPELGSTAAVLNSLVLQRWQFNKLASQATNRLHQFLLAVFPEGESQYFTRLMKITHFYSTPKEILASNGLEKIDKLPQKDRERILELAANTVGVSGDIYGWLIKHLSAQRLQALAKRDELTSILRAQVAAHPYGDILLSFPFLGEIAAATIIGIIKDIERWPDKKKFKKALGVYSNLTQSGTSLGRTRQGKEGSRSGRRVLFQVCFGCIRTNAHDNDSRDYYLRQVARGKPRIKALVATMGKLAEIIYHCLTAGESYHYQGIYR

SEQ ID NO: 328238 - protein, 341 aa, unidentified
MFKNKSMKVFYLGVDVSKKKLDLCLRSNGKDILYDVIPNDLSSIKSWLTRTFEKFFLSEDSLVVCAEHTGQYTYPLVCATKSIGVYLCLEDAAKIKYCHGIPRGKNDKIDACRIAMYAERYNDCLQPYTASELIIQKLKNLSTERSMLVADRAKYQSQLKDQVDYMEHSIYIAKCNRVEGIINTFTDYIAQIDLEIKELITQAPVIAHQMDLLMSVDGVGERVALKMIMETDAFTSFTDPRKFCCHAGVVPFVYVSGSSQRSKNRVSNRADKSIKHLLHMAALSVSQVKNSPLKKYYDRKVEEGKNKMSVLNAVRAKLVTIMFAVIRTDAFFSRNYQNSLA

SEQ ID NO: 328239 - protein, 347 aa, unidentified
MSVQIAVLGIDLGKNSCSLVGLDETGAVIKRRRMRPESIPGFTKTMSACVVAMEACCGAHHLGRLLVAQGHTVRLMSPEYVRPYVKAQKNDDHDAEAIAEASTRPTMRFVELKSEEQLDMQTLHRARDRLVGERTALINQARAILLERGITVPQGRRKLEQHLAAILDGDDDNSLSARMRRLIEDMRDEWLELDRRIVAFDNEFVACARSDADARRLATIPGIGVLNATALVAAVGNAQTFARGRDLAAWLGLVPRQITTGGKPRLVGITKRGNKYLRKLLIHGARSVMPVLAASSTPLGEWLQGLLKRVHKNAAVVALANKLARIVWVVLRRGEEFNAAATASAVA

SEQ ID NO: 328240 - protein, 439 aa, unidentified
MASRDVIQVVRFNCAGLDVHSKLIVATVGITDRSTMLTEYHQNSFGTNNPDLESLAKWLESFGCLDVCMESTGKYWIPIWNVLEEHKMTICLAHPKYTKAIKGKKTDKKDSKWICDLYKHDLVRGSFIPPKDIRELRELARYYRKLIAMQSSESLRYQNCLTVSNFSLQNIFSDPMGKSAMAVAEEVLNSDKVDEEKLRKLIHGNCRNKDKIMEVVNGCRIESDAKFKMQTTSAHIKELDEHINACYLEMTKRASKYFPQFLQIAEIKGIGLLSSILIISEIGVDMSVWENARQLTCWAGLTPGNNESANKKKSTRITKAGQYLKPLLVQCALASIKDKDGYFGIKYARIKKRRGHKKAIIAIARMMLICIYHMIETGEEFKPSDYDELMNPKPKPGYKITIESAITFLQSSGYDVSTIQRTKDLHSQVLASGSPDAGA

SEQ ID NO: 328241 - protein, 357 aa, unidentified
MDGFKQLLQTIRDCTKKSDKIKVGLEATGHYSYNILGFLLDNDLPVYVMNPLHTNLYRKSLSLRKTKTDRVDAKTIATMLLSDVDLKSYTDTAYHNEELKSLTRYRFDKVQERAKLKQSVSRLVTILFPELEQLVSSIHGTSIYALLSEYPGAKQISEAHLTRLANILVKTSRGHYRKDKATHIRDAARTSIGSVMPAKSLELKHTIKLIQELTSEINEIEDAIRKIMDELKPPILSIPGMGFHSAAMILAEVGDFSNFNSPDKVLAYAGCSPSTYQSGKLTNCYAHMEKRGSRYLRYALYTATKYVCYWNPVFTEYLTKKQAEGKHYNVALSHATKKLVRLIYALQKSGKAYLAVT

SEQ ID NO: 328242 - protein, 481 aa, unidentified
MTVQTQFIPRNYDVFAGLEVDKKSMAVIFTDHQQLMQSLRLPYSAAQLLNYVRKRFPGQRLAFVYEAGPTGFGLYDELVAAGHPCLVVAPPMVPTAPGARVKTNRLDARKLSENLRGGQLRSIHVPAPKYRELRHLVQLRDSQVKQLTATKCRIKALLLYEGIVFPSDEGKEKQWSQRVLDELLALPCSEAVRFKLDQLIGTLHFNFNAAAATQKQIRHYCKKDAELRQSIAWLKSLPGIGEIVATHLVARLGGPSLITNVRQIAGFLGLVSSEHSTGDKQNRGEITRAGDSRLRNKLIQSAWVTIRKDPELREFYDRVYQRHAKKVAARKAIVAVTRKLTTRIYAVLKEQRPFVLREVSTAPLTTEETAGPFYLEANASTSNRTNSPDNTGLEDSFLRQRTRAFGIALKRAASTRVRRPLSRATNSSQSLLLVEEIAAQTNWAMENSALKTLRVSHSLYYYEQNRKQNTNLSRSHLLTFT

SEQ ID NO: 328243 - protein, 391 aa, unidentified
MICVGIDVSKDKHDCCIFSSDGQLLLKPFSVPNNRDGFDSLYSAVLSFENDPNKVKVGLEATGHYSFNILGYLLEKGIHCFVFNPLHTNLYRKSLTLRKTKTDKVDSKIIAKMLLSEVDLKPYSKTLYHNEQLKSLSRYRFSKIRERGNLKQQLARLVNILFPELENLVPSLHLSSVYALLEEFPGASYVAKAHITRLSNLLCASSKGHYKKDKAVEIRNAASSSVGSVMPAKSLELKHTIQLIRILSEEIDEIESQIQEIMEKIQSPITSIPGLGFRMAAMILSEIGDFSKFDSPDKILAFAGISPSTYQSGKLDNAYAHMEKRGSRYLRYALYNAAIYVCHWDKTFSVYLQKKRAEGKHYYVALSHAIKKLVRVIYRLQLTGEPYRPAV

SEQ ID NO: 328244 - protein, 354 aa, unidentified
MLIIGCDYHPGFQQIAFLDTDTGELRERRLEHREQAEQFYRELKQQNQSVRVGMESSGHSRWFERLLHELGFELWIGDPAEIRTKRVRKQKTDRQDAQLMLQLMLESRFPRIWVPDAENRDLRQLLWHRHRLVQMRTRVMNQLHVVPLNEGLRRKKALWRPAGRKELESIALAPWASRRRQDLLDLLDQLTPKIQELTHAVEEEVEKRPVTRRLMTHPGVGPLTALAYELVIGTPERFHCGKQLASYIGLVPTEESSGNRRRLGHISKQGNVLLRFLLVEAAQVTVRSQQEWRSKFFHLAMRRGRKIAKVAMARKLAVHLYWMWRQGLDYGQMQKLGSHAGKPGHPDGVQLSPV

SEQ ID NO: 328245 - protein, 322 aa, unidentified
MSVKVLGIDIAKQKFDVALLADGKIKNKTCRNSTEGFETLKVWLEKQGIQKVHACMEATGNYGEDLAVYLHEIGHTVSMVNPARIKGFAQSELVRTKTDKLDAGVIARFCLAMKPETWIPPAPEIRSLRALVRRVDSLIDMRSQEKNRISTAHESVIVLIKEHIIYLDQEIEKIRKQIDDLIKRNPHLKQRKELLDSIPGLGKATIPHLLAELDDLDKFTHVREMVAFIGLAPRETISGSSIKGKPRLCKIGHARLRKALYMPALVSIQCNPVMIAFYNRLKEKGKNGKVIVCAIMRKLVHVIFGVLKSGKMYDPNYKPAFA

SEQ ID NO: 328246 - protein, 346 aa, unidentified
MKIIGCDFHPSYQQIAVLETTTGEVQEAKLMHGDGEAERFYRELEEPALVGMESVGNSLWFEQLVERLGHQLWIGDAAQIRASYVRKQKTDKRDAGHILKLLLENRFPQIWVPSHQQRDQRQLLIHRHKLVGMRTRIKTELQHVALNQGMQKKRTLWSKGGMTDLKKLSLEGWTSRRRADLLSLLSMLETQVSELDQAVEEAAKRDPQAQLLMTQPGVGPNTALAFVTTIGDVARFQRGKQVASYLGLIPSERSSGSKRRLGAISKQGNVFLRTLLVEAAQSAVRHDEDFKKEYRHHCHHKPKGVVKVAVARKLAVRLYWMLRTQTPYPQVVHNEGSPSHFVVSES

SEQ ID NO: 328247 - protein, 319 aa, unidentified
MAEELYVGIDVSKAELVVAMRPSNERMTLANDRAGIKRLVGRLGELKPKLVVVEATGGLQRQVVAALWAAAIPVAAVNPSWVRNFAKGRGVRAKTDRKDAELLALYAQREQPDARPPADAETQALQELVMRREQLLEMLVAEKHRLNRAAATMRKELRHHIAYLEGRIKDLERDIDKTVRRSDAWRRKSEIVRSVPGFGPRFSAMVLAKVPELGTLNRKQIGALVGVAPMPDDSGSRHGRRVIGGGRFEVRNKLYMCAMVAARTNPVFKDFYLRLVARGKPKKLALVAVMRKLIVTLNAMFKTNSLWRQPCPILSVAEN

SEQ ID NO: 328248 - protein, 350 aa, unidentified
MTATNSAVEADIIIGVDTHKDTHAAVAIDRLGRQLEHRSVVTTKSGLIELLNWAQQLGRVRLWGVEGTGSYGAGLTRHLLAAGETVHEVSRPDRRVRREHGKSDPLDAEIAARSVLAQRDLGTPKSAGSSEALRQLRTTRRAAMKARTQAANQLHALLLTGPQDLRAELDKCAFAAKVQRCVKLRPASGIPDAREACKLSLRSVARRWQHLTAEITELDSTIAAITNDAAPLLLAQFGVGPDVAATLLITAGGNKDRMHREASFAALCGVNPLPASSGKTNRHRLNRGGDRQANSALHTVALTRMRTEPRTRAYVAKRTAQGLSKREIMRCLKRYIARDLYSLILLSQPA

SEQ ID NO: 328249 - protein, 470 aa, unidentified
MSHRRLVGIDLGIATAHTVRVLDGEGTIVAKRKAWPTRESLTAVETAALAECPEGTRLEVVIEPTGPAWLPVAVFFTARGHKVFRVSSQKAADLRRFLSRHAKSNGIDADTLARLPLFDPAGLRPLVLPGAERAALDRRVRATDRLTSQAAEHKRRIKDLVRQLLPLSPLTGDLGAADLAVLERYADPRALTGAGQAELTQVIAKASHGHQGADRARQWLDAAQASLELYDGHPAVDLAGLAAEVATEVRLLRATQAELSAHAAEREARYQHVDPAGLARSLPGLAEVGGPALVACMGDPARFSRAGQFRSYTGLAPKASETGETDRKGQPMSKAGSSLLRTTLVRAADNARRQDPQLARIYHQQMTERGKDHLGALCVVAASLAERAWTVMRRGTPYVICDTDGQPVTAAQAKAIIAERWTVPPEVRARRRSKKTGKAPQKVLAGQYARGDLPRGTTPPQRQRPVKPST

SEQ ID NO: 328250 - protein, 312 aa, unidentified
MTSGKYVGVDVCKRWLDVAVHESGQTWRVSNDAEGFASLIAKLKGIEPSKTAFEATGGYERRCVKALGEAGLAVAVVNPTRVRRFAQAMGIAAKTDKIDAQVIAHYASVAQPNAQSAQTPLEERLAAYVERRRQLLSVVVAEKNRLTTCSECMRTDIEEHLAWLEKRVAKLDEDILACVDQKEEWRERSQIIDSVPGVGPVTATTMVAELPELGQLNRQKIAALVGVAPFNKDSGAKKGKRKIYGGRAGVRRTLHMAALSATKCNPVIRAFYQSLLKRGKDKMVALTACMRKMLVMINVMVREGKRWKYLPA

SEQ ID NO: 328251 - protein, 426 aa, unidentified
MAKVEHTSDAHVLVGIDISKHRHEVLIAVPGKTRRRRLTITNSTDDFMRLIAILQEYGLPVRVGFEATGNYHRVLMYRLGVAGFDLKLVSSVALARTREALHNSWDKNDPKDAQVILHMLQIGAVQIFQDPMVAGTNDIQELSKTHDAVSRSKTELWHRILTHYLPLYFPEVDRFHRSSRTDWFLAFLEMFPSPHMISAMTKEEFTTAAWEVVGRKVEKSLLLSDIYETAKVSAGLPVSPDSDAIRMFRLMLAEGRSLIRQRNAIEDRAVELLGDRPDYQLLRTIPGIGPINALTILAETGDLRRFHRHRQFLKFCGMDLATVQSGMFRGRSKISKYGNARLRRTLWLAGQTAVLKKANSFRDKFERYIAQDRHNPDLRRKAYTAIAAKMARTIHAVIKSGEPYRPFFEGTSPGGRTSLSKGRGGA

SEQ ID NO: 328252 - protein, 344 aa, unidentified
MHIASIGIDLGKTTFQLVALGERNKVLVRKKCSRPQLLAYSANLPASLIGLEACAGAHFLGSALRAQGHQVRLIPAQFVKPYRKSNKNDFIDAEAIAEAVTKQNMRFVEIKTQEQLDWQAMHRVRDRLMQRRTALINEIRGFLLERGLTFAARPISLRKNLPTVIEDAEQNLSPRLRWLLDRLWQEWKQTEIDIKAITDEIERISNDDARCRRLRQIPGFGPLVSTATVAAIGNGAAFRRGRDFAAGVGVVPRQYSTGGKQRLFGISKRGNIYLRRMLIHGARAVLLRVKYDTGGFGQWVHRLAQRAPRNKVVVAIANKLARMAWAVLSSGKEYRHQPLPLAAA

SEQ ID NO: 328253 - protein, 350 aa, unidentified
MPMLAESVDAVIGVDTHTDTHTACLVDGTGREVAAVTVEASPDGYSELIAWAAQQAPGPRLTWAVEGCRSHGAGLLRALLAAGQHVVEAGRPQRVGRRPGGKSDPSDARLAARTTLAAGHHAQPRSDGDREALRILLVAREHANATRTAAINVFKALLLTAPDQLREPLRRQSTPRQTAACALLRVHARHTPAERVLRQTLRNLAQRIRQLDREIRANERQLHDLVDTIMPALLAEPGVGPVSAAHLIIAWSHPGRCRSEAAFAALAGVSPLQASSGRITRHRLNRFGDRQLNRALHTIVNWRMIHGHEPTQHYLTRRRAQQKSDAEIRRCLKRYTARHMFRLMETAGRT

SEQ ID NO: 328254 - protein, 391 aa, unidentified
MIYVGIDVAKDKHDCFITNSDGEVLFKAFTITNNLDGFNDLYQKIETVMKDITKVKVGLEATGHYSYNLLGFLLDKGLPTYVINPLHTNLYRKSLSLRQTKTDKVDARTIASILMSDVNLKSYSDISYHNEELKSLTRYRFDKVKERAKLKSSVSRLICILFPELEKLVPTLHMASVYALLSEFPGAKQVANAHLTRLTNLLSEASKGRYSKDTAITFRDAARTSIGSNMPAKSLELKHTIKLIKELDSEIDEIENEIKIIMDEINSPILSIPGINYRMGAMIIAEIGDFSRFDSPDKILAYAGFSPSTYQSGHLYGAYAHMEKRGSRYLRYALYNAAKYVCHWDPTFTAYLAKKRAEGKHYNVAISHAVKKLIRVIYHLEKTNQQYIKAS

SEQ ID NO: 328255 - protein, 333 aa, unidentified
MCVLDARGQVEREDRIRTTPDAVRDWFAGYRKARVVLEVGPHSPWLSRLLTAQGHEGVVANPRRVRLIAEADRKNDRIDAETLARLGRMDPALLHPIEHRGEEAQKHLALLRVREALVRSRTKLIQCARGLAKALGARLPASSAPSFAKHVREAGFAPLFPGLEALLSQCEELTASIRALDREVERLGREQYPETKRLRQVPSVGPITSLAYVLTIEDPRRFAKSRSAGAYLGLTPRQRDSGDARPELSISKRGDEFLRRLLIEAAHYTLGPFGPDSELRRFGLRLQAQGGRRAKKRAVVAVARKLAVLLHRLWVTGEVYHPLAVAGEQEKAA

SEQ ID NO: 328256 - protein, 451 aa, unidentified
MEILYTNCAGLDVHKKTVKVCLLTQPSNGQPHKEFRTYFTTTEELLKLGDWLKEQGCTHVAFEATGVYWKPVFNLLEGSFTVLVVNAQHIKAVPGRKTDVKDAEWIADLLQHGLLKASFIPSVPQRELRDLTRYRVRLTEEKAREVNRVQKTLEDTNLKLGDVGSSIMGKASRMILQAIADGESDAGRLAALAVGRVRADQGQLEAALKGNVTDHHRFLLQEHLTQIRHLEQAIERVTAEITRRFTAPAPPEETTPSQKEEGATQEISSDSASHLEAPSSEHPALSWAEAVVLLCSIPGISERTAIGILAEIGTNMQQFPTAGHMASWAGVCPGNHESAGKRLSGKTRKGNPWLRCLLVQAAHSASHQKQCYLAEQYRRIAKRRGAKRAAIAVAHSILVIIYHLLSQQTTYQEKGETFFEEQERQGAEKRLVRQLSRLGYHVELQPAALAG

SEQ ID NO: 328257 - protein, 391 aa, unidentified
MDKAWAGVDAGKEFHRAHVLDASGKELLSRKVENDEDDLLKLIDEALCLAEEVIWAIDQPGGGAALLLALLWERNQRVLYLPGLTVDRARDAYRGESKTDARDARVIADQARMRSDLGELRPGEQEIAELQLLLARRRDLVTDQSRTITRLREALLSLFPALERALDVNSKGPLTLLTHYQTPTQLRRAGHKRIATYLRNRGVKGSNKVAHKALGAARSQSVTLPAQEVAAAIVAELAEDVLGLKDRVESIDQELGQRFFARPEARVLVSLPGMGPILGAEFLVVVGEISAFESADRLAAYAGLVPAARDSGKRVGNNKRMRGGNKVLKRVFYQSAFASLRSAPESRVFYDRKRAEGKKHTQALIALARRRVNVLWAMLRDGTTFEDRSAA

SEQ ID NO: 328258 - protein, 378 aa, unidentified
MSKIVTVGLDLAKNVFQVHGADETGCADLRRMLRRDHVLSFFSQLPRCIVAMEACGGAHFWGREIGRLGHEVRLISPAYVKPFVKRQKNDAADAEAICEAVTRRTMRFVPVKSEETQGAAMSFRVRELLIRQRTQIINALRGHLAEFGQIVPQGAANVSRLVAIIESPESDLPADAITTLGVLVTVLTNLEAEIGKLNAEIAHRARENEVVRRLMTVPGISPLIATAIAVLALSPQTFRKARDFAAWLGLTPRQYSTGGKQRLGSTTKMGERSLRRLLIIGANSVIIKRRVHAEAQPGTWLDAMLTRKPPLLVRVALANKMARDRLGFDGSRRRLPVSGRSRVSIFGREGVRAKEGKEQFGVTVVRRDRDNQLATECL

SEQ ID NO: 328259 - protein, 419 aa, unidentified
MEDVVEYCAGLDVHRDTVVATVRYPVGGRRSSTTKTFGTDTAELVALGDWLVSQSVTRVGLESTGVSWKPVFYQLEDRLEQVWLLNAQHLKNVPGRKTDVADSAWIAQLVEHGLVRPSFVPPPQIRQLRDFSRHRRVLCEERTRMVQRLEKVLQDAGIKLTSVASTVLSKSGRAMLEAMLAGQTDPVALAELAKGRMRSKIPQLVDALHGNFRLDHHGVLVAQILAQVDFLDRQLADIDEHITALVADLEPIIERVQTIPGVARKCAIGMIAEIGVDMTVFPTAAHLASWAGICPGNNASGGKARSGHTRRGPIALKTVLTEAAQAAGRTKNTYLGARYHAIRGRRGTFKAVGAIRHDILIAYWHIVSTDTNAEDAQVGYRELGADWITSRHSREYQIAKLARQMEKLGATVTVTLPTI

SEQ ID NO: 328260 - protein, 411 aa, unidentified
MELLHPRCAGLDVAKDEVVVCVRVPDGCGGRAQEVRTFPTFTSGLEALADWLAGERVTQVVMEATGQYWKPIWYVLEEAGFQLLLVNARQVKILPGRKTDVCDAAWLAELLEHGLLRGSFVPPAAIRELRDLTRYRKRLIQAHSAECQRVQKTLEDAGIKLDSVAAEVLGVSGRAMLAALINGERDPQVLAELARGRLRAKLPQLRQALRGRFSDHHALLVRLALAHLEHLEGAIATLDIEVDRVMAPFARARDQLATITGVGKRAAETIIAEIGTDMTVFPTAGHLASWAGRCPGNNRTGGKRRSGKPTKGNRWLGEVLIECAWAAARSRDTYLSAQYWRLARRIGKKKAAVAVGHSILVIAWHLLTSDCDYADLGGDYFVRRDTDRQRQRAVAQLQALGYRVTLEPLAA

SEQ ID NO: 328261 - protein, 344 aa, unidentified
MDYFAGLDVSVKDTSVCIVDDTGKIVREVKVASEPEALLAVLKNPAYHFKRIGLEAGPLSQWLFSALAEAGLPVICVETRHMRAVLKAQINKTDRNDARGMAQMMRVGLYRPVHVKTLRSQKLRMLLTHRKLLQSKAIAIDNDLRGTLRNFGLKVGIVGTVRFEARIKKLVENLPDLAALVEPMLVVRRTLREQFCILHRRLLAIVRDDEVCRRLMTAPGVGPVVSLTYRATVDVPARFRKSKSVGAVFGLTCAKYQSGEVDWSGRISRCGDEMMRVMLYEAAQSMMRSKKWSWLKAWAMQVARRRGMKKAIVALARRLAVIMHRMWVDGTEFRWTREQAALAA

SEQ ID NO: 328262 - protein, 422 aa, unidentified
MSYCPVAGIDVSKRFSDMCILSPDNKIFAQEKIYHDETSINRANALLQKAERLFFSKPVIVMESTSHYHLILFQFFSEHGYDVIVVNPLQSNSMKDFSIRKRKTDRVDAFKLAMMYRTKTLRPSQIPQTATRALRQLCRHRAELLNDVSSYKNRLTALLDQTFPGYDKVFSDVGGVTSCAVLVRFPTPTILLVEEESELVDVIAAASKAGYNFAKKNAGLLISAAQKAQTLGIHSCADETLIVCTIQMLRTLSESVLQIETAIDNLLAQIKEMRNNVSLLQSIPGVGSHSAALLLGEIGDILLFKKPKQLAAYFGLDPTERQSGSFRGTKNKLSKRGSPYARAALHMGVVNSICKRGKDSAVNPVLLSYYEKKCKNKPAKVAQAASMHKLVFIIFAVLRDQKPFELKTPEQHAVEQGFVKAA

SEQ ID NO: 328263 - protein, 433 aa, unidentified
MLKLNYMSTLFVGIDVSSKTNAVYAMDFEENKYISSSFGNNQPGADQLVNMIAECMHKHKNLDTVLIVLESTSVYSVHISNFLSASEVLMPYRPYVFCVNPKAASNYRKSYIGMEKTDPTDAYLIADFGRVGRTKKLEPWRGGQFISLKRLTRHRMHLSECITREKTYMVSNLYLKFSELQLLEGDDKPFGSLYGATSSAVLTEFLSPQEIIDMPEEDLLTFLAGKSRNRISDLSKTSELLRKAARDSYRLDKCMYEPLSISLASSFNCIHAYQKEIKLIEQAIEKCINGMNPNALLILQSIPGIGPIWASGILSEIGDITVFHSSDALAKYAGLYWPKGDSGDFTSEDNKMSKAGNPYLRCYLGEAANSVRKHIPEYADFYARKYAEVTKHQHKRALALTSRKLVRLVFGLLVKNQLYTGEKLDAEYNIESN

SEQ ID NO: 328264 - protein, 471 aa, unidentified
MTTGVQVISNMLCEQIKEAPRVQELRLGIDLACRESHRAALADETGKILWSNRRLFTTSVDLQSLWTAVRAAGDVPVLVVMEPTRNAWVPVAAWLRARGADVRMVPPEQSADLRKYYNKHTKTDRLDCELLARLPLLHPDGLVATPGLGPAEALRRSVAHRQSLVARRTAGLQRLDALLGPAWTDVLGTDFGKAALTVLERYADPDALFRLGRARLTQVLIRASRGQWRQDKADELLDAAAQTRLLWAGGGLVFAELADDIAVEARLVRQLGAEIDQLDDRITTHYQDADPTGIVASAPGVGPVLAPLLLGRLGDAKRFRDLAAVRNYTGLVPKVNQSGTSDHTGGLTKAGDPLLREALFMAADHARKVDPTLAARYWRLRAADKHHNSALCTLAAVLVTRIAACWRNDQQYILRDLNGNPITETQGRAQCADLKPTPTAKAGTGRRNKESHSAPSTGPSTKQATKLRKSA

SEQ ID NO: 328265 - protein, 408 aa, unidentified
MNAVGIDVSKGKSMVAALRPMGEVAMLPQEFLHTEVGLEQMAYTIIALGEDTRVVMEATGGYHEPVAAALYEYGIYVCVLNPLFIKQSGGGSIRKVKTDKADAMKIAKYGLDNWVDLREYTPMDTVRQQLKLCSRQYNLYMKTVVSLQNNLISLTDKTFPGVNELFSSPERADGHQKWVDFVMTFWHCDCICRTSEKAFTERYQKWCKRKGYHFSPEKALDIYAGSCGHFTTLPKNDNTKLLITTAAQQLLAGKMTLAALRTEMTHLAMQLPEYDTVCAMYGVGETTAAQLMAEIGDVRRFSRRSSIVGFAGVDPAVDQSGKHEAQSTPTTKRGSPHLRKTLYQIVCTYLRKAPADEPVYQFLDKKRAEGKPYFVYMTAAQNKFLRIYYARVKECLEAFDARQDTTQS

SEQ ID NO: 328266 - protein, 407 aa, unidentified
MEGCFAGVDWASEEHACCVVDNGGRIVEGRRYRHDERGITTLCRRLVDLGVELVAVERPDGLLIERLLDAGLSVIAVHPNQVAAMRPRFSASGGKSDSFDSFVLAELARTDSHRYRVLVPDSDATKALRALTRAREDLVKTRVGLANELRAQLECFWPGAVKVFAEIDSPIALAFLKRFPSPADARGLGEQRMARFLKRHGYSGRRTPAELLERLRGAAHGRAGELESEARRQIVLALVAGLEPIVARIAQLTSEIRGALADHADGDTFRSLFKDPKSVVTAATMLAEIGDCRARYPTYKALSADGGQSPVAVESGKSKRARFRWACDHRLRDAIATLADSSRHHNPWAADIYQRAIARGATHPHAIRILGRAWCSVIWRLWQDHDVYDPARHTALQHLLATQTTTP

SEQ ID NO: 328267 - protein, 401 aa, unidentified
MKVSGLDVHKDSIFCGIYDGKKSTEVKKFTTFTQGIKEMGELLKNQGIQKVAMESTSIYWIPIWNILEEMGFSLMLVNPYLIKQMPGRKSDIKDAQWIATLLHKGLLRGSLIPDKTIRQLRSYSRKYVKMQAMITSVFQEMERILEMCNIRITSLVSKNNSVSIKRVIEQIIQGKDSLEELACCIHGRILNSKGDMVKQSLEGYVQDHHRFTLELAWERYQLYSRQLSQIEKQMEAICQEHYDQHMELLISIPGIQRKAAMQIIAETGADMNAFQNSRKLTGWAGLRPKNDESAGKLKSTSVTKGNRFLRRIMVQCAWAASREKGSFYKTKFEQLCIRKSRKKALIAISRKLLTVVWHVLEEKSPYNPKIVPVYNPEKIKQKMKYFQRELDKLQALGYSLT

SEQ ID NO: 328268 - protein, 448 aa, unidentified
MSKLHVGLDVSQKTVATCFVLDDGTEPVKRFSFEHNPAGVDKLVAKINATAEDLGIDQVLIGMETTGLLWWHLSEALRNSESLQHLQPRIYAINAKLVAHFKKAYVEMDKTDPGDAFVIADRLRFGRLPRLAEPDERYLAIQKLTRHRFHLIQSLAAEKNRFLTHLFLKFSGFCQEEPLSDPFGAASSALLTEFLSVDEIAQMPIEDLTDFLIEKGKNRFADPEAVAKAIKQAARNSYRLSKCLADPVNIVLAMTMENIRFFEKQIACVDKAIARELAAFPGAQVLLSVPGLGPVFVAGIIAEVQDVNRFDSDAQLARFAAIVWKRSQSGAFEGDDTPMMRSGNEYLRYYFVEAANSLRMHNEEYAAYYQTKYREATTHHHKRACVLTARKLVRLVHTLLRKGQLYQTPDQRKESRAVLPAEMTPGELARHVVRRRQAKGRSRVHLDH

SEQ ID NO: 328269 - protein, 389 aa, unidentified
MSSTSNPRELAEIAFRPDHATVYVPLELSRSKWLITSMSAWRDKMSKHPVDAGDGAALLDRLARLRMEAEQRLGAPARVVVIQEAGLDGFWIHRLLEAGGIESHVVEPASIAVPRRHRRAKTDVVDGEMLVRTLAAFKRGEPRVCSMVVAPSPGEEDRRRVSRERRTLIKERIEHANRIKGLLASQGISGCEPMRRSFRDRLESLRTGDGRPLGLRLKAEIGRELDRIDLVLRQVAAVEADRDALLVRPDHADVEVPAARLMKLRGIGPEFAAVLWLEGLFRRFANRRQLAAYAGLAPSPWQSGRVDREQGIAKSGNPRLRTAMVELAWLWLRHQPGSALSRWFRERVGSERGRIRRIAIVALARKLLAALWRYTTSGELPVGATLKTA

SEQ ID NO: 328270 - protein, 323 aa, unidentified
MFVGIDVGSQWLDLAAIPPVLTLPRRVANTPEGHAALVTTLTPLRPTLIVLEATGTYHQPLLASLLVANLPVAVINPAQSAAFRKQHLSRNKTDRGDAQLLARFGERHHTDLRRAEPQEPDLARLRHLVGYRDALVQQQTRVRNQQHAAAWTGDTEILGWMEADLVQIATRLQAVEATIRAVLKRIPDSDVLTEQIGVGAMTAAAVLAYLPAGVQGNAKAAAAYAGVHPRQEQSGQRASSRLSKQGCPAVRRYLYLAAQCAVRCDPVLKAWYNALCARGKARQSAICAVAHQLLRQMMGRLKQARAERAARAERPEPALPLAA

SEQ ID NO: 328271 - protein, 351 aa, unidentified
MFEHSLGIDVAGKDFRVCLKIRRPDGQIKIKGSRKFPNTIKGFESLIKWVGSKQTSDQSMRAVMEATGIYYESLAYFLHEQGWQVFVLLPNRIKGYFKFLNQKSKTDKIEAQGLAKLGINQELPVWEPASPQMYSLKRLCRERNTLIDEKTVISNRLHAEQSCKAPDRGTMRRLKQLLRLLDKQVKEVELDLSQGIDQDPALKQRIEQICLVKGLGWITVLCIIAETNGFKLVTHKSQLVSYAGYDVVERQSGSTINGKTRISKKGNRHIRRVLHFPALSVVKYHDEFTNLYNRVYDRTKIKMKGYVAVQRKLLVLIYTLYKKNEAYDPKYAQKQGTDQGSRQGTMPAYTG

SEQ ID NO: 328272 - protein, 419 aa, unidentified
MKTIKPKKTRTVNQNVLIATVDGGKDTHYGYYRCPDGTEGESLPFWNNGRGFQEFWERVSLAARTHGLEEIIIGFESTGSYLEALTHFLKNRKSVRLVQVNPMHTKRLKELPGNSPLKTDRKDPKIIADIIELGHALTVVIPEGPAAELRRLTQGRERTIESRTRLFNQLQSLLVISFPEFLQVMTDVKTASAQHLLRHYPTAQDIVTLGEPALAAMLRKVSRGKLREDRARALFEAANESVGVRDGRSSMLIEIGLMLDTIATYDRFVEGVETEMVRHLEQIPYSRVILSLKGIGPVTAAGLIGEVGDFTKFGTISEVMKLAGLDLYEVSSGKHRGKLRISKRGRPLMRKLLYLAALSTVRKGGVMHEWYQRALGRGMIKTKALVAVSRKLLGVIFALVRDHSVYVENHLKPVLQEAA

SEQ ID NO: 328273 - protein, 313 aa, unidentified
MDSLGYVGIDVSKNTLVVFVSGHVVEKTNDDSGISELVALLRESSPTLIVLEATGGYEMLAAMALGAAGLPVAVVNPRQVRDFAKAMGRLAKGDRIDAELLARFGEAVRPEPRALPTEEARLLTAELNRRRQIVEMLTAEKNRLAKAHPAMKKRVEAHMAWLGKELKKLDKELHQTIRKSPLWRERDDLLRSAPGVGPVLSTVLMAELPELGSLNRKQIAALVGVAPFARDSGKYRGPRTCWGGRASVRAVLYMGTLAAVRSDAGFIKYYEALLQRGKAKKVAITACMRKLITVLNAMVKSHARWSPELAFSS

SEQ ID NO: 328274 - protein, 325 aa, unidentified
MTKHISYIGVDIAKSKFDICLYSGNFSSCVYESFTNDLDGFLNFSTFLKSANDLNNIKIGMEATSTYMIQLQKYLDTLEVSYLVINPKKIHHYIKYMNFESKTDKLDSYYIASYITKLSLDSFNSSFQTMKFLYKPYNSYINLIIKTETHIKGLTDSVLVNDFISDTLKDEILSFNENLRKTKKKVMQELLEVIKISMPEYDFVKNDIIGVGDKTLLAVLPLIYDISDKYSIKQLQSYIGLNIVYTNSGSSLNKKQHIAKTGNVEARKMLYLASLSAVQSNEILKEKYERLLANGKPKKVALVAISAHIFRAIVSRLNYYKGLKS

SEQ ID NO: 328275 - protein, 390 aa, unidentified
MIYVGIDVAKEEHECYITNSDGEVLFTFFTIMNNRDGFNELHTKILSAADDLSKVKVGLEATGHYGYNILGYLLDKGLTTYVINPLHTNLYRKSMSLRKAKTDKIDSRTIVMMLMSDVNLKPYSDTSYHNEELKSLTRYRFDKVMERAKLKTSISRLVTILFPELEKLVPSLHMVSIYTLLCKYPGASHIATAHLTALTNLLTKASKGRYGKEMAIIIRDSAKHSIGMEMPAKSLELGHTIKLIRELDCDIKEVESKIKDIMDSIESPILSIPGISYRMGAMIIAEIGDFNRFDSSDKILAYAGLSPSIYQSGQYEATHSRMEKRGSRYLRYALFNAAKYVCLWDPTFIAYLAKKRSEGKHYNVAVSHACKKLVRVIYKMEQTQQLYIKA

SEQ ID NO: 328276 - protein, 383 aa, unidentified
MEECSTFVGLDVHKMTITVAVAEGRQEPRVWETIPNTPEAVEQTVGRLRRRWRSVVFAYEAGPCGYGLYRQLALLGARCDVIAPSLIPRRPGDRVKTDRRDAMALARQHRSGDLVRIWVPDEHQEAVRDLVRCREDFVGLQHQIRQRVSSFLLRQGRLYPGKGAWTQGYWRWLRGHRFEQASQQRVFTDYLHAAAESEERLKSLDRALVGSLAGWSGKPLVEGLMSLRGIRLVSAMTLASELGDISRFASARELMSFVGLVPSEQSSGSRRRRGGITKAGNGHVRRVLVESAWAYRHPARRTPAMRRRGESCSEAVRGIAWKAQKRLCGRYASLTRRGKLGTVAVTAVARELVGFVWAIARQVQWEQWQSADASAASSEPQLA

SEQ ID NO: 328277 - protein, 432 aa, unidentified
MEILWGAIEVYIQRVVFRFAEPFDEVTPMAPVQDVITEAPILHVAFELSSVSWILASGVRSSRTVRRRSVKAGALKEVLDEIATAKGRFDLPQDARVVTCYEAGRDGFWLHRWLLDRGIENLVVDPASIDVNRRARRAKTDRLDADKLLERLRRYTRGEEEVWSVVRVPELEVEDLRRLQREVDRLKLERTQHSVRIRSILATHGLGHLCAAEGVHSLKGLHPPAGYDLGKYTLLEIQMISDRMDLAAKQLKEVEKIRRELERGPADLKSVRSVLLLLALRGIGEEGAWAVGTELFGWRKFHNRREVGAITGLVGAPYDTGKKDHEQGITKAGRSSLRRLLVELAWLWVRLQPKSALSQWFERRFGEGSKRCRRVGIVAVARKLVVALWRWVEFGELPEGAELSGSMAPEVLKAVGKGWDVPKGRGMVAATG

SEQ ID NO: 328278 - protein, 387 aa, unidentified
MPQPNDLSRSLAALDEDSTLIAVIEMSQSSWLVAGIVPGIERHPAKKLEPSEEGLLRLLHGWREEAGKAGHTIKRIAVAFEAGRDGFWLARWLRAHGIEAYVIHPNSIAVSREHRRAKTDRLDTALLKRGFVGWLRGEREHCSMAAIPSLAEEDAKRPSRERENLVGERTRIGNRIKSTLARLGIRDFKPTLRTAAQRLERLRTPEGEAVPPNTLAELRREMARLRLLAEQIREIESARLQRLEQQPNSGAHPMVRLLAQVRGLGIETADMLAHEAFSRSLRDRRAVARYGGLTGSPDESGARRREKGLARAGNARVRRGMIQLAWRFLMFQKDSALAQWYRARTAEARGATRKTLIVALARKLLIALWQLVTTGEVPHGVVLRPAL

SEQ ID NO: 328279 - protein, 315 aa, unidentified
MHHPIPQTAGIDIAKDQLDVCLYPDGATRHFPNDAKGHRALIAWLSGHAIERVVFEPTGAYHRVLERSLARAGLPLAKINPRYARRFAEALGQLAKTDRLDAALLARFGALLEPPTRPVLSPTLDAMKELLVARQALIKDRTAALNRQKIVRSSLVRRQLDQRLRQIAHQLAALDDHLLSLCQEDADLAPRLAILISIPGIAQATAVSLLVEMPELGNLDQSQVASLAGLAPVARDSGASRGRRMIRGGRAHLRQALYMPALVAARFNPDLKAKYQALLAAGKPAKVALTAIMRKLIILANALLRDQRNWSPKPA

SEQ ID NO: 328280 - protein, 397 aa, unidentified
MYIVGIDIAKRKHEAAVIDGEGTVIIKPFSFTNNCSGYNRLLAMLARAKLPLDEVSFAMEATGHYWLALFTRLQKEGFRVQVINPVQTNSIRSFYIRQAKTDPRDALLIAEVIRFGHFSESTLHPENIYELRELCRGRHAIVSMQADVKRKVVALLDQVFPEYETAFTNLFGDTSMAILQTCPTPKELSETPLEELCHLIEVSSHKRFRMAKAQELQALARNSFGFAMAGDVFSTMIRLYAKHLDFLKQQVREMDRKIAEIMDTLDTPITTITGIGPTLGAYILSEIGDISRFSSAAKLAAYAGIDPTMRQSGEYNGVRNRMSKRGSPYLRHAIWLAASSAVLHDPALKLYFQKKRDEGKPYMASVGHACRKMVSIIYAVMRDNKAYTPCIPNEISA

SEQ ID NO: 328281 - protein, 422 aa, unidentified
MKNITASKLKQIPEGYLIVGVDAHKKTHYAVIKTQDAVVRSKFKVDNSRQGFNELLDRAWRCMTMVGARGVMFAIEAGGSYWRPLAYFLDRKGIPFRLVSPFTLKRRREGDDVDRRKNDYHDAETAGELLRTGAFTETRLAEGTYAELREAYHTYHRLGKEITQTSNLLGSLLDGVFPEFCRVFRDVDSKTALAVLEAYPLPDTIAGMTLEEFQGAMLKRYKGMRIMRKKLAAIHEVTRDSIGIRAGSCAVASEISMLVERLRLIQRQKEKTERLLVRIEESLPESRFLLSVKGIGPITVAGLLGELGPIRNYSNARQLVKMAGINPVQSESAGKCRGRTPMSKKGRPLLRHCLWEACFGLLRYNANFKSWFERLLERPVHSHPLNKREARGAMCRKLLHLVFALVNNGTPYRKEETISVMV

SEQ ID NO: 328282 - protein, 453 aa, unidentified
MTEDRNIKSAMEKSNPLDLPIINLYAAAVDVGSEKFFVSVGGREPRVFLTVTGQMQQVCEYLKAEGVRTVAMEATEVYWINLHGTLEEAGLEVVVVNGAHCRNFPGRKTDMKDCQWLAVLHAHGLLTGGFVPPSRIRRLRDYVRLRSDLVSMAAQHVQHMQKALDRLNVKIHVVISDITGWSGMRIIKAILAGQREPEQLVELCDAQILKTKKAPMIEALRGLWRKEHLFALELAVESYESYQAQIAKCDAQIAEVLNELKELSGDNPAPDLGQRKELRHNAIVLEGLQKQMAQIYGKDLTKLPCINESTAVVLLAEIGNDMSRWKDWRHFGSWLALAPCNAQSGRKRRRVKRYLTRAGQILCTAVQCMAVGKHTWLASFYRRIRAKRGAKVAIKATAYKLAKLIFLVLTKGWEYVEQGIAKYEQRVQLMRFKALQKLAKELGFVVLPRAMAK

SEQ ID NO: 328283 - protein, 425 aa, unidentified
MNYKQNNKINQVKESTLVVGIDIGSTTQYARAFDWRGIELGKVFTFSNSREGFETFKAWMQRLRDKYKKSDVIVGIEPTGHYWFDLGAYLEDEGILLVMVNPYAVKQTKELDDNSQSKNDRKDPKVIAKLVTEGRYSAPYTPDGVYADLRIMVANRKRLIREITQIKNRFARWFAIYFPEYKEVFGDYEAQSSMLLLKVACTPQAIVELGAEKINQIWRDAKLRAVGMKRATTLCETAKQSIGLKKGSSAAKYEMKLLLEDYEYKKAQLDSVMGEIESLCQKIPESEQMLAIKGIGVITVAGFLAEVGDVRRFESPRQIQKLAGLSLRENSSGKHKGQTTISKRGRSKLRAVLFNAVIPLVAKNPEFKSLHEYYTTRANNPLKKKQSVIAISCKLIRVFYAILANGVTYDPQKMISDIHRQPQAA

SEQ ID NO: 328284 - protein, 345 aa, unidentified
MPIVGGLDIHRKQMTFDYLDTVTGEVYRGQIVPADRAHLRAWLARFAGRDDVAFALEGCTGWRYVTEELTAAGCAAHLGEPADTAAARGRKRHAKTDKTDARHLRQLLAEGRLPECWIPPAQILECRALLETYHDLRRERTAWAQRIHAVFFHQGAPRLGEGALRTDQGIAALRAAAACHLSPAGQLQVATALDMLTAVDARLHVLRHQLLAAARHLTGARVLTARLYGAGPFAALAMTCWLAGAGRFSSARKAVRFAGLDITVYSSDSKRTPGRLSRQGPPVLRWALYEAGKTHARASAPDHRYYAQVKDRKNGKRAALSEARKILRQACHILTELGDDALTAA

SEQ ID NO: 328285 - protein, 354 aa, unidentified
MSQQINARVAVVGIDIGKNSFHIVGQDGRGEIVLRQKWSRSQVEARFANMLPCLVGMEACVGAHHLSRRLKALGHDARLMPAKYVRPYSKGQKNDFRDAEAIAEAVQRPTMKFVATKTADQLDLQALHRVRERLVRQRTGIINQIRAFLLERSIAVRQGIRFLRAELPRILAMPPDVLSPRMVRIVEDLACDWRRLDERVEGLSNEIETIARQDAGCERLMSVPGIGPIISSAMVAAIGAGDVFTKGRDFAAWLGLVPKQISTGDRTILGKVSRRGNRYLRVLFVQAAWVVLIKPKIWERHGLKPWLEAARKRLHHNVLAIALANKLARIAWSVLARGRAFEVRKINQAAPQPT

SEQ ID NO: 328286 - protein, 438 aa, unidentified
MSNKVIFNLDELFISVGIDVGADFSWMSIALPNQQFVGKPYKILHNSIDSLTTAVSKIKEAEELYSLESRIFLESTGIYHYPLFCYLRDKGFNCSVINPIITKNSTNINIRKVHNDRFDSKKAALVGLKPDLKVSLMPSDLALNCRNLCREYYDLMDNRSAYVNKLQGELRMAFPQYLGIFSKVTINTSLTLLETYTSPSAFLEADKQEIIDIIKSTARFGLTYAQNKYNAIIQAATDANQFGYIIDSNIKRIRLYISFIRKYDEEINSILESLHELVDANEDSDFVKQIHLIETFKGAGFLSAVSIMGEIGDFSAFSKPKQLFAYFGLDPAVKQSGKFEGTKVQMSKRGSAIARRVIHTLTLQSISISRNGEAKNPVLREYYLKKCDSKPKLVAMGAVSHKVCNMIFAILRDNKPFKIIAPQEHIKQYNAAKCDIAA

SEQ ID NO: 328287 - protein, 321 aa, unidentified
MVTIGADLHKRTHTLVATDAAGQEMASRTVSATVDGHADALRWARQWPERTWALEDCRHLSRRFEVDLLRAGEAVLRVPPKLMAGTRRSARTRGKSDPIDALAVARAALREPNLPVAQLDGPVRDIRLLLDHRDDLVAERTRIQNRLRWHLHELEPGQEPPPRSLDRTHVLDAVEAQLAASTTLVARIAGELVCRCRELTVRILDLEREISGLTAVAAPTLLQLTGCGSLTAAKILGETAGIGRFRSRSAFAMHNGTAPVPVWSGNRERHRLNRGGNRQLNLALHRIAITQLRRGGRGRDYYDQRRRHQDRGHSSAPSTRL

SEQ ID NO: 328288 - protein, 458 aa, unidentified
MEEPQEVPADEEHERVWERVAAIDIAKASGVVCTRVPDEDRPGRRKTHVWTVQASPKAVIELGDYLRARQIQVVTLESTSDYWRIWFVLLEAAGLKVQLVNARSVKNAPGRAKTDKKDAVWLAKLTEKGLLQPSFVPPYEIRRLRELTRLRASLVHDKSRYWARLEKLLERALIKISAVLSTLDTDTARAMIEALIAGERNPRVLADLAIGKARAKRAELAAALEGRREDHHSIQARILLDNIAALNRQIDQLTGTIGELISQIPAAWGIDADGTTGPHAGTSPDSPVLPAVAQLDAITGCGIIAAQAIIAEIGLDMAIFGTPGRLVSWAKRCPQTRQSGKKTSGGKAGKGNPWLNGILGEIAASASRTDTFLGERYRRLARRRGKRKAMVAIARSILVIIFHLLSDRSVRFCDLGPDFYDTQINRDRKIRNHIRQLQALGIEPDDLSAFLTKNPPAA

SEQ ID NO: 328289 - protein, 339 aa, unidentified
MNITTVGLDLAKNVFHVVCFNDRNKEVKKRMLRRSQVRQFFAQLPPCKVGMEACATSHYWGRELEALGHEVKLIPPQYVKPLVQGNKNDYNDAHAIAEALNRPRIQFVTIKTVEAHDMQAIHRMRSQCVRDRTALSNSTRGLLGEYGISLPKGLATLRRTIPDLLEDAENGLSIRFRTLLARRYQQLVELDEHIGFYTKELELLSQQDDACQRLQTIPGFGPIVASAFRSAMGDGRAYVRGRHAAASLGLVPRQYSSGGKTVLLGISKRGDRYLRKLLVHGARTVVQSAVNRDDPFSQWINRVRERRGKNKAAVALANKLTRIGWAILRYNTRYDPALV

SEQ ID NO: 328290 - protein, 350 aa, unidentified
MYFAGLDAHLKYVTVAVLDRLGTLVLETTVPTREPERLLAVLAPFRPLEVVVETCPFWPWLYDLLVPAGIRFHLAHAKRLRAIATAPQKNDRVDARLLARMLLAGLIPEAYPRPGDQRELLRLLRHRTTLVRARTRLAGRIHSQLHQQRLMLPREQLLRQATRGWLRETAWPRLTAEQQAIVTTHLALIDHLTPLIQALERRIATAADANPTAALLATIPGIGPYRSLLLAAELSPLTRFPRVEHLASYAGLAPVTRSSGGHTRHGSIPQGANRWVRGALVSAIPSHVRSAPHSPVSHAYAQLTARLGWRVARVAAARKLLRIVYIMLRRGEAWRSEQVAGADVRDEVHV

SEQ ID NO: 328291 - protein, 382 aa, unidentified
MKNIYSNVACGGMDVHYKFSAVTFRDEAGRVVRRERLEHPQRCQLREHLNRWPKGLPIVLEASFGWGWLSDLLSEAGLEPHLSNCYKLEQMRKARGWVKTNKKDADMLSLLPFETTAWWEVWRAPLKVRNRREQMRFRGDLVALQTAIKNRIHAIFHRHGIFHQFSDLFKGQGRRFLAELCISGSVYLSSEALQAFRGQIKLLDHLRKQLADIQRILRRQLDKTPLIRRLMTIDGIGLILAHVLAAEIGRIERFRNHKGLASYSLLAPRADDTGQDDSGHSPLGRHLGTRGNKTLKWAFIEAAHGAVRSGGRWRVMFDRVTNGGTKDRNRGYIKVARELVKVVYVVWKKDVAYRDIPPQRPGANRKKSRSGTGQLLHPMVHA

SEQ ID NO: 328292 - protein, 425 aa, unidentified
MNFTQNEKISQVTNETLVVGIDISSETHYVRAFDWRGMELTQTFKFESTSYGFKRLMEWLDETCKSNSKTKVIMGAEPTGHYWFTLAEYLKENNIKFVFVNPMHVKRTKELDDNHPSKNDRKDPKVIAKLVIEGRYLIPYIPEDIYAELRVANESRMRITREIVAIKNRIQRWFAIYFPEYTHVFGSWECDSSIEVLRNCPLPADVMSLGAEAINQLWREKKIRAVGIKRANALIETAKTSVGVKNGANAARFEMSMLIEDYLIKKEQEARIIEILETLCIQVPNSEKLLSIKGIGILTVASFFGEVGDIRRFESPKQIQKLAGLAIANNDSGKHRGKAGISKRGRKLLRYTLFQAVMSLLMHSPEFRYLHHYYTTRSNNPLKGKQSKIALCCKLIRVFYAILTKGVEYDSEKLLYDIVRPELAA

SEQ ID NO: 328293 - protein, 350 aa, unidentified
MLIIGCDYHPSFQQIAFVDTETGEFQEQRLSHREEAERFYRDLAAQGRKGRVGMEASGHARWFERLLAELKVELWRGDAAKIQAKRVRKKKTDREDARHILQLMLKDDFPQIWVPSWDNRDLRQLLWHRHRMVQMRTRIMNQLQAVALNEGLRCKKRLWGERGRQQLESIGLAPWASRRRRDLLELLDRLTPTIAELTKQIEQEVEKYPAAQRLMTHPGVGALTALAYVLIIGEPERFECSKQIAAYLGLVPEEDSSGERRRLGHISKQGSGLMRFLLVEAAQVTVRSDPEWRSKFFHLAMRRGRKIAKVAMARRLAVRMYWMWRQQWDYEQLKKFGPHAGQPGTAHGVK

SEQ ID NO: 328294 - protein, 404 aa, unidentified
MNAVGIDVSKGKSMIAIMRPFGEIVASPFEVTHTDSDLGKLAGLLKNLNGETKVIMECTGNYHFPIAHALQDAGLTVCTVHAQLIHDFGNNTIRKVKTDKADAIKIANYGLTNWLDLPEYIPEDDIRHMLKAYCRQYNKYSKLKTILKNNLISLLDQTFPGVNELFASPPRKSDGHEKWIDFAAAFWHCNCVCCLSQNAFTERYRKWCKRSGYQFSQSKAEDVYFASAGHFHVMPKNKTVKLLITQAIAQINAIALSLAVISREMYSLAVQLPEYPVASAFYGVGDVLCPQLMAEIGNVYRFPKKESLVCFAGLDAPPFQSGKFESANRNISKKGSPHLRKALFQVMSCILKSAPADDPVYQFLNRKRAEGKHYYSYMTAGSAKFLRIYYARVKEFLDNYYSEA

SEQ ID NO: 328295 - protein, 341 aa, unidentified
MEKATIIGIDLAKRVFQVHAAAKDGQPVLRKKVSRSQLLGFLAKQPSAVVAMEACATAHDWGRAISDLGHDVRLVPPIYVKPFVRRQKNDAADAEAIAEAASRPTMRFVALKTEEQQARSMIFRTRDLLVRQRTQLVNALRGHLAEHGIVAAQGLARVNALATAMCDTSSLHPLVRELGERYLDHIARLDLEIAELDKRLRRAAKDDETARRLQSMPGLGPITAAAIEAFAPPMATFRRGRDFAAWLGLVPRQHTTGGKPRLGRTSKMGQRDIRRLLIIGAMTVVRWAIRKGAAKGSWLARMLAKKPRLVVAIALANKMARSVWAMLSKGEDYRGSALAPA

SEQ ID NO: 328296 - protein, 414 aa, unidentified
MLKIVYPICCGLDVHRDFVYACIATTENGVTTYKSHRFSTFTKGLRDLLSWLLQNNCKDVCMESTGKYWIPVYNILETDCKIVLAHPKYVKAIRGKKTDKKDAKWIADIFKHDLVSGSFIPPADIRQLRDLVRYHTKLTSFTTGEKNRVQNCLTVSNLKLDSVFSDVFGKASSNIISHILANPSEKISDVSAFRTKRMKATDDEILEAVDGAMCSEQAEKLRIIRKHMSSLDLCKSNLQSLILSTAEKYISEINLVCTVPGMAAFSAISVIGEIGVDMSAFPTSKHLCSWAGLAPQNDQSAGKKKTTRISRAGVYIKPLLVQCALNAIRCKDNPEIATRYNALKKRRGHKKAIIAIARMLLTAIYNILKKHEPYNAELYRKSDTPPEHRHVSVEEAVFILQRQGYLISPPVSIG

SEQ ID NO: 328297 - protein, 344 aa, unidentified
MVVLGTDAHKRNHTVVAVDEAGVEIGSVTAAATPEGHLKLVRWAARWPERRWAIEDCRQLSRRLEADLLRVGESVVRVPPKMMAGVRRSARTRGKSDPIDALAVARAALREPDLPVAQLDGPSRELRLLVDYRESLVKDRTAAQNRLRWRLHELKPGYDPPAGSLNRYKTLDEIEQLLTSHNSMVAELGRREVARIRELTREANQLERDIARRVMELVPSLLEIPGCGGLTAAKLVGEAADITRFKNRDAYAMWAGTAPIPVWSANNQRFRLNRGGNRQTNAAIHRIAITQIRIHPDAQAFIKRRLETGSTKREALRLLKRKLANVVYRTLLNDVHQPALADAA

SEQ ID NO: 328298 - protein, 361 aa, unidentified
MKCVQRNKLDFSGQNIYVGIDVHLKSWSVAILSEHSVLKRFSQSPEPELLHKYLVSNYPGANYFSVYEAGFCGFWIHESLTDLGITNIVVNPADVPTMSKEKLRKTDAVDCNKLARELRSGSLEGIYVPGTATLELRSLIRMRTLIVKDSTRAKNRIKSLLHFHGVKIPEEFIRCSSHCWSKRFLRWLHNLELSTEYGKKTLELHLEQFIRLRKMLLQETRAIREISRKAPFAKPIRLLSSVPGIGITTAATLMVEIDDIVRFNSAEHLASFIDLVPMCHSSGDNDAVSNMTIRRHFMLRWLLVESAWTAIRIDPAMTMAYTEYRKRMNPQKAIVKIARRLVNRVYFVLKYEKEYVSCIVK

SEQ ID NO: 328299 - protein, 406 aa, unidentified
MKVYIGIDWSTQKHDIVYLNEEGGIILYQTIPNTADGFEAFEEQRAKLGVGVEDCLVGIETEHNLFLDFLSTHRYSQIYVIPPSMVKDGRGRFGANKANTDRSDAHLIADMLRTDRARLHTWHSDSLLTQQIAALSSLEHFLTRTILQTTNRLRMVLWRYYPNAAGVFSSLENQISLEFICAFPTPEAAAELTFEQFKAFAQVHRYRRPAKLAGCFARLKKSQPEAKQQTVLAYQSEAVRLARLALQAVQDKAATLKEIQELFVEHPDYLVFSSLPGAGAILASALLAKFGDDRQRYPSPQVLQCVAGTCPVTRASGKHRYVTFRYACDHEFRWIVQQWAKSSIDASVWANTYFQSVRPQCDSLSHAYRRLANRWLEIAWRLWQDRIPYDEERHLRQHALRVRPPN

SEQ ID NO: 328300 - protein, 343 aa, unidentified
MQTITTIGLDIAKSVFQVHGVDAEGNVILRRQLKRRYVLAFFQKLPPCLVGIEACASSHHWSRELQALGHTVRLMPPAYVKPYVKRHKNDAVDAEAICEAVTRVNMRFVATKTPEQQSCLTLHRTRHLFIRQQTSVINAIRAHLAEFGIVAPVGRNGVEQLLGVAADSNDKRLPEVARACVAALGAQLQTLKTQILEFDRMIRAWHRSSDASRRLDDIPGVGPTLATALVASVADPKIFRSGRDFSAWIGLVPKQNSSGGKDRLGNISIRGDRYLRSLFTTGALAVIRYAKIHGTRHRPWLTALMARRPTKVAAIALANKIARMAWAIMVRGERYKEPAALAA

SEQ ID NO: 328301 - protein, 454 aa, unidentified
MCLEDRPVLEPNAAGIDIGAREIFVAVPPGRDAHPVRACATFTEDLEQLADWLVACGVTTVAMESTGVYWIPLYDILESRNLKVCLVNARHMKNVPGRRTDWHECQWLQYLHSVGLLRGAFRPEADVTAVRTIMRHRTELVQMSSQHVLHMHKALTQMNLQIHHVIDDITGLTGLAIVDAILAGQRDPVELAKLRNWRIKADEETMRKSLVGNWRDEHLFTLRQSRELYRTYQQQMVKCDQQIEKLVGGFEPRVDPEEKPLPPDRKRYRGAKKRAKKNGQPDTGFNLRTEAYKLFGVDVTQIPGLETMALPLFGEVGRDMSKWPTADHFASWQGLCPDNDISGGRVLWKGTRKVRNRAGQMFRQAAYSLHHSLTPMGDYLRRMKTRLGPAAATTATAHKIAVIFYTMVKNQVEYDETIWATRDVKRQQRIEARLKRQANQLGYQLVRLEEKPAA

SEQ ID NO: 328302 - protein, 317 aa, unidentified
MNRIIIGIDISKHKFDVAYMAIKQRWQRRTFDNSSEGFKSFIKWLEDKNIKKCHAVMEATGRYGEDLANFLYVSGHQVSIVNPAQIKYYGRSLLRRTKTDKIDSQLIAEFAQRHDLSSWQPLSASLQCLKDQVRCLEAFKKDATQTSNRLGHAKDLVVKKMLEDRLVYIEKQIKELTLKIKKLVHDDPVLAYNMSLLTSIPGIGETSALSLLTELPDLSTFKCAKQLAAFAGLNPSIKTSGISVKGKEQISKTGSRELRKILFLPAMSTMSRSSPIKPFIERLREKGKKGKVIIVAVMRKLLHIVFGVLKTQTTFQG

SEQ ID NO: 328303 - protein, 321 aa, unidentified
MTYIGIDVSKDSFVVAYSPDKNSKTKTFKNTTKGIHEFIRSISKDEHHCVMEATGNYSALLVYLLSEAGITTSLEYPLKVKNFARDMLSTVKTDEIDARLIALYGEKMQPAPYKLHSDAILTLKQKRTVIRQLKKQLIATRNLKGSMEVLPFFDAKCKKSIERTIAFLEKQVKDLEENLSSLARSEYKKQMDLLTSVKGIGVTLAAALIMATGGFTYFDNAKQLTRHLGLSPTYQQSGTSVNFKGHINRNGDSSLRSQLYVAAFASLRCNTECKACYDRLRSNGKPGKVAVIAVANKLIRQAFAVVTQEKPYVDGYVSSKK

SEQ ID NO: 328304 - protein, 401 aa, unidentified
MPEQPLIQRWIGLDIHKAFFVAVGVDAEKRTVFGPHKIPNEQLENWIAKHLLSTDAVVMEMTTNTYLFYDTLLPHVGSVIAVHPPNVRLVTGVKVKTDKKAALTLAQLHAAGLLEGVWIPPDEVRELRAVIAQRSKMVRLQTQAKNRLTSLLHRTHRERPAQSFKPELKAWWEALPLSTIEKYIVASDLETLAFAEKQIQAIGEVLCQEAAKDERVPLLTQLPGIAMLMALTILAAIGPIERFEDASHLVGYAGLGASVHDSGQMHATGHITKAGRRDLRGAMVDAANAAVRHHPFWKKEFERLEYRLGRSKAIVAIARRLLVAVWHILTNGVADRHADVISVAASMYKLAYEIKLSNLPKGVSSRAFTRQQLDRLGIGQDLEVLPRSGKKVKLPPSQLKT

SEQ ID NO: 328305 - protein, 373 aa, unidentified
MPKYSTAFGMDVHLRSTTVCALDADTGEAVTRRFPGNPWGEIAGWMDGFPGPSLAAYESGYLGFAPQRELAGLGVECAVAAVSKIPRSAADSASKNDRNDAARMAKAILAHDISPVWVPSPEVEGIRDLAGAYDGATARLATAKQRLLAFLAKRGFVYGGTTPAGNPRKYWTYDFLRWLDKVRPEDDGGVRTLAALRNEVEAAAEARADLLSEYRAAVDASPIAAEVASLQSIKGCAFALAAAFSAEVGDFTRFRSGRQVTAYFGLAPSQRSGGDSVRLGGISGAGNALVRKLAVEGSWCYAAARHQPKLMPRDTGVPLEIRMHGRKGSERLLRRREEMLARGMPAAKANAATAAELVRWLWALGMMCREGAE

SEQ ID NO: 328306 - protein, 355 aa, unidentified
MNDAKYIGMDVHTATISAAVRDSSGNLVMEATLETKAETILEFVHGLRGSLHVSFEEGTCAAWLHDLLKPHVTEVLVCDSRKNALLRVGNKNDREDARKLSELLFLNKLHPVYHGETGIRTLKELARSYLTITRDLTRVMNRLKAIYRGWGIACAGQQVYAPRYRAEWLAKITEAGVCRRAEIYYQQFDALAALRQEVRRELLAESRKHPAMRLLRQIPSIGPIRAALLIALMQTPHRFRTKRQLWAYCGLALRTYDSGEYRFVGGQLKRSKKAVTIRGLNKNHNHDLKNIFKGAATRAAATAGPLQNFYEARIANGMKPPMARLTLARKIAAITLLVWKKGVRFDAEQLKQQAA

SEQ ID NO: 328307 - protein, 341 aa, unidentified
MKKNVVIGIDFSKLTLDVTFFNTNNPDETQYQQFENTKKGCIQIIKWVKRSFKDCSNWLACGEFTGIYSMTSAMVFNEKGIDLWLENPRQIKLSSGISREKNDKVDSKQIALYADRFMDRVKLYKPKNKALLKVRELVSYKDRLTKIKSQLSVPAKELKRVHKDWEEADYILDNSKEMIKQIDKQIKDIEHKMLFLLKSDPDLNRLYKLINSVVGVGMQTSIYLLIHTWGFTSFDTPRQLACYCGIAPFSKRSGTSIKGKSQVSHIANKKLKTLLHMCALNAIRYDPNIKAYYERKTQEGKHRMNVLNNVRNKLVYRIWAVVSSGQEYDKNYNLYKKNQAA

SEQ ID NO: 328308 - protein, 366 aa, unidentified
MKQQHNRSEFTIGLDLGERRHRFCVLDGKGEVVEEGSLSNDRACLARLTARYCGALAVMEAGAHSPWISRYVEGLGWQVIVSNPRKVRAIYQHERKSDQRDALMLARIGRMDRALLYPVRHGSEEAQQDLLRIKLRDSLVRARVALINSVRFSLKSLGYPVSNPSSERFHKVAMEGLPEVVRQMIAPSVQALAELSARIAMLEREIRVVARTKYPQTLLLQQIPGVGAITALYFVLKIEDPHRFKNVRDVGAYTGLCPRRDQSGQSDPQLRISKRGDAYLRRLLVSAAQYILGPFGPQSALREYGLMLAADGTTRGRKRAVVAVARKLAVLLLSLWKNRSHYEAFPHWQTIEDKRSGTIAMHRVEA

SEQ ID NO: 328309 - protein, 338 aa, unidentified
MTIETLAIDIAKNVFQLHGVNRNGRVVLKRRVMRNQLLEVLAQVDPCTMVVEACTGAFWWARKFEALGHQVKIISPQYVKPFVRRQKNDGNDAEAICTAARQPHIPFVPKKTVEQQDIQALHRARQRMVNHRTAVVSQIRGLLLDRGFPIAKSITCARRLIPELLADLANELTPMARDAIADLYDLVRDLDRRIASFDKKIEQVFRGNESCQRIAKIKGVGPKTATAIIAAIGDGAEFKNGRHLAAWVGLVPRQFSSGDRTTLMGISKRGNQHLRSLLVHGARAVVRTAPSKTDLNSQWVNQLRERRGFNRATVAVANKNARIIWAVLRTGEPCRAAF

SEQ ID NO: 328310 - protein, 343 aa, unidentified
MYYIGLDVHKKTISYCVKDAAGHVHREGKIGATRRDLDAWIKTLPEPRTIAMEATIFTGWIYDHLLPHAEKVKVAHPLMLRAIAAAKKKNDRIDAGKIADCLRCDFLPECHMASTEIRDRRRTLRYRHLVVRQTVQMKNRVSGLLMETGVSYDKQRLHKMGYFSELFSTNEEISDSIRPLLRLGREHIQRGQRLDRALISSLEQDPLLSERLRRLRTIPGVGPITALTWALEIGDYTRFQSVKQAISYCGLCSAEKSSADKVMRMPISKQRNKHIQHVLVEAAKMAPRYSHELALLREKEIQRGNKNRATLAVARKMVAYMLAVERRQQDFVPAEEMAGTAAA

SEQ ID NO: 328311 - protein, 409 aa, unidentified
MEHVVIGVDPHKLSATIEVVDHHMRLLGSGRFSTDRAGYTAMRRYAKAWPGRVWAVEGANGVGRPLVQRLLEAGEQVVDVPAKLAARVRLFDTGHNRKTDARDAHSIAIVAVRTETLRVLHADGELEALRMLTDRREALTRRRVQTVDRLQALLAELLPGQAKRDITTGQAKAMLATVRPRDIAGKTRRRIAAEELAELIAVEAKIKKATAELKAMVLARDSRLMDLHGVGPVVAARILADVGDVARFADRNRFASWTGTAPLDASSGEQNRHRLSRAGNRRMNHMIHIAAVTQIRLDTDGRDYYRRKRADGKKPMEAMRCLKRRISDTIYRQLVADAERAALAKPLEAADAGPGGHCGASQESSAVDLPPHIDTSDQPLPGPADETLRPAPPTRKRTLKPVDNRREPQ

SEQ ID NO: 328312 - protein, 387 aa, unidentified
MSEMFNPHAPATAYDHNTTIVAVLELSGKNWLLGAVAPGLSRRTKRSFEARNVEAVVRALEQAKGESAKARFEVARIVVGFESGRDGFWIARALQQRGIEVYVMHAASIAVERRGKRAKTDRLDVDLLLTTLIGWLRGEPGRCTMAPIPSEEEEDLREAGRRRETLVHARLKVENQIASLLIRHGIEGFKPRLKNAETRLCELRTFDGRSLPANTMNSLRLLLAQHRLLSAQLKEIEEARQRVVNVAKPDRLQRMIQALAHVVGVGVETATVLVHEVFSRSFKDRRALGAFVGLTGTPYNSGSSKTEQGISKNGNARVRRMLSQLAWRWLGHQPESALAQWFNARLGGAKGRMKKVLIVALMRKLVIALWRLAETGEVPTGARLAPR

SEQ ID NO: 328313 - protein, 543 aa, unidentified
MSDSTLKPSIPEAAKDSISSTLSKDKAPIITVFEASYNSAVGIDVHLNKMALAYQRAVPESQDLIQDALTTKGTIEELNRAIDWIATKDPEVIIMESTGVYWVPLYLLLEERGFADKTFVLNAYNAKTALGKKSDVSDAKHLAQMGRLGAFVGSFIPCKYIRDTRIYSRHINALKKDAVTNKNRLHKLLNMGGIKASTVFSDIRGVAARTILDAVMRGDDAESLKCVIADNCKRLKAQPDEISQAISHLDITAISPLYFDISTKLDQIESEIERYEDLLYKRLKPYYDSIELLTSIPGISQKTACTIISELGDDWSAFTNSKAFCSWVGLAPGNNESAGKRKKAGITKGNKYIRKVLIEAAQSVYRMKSGHLKSGFDRFYSRLHSYHKAVVAIAHKMLRIAYALMTKRELYKDPTLDCVATDDVSAELKLFEEPNMVLNLDDSQDMQSLAVSESADTKSQSDIIIDNSSNASDGDSLEVSSKQVTTAGNTSLPNEQKLSKVVAKPISALKQSVDEPITPKQGSLFSFALGLDQLFSAEPLGQT

SEQ ID NO: 328314 - protein, 347 aa, unidentified
MRFYTQQHKFYCGIDLHTKNMFVCIIDAGGNVRVHQNIHTNQEAFLHTIAPFREDIVVAVECMFTWYWIADLCIQENISFVLGHALYMKAIHGGKAKNDKIDSLKIATLLRGGMIPQSYVYPARMRATRDLLRRRNHLMRKRAELFAHIQNTRSQYNLPDPLGCIAKPQNREGIVQRFDDPSVQKSMAVDLEMIEAYDHILTQLERDIIACAKEHDLRSYALLQTIPGVGRILGLVILYEIESIERFPQVQDFVSYCRLVKCIKESNGKKYGSSGKKIGNAHLKWAFSEAAVLFLKGNEPAKKYLQRLARKHGKAKALSILAHKLGRAAYFMLKNKEAFNQKKFLGL

SEQ ID NO: 328315 - protein, 346 aa, unidentified
MNQIIRIGMDTSKHIFQLHGVDAAEQAVLRKRLRRKEVLAFFAKLPPTVIGMEACGAAHYWGRELRKLGHEVKLMAPQHVKAYVKRNKNDGRDAEGTCEAMGRPTMQFVPVKTEEQQAALMLAGVRQQLIARRTQLSNAIRGYAAEFGVTAAKGLDKIEPLLARIAQDESLPALARELFAIEGREYAQVQAELKAIEAKLMAWHRANAASRRLAQIPGVGPIGATALVMKTPDPRAFSSGRHFAAWLGLTPKDHSTAGKTRLGKITRAGDEVLRSLLVAGATAVIQQVRRGRGHPSPWLVALLKRKPPKLAAVALANKIARIAWKLMTTGESYDGARMPGASALAA

SEQ ID NO: 328316 - protein, 346 aa, unidentified
MAVYIGVDFHARVQTISYLTTEDGAIEQVELHHLKDDVRGFYQQFTGEVIVGFETSGYAYWFEEMLEELGHRVWIGDPAEIRRLARRRQKNDRRDANLILELMMRGDFPRLHRQSRESREVLQQLRYRQRLVKMRTMTINTLRFMAMSRGVSVRGHLSSRVTQERMKAVPLTLVLSQQRDELLGLVRDLTQKIAGAQQWLEQQARQDSQVGLLMTHPGLGPLTALCLVHTLSPINRFHNGRRVTGYVGLDPMEDSSAERQRFGAISKQGSRLLRFLLVEAGQVAARQDHDLKQFYWRVQLRRNRPKAKVAVARRLLVRAFIMLRDQIDYAEFLRRGVAARSSRTSP

SEQ ID NO: 328317 - protein, 358 aa, unidentified
MNRKIQNYILKGKDIFVGLEDSKKTWKVCVRSNGDVVNEASMPACYDVLKSYFHNRFPECRVNVMYEAGFRGFNLCDQIIADGWNCVVTPPHTVTEEKCNRKKNDRIDCRRLAKNLENRDYKECFVPDKQLREDRQVSRLYGQVQRDIVRICNRIRRTIENHGIDDQFPSGRWYKRHYQELKFQLERMDISDSLRFSLDILFNELNFLQNTKKEIFKEFSRLRASDRYKEDVRILKSAPGIGPLTAIRLVLEWGDLGRFSRNENFASFLGLTPSEYSTGEQERKGHITKQGNRWIRSWLIECSWVSIRHDPALLAKYDRVFRQCGSKKKAIVAVARKLAVRLRALLLSGQEYRIGVME

SEQ ID NO: 328318 - protein, 390 aa, unidentified
MKFVGIDIGSEKHVVAIVDESGKTLQKPMPFSEDASGYERLRVMIGEPADAFVAMEATGHYWQNLFTHLHAAGFTIALINPSRTARFAAEDMRRAKTDALDALGIARFAQQKRPAPTPMPDAATLELRELMRLRDRLVQDLGDRVRQVHRALDLTFPEFTEHVSDIASFKATALLLACPSREAFRTAEPGALAELKYDGRRAVGTELANALCEAAKTSVGSHGGTPYELQILYACEDIATLRTRIKKLDDDISASLDRHEVGKLLTTIDGVGDNTAARMIASIDFDAFRHVRPLAAYVGVAPLVNHSGKRQPLRGHACTMGDADLRAKLWMPTLSAVTKNPWLKAFYDRLVAGGKPKKLAIIASMRKLLSAMVSVARTRKPFVPKLAVAA

SEQ ID NO: 328319 - protein, 387 aa, unidentified
MGRAEPHTRGRVMEHHSEAFVALDTAKLRNAVAIADAGRNGEIRYLGEFDNTEVGTRKLVAQLASKHARLTFCYEAGPTGYGLHRLIKSLGHDCMVVAPSLIPSKPGDRVKTNRRDAVNLAKLLRAGELTAVWVPDERHEAMRDLVRARDAAAKDYRIKRQNVSSLLLRVGRHYPGKKTWGQAHTNWLTSLKLEHREQRIAFEEMLLAVRQVRERIERLEQAMREAVADWSLAPVVEAVQALRGIDMVGAVAFLAELGDLSRFENPRQLMAYLGLTPSERSTGESVKRGGITKAGNTRARRLLIEAAWSYRFPPRVSKDMQTRIGAAPRTAREIAWKAQMRLCGRFRILTRKGKRPTIVVTAIARELSAFIWAIGREVVGSHATANQ

SEQ ID NO: 328320 - protein, 355 aa, unidentified
MSSEKYIGLDVHQATISVAVLDSTGKLVMESILETKAATILEFLAGLRGTVSVTFEEGTWAAWLYDVLKPHVAKLVVCNPRKNALLKDGNKSDRIDAHKLAELLYLNKLSSVYHGETGVRMLRELARSYLTIVKDLTRVMCRLKAVYRSWAIPCAGRDVYYTRHRDEWLGKINEAGVRRRAERLYQQLDMLQYLRQQARRELLAESRKHAITVKLRQIPSLGPIRSALAVALIQTPHRFRTKRQLWAYSGLALETRTSAEYCYVKGGLRRSKKQISIRGLNKDHNHDLKGLFKGAATRASVLPGPFQDFYQRSLAKGIKPTMARLTLARKIAAITLTLWKKGENFDADKLKSQAA

SEQ ID NO: 328321 - protein, 312 aa, unidentified
MEAKFVGIDVSKATLDVDCLPVSTARQFSNDAGGIAALVQWLLGSGVERIVVEATGGYEIAVASALAAAGLPVVVVNPKRVRDFAKAQGVLAKSDRLDARVLALFGERIAPPVRALPQAAQRELTELLDRRHQLVSMRAQEQARLATVLPVARGDVEQHIAWLDQRIRKHETVLLKRLRANEIWDAKVKLLDSVPGIGPVNLFTLVGRLPELGTLNRQQIAALVGVAPFNDDSGKRRGQRYIRGGRAEVRCALYMATLTAKRCNPVIAQMFERLIAKGKPFKVAMTACMRKLLTILNAILKSTQPWENRLAT

SEQ ID NO: 328322 - protein, 388 aa, unidentified
MRNDPVPTKNVATSSRSKSKTQREFSRRPEPGVRSKLGVAKPTRKRQKETPVEQVQQYVGIDLHRRRSVIVRRTESGETLDTVRIDNDPVTLAAELAKAGEHPEVIVEATYGWYWAADVIQECGGNVHLAHPLGNNWGNRRVKNDERDATDLVDLFRMGRLAEGWVAPPALRELRELIRYRAKLVHLRSNLKAQVHAVLAKEGVVVPMTDLFGVGGQRLLDEVKLGRAYRIRVESLRDLIKLCDREIAILEKETAPFFAGDLGYHAVQAIPGVGPVLAAVFVAEIGDVSRFTSARHLTSWAGLTPTHHESDKKVRRGHITKQGSRLVRWAAVEAVSRQRGDTPIRAHHQQVGERRGAQIGRVAAARKLLILVYYGLRDGEIRCLAKAG

SEQ ID NO: 328323 - protein, 321 aa, unidentified
MDMEVFVGIDVSKDTLDVAVWPQEERMSFAQTDDGLSLMADFIQPFSPCLVVLEATGGLERAAVATLAARSLPVVVVNPRQVRDFAKATGILAKTDKLDALGIAKFGQAIRPELRPLKTMEAQQLEAILSRRRQIVQMLTAEKNRLHSAPGWTREDIRLHITWLEKRLEKIEKELGEMIRKSPVWRVKDELLRTFKGAGPVLSQSLLSDLPELGSLNRKKIAALVGVAPMNRDSGKFRGRRRVLGGRADIRSVLYMATVAAIRFNPAIGAFHERLIKAGKAPKVAITACMRKLLTILNAMMKNQTPWRPLTQNMLDMQHSC

SEQ ID NO: 328324 - protein, 441 aa, unidentified
MPMTFARLLDPSFEDDDDPFRHYDVRGEPLEDRLYLPCGIDPHKKVCYAAFVHPLPHRQEILSHRSIPNQDLQSALWLVREGQRLADHIDAKPIYVFETSGPYWRPYRLFLHQLGLPTATVSGRQTKRAGGTGTRKTVNDLKAAFLIAKIFKQGESHASRVPPEPLASLREYTRLHFFFVKHSVAIQNRMFDIRYQIHPGFAGRDGLLSKPTIPSALALAKQEWVHPAKLLKADHNELAHLLRRASRGKLGDQLATALHHSALTVFLAPYAVDALSFNLRMLAEAYQHIHHYILPPIRTRIDECLSQLPFEQYLSEIPYVGPVTAGTFLGELGLSSWFKTVDSVVAWFGFDPSISESADHETGTSHLTKRGTKYGRRVWWLLARNWSRYVSQGCRMFKKEFYVNKLSYDGAICVIAAKLVRIAFAMARDGAHFDMNKAFPH

SEQ ID NO: 328325 - protein, 419 aa, unidentified
MKLFVGLDVSKAKLDVCFLSREDDTNAILLQKTVANSDAGARKIKEQILRFHEELEFTKIVVGMEATGLYSTHPALFFSNDPDLQLLNVQTIVENPRVIHRFSKVWTEEKNDKLDAQLIAEFLSTGKHSDAQPREEKFVALLRLTRSRYQLVRQLTEAQQHYVENLYYKCNTLTTKLEEEEISTSVFSSTMIQLMGGDIDMADLRTMKTADLAAMLQTFGRGRFKDPIQLAKAIRKSINDSYRLGKVAQDSIDINLGVQMRVIRSFQTEINTVDRAIENIMETIDVAQSLLSIPGIGPVYAAGIIAEIGQIDRFDHESKLAKYAGLYWPKHQSGKFQKENTSMSKSGNRYLRYYLVQAANSVRRHIPEYKDYYDKKYNEVPKTQHKRALVLTARKLVRLVFALLSNRQLYVARSEATES

SEQ ID NO: 328326 - protein, 424 aa, unidentified
MKVTYQTCCGVDVHTSFLVATIVKTTGGIEPSYQKKRFSTFNNSILEFKQWLLDNDCHDVCMESTGKYWVPVFNLLEDDINVVIANPKWVKAAKGNKDDTKDSKWIGDLFRLGLVKGSYIPCKKVRILREYTRYRYKLVSCRSSEKNRYQNALTVCNVALDSVVSDIFGKSSTSIIDYLLEQSGSSINHEEIASKLLRSLKSKEDAVIESVEGYQMTDAQKYRMRLVRAHMDYITAEINDVDKMIENMISSNTDFENAVQFLCTIPGVKRDSAITIISEIGTDMSQFSSSKRLCCWAGLTPGSNESAGKKKSVRITRAGVYLKPALVQCAHAAVKSDKSPYYKKKYESLVKRRGKKRAIIAIARMILTAIYQMLSTGEQWNPSNLYKIDMPVALVEKQKAKAIKQARKLLQREGLLPPDEPLAS

SEQ ID NO: 328327 - protein, 340 aa, unidentified
MFYVGLDVHVKYITVCILNCNGKVHRRCTLRSISEVVATLDALSGPCQVCFEASTGYGFVFEALSPVAKHVAVAHPGLLRLIYRSKKKHDRADALKLAKLLFIGEVPAVHVPSANTRAWRELITFRRKLVEKRTRAKNGLRCLLRSLCIKAPAAAKLWTRKGIRWLEALSFDNAMQALKRDLLLVEIETLNEQVKRVERELGRYAENNMAVQLLRSIPGVGPRTAEAVAAFIDDPHRFANSKRLGSYFGLVPMQDQSGSKNRLGHITREGSATVRHLLTEAVWQAARRSPTIKAYLERVQRDDPDRRKIAIVATAHYLIRVMWSMLKHNTLWKETVALAT

SEQ ID NO: 328328 - protein, 392 aa, unidentified
MDNIMRQSTSVQLNRLFVGMDIHKDNHAAVAVNCFGLPLLEQELGNEIRDFNNLIARVQTIAKERQLNPVFGLEDTAGSGELLARYLFNQGYEVKTINPVLVKRERDYETHPEKSDLADALGVAKVLIQRIDNVPDYNISETTEVSRDIRALTKDRETIVLEQTRLKNQLHALLHHSFGSMYKSLFRDVFAKKALLFWHNFPSAQILKSSRKRNTAKPDWITRRSADELPHASETQANQIRRKVKRLLAIREELNEIEKELDGLLGQTGQKLDTLPGCGPTLSAVVLAEIKDINRFSSPAKLAKYAGCAPRKLESGKRRRHVKTRSGNRRLNKALYQIALTQISNQGILKAKAYFQKKVNEGKSKKHALTCLKRQIVDIIWSMLKEKRAYYS

SEQ ID NO: 328329 - protein, 368 aa, unidentified
MRMDVIGFVTFIGVDLHKCTVTLRAVRADGELLGQLKCDTKCIERIAEWIKSLPGPKWLAVEACPFVEWFIDRFTPCVDRLDIADATELSMRRGKRRKNDPNDALDIALRLARGECPLGYIADPQLMQLRKFGRHWRQLSRSLGKAKQGMKSMLNAANIRGPQFDGPRAHRWFLTFGGLLQPAQRLAFGNYLDQILLIERQREILRREMLTAARSPQFAATEQLLKSVPGIGPIWALIIASEIGPFDRFPNADALEFWAGMTADLKESAGRTQSGNITKAGSATLRWALCQAAVTLCQSDAKQEATRQRFIARMPRAKANVVMGRRLLRTLYAMVRDGKPYQCGERRDRTKAANKAKAKRKARTVQPG

SEQ ID NO: 328330 - protein, 362 aa, unidentified
MTNFIFAGCDLHEETLVNRIAIGQEPSERKTVGNSRGGREKLIAALKRESDKHGGARIIFGYEASGQGFGLHDQMVEAGIECYVLAPTKMESSVKQKRNKNDDRDAERILKRLRAHKLAGEELPSVWVPDPQTRDDRETVRARQDLGDKLSSVKVQVRSLLQRHGIEKPTGVGKPRTKSHQQWLEQLSCDSQQGIGVRTALGSLLRQVRHLEQEIQQLDEAVDQLSRKPHRQAVVDALDQETGIGRLTATAYAVEVADFTRFRRGRQIGAYWGMTPSSDESGEVNDRKGHITRQGSPRIRKLLCQATWYRVQKDPQVRAIYQRLVIRNPKKKKIAVVACMRRLAVRLWHIGRQAQLAMKEAK

SEQ ID NO: 328331 - protein, 332 aa, unidentified
MMYVGIDVSQGHLDFALLSSDGEHVESAQVGNDEKAIIKLVRSWEKQHGFDREQSLFCLEPTGYCSYLPLCVLMGVHARVWLAHPTDIKQSMGMTRGKNDRIDALRIAQYAWRFRDKVRLYTADQLRMNKLKQLLMKRRQLIEAKGKLTVQLGTLTLKMHKDLRASFNRMDKAQARVIDAAMKQLEGMIQAEVQADDRTRRQYALITTVPGVGPVLATTLLAATDAFTRYATPRQLACHAGTAPFENSSGSSVRGRTRTSPQANGGLKSLLHMGAMVAVRTDHELRTYYTRKVAEGKPKMCVLNAVRGKILHRVCAVLRRDGPYVRTMVASV

SEQ ID NO: 328332 - protein, 385 aa, unidentified
MATSTTSRIEQDSLPQPTLYLAFELGQQTWKLGFTIGVAQQPRERTIPAGVLETLQQEIARAKQRFGLPENTRVVSCYEAGRDGFWLHRSLVAHGVQNHVIDSASIEVNRRQRRAKTDRLDVRKLLTMLLRHTAGEKKVWSVVRVPSVDEEDRRQLHRELTTAKQDRTRVINRLKGLLAGHGVQLALQGDVDAQLEQVQQWDGSPLPSALRTRLKRAWQQVGFLTTHIQTLEAERRALWRRREDPVIAQVRQLFTLRGIGVNSAWLYVMEFFAWRDFQTPKQVGALAGLTPTPYQSGQSRRELGIAKAGNRHIRAMAIEIAWAWRRFQPDSHLSQWYERRFGAGSARLRKLGIVALARKLLIALWRFVKTGVLPEGAVLKTAPSQ

SEQ ID NO: 328333 - protein, 371 aa, unidentified
MKKDSTTKFIGLDVHSKTISVAIADEGRKGEVRHYGTIENTFGAIDKVIKKLTVTGTELKFIYEAGPCGFALYRYLTGNGFKCIITAPGLIPKRSGVRIKNDRRDALTLARLYRAGELIGIYVPEPEDEAIRDLARARDDARVAERKAKQRLNSFLLRNNLIYPGKTKWNRTYFDWLGLVGMKYPAQKIALQEYIEAVHECNGRVKRLSEQISLAVEEWRMAPMVKALQALRGVSLICATVTVAELGDLSRFNKPKELMAYLGLVPSEHSSGESIRRGHITKTGNKHARRVLVEGAWTYKHHARVTRPLIKRQRDLPKNICQISWKAQLRLCARYRRMMVRKKPMQVVVIAIARELAAFMWAIAQEVKAAA

SEQ ID NO: 328334 - protein, 369 aa, unidentified
MKKVNSMETTTAAVGIDLGDRFSHFCALNDAGEVVARGRVRTTAEAIAEQAAAWRGARTAIENGTHSGWVSRTLTAAGCLVTVANPSRWRGTAHPGKNDRNDAEALARVVRVDPQLLFPIQHRGQQQQQDLAVIRSRAQLVQERTRLINSARGLVKSLGARLPRADAAYFPRKTWSEVPPPLRPALAPYYRIVAALSEEIRALDGEIEQLSRHSYAETASLRSVPGVGPVTALAYVLTVGDPHRFARSRDAGAYLGLRPKQHQSGERNPQLGIAKNGDRYLRSLLVECAHHILSRAPDSALKQWGLRLARGGRGVKRRALVAVARKLAVLLHRLWVTGETFRPFPTAVPEPTVDAGLRAHPSLGAAAMA

SEQ ID NO: 328335 - protein, 413 aa, unidentified
MSLTPEPVQRRVCAGIDWASIDHAVCILDGQGAVLERFVVVHDAAGLKTLVRRLLKAGVDEVGIERSDGPVVDALLQAELAVLVIAPGQLKNLRSRYGSAGNKDDRFDAYVLAEVVRTDRARLRPLVRDSAATTAMRSTVRARRDLVEHRVAAANQLRAHLQLVFPAAAGLFAAIDSAINLTFLERFTTQTHADWLSPTRLASWLSKSAYSGRTSAAVLHTRLLAAPRGTTGTDAEVHALTTKAYIALLRTLNTQIGALEDNLATQLTSHPDTHIFASLPRVKTLRTARLLAEIGDARGRFPTADSLAALAGVAPSTRQSGKVKTVTFRWGANKQLRDALCDFASDSRHDNPWAADLYTRAIARGHDHPHAVRILGRAWAHIIWACWHNNLSYDPSQHRALQNILANTTAQAA

SEQ ID NO: 328336 - protein, 373 aa, unidentified
MQHYTTLFVGLDVHKDFISVAYAPEDRSAEVAFLGPVGTRQCDIDKMIRTLQSKAQQLVFAYEAGPCGYTLYRYLTKKSLQCLVVAPSLIPRRAGDRVKTDRRDAVQLARLMRSGDLTPVYVPRVEDEAIRDLCRAREDATCDLKAARFRLKSFLLRLDIRYTGRANWNQVHLRWLSEVVCPTPAQQIVFQEYLRAVSQHVERLARIDAQLQELATSWRLFPLVQALQALRGVQFTVAATVAAELGDITRFDNPRQLMAYLGLTPSEYSSGGSRHLGGITKAGNGHARRVLIEAAWAYHYPAKVSRSIQLRQQNLPTPVQDIAWKAQIRLCKRFSRLTARGKNPNVAITAVARELAAFMWAIANQIQQPAYSL

SEQ ID NO: 328337 - protein, 353 aa, unidentified
MNNRKYIGMDVHQASISIAVSDAAGKVLMECIIETKAATVLEFIQGLRGSLWVTFEEGTSAAWLYDLLKPHVTKVVVCDPRKNALLKAGNKNDRVDARKLGELLRAELLTPVYHGESGVRTLRELSRGYLAVSKDLTRVMNRLKAIYRSWAIPCAGQQVYSPRHRAAWLEKLREAGVRRRAEQTYQQLDFLMDIRKETRKELLAESRNHPARKLLEQIPRLGPIRVGLLIALIQTPHRFRTKRQLWNYCGLGLRTRSSGEYRYTGGQLQHARKPPALRGLNVNHNHDLKHLFKSAATQAGNDPLGAFYQNLLAGGMEPPMARLTLARKIAAIALKVWKKGERFDPAKLKQQAA

SEQ ID NO: 328338 - protein, 435 aa, unidentified
MFVVSNDLLTTALERRTVMNQYAACLGIDWADKKHDLCLFDATTGKKTKQVLPHTPQAIAEYFTSLRARYPGQQIAVGLEQSRGPLLFALLQYDFLVIYPINPTTLAKYREAFSPSRAKDDPTDAEYAAELLMQHSDRLKAWHPDDDQTRTLRYLVEHRRRLVGDRTRISNRMTSLLKCYFPQVLSWFPDLATVLVCDFLCRWPALEQLRGVKRTTLLNFFRAHHSVRSDTLEKRLAAIKDSMPLTTDRAIINSSVLMITALAAQLKTTIAAVRQFDLEIEKLCAAHPDFPLFQSLPGAGEVYASRLLAVMGTKRDRWTTAQELACLSGIAPVIERSGQSTWIRWRYFCPKFMRQSFHEYAGESVKHSFWARAYYEQQIGKGKSRQAAVRALAFKWIRIIWKCWQTSTPYSEVKYLEGLRKKGSPLLSYAAKNAA

SEQ ID NO: 328339 - protein, 368 aa, unidentified
MNTVKFIGMDVHKKTITIASADAGRDDQPRLYGTIANDLNALDKFCRNLISTSTQARFAYEAGPCGYGIYRHLTQKGFDCMVAAPSMIPKKSGDRIKNDRRDATNLARLHRSGELTAVFVPNEQDEAMRDLTRAREDAVIATKKAKQRLKAFLLRNRLIFNGGSKWTKAFFRWLSDIAMSHPAQQIVLQEYIDTVIECQNRVDRLSDQIRQLVPEWRLAPMVSALQAARGVSIITAVTVLAELGDLTRFKKPTQLMAYLGLIPSENSSGPRIKRGGITKTGNGHVRRTLIEAAWSYRMQARVSRVLLKRQRNLSDQVCQIAWKAQVRLCARYRRLVAKGKSKQKVVTAIARELCAFLWAIAKQVPAVT

SEQ ID NO: 328340 - protein, 387 aa, unidentified
MSQTVAALIPAAVDYERTLVLAIEVSNKSWVLAAQVPGLPHTKAKRTIDPEAEALLAAIAGYRSRAVATGRSIERVIAVYEAGWSGFWLARWLMRHGVEVYVVQPSSVPVDRRMRRAKSDGIDSELLLRTLLAWLRGEPRVCSMVPVPDEADEDARRCVRERTELISERVGLTNRIGAVLATLGVGDYNPLLRNRSLRLVELRTALGEPLPPNARAKIERLLARLELVLTQIAELERERDAVVETEASDQASKMIQQLTALRGIGVQSATVLVREAFVRRFANGKALGSYAGLASSPYSSGGIDREQGIGKAGNRRVRTVMVELAWLWTRYQPGAAQVRWFRERVGSTGRRVRKIMVVALARKLLIALWRFVIDGVLPEGAVLKPAA

SEQ ID NO: 328341 - protein, 406 aa, unidentified
MLNKLYAGIDISATDATLCCLDSAGKQLQPSQSFENNLSGAAQIVDVLVNFGAKEIHVGLESTSVYGAHLRDFLLTSPLLQGGCFVYEINPALVNGFKRSFPKKPKTDNVDAWLIAERVRFGHLRPFSEKRLTTQPLLQLTRYRLHLIKLLTMEQNRACNLIFLKFSNYRKDTPFSNTFGKASLAVLGDLFPDDLINMGLEQLVTFITQNGNNRLNDPENMAKELKTIARNAYRLNPKMKDSVHVALAMTIQNIEYFKNQVKRLDKLIARELKAIPQTLDTIPGIGPVLAAGITAEIGDISRFDNEASLAQYAGLTWSRYQSGNFEAEERRLTKAGNRYLRYYLVEAANSLRVHNEEYKAYYYSKYKEVNKHQHKRALVLTARKFVRLVFALLSKGQIYQKQEVKM

SEQ ID NO: 328342 - protein, 382 aa, unidentified
MPAYADPTPTPISADTIFLAFELSGTSWLVALHAPDADKVERHRLSAGVAAEVLGLIARTKARVTRRLGTTPRVACCYEAGRDGFWLHRVLEAEGIASHVMDPTSLQVDRRARRAKTDRLDAQALLRALMAWSRGERQVCSMVRPPSPEHEDERRLSRERGTLLKERLRLSNRIKGLCAAQGIYHYEPLGADRRERLARLVTGDGRALPGRLAAEIGRQLDCLELVLRHLAEVEAARDARVAQAREEGGSKLAALLRLKGIGPELATVLELEVFHRHFANRRDVAAYAGLAPSPYASGGTSREQGISKAGNRRARKALIELAWLWLRHQPESALARWYRDRVGTATGRVKRIAIVALARKLLVAIWRYVETGLVPAEAAVRT

SEQ ID NO: 328343 - protein, 344 aa, unidentified
MNKVTIGLDTAKSVFHLISKNTQGRILNKKKLKRAQVLDFFANLPPSIVVMEACGSSHYWCRGISRLGHEVKAIPPQYVVPYRKGNKNDYNDAEVIAEAAQRENMRFVPLKSQSQQDVQLVHRVRERLIGQRTALSNQTRGLLSEYGIVLPKGLAQLTKGLPYILEDADNELSIMARHQFSDLLEELKSLQDRIKQVDSQIKTLVKNLPTCQRLISMTGIGPLIATALYAGIGNGQAFKSGRHLAAWFGLVPKQHSTGDNPRLLGISKRGNTYLRTQFINGARAALRCIADKQDTVSQWCRQCLERMSFNKACVALANKMVRMAWAMLHYQQDYQPGHVNKAIS

SEQ ID NO: 328344 - protein, 356 aa, unidentified
MNKSNKLDFTGQPIYIGLDVHKKSWSVSIFTQHCEHKTFTQPPEVDKLAYYLGRNFPGAQYYSVYEAGFSGFWIHDQLRAKGIDCIVVNPADVPTRDKERTKKRDPVDCRKLARSLRSGEIEGIYVPSRGKLEDRSLIRTRQSMVRKQTRCKNQIKAILFFYGVVIPEEREMGHWSRRFIRWIERIRMERTSGDIALKAHLEELSHLRQLIASLNRAILRLARTEEYRSLVRLLKSVPGISTLTAMILLSELGEVTRFPSLDELSCYVGLIPDTQGSGEKEYVGGITQRRHSQLRWLLIEASWVAVRKDPALLMTFQEYCKRMRKTKAIIKIARKLLNRIRYVLKNQAEYVPCVIE

SEQ ID NO: 328345 - protein, 395 aa, unidentified
MVAPAHWREHDSRILGIQPHAHFYQYNVITMFASCDRKTTLFVGIDVHRDTHTAVGVSPFGEKLFELTVGNYEKDFRLLIQKVDEVSEQALLSPFYGLEDCHSYGERLSTHLVQEGLRVVSVPPILVDEKRKYETHPEKSDPLDALGVARVMIQRIDSLPIFTLTEESRKAKQIKELSMDREFLVCEQTRLKNQLHTLLHRLWNTGYRVKFKDPFSKKALVFWSKHVPKESDPFLVRSMKRKVKRLQDIKEEIVELEYELETLLKTSGQTLNTASGVGITIAAEIVGEVGDISRFHSPAALAKYAGCAPRECSSGKTSRHRKTRSGNRRLNRAFHRMALSQISRMGNPVAQKYFKRKVSEGKSKSQALVCLRRQMVNIVWMMMKHKTVYRYPQEH

SEQ ID NO: 328346 - protein, 324 aa, unidentified
MTDPALGIDIAKLKFNACLILPSGKLKHKLFPNTGAGFEQLRDWLSKQRVECVHACLEATGTYGDSLSLFLHQAGHTVSVTNPAAIKAFAGSRLSRTKTDRVDAELIARFCLAQEPPAWTPLPAEVRELQALVRRLESLIEMRVMEENRLSSIITVDSVRHSVEEHLTYLNQEIKRTEELIRQHINSNPTLKQQSALLDSIPGIAETTAAVLLSEITDITQYRSARQVAAYAGLVPRERQSGTSVRGRTRLSKIGNARLRRALYFPAITALRCSPFFQQWAEGLRGRGKSKMSVICAVMRKLLHLVYGVLKTGKAFDPEWAKTA

SEQ ID NO: 328347 - protein, 452 aa, unidentified
MPARKDELMHFNKLLQMLDGSSYLSVGLDVGADFTWMSIALPNGSFPWKPFKIIHHDPYSRELAVAKIKEAQELYSLKSRCFLESTGIYHIPLLCFLRDKGLDCSVINPIITKNSTNINIRKLHNDKFDSKKAALVGLNASLKTSIIPDEDIADLRNLVRDYYYFKDLQSSVVLKLNAELKVSFPAYLKVFSKVTTQSSLKLLGAYPLARDMLAAPGEELVGIIRSTARFGETYALSRYEAILEAAKDAAIFGRALPSHAVRIRLYIESYQTYQKHLDTLLLALHEAVDRLHGTPVYDRICLLQSLRGVGFLSAVVLMAEMGDFDLFSSPKKLYAYFGLDPAVKQSGKLNGDKVHMSKRGSSLARRVLHMVALNNLKVDKGTKTPVNPVIYNYYTGKCANKKKNVAVGAVMHKICNIIFAMLRDNKPFEIIPPEVHCKQYVLNHTASVTNAA

SEQ ID NO: 328348 - protein, 423 aa, unidentified
MQMEKREEIEFAALVGLDWSEEKHDVKLCDLTNGNRVESVKIGNTPEEIEEWVLSLRERFNGGYIGICLEQSKGMLINKLLMYDFIVLYPINPAVSAKYREAFFPSKAKNDPVDAELLLELVVKHRDRLTAWRPDSEQIRALEILTENRRQLVEERKSCVQRLQSVLKKYYPQAIEMCGGDLSKEMACAFLMKYESIATLKKARPQTLRKFYYSYNCRSEEAILRRLEIHKNLKEVTDEAFIIKSYILAVKGLVKQIRSLNKSIEEHEKEIASIYDGLEDAEVFNSFPGAGEVIAPRLLVAFGSQRDKYPTPASIQNYSGISPVTEKSGKNEWIHHRWRCPTFLKQSFHEYAQHSVGKSVWATNYYELKKKEGKKHNTIIRSLAYKWQRIMHKCWQDKTPYDEQKYLRHLQKKGSPYAPKIAA

SEQ ID NO: 328349 - protein, 386 aa, unidentified
MSRPSNILLRAINYDHTLVLAIELSNKSWVLAAQVPGLPQTKAQRTIEPNKNALLAAIDGYRARAAAVGYAVDRVITTYEAGWSGFWLARWLVAQGMEVHVVQPSSVPVDRRLRRAKSDGIDAELLLRTLLAWLRGEPRVCSMAPIPDEADEDARRSVRERTELLSDRVGLTNRIGAVLATLGAGDYNPLLQSRRRRLTELRTGLGDPIPPNALAKIERLLARLELVLAQIAELERERDEVAAADAPDRAGKMIQQLVSLRGIGVQSATVLVREAFVRHFSNGKALGSYAGLTSTPYSSGGIDREQGIGKAGNRRLRTVMIELAWLWQRYQPGAAQVAWFRDRVGSTGRRVRKVMVVALARKLLIALWRFVIDGVVPEGAVMKPSI

SEQ ID NO: 328350 - protein, 474 aa, unidentified
MQPKPQEKTTKDTCRTEPGHWHEMNRKQRRETMRKIQSDDLSLEVVHPDAAGIDIGNESHYVAVPPMRDSQPVRRFGCTTAELKAMAQWLKQCGIRTVAMQSTGVYWIAVYDILEAADLEVYLVNARERKNLPGRKSDVQESQWLMKLHTYGLLRNSFRPSQQIRMMRTYWRQRNDLVQAAGRHILRMQKALTQMNIQLANVLSDVSGMTGHGERDPHKLAEFRDPRVKASKHEIALSLEGNWQEDLLFVLKQEQDGYEFCQKQMLECDRQVEQYLQQREDRSKGTPLPEEKRKGRLKKKKGNAPQFDLRGELFRMSGVDLTQIDSIDVMTATTILSEVGWDMGKWETEDHFVSWLRLCPDNRISGDKIIGKGRLPTKNRVSISLKMAASTLRRSNTYLGAQFRRFRTKLGSPIAIKAMAAKLARLVYRMLRHGMKYVDQGAKFYETQHRNLQIKQLKWKAAKLGFQVVQAPAA

SEQ ID NO: 328351 - protein, 414 aa, unidentified
MEIILDRCCGLDVHKKSVVACVLTATVGEPARAETKTFGTMTADLEALAAWLRERQVVDVVMEATGVYWKPVYNVLETAGGFRLVVGNAEHLRAVPGRKTDIKDAQWLAQLLQHGLVRASFIPDREQRELRELTRYRTALVRERASEANRLQKTLEAATIKLAAVISDVTGVSGQAILDALVRGEEDPAKLVDLAYPTVQKKREALERALVGTVSGTLKFIVERQLRHIRELDGVIKECDAKVSELTRPFVGEIARLAAIPGVGLRTAEVILAELGVDMARFPTDRHAAAWAGVCPGQNISAGKRRKARARQGSPWLRGALAETAWAASRSRDTYLAAHYRQLLARRGKKRAIVAVSHTILVIIYHLLKDGTECTDLGPAYSLTRNADRVRRRSIQQLEALGYHVDLSRPEDAA

SEQ ID NO: 328352 - protein, 417 aa, unidentified
MAETFEWFVGVDWGSEVHAVCLIDGRGRIGGTRSVAHTAQAVDETVRWVCEQAGVGPAAIALAIETPRGVLVDTFIERGFPVFAVNPKQLDRFRDRFSPAGAKDDTADAHVLADALRTDRRAFHQVRPDDPLIIQLREVTRLREDLLEEERRLTNRLRDQLYRVDAPWLRLCPAADEPWLWTMLAEAADPATWPHLTRRRIAAVLRAHRIRRLSADDVLHALGSPRLTTALGVTDAVATWLTAVMPQLQLVHQQRHTAEGHLDRLLARLASVEASAGETAEHRDVEILQSLPGVGRIVAATMLSDAPGPLAARDYDTLRAQSGAAPVTKRSGKRAVVQMRYACKAALRQALYHWARTSLQVDAAARAYYQALRTRGQTHGRALRSVGDRWLRILIAMLKTGSLYDATRFTREETSPT

SEQ ID NO: 328353 - protein, 401 aa, unidentified
MVSDFMKGRYNLMKIFVGIDIAKLNHFAAAISSDGEIILEPFKFTNDADGFQLLVSKLESFDKNSIIIGLESTAHYGDNLVRYLVAEFYQVCVLNPIKTCQMRKNNIRKTKTDKVDTFVIAKTLMMQDDLRFVSFYDLDMMDLKALGRFRQKTIKQRTRLKIQLTTYVDQVFPEIQYFFKSGLHQHAVYALLKEAPSPKEIASMHMTHLANLLKVNSHGHFTKELAKELRVLAQKSVGANDSAISIQITQTIQQIELLDSQLEKIEAEMTDIMKFNDSVIMTIPGIGYINGGMILGEIGDIHRFSNPNKLLAFAGLDPSVYQSGNFQAKTTRMSKRGSRVLRYALVNAAWNVVRNNATFKAYYDAKRAEGRSHYNALGRCAGKLVRVIWKMLTDEVEFNLE

SEQ ID NO: 328354 - protein, 359 aa, unidentified
METQSNKIDFSNQNIYVGFDVHLKSWKVTILTEKVAVKTFSQDPNPELLFQYLKRNFPGGIYYSAYEAGFCGYWIHNKLISLGVKNIVVNPADIPTTNKERVQKEDKRDSRKIARSLRNGDLKAIYVPGLKTLEDRGLLRTRATMVKDLTRFKNRIKSFLHFHGIDFPESFSNPKSHWSKRFITWLESIELTEESGKITLSSFIHQSKNLRATILDLTKQVQKLSQTEPYQNDVKLLRSLPGIGVLTAMTILTELETIMRFSNIDTLCSYIGLVPSTSSSGEEEKTGDITPRGHSVLRTAIIESSWTAIRHDPVLLKSHLDYCKRMEANKSIVRIAKKLLSRIKFVLKNKPPYVFSWVN

SEQ ID NO: 328355 - protein, 366 aa, unidentified
MKKVSTAAANEIRNFSEQKLTIGLDLGDRSSWYCVLDATGEVVLEQRLSTTAKAMKEVFRAMPRSRIALETGMHSPWVSRVLSELGHEVIVAHARNVRLIGESRKKDDRLDARTLARLARIDPQLLCPVKHRSARAQADLTVIRARAGLVRARTALINTARGLAKSYGERLRGCNPRNVNPEKASGLSPELQSALEPLLAAVESLSEQIREYNEGIEQLAQQSYPQVALLKQVKGVGTLIALTYLLTLEDPHRFRKSRDVGCYLGLQPGRRNSGQSEPQLHISKEGDPYLRTLLVQGAHHILGPFGADSDLRRWGLKLAERGGKNGKKRAVIATARKLAVLLHRLWVSGEVYEPLRNSSQLMPAAA

SEQ ID NO: 328356 - protein, 401 aa, unidentified
MVSDFMKGRYNLMKIFVGIDIAKLNHFAAAISSDGEIIIEPFKFTNDADGFQLLVSKLESFDKNSIIIGLESTAHYGDNLVRYLVAEFYQVCVLNPIKTCQMRKNNVRKTKTDKVDTFVIAKTLMMQDNLRFVSFFDLDMMDLKALGRFRQKTIKQRTRLKIQLTTYVDQVFPEIQYFFKSGLHQHAVYALLKEAPSPKEIASMHMTHLANLLKVNSHGHFTKEQAKELRVLAQKSVGANDSAISIQITQTIQQIELLDSQLEKIEAEMTDIMKFNDSVIMTIPGIGYINGGMILGEIGDIHRFSNPNKLLAFAGLDPSVYQSGNFQAKTTRMSKRGSRVLRYALVNAAWNVVRNNATFKAYYDAKRAEGRSHYNALGHCAGKLVRVIWKMLTGEVEFNLE

SEQ ID NO: 328357 - protein, 289 aa, unidentified
MRNSSVIGIDLAKHVIQVCKIDKHGELISNKAISPSKLKELLAKTVPSIIAMEGCGACHYWARLAQWHGHDVRVISPKKVKGFLQGHKTDANDALAIAIASIQVGMKFSQIKTEEQQSLQTLETSRKFLDKELVALNNHIRAYLYEYGITMRRGRKSLRETMAIVLDDLDTRLPSSLKNTLRLLWERYKLTVEQLTEAEKYKAHLVAQLEPCQRLMDLEGIGKVCASMLYANIGDGREFKNGRQASVYIGLTPKQHSSGGKTYMTGIDKRGGNKRVKGCALSGRLIGYL

SEQ ID NO: 328358 - protein, 320 aa, unidentified
MRNAVGLDISQNTFNAAAIVNGQCKQALFDNSINGFESFKAWLDGFDCELHICMEATGNYFEDVADYIGQFYIVSVINPYKISEYGKSRFHRTKTDKQDARLIAEYCHTAMPKDLPVRQKISIGHYRLKRLLALYDQLKTQKTAQKNRLKVAKDEFVRKIHKAQIQELDQHIQQVEAEIQAITNSNQDLKAVSDRLQTIPAIGKLTAAILTNYLLSGDFKTANQFTAFAGLNPQQKESGTSVKGRSSMTRYGNRRLKSALFMPAMVALNRNYFPDFVKRLKAKNKPKMLILGALMRKLLVVAYHVYKTQKPYNPERYKPA

SEQ ID NO: 328359 - protein, 402 aa, unidentified
MDIEDIDVFIGIDVGKSEHWATALSRDGQKVLDRALPNDEERLRALYKKLADHGNLLVVVDQPATIGALAVAVAQDMGITVGYLPGLSMRRIADLTPGSAKTDAKDAAVIAQAARTMPHTLRAVSTSDEDAAALSMLTGFDLDLARQVNQTANRIRGLYTQIHPALEAVVGPWLEHDAVLEVIAAWPTPADLKRAGKARIDARLKKQGCRRHAAWAGQIVSALKHQTVVVAGTDAAAVVLPHLARQLIALHAQRADVAAQVETLVQAHPLYQVLTSMPGIGVRTAAVFLAETLGKTFDTGAQLASYAGLAPVTRRSGSSIRGEHVSHGGNKRLKRAMFLSAFASLRSDPVSRAYYQRKRDQGKRHNQAVLALAHRRILTLHAMIRNGALYDPQPATKLPAAA

SEQ ID NO: 328360 - protein, 336 aa, unidentified
MPMYQLGIDVSKNTLDLCLLREGIKGRIKTRKLKNTADAAKVVAEWLKKQSCELGEVHIIMEATGVYHEPLAYGLHFAGARISLANPHRTREFARGMNILTKNDKVDAWMLACYGSLKEPEAWTPPPESVRYLRALLRRRDALVADSTREKNRLEKSVFTDSPDAVRASIENMLQELSNEIEHLDVLIQEHIKTHPELNQDFRLLTSIKSVGYLLGLNMLEILKSHSFESAEQAAAFLGVVPVERRSGTSVKGKPKLSKIGPPEIRTKLYLAALCGLRFNPVMKQMYTKLCQRGKSKMCAIGALMRKLVHWCYGVLKTQLPFDAEYNQQSHYKTTC

SEQ ID NO: 328361 - protein, 431 aa, unidentified
MTVTSTLYVGIDVSLDTNQVCAMNFDQVVFFNQSFKNSFDSARLLIDRILDTLHKEHLTHAIIVMESTSLYFFHVANLISVNNELNSFNCKVYCVNPKTTANYKKSFNEMSKNDPADAWLLSDFARVGRCKNLREWRGASYVALQRLTRYRFHLAQNLSKEKNYALNNMYLKFSQLRKKQGSGDGTNPFSNLFGATSMAVLTDFATVDEIIAMPLEELVEYLEIKSKKHFADSKDVARLLKKCAGDSYRLDRLSYDALNITISSNLRMIAMLEKELKNLDKQILDFVKGIDSNGVVSLRSLPGVGPVYAAGIIAEIGSIDFFKNDSALAKYAGIAWNESSSGKFISEDNHLINSGNMFLKYYLEEACNLMRQKDSVLRAYYSRKFEEATTHKHKRALVLTTRKFIRLVYRLLRDNKLYVNPETGEVKTLTD

SEQ ID NO: 328362 - protein, 355 aa, unidentified
MTDKRQKIIIGIDTHKDFHHVAVISVLGESLTDRKFDATPDGYASLIAWITDQGDVLRAGVEGTGSYGAGLTKRLRTAGLTVIDILAPDKQERRLRGKTDQIDAYSAARAVLARRATTVPKTRDGKVEALRILRTTRRMAVKQRTETMNQLHSLLVSAPEVLRAKLAGLKAKELAKACSRIRDREADDVVTAVTKDAARSLGHRFLDLTVEADRLEKRIRTLVADYAPELLAVYGVGPDVAATLLTVAGENVDRISSEAALAHLSGTAPIPASSGKTNRHRLNRGGNRQGNAAFHRIVLVRMVRHPETRAYVEKTLARGKTKRDTMRLLKRYLAREIFPILIAIQQRQAATQIAA

SEQ ID NO: 328363 - protein, 457 aa, unidentified
MKWYLGIDVSKGYADFALLSELLVQQEETFQLDDTKSGHDQLGIWLDTLFKRHPSLEIDCGLESTGGFENNWYALIIKLSSLLPIRATRLNPSVVKNASKAILNANKTDAESAKEIAGYLKRYEDQIDFAVRDNQYASFRSLQNHLELVTKQKTQLINELKQILYSSFPELQRFCKQGIPSWVLELLMLYPSPEKLVRQKPLKLARIKGITEEKAKSLIEKAQSTIASRSNSTYEYLITQLASEVKHKQEKIKQLKQYLEDHCKGKEKEWLESIIGIGAYSAAAIMIQIEDIRRFASPKELASYFGLHPLIKMSGDKRMVSRMSKQGRPAVRALLFMCANSAVRSDEHMRSIYARHRAKGKNHKQALGVIMHKMIRVIWGVLTHEKPYDSSIDLANQAKTNQNPVQDELKETENKRRMQKFDSEAPISRIATKKRKVHAASQVGEAELVRDLEHEPG

SEQ ID NO: 328364 - protein, 350 aa, unidentified
MMIGVDYHPSFQQIAFLVEETGEYSERRLNHSDGEAEKFYRDLQRRGVQVRVGMEATGYSRWLERLLAELGFEVWIGDPAEIKAKRVKKQKTDRQDAQLLLKLMMEDRFPRIWVPSPENRDLRQLLWHRHRLVQMRTRIMNQLQALAMNEGRRWKSKLWSEQGRAELENLALAPWASRRRHELLELLDRMNPTIEELTAAAEQEARKRPEALRLMTHPGVGPLTALAYVLIIGTPSRFHRGKQIGNYVGMIPSEDSSGGKQRLGHISKQGNSLLRFLLVEAAQAAVRNNPDWRRRYIHLAMRRDKSIAKVAMGRRLGVRLYWMWRNGCEYSPSMEFGSYAGQLGTGHGVK

SEQ ID NO: 328365 - protein, 351 aa, unidentified
MSHKTAATVALTIGIDTGKNTLHLIGLDDKGAIVLREKIARGRITARLANVPRCLIGIEAGMATHYVARELSALGHDVKQVPPAYAKPFRQGHKNDFRDAHAIAEAVQRPSTRCVPVKTDDQLDLQALHRVRSRLIGQRTAVINQIRGFLLEHGIAVRQGLRFLRQQLPDILAKRTDVLSPRMIRIMEDLSGDWRRLDERIQHVTEEIEVLAHGSESCRQLMTVPGIGPIIASAMVAAIGNGAAFAKGRDFAAWLGLVPKQMSTGDRTILGRITKRGNRYLRTLFMQGARVILLRPANWAKHSFGPWLTAAANRLHHNVLATALANKLARIAWTVLMQARSYEARVEPRTA

SEQ ID NO: 328366 - protein, 412 aa, unidentified
MELTAIYKRVIGLDVHQAKISACAVAEQADGKVTVESREFGGFKRDRRALAEWAKSFGPEVVVMESTGIYWKSPYAALENVGIAAWVVNARHVKTVPGRKTDVADAQWLATLARAGLLRASFIPPADIRHLRLIARQRQKLGGMLSSEKNRLHKLLADAGIRLNVVVSDIHGEAARAMVKALIEGQSITQILDLAGRLRASRADLFEALQPEELSGAHLFVLTEIMAHIEELEARMGRFEQALLAGLSPWMPQLVLLQTIPGIDVMGAAMLLVEISADMQSFGSAERLASWVGICPGNNESAGKRKSGKTRKGNAWVRRLLCEFAQAAARSRCALKDKFAALSIRKGHKKSIVALAHKMLRIVFAVLKSSQPYHDRAVDYEALSVQRNAPRWMKMLIKHGFLEAGTSPVAAA

SEQ ID NO: 328367 - protein, 411 aa, unidentified
MRLFVGDDWAEGHHDVEVMDEQGKVLARRRLPEGVAGMAQLHELTGRYLGEDGGDAQVAAGIETDRGPWVAALVAAGYVVYPVNPLQASRYRERHGVSGAKSDQGDSHMLADMVRTDSHQLRPAAGDSAEVEAIKVVARAHKTLIWERTRQVQRLRAQLREYFPAALEAFEDLDAPDALELLGKAPDPARAVRLTRAQVSAALKRARRHHIADKTTAIIAALRGEQLAQPPALTAAYAAAARALIAVITTLNEQVKALEGQVGEYFGQHPDAEIYRSQPGMGAILGARVLGEFGDDPHRYTDAKARKNYASTSPITRASGKKKVVAARFIHNDRLIDALMSWAFSALNASPGARAFYDEQRAKGLEHNDTLRRLANRLVGILHGCLKTRTPYDEATAWSHRENLPQSGVAA

SEQ ID NO: 328368 - protein, 342 aa, unidentified
MEYYVGLDVSLKQTSICVVDQAGLVVREGVVGSDPEAISVFVRSKAPGAVRIGLETGPTSTWLWTELKRLGLPVICIDARHAKAVLKMQINKNDRNDAIGIARIMQTGWFKEVHVKDIDSHSVRALLASRALLVKIKRDLENHVRGLLKNLGLVIGRATFNVFAVRAEELIEDRPDLVAAVRPLLEARNAVEQQVSELDRKVMKLARRDAQVQRFMTVPGVGPITALAFKATIDDPARFARSRSVGAYVGLTSRRHASGEIDWSGRISKCGDAMLRSYLFEAAGVLLTRVPKWSTVKAWGTRLAKRNGLRKAKVAVARKLAVILHRMWIDGTEFNWSKEVAA

SEQ ID NO: 328369 - protein, 337 aa, unidentified
MGEIIRIGVDTSKRFFQVHGVNAAEERVLRKKLQRSEVEQFFAALAPTVIGLEACGAGHHWARVFQRLGHEARLLPPQYVKPYVKRGKNDAADAEAICEAMSRPSMRFVPIRTAENQAELMLHGARDLLIKQRTMLTNAIRGHAAEFGIAGARGIGRVASLLERIAAAATVPPLAREIFAQLGEQLEQLEERLRALEKKLLAWHRSEERSRRLATIPGIGPIGASALAMKVPDPAAFRSGRHFAAWLGLTPKDHSTAGRQRLGVITRAGDETLRRLLVSGAMATIRHAKPGRASPWLLALLARKPKKLAAVALANRTARIAWAIMMRGEVYRRPMPA

SEQ ID NO: 328370 - protein, 323 aa, unidentified
MQGKVSFEQDATSAVYVGVDVCKEWLDIHVLPQAESRRFGNDKAGIRQLKRMLSRLRPDRIVMEATGKFHRPAHRSLSGDGFAVAIIDPWRARQFAGCNGFLAKTDRIDARMLALLAAVLRPQTSGPASADIEALQELVNARAGAQGELTVVKNRCKAADTAFLRAELRRVMRALEQDVERLDREIERRITAQPDLCRKAEILTSVPGIGRITAAALIAGMDELGACSGKQAAMLAGLAPLADESGERRGRRSIRAGRPAPRRALYMAALSAQRYNPALAVFAKTLKAAGKPPKVILVAIMRKLVVLANALLAQNRLWTPTRP

SEQ ID NO: 328371 - protein, 408 aa, unidentified
MEIVHPRCCGIDVHQASLAVCVSIKEEGKTEKHRLRCGTTTADLLRFADWLHEYKVTHVGMEATGVYWKPVWHVLEGQFELLLANPTQVRALRGRKTDLKDGERIADFLQHGLLQSSFVPPRPIQELRDLTRSRTTLKQEQVRIGNRIRKVLEDANVKLSSVMSDVMGVSGREILRAIAGGEFQAAELAELARGRLRGKIPVLQQAVTGSLNQHHRFLIEQWLAHWDEVGIRIAKSEKRIEEQMRPFEPAVQSWTSLPGIDRITAWTIVAEMSADMAPFPTAAHAASWAGLCPGQEESAGKRQSGRTRQGNVWLRRALTQAAWGASMRKGSYFKAFYHRLAARKGKKRAIVAVAHALLITGYILLRAGKRFEDLGDDYFDRLDRERLTRRLVKRLQRLGHQVSLQPAA

SEQ ID NO: 328372 - protein, 354 aa, unidentified
MKKRDKYMGMDVHQATTVVSVIDSEGKPVLETTVETVAGALIRLLESISGPLHVTFEETTQAAWLYEVVRGYAAEVIVCDPRRNKLLSEGSKADKVDARKLAELLRGGLLRSVYHGHEATRRLKELVRAYETLSEDVMRTMVRIKAGYRSRGIANRGRGVYQPNQRKQWLEKLTEPGAQQRMEWLYEELDQLRPLRRRAKQAVLAESRKHRAVSLLRTIPQLGPLRSALIVATVDTPYRFRTKRQLWSYSGLAVVTHMSSEYEIREGRVVRSRKPIATRGLNRNCNRRMKDVFIGAATGGSQRDPYRTYLQRLERSGMRSEMARLTLARKIAAIALRIWKKGETFDSKKLNLAT

SEQ ID NO: 328373 - protein, 359 aa, unidentified
MQIQSNTLDFDGQNIYVGFDVHLKSWKVTIMTDELIHKTFSQPPEPLILHQYLKKNFPGGVYHSAYEAGFSGYWIHNSLVNLGIHSIVVNPADIPTTNKEKVQKDDKRDSRKIAKALRSGDLVPIYVHSAKTLEDRYLIRARGLLVKDLTRNKNRIKSFLYFHGIKYPPSFENSKTHWSKRFVDWLEGIEMKEDSSKLTLSILVSEGKKLRSTILNVTRSIKELSQTVAYQEQERLLRSVPGIGLLTAMIILTEIETITRFGNTDHFHSFVGMVPSTRSSGEEEKVGEITPRGHGTLRSAIIESSWIAARIDPALTKAYHEYCKRMEPNKAIVRIAKKLLNRISFVLKTKQSYRLSMLK

SEQ ID NO: 328374 - protein, 349 aa, unidentified
MRFYNGQHTYYCGIDLHTRMMCICILDARGDVVLQRNTVAKPKSFLTVVAPYTDGLVVAAECVFTWYWLADLCNREGIPFVLGHALYMKAIHGGKTKNDRVDAHKIAVLLRGGMFPLAHVYPKKKRSTRDLLRRRTHFVRKRAELLAHVQNTSLQYRLEPIGRRLANRKGHETVPALFEDAFVQSSVEADLELLGHYDGVIKRLEWQLTKQARIDDRATYDLLRSIPGVGKVLALILLYEIDDVCRFETVQQFCSYCRLIRPPKTSAGKPAGISSNKKIGNAHLKWAISEAALLLLRESKEIKRYVEGLKQKHNKGKALGILSHRLGRAIYYMLRRHEYFDEHSFLRQA

SEQ ID NO: 328375 - protein, 366 aa, unidentified
MIVIGADTHKATHALVAVDAGTGRIRGDREIKAEEPGHLAAVRWARELDDDRAWAIEDCRHVSRRFEQALLAAGERVVRVPPHRMGASRKGEREPGKSDEIDALAVARAVVKDGVECFPVAYLNDQSMEIRLLFDHRADLVAERTRIVNRLRWHLLELSPELERSCKRGSLSKSRVLDRVERGLRKLPAGARVRVAREQVRELRRLSREIDALHCELGALVRAHRPQLLAELGCGALTAAILIGRTAGNERFRSEASFALQSGTAPIPCSSGQRIQHRLNRGGDRHLNHALHIIAITRAQRDPATKEYLDRKEAEGKTPKGALRALKRHLARHFHRLLAAPAADQQRAAVDPNSNGVAPSPKVCIT

SEQ ID NO: 328376 - protein, 425 aa, unidentified
MNYKQNEKINQVKESTLVIGIDIGSTTQYARAFDWRGIELGKVFTFSNSREGFESFKAWMQHLQDKYRKSDVIVGIEPTGHYWFDLGAYLEDEGILLVMVNPYAVKQTKELDDNSQSKNDRKDPKVIAKLVTEGRYSAPYTPDGVYADLRIMVANRKRLIREMTQIKNRFARWFAIYFPEYTDVFGDYEAQSSMLLLKKVCTPEAIVELGAEKINQIWRDAKLRAVGMKRATTLCETAKRSIGLKKGSSAAQYEMKLLLEDYEYKKAQLDAIMEEIEKLCRKIPESEQMLAIKGIGVITVAGFLAEVGDVRRFESPRQIQKLAGLSLRENSSGKHKGQTTISKRGRSKLRAVLFNAAIPLIAKNPEFKSLHEYYTTRANNPLKKKQSVIAISCKLIRVFYAILANGVTYDAQKMLSDIHRQPQAA

SEQ ID NO: 328377 - protein, 339 aa, unidentified
MELYSGMDLHSTNTYTAIMDENRKRVIDRRLPNQPKVILDFLEPYRADLEGIVIESTYNWYWLVDLLQENGYRVHLANPSAIQQYSGLKHVDDRHDAFWLADLLKLGLLREGYIYPKEVRPIRDLLRKRAHLGRLRTSLLLSAQNIVLRNQAIKVASEDIKKLTTDLLTPHLQESEGLFLTGKISKDLIDAFSRQIKAIETWVMKRLQPNKLFLNLLTIPGVGEILAMTILLETGCIARFPKVGNYVSYCRLVASQRISNDKLKGKGNDRNGNKYLAWAFSEAAEHARRHYPMCRAFYNRKLQQNNGRVAHCALARKLSRAAYYIQKDQVVFDKARLFC

SEQ ID NO: 328378 - protein, 388 aa, unidentified
MQFIAKESTAIRTNLGAIFVSLELSRSTWLITSVSPGGGEKMSKQCLSAGDIAALLARFSALKQRAFARTGKLFPIIVVQEAGLDGFWIHRVLQSVGIESRVVDPASIATSRRRRRAKTDRIDGEALVRALLAYERGEPRVCAMVRVPTPEDEDSRRICRERKTLTIERIQHVNRIKGLLFSQGVSDYEPLRRNRRQRLDELKTGDGRPLPPHLKRQINRELDRLELLLGQIKTVEAERDALFAPTAKTDQTPAPQAILIGLRGIGPEFAAILWSEGLYRSFANRKQVAAYAGLAPTPWQSGSVAHEQGVSKAGNPRLRTTMIQLAWLWLRHQPNSSLAQWFNERVSRNGGRLRKTMIVALARKLLVALWKYVTAGVVIEGAIVKAAS

SEQ ID NO: 328379 - protein, 392 aa, unidentified
MIIVGIDVASEKHDYFMLHQETGTVFSTSSVTIRNDEEGYKKLHKDIQSFCGATGDSNVHIGLESTGIYHTNIIAFLLSQDYKVMMINPILTNMTRKASRVHSPKNDNLDAQTICKYMIDHSDEFSPYTPSLYHKTALKSLSRKRFFISRELRKAKLAVNNLVQLIFPEFKSLFTNIYGVSAIAILKEYGSPKRIAKAHERKISSLLHGRCKCSASQIIETAKRSVGLKDDFYSFELIDAIEEMEHIQKRIDAYNAQIKMFVDEICPNLLSIPGIGYTNAGLIAGEIGDIDRFHSAESLIAFSGIDPIVHESGKFKAKHLIPSKRGSKYLRNALFQVARIIWQHDPVFAEYYSKKQAEGKHYYVILGHIQKKVARVIYSVLKNNSVYQVRRV

SEQ ID NO: 328380 - protein, 356 aa, unidentified
MKEETAGHPGVVGGVDTHKDLHMAAVVDEHGRVLGSECFATTRHGYRQMLAWMRSFGELLRVGVECTGTYGAGLLRYLQHAEVTVLEVTAPDRSDRRKRGKDDTLDAENAAHAAFAGVRTVTPRTRDGMIESLRVLKVCRKTAVAARRVALQLIHNTVVCAPGTLAAWRPDLSGYRNLTSAYRITLKSLGRRYLELHDEIADLDVMIAGLVDELAPDLVSRNSIGYESAAQLLLTAGDNSERLQSEAGFAALCGVSPVPASSGKVTRHRLNRGGDRAANSALHIIAIGRLRTDARTKAYVERRVSEGHSKLEAIRCLKRYIAREVYYVIRRRNRQIGQVQVASKGSVPDDRQAFAI

SEQ ID NO: 328381 - protein, 462 aa, unidentified
METMTLGVDVACRAAHQCSLADERGRYVWSARKFRTTVEDLEKLWQALPERIRLTVVMEPTRNAWVPLAAWFRRHGAHVTLVPPEQSADLRDYYSKHTKSDPLDSRLLARLPLLHPEGLRPAEGMGPADPMRRATKLRANLVKRRSKVAARLDCYLELLGPGWHSAFGADLVNNTPLHFLAAGYADPHTLRRLGRARLIKFLWRHSHGAWGGTHADEFLAAADETIQLWDEEIDYAELADDVAVEARLALQLTKEIHELDQRIAVFLHELDPDGIMASAPGVGKVNAAQILARLGDPNRFRSLAGVRSFSGLVPSLNASGVNGHHGGPTKSGDAPLREALFMSANAARRVDPTLAARYHRLMVLEGKHHNSALCHLSTVLLTRMVSCWRNGTPYVIRDIDGTPITAAEGRAIVAEHYRVSDDLRALRRATNKAKGTGRRSKESPGAPSTSPSPDQARTAQVA

SEQ ID NO: 328382 - protein, 387 aa, unidentified
MLQPNDLSRSLTALDQDSTLIAVIEMSQASWLVGAIVPGIERHPLKKLAPEAEELLRLLRRWRDEAIKAGRTVTRIAVAFEAGRDGFWLARWLRARGIEAHVIHASSVAVSREHRRAKTDRLDVELLKRAFLGWLRGERDHCKMAAIPTLELEDARRPSRERETLVGERTRIINRMKSTLARLGIRNFRPNLRRAAERLAALRTPEGVAVPANTMAELQRDMTRLQLVKEQIAEIGRMRLGRLAQPPAEAPYAMLVLLARVIGVGIETADMLVNEVFVRNLRDRRAVARYAGLTGAPDESGARRREKGLARAGNARVRRSMLQLAWRFLMFQKDSALAQWFQRRAADRRPGTRKTMIVALARKLLIALWRLATIGEVPQGVVLRAAV

SEQ ID NO: 328383 - protein, 363 aa, unidentified
MEVAKEGRYVGIDMGKTGYVLRMIDGKGRITGWEGKTTREGRRELYRRLRPEDRVAIEACNLAFIMNTEFKELTGTEFYILNPGKLYQIYMTDKKTDKEDALKLAKEIRDKAEEDLPRVFAPTEEMKEMRKVVSEYREIVRLHTQRVNRLHTVYEHCGITDMKRCDLKTRTNREKNLGLLCGYEREEAERLMQVIDLLEAQKNELEKKIREAENTNEKVQAVEQVPGVGKITAYAFVASVGSADRFSSVAQVSSFLGFVPKIDCSSQTSHYGHITKKGNPYLRGLLVQAAWVLVRSKSGGALKEKYHDLVLHGLSRKKAIVAVARKMAELMYTLLKNNSKYEPRKFVAPLSRTERLAKLAVAG

SEQ ID NO: 328384 - protein, 397 aa, unidentified
MYIVGIDIAKRKHEAAVIDGEGAVIIKPFSFTNNCSGYNRLLAMLTKAKLPLDEVSFAMEATGHYWLALFTRLQKEGFRVQVINPVQTNSIRSFYIRQAKTDPRDALLIAEVIRFGHFSESTLHPENIYELRELCRGRHAIVSMQADVKRKVVALLDQVFPEYETAFTNLFGDTSMAILQTCPTPKELSEMRLEELCNLIEVSSHKRFRMAKAQELQALARNSFGFAMAGDVFSTMIRLYAKHLDFLKQQVREMDRKIAEIMDTLDTPITTITGIGPTLGAYILSEIGDINRFSSAAKLAAYAGIDPTMRQSGEYNGVRNRMSKRGSPYLRHAIWLATSSAVLHDPALKLYFQKKRDEGKPYMASVGHACRKMVSIIYAVMRDNKAYTPCIPNKISA

SEQ ID NO: 328385 - protein, 417 aa, unidentified
MINAVLERCAGIDIGKKFLMACVMVGAADQDPSQEIRRFGTTVPELENLRAWLQTEGCTHVAMESTGSYWKPVFNVLEGTVVVILANAQQVKARKGHKTDPHDSVWLAHLLRHAMIRPSFIPPRAIRELRELTRRRRQLMNAGTAERNRLHKILEQANVKIGSVLSDVFGMTGQTILEALLEGKATPEEMAKLARGVAKRKIPQLVEALKGHRLTDAQRFLIEHCLQHMAFLEQSLEQLEARILQQMEEAGLTRPFELLQTVPAIKQAAAAAVLAEIGSSMEPFPTPGQLASWAGVCPGNNRSADKSRGTHCTKGNQWLRSVLAQCAWAASLQNGSIFQARFQRLAPRLGRRGAIVAVAHAILIAVYQVLQSGQAYSKDTARATPNQKHRLVRHHFRCLQKLGVKVKIEPTDSGGQI

SEQ ID NO: 328386 - protein, 336 aa, unidentified
MTKYIGLDAHSSTCTFNVTDERGRELDNTTIETNGRLIVKYVRGVEGVKKLTFEECELSNWLYEVLKPEVEELIVCNPVANKDYKKIKTDKMDARKLSKLLRGGFLVSVYHDGSERERFRSLMSGYQDLIEEGVRLKNRYKSLFRKSGKKVKGESVYNDESFLEGLERSDFKFIGTQIYQLLEKMEVSRQEYIKEIIRYSKRFKEIKYLKSIPGIGIIQTAKIVSQVIDPKRFSNKYKYYSYCGLVRHKRISDGKGYGSEKIWGNRILKCVYKMAGHSVLKGSSGLRGYYDSLRSKGIAHDNAYNAVCRKIAAISLSVWRKSEKYNDRLITGNLIK

SEQ ID NO: 328387 - protein, 371 aa, unidentified
MLGRSVRFEAHCPEEVRITMQQFIGCDAHKKYSVFRAINEEGRLGPAVRISHDREQFRSYLAQLPPAASIAVESSGHWYWLIEEMERAGHQPRLTNASEAKRRMGKTKKTDKLDAGGLAILLRNGTLPEVWIPPADLRDQRELLRLRMFLSALRTQVKNRIHGTLGRYNLQIEVADLFGVEGRLRLGQRLDELPEETRRSVERELATQDFLELQMEEIEKSLHHVMQAIPEANLLRTLPAVGPILSAVMALEIGDVSRFPAAENLASYAGLVPRVHSSGGRTRMGQVGGDVNRTLKWAFVEAANLIVMQQRRLADTHVLRLYRRIRARKNHQKAAVAVARHLAEAAYWVLRKREAYREPPARKPAVASTHG

SEQ ID NO: 328388 - protein, 322 aa, unidentified
MRYIGIDVSKATFVVAYSSDKGGEIRTFNNTTTGIKQFIGALPKDGSIHCVMEATGNYSALLLYMLNVAGITVSMENPLKVKNFAKAMLSTIKTDKSDARLITLYGEKMNPRPFKVQGEAILRLRQKRTVIRQLTKQITAMSNLRGSLACLPVPDKGATHTVDETIKFLEKKRDRLQSELTDLVEVEFSRQLALLTTIKGIGITLATALILTTGGFTYFQNAKQVSRYLGICPTYEQSGTSVNIRGHINRNGDAYTRGLLYIAAWPASRFNAQCKETYTRLRQNGKPGKLAMIAVANKLVRQAFAVVAHDKEYIDGFVSNRP

SEQ ID NO: 328389 - protein, 347 aa, unidentified
MRFYTETHQHYCGIDLHARTMYVCILDREGQVLLHRNLPCDPERFLRTVAPYRQDLVVAVECIFTWYWLADLCAREGIAFVLGHALYMRAIHGAKAKNDKIDSKKTAALLKGGLLPQAYVYPPAMRATRDLLRRRLHFVRHRGQLLAHIQNTHHQYNLAAPGKRIAYRANREGIGEGFEDASVTKSLEADVALIDHYDTVIRGLELTVLRRARGHDLDSFERLKTVRGIGKVLALTILYEIGDITRFARVQEFASYSRLVKCQASSAGKIKGTSGAKMGNAHLKWAFSEAAVLFLAKCPEGKKLLARLERRHGKGKALSILAHRIGRAVYFMLQRKRAFDLDRFLRM

SEQ ID NO: 328390 - protein, 354 aa, unidentified
MLAELVDHVIGVDPDRDWITVAALDSRTAGVITTDRFPATRDGYRDAIAWADAHTEESERAWVIEGTASYGRGLTMALQRLDELVIEFDRPMRKATKDGAKSDALDAIRAAREALGRDKLNQPRANDGIREAIRVHTIARAAAVRARTAAVNELKAFIVTADEQLRSELRGLRTNKIVIRCSRFRDSAKRPIEERCTRNAMRALARRVQHLEAEIGEHDAAMKTLIDRAAPQLLAERGVGYVTAAAFYLAWSHPGRCHSEAAYARLGGTAPIEVTSGQNQDRHRLNRGGDRQLNRALYFVAVTRQRCCPETKDYMARRTSEGKSEREVTRCLKRFIARRVWRLLEHPELHLDTT

SEQ ID NO: 328391 - protein, 356 aa, unidentified
MSRDIKYIGMDVHKEAIVIAVLNGSGKLVMESIVETKASSILQFIHGLRGELHVTWEEGTWAAWLYDLLQPQVAQVLVCDPRRNALLKEGNKSDKVDARKLADLLRTGMLRPVYHGEHGLRTLRELGRTYQTLSQDLNRVMNRIKALYRGWSIPCAGTQVYAPRYREEWLQKIEHAGVRRRAELLYQQLDGLQGLRRTLRPELLAESRKHKAAKLLRQIPCIGPIRAARLIALMQTPHRFRSKRQLWTYSGLGIETRDSAQYRYLHGQLQRTKKPQQIRGLNQNHNHEMKEIFKGAATRASCGVGPLRDFYVALLAKGMKPEMARLTLARKIAAIALTLWKKEERFDAEQLKPQAA

SEQ ID NO: 328392 - protein, 447 aa, unidentified
MSDRTGLSRGDRNRNARLARLRELVPAGNAIVGIDLASDKQAAVVTDHDSRVLARRRVSARAWELGELLDWALVRAKAAGFVSVTVACEPTGHRWRVLDQLAAQRGLALVCVQPLLVYRAREGEDLTFDKSDPKDAVIIARLAAGLRCYEPERADAVWARLRHLGARRRQLTTDATAAVNQVRDLLECAWSAVLDASPAPFRSASWRAAVAVALERGHGDLARVRRLGTDRFTAAVRRELPRWGATRPCLRIIRAVYAAAADPAGVTAHRPGALERASLALDDWHDTRTRLAQIEARMITVLDDLGLTELVTSIAGLTPVGAAAILAGTGDPNRFATPRSLVKHAGLCPRDNASGGYQGKTSISGRGRPGLRVAAWRAVWAALPNNDVLAAKFTHLTTRDDNRLARQQARTACAAALLRWLHVVITRQVRWNPVIAAGGTSPLRTAA

SEQ ID NO: 328393 - protein, 419 aa, unidentified
MWMPAAGAAGEAGTLDRRTHVIDTSDIGAFLGLDVGKGEHHATAVTPAGKKAFDKRLPNSEPKLRELFEKLQAKHGTVLVVVDQPASIGALPLAVAREAGCQVAYLPGLTMRRIADLYPGEAKTDARDAFIIADAARAMPHTLRALELEDETVAELEMIVGFDDDLAGEATRISNRLRGLLTQIHPSLERVLGPRIQHPAVLLMLDQFGSPAQLRKAGRRRLVNLIRAKAPRMAERLVDDVFTALDEQAVVVPGTDAAALVPSLANQLKSVLDQRKLLAARIEELLEAHPLSKVLTSMPGIGVRTGARILIDVGDGSSSPSAAHLAAYAGLAPATRSSGSSIRGEQPSRRGNKQLKRAFFLSAFAALTDPASRAYYDKKIAQGKHHTQALLCLARRRADVLFAMLRDGTFYDPQPAPTG

SEQ ID NO: 328394 - protein, 371 aa, unidentified
MSEVTRRLMVRVGVDIAKQVVHVHAVDGAGRRVVARALKRDQFLPWCAQHLPAGCLVAMEACSGAHHWARQLMAMGFAARLIAPHLVTPYRMEGRGGKNDATDAAAICEAASRPQMRFVPIKTTVQQGLMALHAIREGFKQDRTAWTNRIRGVLAEFGLVFGKSPKVLRAALPDVLEDAGNELSGVARMALQQALDHWRGLDDAMQWCDRQIKEHVRSCDAARRAARVIGIGELGASAFTASVADFHQFKSGRQFGAWLGIVPRQNSSGGKASLGRITKRGDDYLRTLLIQGAKSAVMSVDKRDDPTSRWLKQLIERVGWQKACVAMANKNARILWAVMTREQGFDPQHVSAKPAAKQKPAPAPAAVPVAA

SEQ ID NO: 328395 - protein, 349 aa, unidentified
MSQRATSAIAHMGIDIGKTAFHVVGLDAAGKPVFRSRFTRERLIEFLARASPTIVGMEACPGSNWLARKAADCGHKVRIVPAQFVKPFVKSNKTDFIDAGAIAEAISRPTMRFSTPKTEAQLDLQALHRVRQRLVSSKTAIGNQARAFLLEYGLTIGVGAAYFVRDMPSILANENNGLTPSMRRLLQELWEEYRSVEARLLQLRHQIESIASTDDTAVRLTSVPGIGQLTATAITAFAGTGAQFKSGRHLAAWLGLVPKEFSTGGKQRLLGISKRGNPYLRKLLVHGARACVCNLDRTKDHLGIWIGRMEAKGIHRNKVIVALANKLARIAWVVLTHQGTFYLRQPQQQ

SEQ ID NO: 328396 - protein, 314 aa, unidentified
MSPLIFVGIDVSQAHLDIAVRPGASFSIAHHESAIATLVEQLRPLSPTLILLEATGGMEIPLTSALATAGLPVVVVNPRQVRDFAKASGRLAKTDALDAQMLAQFAEVMRPQPRPLPDAEARALTALVARRRQLVEMLTAEKNRLLSASSPIRKRVRAHIAWLERELEHTNTELSEAIRHSPVWREKDDLLQSVPGVGPVLTSTLLASLPELGTLTHKQIAALVGVAPLNRDSGTLRGRRTVWGGRAQVRAVLYMGAIVAARFNPVIRVFYQRLQRAGKAKKVTLTACMRKLLTILNAMLKHRTPWRVVEAHHA

SEQ ID NO: 328397 - protein, 414 aa, unidentified
MELLHERCAALDIGKKDLKACVRTPSPKGKRSRRQEIRTFATTTNALLELRDWLVAEQVSLVVVEATGDYWRGAFYLLEDQLNVILVNAAHAKGLPGRKTDVCDAAWLCQLGECGLLRASFVPPEPIRQLRDLTRYRTTLTAERSREAQRLEKELEDAGIKLSSVATDITGVSGRAMLAALIDGERDPQVLAEMAKTRMRPKIPHLVQALTGNFGEHHALLCRLHLQRIDELTAAIAELSARIEEQMRPFARQLEHLMTIPGVGQTVAEVIVAETGTDMGRFRTGANLASWAGVCPGHHESAGKRKSGKTRHGDRWLTGALGTAAMAAARTKDTTYLGARYRRLAPRLGKKKALVAIEHSILVAVWHMLTNNVDYHDLGGDYFARLDPERAMRRIIRQANSLGFTVRFDPIQAA

SEQ ID NO: 328398 - protein, 343 aa, unidentified
MQVVRTVGLDIAKSIFQVHGVDGAGQVVIRRQLKRRYVLAFFQKLPACLVGIEACASSHYWSRELKALGHTVKLMPPAYVKPYVKRQKNDATDAEAICEAVTRANMRFVATKTPEQQSGLTLHRTRHLFIRQQTAVINVIRAHLAEFGIVAPVGRKGVEALLDVVANPTDTHVPAIARACLAALGAQLCRLKEQILEFDRMIIAWHRSHEASKRLDAIPGVGPVLATALIASIAEPKAFRSGRSFSAWIGLVPKQHSSGGKDRLGSISKQGDRYLRSLFMAGALAVIRYAKIHGSRHRPWLTALLARRPSKVAAIALANKIARMVWAMMARGERYKEPVALAA

SEQ ID NO: 328399 - protein, 355 aa, unidentified
MDSKKYIGMDVHKESISIAVMNGAGKIGMECVIETKASTIVQFIDGLRGDVHVTFEEGTSAAWLYDLLKPHVTKLVVCDPRKNASMREGHQSDKIDARGLAELLRLNHLSPVYHGEHGLRSLKELVRSYLTITKDLVRVMTRVKAIYRSWAIPCTGKQVYAPRHRAEWLGKIGEPGVRRRAEFYYQQLDALRTVRQQVRRELLAEAKKHPAWKWLCQIPSIGPIRAAVLLGILQTPHRFRTNRQLWAYSGFGIETHSSADHRSVDGQLQRVKKQSSIRGLNRNCNHDLKNLFKGAAIVASSKPGPFQEFYTALLTKGIRPEMARLTLARKIATIVLIVWKRGACFDAQHLKPQTA

SEQ ID NO: 328400 - protein, 489 aa, unidentified
MKVVYQTCCGVDVHKSFLVATIIKTTSGVEPSYQKKRFSTFNNSILQFKEWLVKNQCRDVCMESTGKYWVPVFNLLEDEINITIANPKWVKAVKGNKDDTKDSKWIGDLFRLGLVPGSYIPCKPIRILREFTRNRYKLTSCRTSEKNRYQNALTVCNVALDSVVSDIFGKSATSVINYLLEQFTNSVNHEEIDSRLLRSLKKKSDSVIESIEGYQMTDSQKYRMRLVRAHMDYITSTRNDIDTMLDSLITPYENAVQLLCTIPGVDRNSAITVISEIGTDMTPFSNSKRLCCWAGLTPDNNESAGKKKSVRITRAGVYLKPALVQVAHAAVKSDKSPYYKQKYERIMKRRGKKRAIIAIARMILTAIYQMLSTGEAWNPTDLFKIDMPEPMKEKQKEKQENEKNSSSEVKVKRQNNHSRKLSFKERKELERLEEEISVLENEKKEIIESLSNGLASVEKITEMSKRLPLCEKELDEKSNRWLELSEIEG

SEQ ID NO: 328401 - protein, 351 aa, unidentified
MNYIGVDYHKKYSYIVVKNEDGRIEGRGTVNNTREEVQRFLEPYRPGMAVVEATRNWGLIYDWLDEVLDDVTLAHPLKVKAIAEARIKTDKISADILADLLRAGLLPRAYAPSKQTRELKNILRQRMFFVRVQTMVKNRMYDILDRHPEVLCQAPEVSDLFGAAGMQWLSQTALPGEDNKLLASELELLKFLKEKISQSNNTVKELAKRDARAGLLQSIPGIGPFFSVLILYEIDDISRFRDEKKLCAYAGLVPSTHASGGKVFHGRITKTGSKWLRWAAIEAAQTAVRSDSEFHAYYQRIRIRKGTNAAKVATARRLLTIVYRLLRQERFYDRGTTNTRKIVTPAALVTD

SEQ ID NO: 328402 - protein, 362 aa, unidentified
MEVKKKMAVYVGIDVHKKYCQAALMNDNGHLLQELRFDNTSQGASSLVDLAKSVDSHVKAVVEPSANFWIRVYDKLEEEGVEVKLSNPLRTKAIAEARIKTDKIDAKTLAYLLRGDLVAESYVPSRKNRERRALIRHRASLIRMRVEVKNRIHALLDKHELSYKYTDLFGKQGLEWLRSLQLATPDHEILQSSLQVLDTLSEQAQSMDIQIAKDAVTEDQAKLLMTMPGVDYYAAMILLSEIGDVKRFASPEKLVSWVGLAPQVHQSGETHWTGHITRKGSKRARWILGQCAQSARQHDPRLREFYMRIEQKHGSSKAIVAVARKMLSIIHVMLTRNEPYRGENRELTEQKHKRLENLANTT

SEQ ID NO: 328403 - protein, 339 aa, unidentified
MKTTLIKLTHVLGIDVAKKTFQVALASVEEPGKTIDHNFDNTAKGHRALLSWLRKRCKTVELHACMEATGPCGDELATFLDTHIARLSVEQPRRIKGYANCRMMRSKSDPADARMIAHYCATQKPRAWKRPGGGQLRLRAASRRRDSLIGQLHAEKNRLGQTSDPFVCKDIRTHLRHLEVRIAVLEKEIRAIIKSDEKLATALDLLTSIGGIGITSASIILAEIPDVANLDDARQLAAYAGVTPRHHQSGTSGSTHTPMSKNGSARLRKALFYPAMSALRFNPVCQTFGQRLLAKGKKKIVVIGAVMTKLMHLIFGVLKSGKPFDAKHHLQYHPKLQIS

SEQ ID NO: 328404 - protein, 378 aa, unidentified
MEPTLRKEEPAVSSIAHQGFVHLGMDVSKDSISVAILPPNRDIAAVERIFHDEESVRRLIKRLGRPNSLWACYEAGPTGYELQRLLSSLRVRCDVVAPSLIPKGSGDRVKTDRRDARRLAGLHRAGELTPIAIPSPGQEAVRDLCRTRGDMVEDLTRARNRIQGFLLRHSVVWRGGSTWTQRHERWLATRSFDDPALATTYAHYLSTVRLRDSALEAVERDLEAWCGTSPFGDQVGRLAAYRGVTRIGALCLAAEVFDWRRFPRARTFMSFTGLVPSEKSTGQSQHRGSITRAGNAHLRAQLCEAAWAYQHHPSVGAGIRQRQVGAPPATVARSWKAQSRLSSRFRQLCAHKNVRSVVAAAIARELAGFLWAEMVAEN

SEQ ID NO: 328405 - protein, 341 aa, unidentified
MGEYIGLDVSMKDTAISVRCDGKRVWRGKCASDPETIARTIRKHAKEPERVIFETGPLSVWFYHALQSEGLPVICVDARHAKAALDMAANKTDANDADGLAHLAEVGFYREVRVKGFDSMLTRTLVAARTKLVRIQTELSNQIRGLMKTFGLVVPAGKGSTFEANVRGRLDENHELATIIRPLLEGWCSIRLRAAELTRRLIDDARQSEACQLLMSIPGVGVVTASAFATAVEDPANFRSSRSVGAWLGLTTRRYQSGQVDYNGHISRRGDHQVRSLLFEAACVILTRSSAESALREWGLKLRERIGFKRAAVAVARKLAVIMHAMLKSGEMFDRKVVTPA

SEQ ID NO: 328406 - protein, 360 aa, unidentified
MRKRLSKKESWFKENILTAQDEIYVGIDVHKDQYHVAIWHNDRIGCIYSMSSDNNKLLRDLRRIRNSLKNVVYEAGPTGYGLVRLLRSAGLSAEVVATSKTPRSADSTAKTDRLDCKQLAEYTAKGLLTFVAIPTEQQEADRQVVRLRDQLISKRKRIMQQIKGFLLQHSIAWPGHCWGKAVVGKLRAMDLASELRFTLDQYLDEYEFLSGKIAQTNSRLGRIFSSRRHSAAIEIFKSHPGVGDIVAWQFRAEMFDITRFKQPKQISKYIGLCPSISQSGKTCRQGPITKTGRRQLRAILIQAAWAWYRKDPHARQIYNRLLHNTGNGKKAIVGLAKRIAVHLWRMRCDGCLYDAGAVNA

SEQ ID NO: 328407 - protein, 337 aa, unidentified
MIHVGVDLHQRFCYVTVMDARGKILQQRAVGNEAGELRRWARSLPGPAQVVMEACSFWPAFQKNLSGEVEKMVLVHPARVKAIADAKLKNDRVDSETLAHLSRCDLLPEAWMADEGTRQARQRVRLRVALGQQRARSKNLLQAVLHQEGQKKPVTDLFGKKGRVGLEEVELSAAGRESVNTYGELIEHYDQLIGERQQKLEQAAEQSAEARWLATIPGIGPYLAMVILAEIGDVARFRDKKALANYAGLVPRVRESAGKRHYGGLTYQGSKLLRWAMVQAAHGATRGSPAIRAWYEKRRQRKRPQVARVALARKLLTCVWALLRHGVSFEESVFATR

SEQ ID NO: 328408 - protein, 371 aa, unidentified
MADSSKTLFVGLDVHKDTIAVAYAPEDRGTEVVSLGMIGTRQYDIDKLIRQLESKGAALMFAYEAGPCGYWLYRDLTRRGLRCAVVAPSLIPRKPGDRVKTDRRDAMTLARLLRSGDLSSIYVPTVDDEALRDLSRAREDVVRDLKRSKVRLKAFLLRQDIRYEGRATWTAAHLRWLARVVCPTPAQQIVFQEYLHTVSEQTDRLQRLEAEVSAAVQTWRLQPVVEAVQALRGVHFTGAVTLIAEVGDLTRFDTPKKLMSYLGLTPSEYSSGGHRHQGGITKAGNGHARRALVEGAWAYRYPAKVSRHLQLRLERVPTEVRAIAWKAQLRLCKRYRVLSARGKHVNQVVVAIAREMAAFAWAIARTVPVAS

SEQ ID NO: 328409 - protein, 344 aa, unidentified
MKYFTGIDVSLRSVSICAVDETGVVRYENKVAAEVDVIVASLRRFSGEISQIGLEAGTLTQYLTYGLQKAGFEVICLEARQTAATLAAMRNKTDRNDARGLAQILRSGWYRTVHVKSLESHQVRALLASRKAILTKCVDLENELRGLLKIFGVRLASRVGHGSFDEAVRGVIASEPLLARALVPLLDARTVLYRTYLKLDNAVKAVVRTDPVCQRLMTVPGVGPVTSLTFKAGVDDVNRFRSSRTVAAHFGLTPRRYQSGETDNPGRISKAGDRDVRMALYTAAHALMTRSDAWSTLKAWGLRLAKVRGHRRAVVAVARKLAVILHRMWVDGTDFRAARLQGAQ

SEQ ID NO: 328410 - protein, 415 aa, unidentified
MNPLYRCIAGLDVHRMLYVLTVLIEQDDGTVAKQQRSFGGFKRDRRALVAWLLELGVGMVVMESTGIYWKSIYAGLEPAGIPAMVVNARHVKNVPGRKTDVSDSEWLAQLGRFGLVKPSFIPPEDLQELRLVSRYRQKLAQTLAGEKNRLHKVLDDAGIKLGAVVSDIDGVSARAMIEGLIEGQPIEQLLDRAKGALRAKRDTLEPALEGELSSRHRFVLEQIHGHIRYLESELAKLDTQLIDAMAPYAEYWHLLQTLPGIDQISAAMILVEIGTDLSAFGDAQHFASWAALCPGNHESAGKRKTGKTRKGNHAIRYLLCEAANAARRTHSTLRDKYQSLVPRKGHKKAIIAVAHQMIRTIYVLFTRREAYRDPGIDYQAIVVTKNAPRWIQALKKYGYWPKFASTQLPTPVLAH

SEQ ID NO: 328411 - protein, 327 aa, unidentified
MTASVSSHNHIFIGIDVGGASFEAAWHRGGSTQYQNRPDAIAAFVARLSVEKQIIRIAVEPTGGYEKPLVKALRGAGLPVEMVHTSRFAAYRTLIGAKAKSDTSDARLLAAYAAAPEEVRGRKAEYVVLPQDAVREQLAELAARRDQLKHMIHAETCRLSTVRSQSVRDQITAHLQALRQADCKTHDAMMQLVRQRDELHNAKRLLKTIKGIGDKTALTSIAAVPELGLISNKAAAALIGVAPFVRRSGTMTAPARIHGGRALVRNAFYMAAVTASRHNPVLAPFYARLIAAGKPPKVALVAVMRRLVVYANAVLRSGQPWKRAEII

SEQ ID NO: 328412 - protein, 402 aa, unidentified
MPMLSIGIDVSKGKSTVCGMKPGGEIVYAPFEVQHTREGMSELVLLLHNSGEEVRAVLESTGSYHCPVVAALLENGIFVSVVNSLRMKRFCSQSIRKVKTDRIDAMQIALYGLAYWQELQPTKLPEDTYRELQLLARQYYQMTSLLIKAKVDFNAICDQVLPGMQELMNDHAGRHKLSDFVLRYRHTTHILEMGETRFRKDYCKWAEKKGYRNCERMAVLIFATAQNGIPVLPNAPSTQIVITEAIRVLHTVEASRDAILTQMQALAKTLPEYSLVREMPCIGDTLAPRLIAEIGDVRRFHSKRALIAYAGIDAPPYQSGKFCANNRHISKRGNRYLRKTGYEVMQSYVMHKPANDPIFTFIEKKRSEGKCGKLAMVAGLNKFLRVYYGKVTELYRSLPAIE

SEQ ID NO: 328413 - protein, 372 aa, unidentified
MNSIVYVGMDVHASNYTLSCYTLTNDECFATVQMEPEVKNILKYLKKVQRNLGVPCEFLCGYEAGALGFSLYRQLQKHGIHCTVLAPSTMPSFHRNEIKTDRRDAMKIARCLAFGAFRPVHIPTKEDAAVKDFIRMRDDHKIALKKIKQQIQAFCMRYDLHFTEGRSYWTQRHLAWLKALALDDLLREVLDEYLVTLHQLADKIERLDARIEELAQGERYAENVKKLSCLIGVRTHTALALVAETGDFRRFAKAEQYAAFLGLVPGERSSGDKQSRTGITKAGNTHLRRLLMEASQCYGRGKPGYKSRLLKERQQGNTSEDIAYADKANERLRRKFYRMVLRHNKKHNVVVTAIARELSCFVWGMMTGHTAI

SEQ ID NO: 328414 - protein, 392 aa, unidentified
MNRIVYIGMDVHTSNYTLCSLDPGYGVEKDNYFAEVQFTNDFIKNVVNYVTNLKKKLKDCEFVCGYEAGCLGYSTYKDLTKAGIKCVIMAPSTMAVQKGGKKVKNDRRDARVIAQCLAYQTYKEVYVLSEHDEAVRGYLRMRDSHNKALKRIKQQIIAFCTGHGLFSPTKSNWTVAHLKWLKDLKFNDPVEQEILNEYLSSLTFLSDKIKAMDVRIEELASEKQYCENVKKLRCIKGIETNVALTLLAEIGDFNRFSKPTDFASYLGLIPGEQSSGDKVRGTGITKAGNSTLRRKLTESAKGYWRGRIGIKSATFKKLEKELPKEVTEYALKANTRLQRKFFNMTHVKGKNMNVAASSCAREMACFVWGLITNNYEKAPAVPKTDEELLDLN

SEQ ID NO: 328415 - protein, 343 aa, unidentified
MQTITTIGLDIAKSVFQVHGVDAAGGVVIRRQLKRRYLLAFFQKLPPCLIGMEACASSHYWSRELQALGHIVRLMPPAYVKPYVKRQKNDTADAEAICEAVTRATMRFVPTKTPEQQSCLMLHRTRHLYIRQQTAVINSIRGHLAEFGIVAPVGRKGVRELLHVVADPSDKRVPEVARACLAALGTQLLSLKQQILEFDRMIMAWHRSNQTSKRLHYIPGVGPMLATALVASVADPRTFRSGRNFSAWIGLVPKQHSSGGKERLGSISKQGDRYLRSLFVAGALAVIRYAKIHGTGHRPWLAALLGRRPTKVAAIALANKIARMAWAMMAKGERYKQPAALAR

SEQ ID NO: 328416 - protein, 409 aa, unidentified
MIFVGDDWSEEHHDIEVLDGDGATLERRRLPEGLNGVGQLHELLAGYANEPGEVVIGIETDRGLWVQSLVAAGYQVHAPNPRMVARYRERHVTSGAKSDPGDAKVLADLVRTDRHLHRQIAGDSELAEAIKVIARAHQRQIWARQRQVNALRASLREFYPSALVAFGNDLAHPDALGVLGKAPTPAAGRGLSHSTITACLRRGGRRRFVEDTAKKIQEALRAPQMEPTTTLADAFGATVRSSVAIIGELSRQISTLETELRSHFEQHPDAEILHSLPGLGSILGARALAEFGDDPNRYQDARSRRCYAGTAPITITSGKRKTVLARFKRNHHLADLCYWWAFCALTHSPGVRAFYDARRVGGNTHDQALRAVGNRLVGILDGCLRHRTLYDEAKAWGHRTDLSGEGAAA

SEQ ID NO: 328417 - protein, 343 aa, unidentified
MEIYTIGIDLGKTLFHLVGVDASGTVVVRKRCSRKQLLAYTANIRVQRIGMEACSGSHFLGRALQQQGHDVRLIPAQYVKPYVKTNKSDFIDAEAIAEAVQRPSMRFVPIKTEEQLDLQAVHRVRERWVMRRTAVVNQIRGLLLERGLTLPKGRSHVDEALPEILADVTGRLSGSFRVLLAQLKVELEQLSARIAQIDGVIQQTAREHEACQRLTTIPGIGPVTATALVAAIGNGSAFRRGRDLAAWVGMVPRECSTGGKQKLLGISKRGNSYLRRLFVQGARSVLQQRNKQPTRLSSWLAQLLARTHQNVVIVALANKMLRTAWAVLCKNQTYCIPATASTS

SEQ ID NO: 328418 - protein, 465 aa, unidentified
MKQRNAIGIDPDSRGFVCAYVKYSDTKVAHKGYLATEADLKSFLRWVKGEKDVVVAIEGSNGLSKPIETALRDAGIVFYSFKPADTERFRKAVLGQNKNNEKDAESVARYAMALEAQGKLENYRRVWFADMELQLLTRRYGSLAKQLTAEGNRLWKLLRYACPDLYLALAGKNPEVDCGPKMVKSQGILHLLITMPDVGQWKSLSEEQMLEAMGGGNYKGRRELVRELRKVVDSFRPISDSMALLLSRGAHQIRRLKEEQLHIVRMLEKVTAGNAAVQALRQMRGIGPITAATMIAEIIDIRRFAREDSLACYCGFGMREYSTGQTTSMRATELFNHRLKDSFMKAARNVVFYNPDSHLAGYQRNLMKAGMSQVQAMKRVARALVRGLYRKLSALPVAAETEAQTEDEKERGEGAMASGATRSGQGHVSDIALPSPPKYKAKTIRRVKMKVSRPKQTAQGRDDCP

SEQ ID NO: 328419 - protein, 339 aa, unidentified
MKFAGCDLHKQTITICVVDQSRRVLERRTVRCGEERTILAFFERLGDFEAVVEATASYEWFVRLIEPVAHRVLLAHPKKLRVIAESTRKSDRLDAQILAEFLALDMIPTSYRATPRQHEHRRLVRQRGGVQRRLTSVKNRLRRILCDYNADRPSLFTVDGLAYLAQVPLLGADRFAVDQIVEELHFGRRQLLAVNARLKEFAEAAPLREQEARTLLRTIPGVGFVTTEVVLAELADIDRFGSQKRVVAYAGLSPGQRESAGKSRELHLEKNGSTLLRSTLVEAAWRLVQHSLRWRRIYERLKLRVRAKKAIVAVARRLLCLMTAILKTGQPYSLSQQPT

SEQ ID NO: 328420 - protein, 482 aa, unidentified
MRILLHYYFKKKYAKETYMKKKSISQKSVKGNPKFLCLTVCNPNSAGVDIGSKEHWVAVSPHLAKDNVRHFPAYTCGLRAISKWLKRCHVKTVAMESTGVYWLSLYDILEQDGFEVYLCNARNIKNLPGRQKTDAIDCAWIQKLHSFGLLTSSFIPNLDVRGLRGLLRYRDILTQENSRHVLRMGKNLTQMNVLLHKVLSNIMGESGTKIIKAIIAGNTKPEKLLKLKNNSVKASDALFLKALDGNYDSLQIELLSYELQYYEYTTEIITQIDFKIGQKLIEMIKSTSDNFDDPSFDVENLSEVDILTFLFGVDLTQIPGISILSLRKLISETGTDMSKWEDASHFTSWLGLSPNNKISGGKLLKSDTKHNKPRAATIFRMCASTLRRSKSHLGNFLRRKMAQKGYPKALTATARKLAVVYYLMIKNRTPFLELGEDSYMINYRYRAIRNLQKKARRLGFAVIPNKVEVVPNQESDENCPKT

SEQ ID NO: 328421 - protein, 374 aa, unidentified
MADIIETFVAFDTSKLRNAVAIAEAGRAGEVRFLGEIENTEAAVAKLVRKLAGKYGRLTFCYEAGPTGYGLYRQIKRLGHECMVVAPSLILKKPGERVKTNRRDAVSLVKQLRGGDLTAVWVPDPRHEAMRDLTRAREVAVEDMRRKRQQVSAFLLRQGLHYPGERAWTKTHRNWLMSQKLEYAEHRIAFEEMLLAMRQAQERIERLEQAIRLAVPDWSLAEVVTALMALRGIDFVSATAFLAEIGDLSRFPTPRELMGYLGLVPSEASTGDTIKRGPITKTGNRRARRILVECSWSYQHPPRVGKEKQERVAAAPQAVREIAWKAQCRLSARYRALTRKGKLKTVAVTAVARELSAFIWAINRQIANPRAVAR

SEQ ID NO: 328422 - protein, 343 aa, unidentified
MQAVKTIGLDIAKSVFQVHGVDADGQVVIRRKLKRRYLLAFFEKLPACLVGIEACATSHHWSRQLQALGHRVRLMPPAYVKPYVKRQKNDVADAEAICEAVTRANMRFVETKTVEQQSCLMLHRTRHLFIREQTAVINVIRAPLAEFGIVALVGRKGVEELLRVIADPADRRIPEIARACLAALGTQLQRLKEQLLEFDRMIMAWHRSDETSRRLDEAPGIGPMLATAVVASVADPKAFRSGRNFSAWVGLVPKQHSSGGKDRLGHISKQGDRYLRGLFVAGALAVIRYAKIYGTRHRPWLTALLARRPTKVAAIALANKIARMTWAMMVKGERYKEPVALAA

SEQ ID NO: 328423 - protein, 322 aa, unidentified
MKKISTVRVNGNMIFKGHKLTIGVDLGDRWSCYCVLDEAGEILLEQKVATTPEAMKQIFEKIPRGLIAMETGTHSPWVSRLLTELGHQVLVAHAQKVQLITKSNRKDDRHDARTLARLARIDPELLGPVRHRSAQAQIHLTVIRARAELVSARTSLVNAARGLVKSYGQRLPKCGTQQVSRQVELLKQVKGVGTQIALTYVLTLEDPHRFPKSREVGCFLGLRPGRRDSGESQPQMHISKEGDPYLRTMLVQGAHYILGPFGADSDLRRWGLKLAARGGKTAKKRAVVAVARKLAVLLHRLWVSGEVYEPLRNSDKALRAAA

SEQ ID NO: 328424 - protein, 372 aa, unidentified
MGHHTEAFVGIDTSKLRNAVAVADSGRGGEVRYLGEFPATEAVIQKLGAKLAAKYRHLTFCYEAGPTGYGLYRLLKSLGHECLVVAPSLVPKKAGDRVKTNRRDAVSLAKLLRAGELTAVWVPDERHEAMRDLSRARQAVKKDLQGKRQQISSLMLRLGRIYPGKTTWGPAHMNWLMAQKLEHREQRIAFEELLEGIRQESERVERLEKAIREAVPEWSLAEVVAALQAMRGIDLIAAVGVLAEIGDLSRFQNPRELMGYLGLVPSESSTGDKVKRGGITKAGNGRARRILVEAAWSYRYPPRVSREKQPKVEAAPRRVREIAWKAQTRLCGRFRSLERKGKRRTVVATAIARELSAFIWAINRELMAHRQA

SEQ ID NO: 328425 - protein, 340 aa, unidentified
MQRYIGIDVHSKSSTIYVMSAAGKKVRQDVVETNGQALIGYLAQIPGQLHVCLEEGEWSAWLHEILEPRVAELVVEQPQSKTGSKSDAIDARDLAEHLRTGQIKTEVYKAPRRFTELRELARTYDMLTDDAVRAKNRLRSAYRRRAVGYPGHGLAAQSEALPELPAWMRQSVEALGIELASIEELRGEIEKAMIAESRRHPISRILQTAPGLGPIRVAQLIPIVITPHRFRTKRQFWSYCGFGIVTRSSADWAKVAGRWVRVPVQQTRGLNRDCNHTLKRIFKGAAMTVIRFKKEPLWSDYVRLTENGTRPNLARLTVARKLAAAVLVMWKRKERYNPKS

SEQ ID NO: 328426 - protein, 324 aa, unidentified
MYLGIDLSKAYFDVTLRNEQGEKTTAHFDNTPAGFVGLEKWLKGQGGSEVHVCMEATNVYWEPVAHFLHAKGMTVSVVNPARIKGFAMSQLRRNKTDKQDSDVIVDFCQAMHPKAWTPPSAAVSKLRSLVRLRATLVKTLTQHKNRLTDAQDDEVKACWQRLIDTLEAEIAQVESQIEHHIAQHPALQATATLIRSVKGLGKIATWTILAEMPDLAEYEDAHAAAADAGVNPAHHESGDTVRHKPKLSKVGKAAIRGVLYLPAITAIQHNPIVRALAERLAQRGKPKKVIIVAAMRKLLHLAYGVVKNKIPFDPLYPASPLPAT

SEQ ID NO: 328427 - protein, 418 aa, unidentified
MKVHRNCCGLDVHKQTIAACLIREDSRGNSVKEKRIFGTMTQQLRELAQWLVAAKVSAVAMEATGVYWVPVWNVLEREGLQLVLINPEHYKAVRGKKTDLKDGERIAELLQDGRLEGSYVPPRELRVLRDLTRYRIKLVEHQCSIACRIQKLLEQCNIKLGSVASNVLGVSGTAMLHALAQGESNPERLADMAKMQLRRKLPALRLALDGYLLPHQRFLLGEMLDELSYSQNKIARLEAEIEMQMQPFQKALQAWMSMPGIKQRVAWTLVAEIGPDVQAFPSAAHLASWVGVCPGNHESAGKRQSGKSRKGNRWARHALCEAAWAATKTKNTYLAAQFRRLAAARGMKRAVIAVAHTILTTGYHLLQRGTVYADLGPNYFDQRHKLRTTKRLVKRLEALGHKVVLDSPLPSALTPARA

SEQ ID NO: 328428 - protein, 426 aa, unidentified
MSYRIAGIDVHKKMLAVVVSDVEIESEYQFERRMFSSNPEQLRSLAAWLVEQKAEEIVMESTAQYWKPVWGTLERYWKPLCEKREGARRRSGTLHLAQALSNRGRRGRKRDFVDAERLVKRLVARELTLSFVPDAEQRLWRTVTRKKYQLRRDLVRLNNQLESLLEEAHIKLSSLVSDLLGVSARRMLKALADGETNPAALAALAHERLRATPEQLCDALGACTELKPVYRRLLKMTLEHLQILEQQSGQLDQELATLLHPHQDVVERLAEVPGFAVDSAQQIIAEVGPAAATFPSEKCLSSWVGACPGEEESAGVNYSHRSPKGNRHMRRLLNQTANAAVKAKGSIFEIIYRRCVPRLGHNQAIGVIAHRQCRLIWLILHQGTRYEERGPAVTKRSRYQRTWRMIRQLRNLGYRIDDPSYRGGVP

SEQ ID NO: 328429 - protein, 358 aa, unidentified
MGSISHRVPAGKIAVGVDTHKDMHVAVALDHLGSHLGEHSIPTDAAGYADLRRWALGLGPVHAWGVEGTGSYGAGLASALLRAGERVIEVNRPDRAARHRDGKSDPLDAEAAARAVLSGRVTGIPKSADGEIEAIRLVKLTRNGAVKARTAAMNTLRNVLITAPAALRAELEPLPERQLISRCTAFRPGPATDPGNAARHALRALARRWEALREEIDAHTALLDTLTRAVAPDLRGAFGVGPETAADLLVAAGDNPERLHSEAAFAALCGASPIPASSGKTNRHRLNRGGNRAANAALYQVIVVRLGRHEPTRAYAARRVAEGRSKLEIIRCLKRFLVRELFPLLQPIPAPDGAILTS

SEQ ID NO: 328430 - protein, 415 aa, unidentified
MERVLERCCALDVHKRQVTACVRVPDREGRRSELRAEFRTVTSELLALRDWLKGLGVTHVAMEATGVYWKPVYYLLEDDFELWLVNAQHVKNVPGRKTDVQDAQWLCQLLEHGLVRASFVPPKPIRVLRDLTRYRKSLVWERAREANRLQKLLEDANIKLGDVASDVLGASGKAMLNALCEGDTDPEALAELAKGKLRAKLPALRLALEGRFSAHHALLVSHLLSHVEYLDETIASLSEEIEERVRPFERQRELLCTIPGVAERTAEVILAEFGPDMERFPSHRHAASWAAICPGHDESAGKRRSGKTRKGDRWLRTALIEAAQSAAGRTKDTYLHSQYLRIKRRRGHSKAIVAVAHSILVAAYYILSEDKPYEELGGDYFIRREDQERLTRRLVRQLERLGQRVTLEPATVEAR

SEQ ID NO: 328431 - protein, 421 aa, unidentified
MRKAATGKVKFVKDGTLIVAVDIGMEMNRGYCTTPDGKSTKPFKFENTREGLDMLWGMIMTSKSRFKCNEVIVGYESTGPYGEPMVHYLMKKPVMLVQVNPMHTKRVKEINDNSPLKTDDKDPRVIADIIKLGRALSIVIPEGDAAYLRRLNNSRERHVRERTALVNQLQQLVFLLFPEFRTVIKDIKCKTPLYLLKKYPTPEALSVLDKQVLGEEMRKRSRGKLREHHADMLINLAKDTVGIREGAAGLSMDIRHILIQLEMLTNLVTELESEMEIALGRIPYSPKLLSIKGLGVVSVAGIIGEIGDFKKFGTRPEIMKLAGLDLYEISSGKMRGQRRISKRGRSLLRKILYYAAIQTIRKNGILHDYYTRLIDRGMKRMKALVAVSRKLLGIIYAMVRDDSEYSVNFESMQRQVIKKAA

SEQ ID NO: 328432 - protein, 346 aa, unidentified
MFYCGIDIAKHKHEASVIDSEGKALIESISFSNTKEGCEKVTAVFEKLGASVSDVVIGMEATGHYWLSVYTFFLELGFSVKVINPIQSEAFRKMYIRQTKNDSVDSFIIAQIMRFGEYSSSGLAEENIIALRQLSRYRLALVDACGDCKRRVIALLDQVFPEYNSLFSDTFGKTSEEILLSCPTPEELLEVSTRKLTNILNKASHGRFGKEKAEQLKTAAKETFGVAFAKDAFSFQIKQLMEQIVFLENQLSELEEQISGLLHETNQYISIGDTIGAIIVSEIGDINRFERPNQLVAYAGLDVTVKQSCEFSGTKNRISKRGSPYLRRAIWLASQRAAFCLRPYFI

SEQ ID NO: 328433 - protein, 355 aa, unidentified
MNSVKYVGLDVHQSTISVAVLNAEGRLVMQSVIATQAAAILDFIAGQRGTLQVTFEEGTHSAWLYDLLVRRVARLVVCNPRQNALLKSGNKSDPIDARKLAELLRAGMLSPVYHGENSTGGLQQLVASYTALTQDTTRVMARIKALYRSQAIACAGKKPLGKRHRQQWLEKLTAAGQRQRAEWLYAELDAVQGLRRQARQALVAENRKHAAAKLLRTMPFLGPLRAAVLLAKVQTPYRFRSKRQFWAYCGLGLETRSSADYVIQNGEVVRRRRALYIRGLNWNHSHPLKNLFQSAATTASTMQGPLREFYQARVAKGMQPALARLTLARKMAAIALILWKKGEVFEAKHLNSQAA

SEQ ID NO: 328434 - protein, 402 aa, unidentified
MNCVGIDVSKGKSTIAVMRPFGEVVVSPFEVCHTASELSELARLLKSLDGETRVVMESTGNYHAPVAWLLHGAGFYVSVVNAMLVHDYGNNSLRRGKTDKKDAVKLANYGLDHWLTLPRYVPEEDARLMLKTCYRQYQQYSKVQTMLKNNLISLLDTAFPDANRLFTSPPRADGSEKWVDFVAAFWHCECVCGLSKKAFTTKYQKWCRKHGYNFSEDKALDIYVSACGRFGVMPKTKTAKLLVEQAISQLQATSAALAALKQEMQSLAASLPEYPVVMGMFGVGPTLGPQLIAEIGDVRRFHSKKALVAFAGIDAPPYQSGQIDVRSRSISKRGSASLRRTLFLVMGVLLQCAPMDEPVYQFMNKKRSEGKPYRVYMMASANKFLRIYYASVKTYLDSLEHN

SEQ ID NO: 328435 - protein, 462 aa, unidentified
MARKRKTKRKSVLGLPILRPDAAGVDIGAHEIYVAVPADRDRYPVRCFTTFTRDLHALADWLQECRIQSVAMESTGVYWIPLFQILEARGFEVYLVNARYVKNVPGRKSDVSDCQWLQYLHAVGLLRASFRPPQEVCQVRSLLRHRESLVQMAAVHVQHMQKALDQMNVQIHHVISDLTGRTGMAIMEAILAGERDPEKLAQLRDPHIRASSHVVAQSLVGDYRREHLFTLRQSLAAYRHYHTLMMACDQEIEACLGEFDSQVDCRKYPLPPARDSHRKPRGNEMHFDLRGELYRILGVDLTQVPGLNALTVHTVLAEIGPDLSAFPGGAAFASWLGLCPDNRISGGQILSVRTRPVRNRVALALRQAAQSLHHSQSYLGIYYRRLRAKLGAPKAITAAAHKLARIVFHLLTTRQEYDESVFAEQEASYRKRTESRLRRQARALGFQLLPVTAQICQSAGVP

SEQ ID NO: 328436 - protein, 329 aa, unidentified
MEVSQAVVGLDVSKATLAVCHQVGAHLQHLEVANTPAGFRQLVRCGGATSLYVLEATGPYYLAVAYHLVAAGAQVAALNPLVAKHFIQMHLGKGKSDRKDAQWLLRYGQQQATPRWQPEEAALVECRQLEHVIELLIRQKTMVYNALEALQMQPVVNPAARKPLQHILCQLTQQVQELEAKLLTSVELRYAREMALLGSIPGIGRKTAALLLLFAGGFTSFQNHRQLIAKAGLCPREFSSGTSVRGKARITKMGGGLIRSKLFMCSWSARKANTACRELYDRLVAKGKNGKLALIAVCNKLLKQAFAIVTSGIPYQADFAKIKAPTLAF

SEQ ID NO: 328437 - protein, 346 aa, unidentified
MSYSTTVGVDLAKNVIQISVVSGRGKELCNRSLTRKKFAEFLGKQKPALVAFESCASAHHWARAAKRHGHEARIIPAKAVAPFRQGHKTDSNDALAVAEAARRPNIKEAPMKTAEQQGLQAIQRSRELLIGECTALSNHLRGILLEFGVAIPQGFASLLRALPEVLEDGENELPDLYRPTLHRMHQRLLELREDIESMTKEVDILVKQHPVCKRLTAIEGIGPIGALSLYAVMGSGKAFTKSREFSAYLGLTPRQYSSGGKTNIVGISKKVGNRRLRSILIQGARAYVYRMKEPRSLKDRWLKDLIERAGPNRAAVALANKNVRTAWAMVTQGTEYQRRLQLEMAA

SEQ ID NO: 328438 - protein, 397 aa, unidentified
MLRRILPTAERTVSPGQQPKVIDKGGAIRERPPTHRLCQNEVVADLRQWRPSVEQVSRIGMDTSKHFFQLHGVNAAEKVVLRKKLRRKDMVAFFKALAPTVIGIEACGAAHYLARLLGSFGHEVKLIAPQLVKPYVKRGKNDGADAEALCEAMSRPTMRFVPVKTTEQQAALMMVGLRDRLIRNRTQLSNSIRGYAAEFGFTATKGKAHLVTLLERIQADESVPALARELFAAQAAEYARLQAQIDEVDAKLMAWHKANECSRRLAKIPSVGPIGAVLLMMKTPAPELFRSGREFAAWIGLTPKDHSTAGKVRLGGITRAGDEALRSVLVVGATSIIQHVRRGGRGSPWIVDLLKRKPPKLAAVALANKMARIAWKLMITGESYVAKSVPAALANAT

SEQ ID NO: 328439 - protein, 345 aa, unidentified
MVVLGADLHKRSHTIVVIDATGRQLAEKTIAATDAGHLELRRWAAQWPDRTWGLEDCRHLSRRLDAELVRAGESVVRVSPKLMAGARRSGREPGKSDPIDALAVARAVLREPDLPVATLDGPDREVRLLIDHREDLVGERTRHEQRLRWFLVELAIAEPAPRSLGRVVVQRSLETALAGRTEPVARFARDLLARIVELSATIRALEHEIEILVRILAPTLLGLPGCGALTAGKIIGEAAGISRFRSKEAFARHNGTAPVPVWSGNVVRHRLNRGGNRQLNAALHRIAITQIRLAGPGKTYLEHRQASGDTRTEAIRALRRRLSDEVFRRLRADEVTRSTDLAAAA

SEQ ID NO: 328440 - protein, 394 aa, unidentified
MKLIGIDIGKNKHFFCVMDQQTGEIISQPVSFSNDKEGFDFLVQKIKSYPKDSILIGMEDTGHYHFALLKYLLDLQYTVALINPKTTDFNRKMQGGITKNDKLDTINICDVLDTPERKKQYRITKVNSFDLYEQKQLTRHHHNLKEEENVYKNRLQKCIDIVFPEFNKLFNSKYGIVYMNILKMFGSAENIANTDIRTIRKCFEIDGRDNRISLTPERLKECARSSIGISSSAEVIQIKHLTAQIELIEEQLTEIDKKIEEFSIQNNSPILSIPGISHFSGTSILAELGDISNYSKTSQIIKFAGVAPLHYESSQFNAQHTAITKKGSKYLRKTLYQIMLPVIRHNPVFNKYYQLKISQGKGHRCAQGHCVRKLLRIIYHLLKTNQQFDPQLLR

SEQ ID NO: 328441 - protein, 466 aa, unidentified
MENNYILYVGMDSSKGKADAAILKVSDRRSVKPKFLRKKLSFKFVKSEVTSFLETVRSYSDDNCTSICFALEVTGIYSTNVYNFIKDNLNDNESIKFLNTDFVNQWRNAHNIAKSDPLDAQTISTIIGTDSDVQYVNDNVFENKNGYQDLKALVHRHYQIKKIYSQEINRLIAQCDCLFPELQYVFEPKSAAFIAVLSSYPTTHDIINASRLEVFNVVYEATKHRCSMDKIDKLFDLCHDTLVPDNISSYGRSIILDLVENIKNIKGQLKMIERYIRDVASLNPAYKLLLTITGCGPLTAATVIAETGDIKRFKNADCFVSYSGTSPRNKRSGTSVETMGKISKKGSRYLRHAIYMIAEFARRHNPVLKHQFERIKNGNKKRHKLANIAIANKIARYIYSIMKNESGFVIFHEHIMRLPEETQNTFFNSISLDFPKNTRKQIYQYSDINGEVHKFVYTKLEETMII

SEQ ID NO: 328442 - protein, 321 aa, unidentified
MNKNNQIYGVDISKGVFDVVNSTGEHFQFKNNVSGFKSFLKILIKEDLVVMEATGYYHFRLAQFLYEKGIKVSVVNPLSVKRFIQMKLSKIKTDKSDAKAICEYASTNEVPLYTARDKSQAEALQILRLIAIYTKQSTALKNKLHGEKVLGKPSKVVYHSLNRSLKVLQNEIKTLESRLTEIVKDDQQKQLTLLKSIPGLGNKTAIMLLVLTHGFTSFEDASQLCCYAGITPTIRASGSSVRGKSRISKIGNPKLRNLLFMCSFTACKHNKACRDIYERIIAKGKSKKLALIAVCNKLLKQAFAVDTSGLPYDENYASRLG

SEQ ID NO: 328443 - protein, 340 aa, unidentified
MHATTYGLDVAKRVFQMYWVDGDTGEIVNRRFGRDDLIQYLSRRPPGRVALEACGSAHWWARKIKALGHEVVLLHAKFIRPFVQTNKTDAADARAIWTAVQQQGMRTVAAKTEEQQTMLSLHRIRSLLVKFRTMQVNQLRGLLYEFGASFRAGRVGGLAEVRARMVELEEALPGAMMCCLQDQLRRIDELQKEIDQLERRIGAWQKQDVACSAIAAVPGIGKLTATALVATMGDAATFKSGREFAAYLGLVPRQSGTGGKVRLGSISKRGDPYLRTLLIHGARSVLCHTKVPTPWQSAIQERRPTNVAAVAVASKMARTAWAILAHGEAYRRDHVSLRPA

SEQ ID NO: 328444 - protein, 415 aa, unidentified
MVDVIVERCAGLDVHRDTVVATVRVPGSGKSRRRRVQETRTFGTTIGQLERLSDWLAECGVTRVGMESTGCYWKTVFYALEDRFDCWLVNARHLRNVPGRKSDVIDSRWCCELVELGLVRPSFVPPPEIRRLRDLTRLRATQVQEPTRVIERLEKVLQDAGIKLTSVASGVYSVSARAMLEALLAGVTDPAILAELARGRMRKKIPQLREALASRFDIGHHGVLVAGLLAHIDALDQAIGNLEARIGIATAPYADLIELLCTIPGVGVRIAEILIAECGLDMSVFPTVAHLASWAAICPGTNQSGRKRGSGKTRNGDTWLCTALTQAAHAAVHTKNSYLASHYWQLRGRRGDAKAIGAIRHDILTAYYHIVRDRVAYRELGSDWLSRRHSPEHRTRRLVKQLEALGHHVTLQPAA

SEQ ID NO: 328445 - protein, 347 aa, unidentified
MKILALDLGKYKTIGCDYERESGQHRFRGSLTTPAALQQLVKEVKPDRVVIEVCNIAGWVCDLLREMGVAVQVANTSDDAWRWRKVKKKNDRCDALKAAQLSAVNQLREVHIPTIEVRQWRALIAYRQQLVRRRGKVKNHIRDLLLTEGQLLPRGAKCWTELGVARLEALAKPLAEVGLHELWRGQLHLELRQLREVQAEIKLVEEKLDAVAANDPRIALLRTIPGVGPRLSEAIVALLDQPARFRNANQVSAYIGMVPKELDSGETVRRGPITKHGSRLVRSLLVEVAWAGLRHNAWVRQTYQRISGGKKSRKKIAIVAVGRRLLVRCWAMLRDGTSWRPPVASLV

SEQ ID NO: 328446 - protein, 336 aa, unidentified
MSYIGVDLHTTQITVGYLTEKDEISIRKYQLWEIEKFVSGLSGTDEIAVEATGNTGWFAEQVKDKVRRVVLVNPRQFEVVKNSVKKTDKNDAINLARFLKANLLPEVRAKREEAEKVQSLVNTRTKLVRLKTSLLNKIHALYVSNGLKLRRASLSSEKGLEKVFSIQWSEIEKLELEIIIDQIRSLKMSIKKLEKAIDQEAMKLKGFENLKTISGIGSLSAGILLSVIGNIKDFASEDKLASYFGIVPRVSNSADSVNHGRITKRGNKTGRTTLVQCSLSAIKKSEYLKKYYDGVKARRGHGKAKIALARKYLGIIYNTLSNNWVFAYFNNFELAE

SEQ ID NO: 328447 - protein, 449 aa, unidentified
MNHLLRIMHERVAGLDVHKKTVVATRMHIGADERLDWETQTFGTTTPDLLVLHDWLAEWSCTHVAMESTGDYWKPVFNLLEDDFEVLLVNAQHVKHVPGRKTDVCDAEWLAELLLHGLLTASFIPPKPQRALRDLTRYRSTLVHERTRVVNRVQKLLEGANIKLASVATDVMGVSARAMLAQIAAGQTDPKMMADLARGRMRTKIPELEKALTGLVGPHQRFLLAKQLAHIDFLDEQIGDISAEIVRWFERQGQDPGGAGGIDPHSEPDRPEPPSSAAEEPLTWEQAVALLDTIPGIDRRIAEDMLAEMGLDMGQYPTDKHLTSWAGLAPGNRESGGKRYSGRTRKGNRTLSSVMVQAAWSATRTRDTFLKARYHRLAARRGKKRAIVATARSMLTSAWHMLTYRQPYQELGGDYFDQRRKEAKVSYFTRQLEKLTGGAVRIELQVAAA

SEQ ID NO: 328448 - protein, 341 aa, unidentified
MAEVVTIGLDIAKSVFQVHGIDAAGAVVLRRQVRRAHLLLFFAKQPKCLIGIEACASAHYWGRELSKLGHQVRLMPPSYVKPYVKRQKNDAADAEAICEAVTRPTMRFVEIKSPEQQSVMVLHRVRMMLMRQRTQLSNAIRAHMAEFGLVAPIGREGLQNLIRLVETSDARVPEEASACLQLLATQLKLLNSQILATDRRIRTSARATETGRRLMGIPGVGPLLACALVATVPDPKAFKSGRNLAAWVGLVPKQNSSGGKQRMGGITKHGDRYLRQLLVVGALTVVRYAQRHGARRPWLVQLLSRRATKVATVALANKTARIAWAIMTSCESYREPMVQAA

SEQ ID NO: 328449 - protein, 368 aa, unidentified
MAKRTTFVGLDVHKESIAVALAERGRCGDVRAYGTVGGELEALDKVIRALRAPGRTLHFVYEAGPCGFTIFRHLTRLGEDCAVVSPSMTPKRAGDRVKTDRRDALTLARLHRAGELRAIYVPNESDEALRDLVRAREDAVEVTREAKQRVKAFVLRHGLRYRGQTGWTIPYRRWLAGLTMPEPAPQIALQEYLATVEEAEQRVTRLTEQLQHLVPAWRWAPVVDALQALRGVSFITATGLVAEIGDVRRFARAPELMAYLGLVPSERSSGPLTRRGHITKAGNPHARRLLAEAAWAYRSIPRIGRVMQQRQEHLPAAVRAVAWKAQLRLCGRFRRLSARGKPRVVIATAIARELTGFVWAVAREVPAP

SEQ ID NO: 328450 - protein, 469 aa, unidentified
MKKNNINSSKQKVKKEISIKLPKHLDHINKMAAGIDIGSASHFVAVPEGCATESVREFKSFTADLYELAAWLKECKVTTVAMESTGVYWIPLYELLEQKGFDVKLVDARHVRNVSGRKTDVMDCQWLQQLHTYGLLQGAFRPDEQICELRAYLRQRSMLIQHMAQNTQHMQKSLSQMNVQLHNVITDITGETGMNIIRAIVAGERDSTILAGYRHSNCKNSLETIKKSLEGNYRNEHIFTLKQALELYDIYQDKIRACDIEIEKKLLGFENKSQKDKKDNEPEVKKSNTYTKNKLSFDASSHLARITGVDLTAIPGIEASTAIKIISEIGLDLTRWKSSKQFASWLGLCPGNKISGGKILSSKTKRTGNYASSILRMAASTLHRSNTALGAFFRRMKSRLGTPKAITAVAHKLAVIVFNMLKNGTEYIESGQDYYEEQYKDRIVKNLRNKAKSLGFELVSVQNVESALL

SEQ ID NO: 328451 - protein, 342 aa, unidentified
MNTLTTGTAYQLYVGVDISAATATIAWMKPGSKVTRPFTIDQTPKGYAAFHTKIVEAGYTPAEVLVVMEATGAYWIGMATTLVEAGFFVSVINPASAHHFAKALLKRAKTDAIDAQTLAQLAALLQPEPWSPPPLVYHQLQQRLRERESLLVLQRQVSNQLHALQHSPVVITEVRSRMEALVETLKQQLTAVEAEIGQALSQDQEWAASAQLLQSIKGIGWLTAAWLLVTTLNFTTCESVEAVTAYAGLAPALHQSGSSVWHKPTIGHTGQARLRTALYLATLSAAQNNPVIKTFYDRLRSAGKPMKVARCAAARKLLHIAWAVVKKGQPFDPNYALKQQAA

SEQ ID NO: 328452 - protein, 402 aa, unidentified
MNAVGIDVSKGKSMVAIMRPFGEIVSAPFEIKHTASDINSLVELINSVEGESRIVMEHTGRYYEVLAHQLSEANLFVSAINPKLIKDFDNDSLRKVKSDKADAVKIARYALDKWQNLKQYNVMDELRNQLKTMNRQFGFYMKHKTAMKNNLIGILDQTYPGVNTYFDSPARSDGSQKWVDFASTYWHVDCVRKMSLNAFIDHYQNWCKRKKYNFSQSKAEEIYGKAKELVPVLPKDAITKLIIKQAVYQLNSASTTVESLRTLMNETASKLPEYPVVMAMKGVGTSLGSQLMAEIGDVSRFTHKSAITAFAGVDPGVNESGSYEQKSVPTSKRGSSDLRKTLFQVMDVLIKTHPQDDPVYQFLDKKRAQGKPYYVYMTAGANKFLRIYYGRVKEYLSSLPES

SEQ ID NO: 328453 - protein, 369 aa, unidentified
MGNSTTTSWVAMDTAAERIHVAIFRGEEATPSEEFEVKADAQGIGRLKKKLEKETGPVKCVYEAGPCGYGLYRTLNGSGYPCQVIAPSLTPRKPGERVKTNRLDARRLGNYYRGGQLTPVRIPDEQQEALRDLVRGRDDVRRNLQQSRQRLSGFLLRHGYHFKEGSRWTRKHWAWVKAIQFKQELAQMVVEEYITGVETQIEQMKRFDQKLHEISQRPEYAAKVSAYSVLRGIQTTGAMTIIAEGGDLRQYGWAPQFMASIGIVPGEESTGERRKPRSITKTGNAYLRRILIEAGWSYQKRLHAGAGIQKRRRNQPEALLAIARKADHRLHGKFSKLQYRYNKPSAVANVAVARELAGFVWAIGQFLEQ

SEQ ID NO: 328454 - protein, 350 aa, unidentified
MVVVGVDVHKRTHTCVAVDEVGRKVGEKVVTATTSGHAEAVMWTRERFGAEVVWAIEDCRHLSARLERDLLGFDQKVVRVPPKLMAQTRASARTRGKSDPIDALAVARAFLREPDLPVASHDEVSRELKLLVDRREVLVAQRTAMINRLVWRVHELDPERAPKARSLNLPKHRTILGSWLATMDGLVAELARDELTDITRLTEAINELAKRISARVRAVCPALLALPGCGELTAAKLVGETAGVARFKSEAAFARHAGTAPIPVWSGNTAGRVRMTRSGNRQLNAALHRIAITQIRLDGLGQAYYRKRLDAGDSNREALRCLKRRLCRVVFGRLHTDHYNRTQPCQQAAA

SEQ ID NO: 328455 - protein, 402 aa, unidentified
MDARDMDYEVFCGIDVGKSGHFAVSFRRDSLEPEMRRAIAADEADIRRALADASGGSRMLVVVDQPGGFGELPVAVARDMGFDAAFISPKDFHDLAVLYSEGKSDAADALVIADAPRRHPRLVRLVAEREEALSELRVLTRARADAVRERTRAYNRLHDCLERGCPPLEELFAGDALHTSLARAVIARYGGPAGLRRAGEKRAAQWASKLKGQANRGPEKIREAFEAIGRMGVALPAAGAVEAQAERLAPRLDQLEEEVAAAEREIARIADSLPEIALLQSMPGIGPVYASVIVAEIGGIGRFADGNRLASYAGIAPVKDQSGKRDSSKKSKKGNRRLKAAFLGSADAALDCDGASRAYYDRKRAEGKLHRQALRALARRRADVIYAILSSGRPYRQPAPAA

SEQ ID NO: 328456 - protein, 426 aa, unidentified
MSPSSPVSTVIVCWIGIDWADQEHVISLKAVGSPTVERLQLRQQSEALQDWIGQLRQRFAGRPVAIVLEQSRGPLLYALMHTDFLYLYPINPKSLARYREAFYPSGAKDDPEDADLLREIVEKNPERFRCWTPEDPLTRQLQLAVEYRRKLVTQRTALTNQLTSLLKSFFPQALEWAGGLDTAQACDFLQRWPSLQGLQATAPSKIRQFYRTHHSRDLQHLDERIAQIRAAQPLTGDSGIIGAMSLMVRSLAQQLQPLLDSIAEFDRLIQTLFQQHPDHSLFDSFPGAGAALAPRLLAALGSDRQRFETAAHIKSFSGIAPITRKSGHSRVVLFRLACPKFVRQTFHEWAGLTVRFSPWAREFYQRKRATGMKHHAILRALAAKWINILTRCWKEGIPYDEQRHLDNLKKRHAPRSLVGFSRERPV

SEQ ID NO: 328457 - protein, 354 aa, unidentified
MKRTTKYVALDVHQATTVASVREESGRVIARSVLPTDGGALTEFVCGMRGTRHVTFEEGTQAQWLYDLLAPLVDRVVVCDRRGAPRQGNKGDQVDADQLSELLRRGALRAVYHGSADRATLKELTRTYRNLVEDATRVMLRLKALFRARGIPTAGTAVYDARHRAHWLARLLEAGARFRAEALYAELDVLRKLRPKAKAAMVMEAQRDPAWPVLRTIPFLGSVRVALLLATMQTPWRFRTKRHLWAYAGLAVVTRSSADYTIVAGQAVRRRRSPMTRGLNRNHNRVLKDVFKGAATAATARPGPLQDFYHGVLARGTREELARLTLTRKLAALTLRLWKKGERYDPTKLTTPAR

SEQ ID NO: 328458 - protein, 456 aa, unidentified
MPLVNAHAAGIDISDKEQVVAVGENICAERVRKFGAMTCDLQSIAAWLKECNIETVAMESTGVYWKPLFSLLVQEGFEVYLVNSKHVKNVTGRKTDEDDAMWIQKLHSCGLLKSSYLPGDEQDALRTLTRYRRTLVQDSSRFINRMQKSLELMNIKFHTVISDIVGVTGKAVVEAIIAGERKAENFLPLIGSRIKANHETIRKSLEGNWRDEHLFTLKESYEFYKMYQRRIAEFDKEIEKQLQCFEAKCNEGVIETKKDDKAKSNTAKADNTSAKGDKEKKTKKKKDKNHPPFDVRGYLQRIHGVDVLAIPGLSETGGLEILAETGTDLSDWERDANFRSWLNLCANNKISGGKIISSAMMKKKPNAASQAFRNAANAVQRSDNWLGDYFRRMKSKGGNKYAVLATAGKIATIYYKMVTNKEEFKAVDLVEYQQKYKKAKIAYLERMLDKLKGEAA

SEQ ID NO: 328459 - protein, 387 aa, unidentified
MTKNKGRVVGLDVHPDSFAGAVVEGRDPASAVVSSTSTRVELEQLEQWALRHTSTEDTLVLEASGNAFAVAARLRVIGRAVEILDSHRAGKVGKVYCANDRVDAVKIARIYLSALSPIVWQPDQKTLERREVFSAYQAVVKESTRAKQQLRSMLNEHCVRLEKGFRLCHPRAITRLLKLREWTPARSMLLQQLHSTLVAARMRRTLLRRHMAQEIVAEEALLRLTRLCGINLITLYGVVAAVGDVRRFTQSKKLVAYLGLNPSVSQSGNFQGSGALKRHGRGALRALLIQSGKKLLEVINPLQKWGLALAARRGRNKAAVAVARKLCVALWHVMIGHAIGTLERLDTLQTKLSKFATEIGPAALTAFGYNNKADFVEKKLYVLRSYP

SEQ ID NO: 328460 - protein, 374 aa, unidentified
MSRSIIYLGLDVHKDSITIAVLPAGAPAPTRHERLPNDLAKLRRFCERLAVQGELRACYEASGAGYVLHRAMREWGYPCDVIAPSLIPSKPGQQRKHDKHDAAQLARLYRAGELTTVRIPSEAEERVRDLVRCRETLQREVLKSRHYILKFLARRGFVYRDGTNWSTAHYHWLRRLAAVSSSLVAEDQIVFGEYLGLLEYKLSRRDELDRRIAELALTPALAPAVNRLQCFRGVQRHVAMVLTTEIGDWRRFATSRQLMAYLGLVPREHSSGDRERRGSLTKAGNAHCRHVLVQAAWAYRFQPKVGIALKARQRGQSPVVIAHAWKAQHRLHTLYRRLAFRTRPQIAVVAVARELVGFLWAVMQDQDCGSHAAA

SEQ ID NO: 328461 - protein, 407 aa, unidentified
MEVLHSRCAGIDVHKDVVVAAVRCVSSPAHREVRSFGTTTSELQALSDWLESHGCTHVVMEATGVYWKPVWHLLESHFELVLANAQHVKNVPGRKTDVADATWLAELLAHGLVRGSFVPPAPIQELRDLTRTRKQLVRELSQHVLRIQKVLEDANVKLGSVLSNVIGKSGRAMLSAIIQGETDPEKLANLAVGHARKKRPELIESLRGRVTAHHRNLLRLHLGLIDSLQAAIAEVDASVGKALEPIQARATLLTTMPGVSDIVANVLVAEIGVDMSRFPTPGQLVSWAGLCPRSDESAGKRRTTRVRKSGTWLKTTLVTAAWCAVRAKDTYLRAQFLRIKSRRGAKKAILAVAASMLTAVYFMLRDDLPYNDLGPNHFDRHDKRKTISRLMRRLQDLGCEVQIKPAA

SEQ ID NO: 328462 - protein, 413 aa, unidentified
MALKIVYQICCGIDVHKTFVIACIASTNSTITTYKRHRFSTFTKGLKELSQWLCENNCRDVCMESTGKYWIPVFNVLETTCNITLAHPKYVKAIRGKKTDKKDAQWISDLFKHDLVAGSFMPPLAIRQLRDLMRYRFKLTNFRSSEKNRFQNSLTVSNIQLGNVVSDTFGKSSMTIIDQLLNNPLDQPLDIPSLIHGSMKKKIPELEMAVDGFITPEQAGKLRIIKHHYEDLNDRKSDLEDLILCLSLPYAEKINLILTVPSFKNIFSAITIISEIGADMDVFPTAKHLCSWAGLTPTNNESAGKKKSVRISRAGCYLKPLLVQCATAVVKSEKHPEIRNRYLKIKKRRGHKRAIIAIARMLLTAIYMILKKNEPYNAELYKKSDVLPVSREITVEQAIALAKSQGYLILTGT

SEQ ID NO: 328463 - protein, 426 aa, unidentified
MSRVVIGMDPHKRTATIEIMASDETVAGRGRYTTDAAGYRSMLAEARRWPERMWAIEGCQGIGRHIANRLLADGEQVVDVPPKLSARTRVFATGQGRKTDVTDAHSDALAATRMQGLRPVVDDAQLAVLRILADRRRSLGEDHTRMVCQLHQLLLELIPGGAKKALSAAQAKALLARVRPRDAAGKARRRVAAELISDLERIYQRKKDANKELNALLKATATTLTDLNGIGPSGAARLLVEVADVTRFPGKAHFVSWNGTAPIDASSGDQVRHRLSRAGNRQINRVLHIMAVVQLRHRDSEGRAYYDRKVAAGKTPMEAMRALKRRLSDIVYRQMITDAQAVVTGPGGHVGAATGSSAAGSNPSTGASEKSLPGPAIHEPMPASRPILQVAPGASGPRRTAAVVKRRLLDDGEDRRTLARREQPPS

SEQ ID NO: 328464 - protein, 339 aa, unidentified
MTLYAGLDLHSSNTYIGVLDQQFKRIFKKRVANDLDLILETLEPFRGQLQGLVVESTYNWYWLVDGIMDAGYSCVHLANPSAIKQYEGLKHSDDQHDAFFLAQLLILGILPQGYIYPKEARPVRDLARKRMFLVQQRTAHILSLQSLLARCCGQKVSSSQLRKVTGQDLKRWLKEEHLVLSAQANLDNIVFLKQQIGRIEAAIQKQVKLSEAFNCLLTVPGIGKILAMTIMLETGDIHRFANVGNFASYCRCVSTQRLSDGKSKGSGNRKNGNRYLSWAFTEAAQMARRFNSRFRSYYDRKAAQTNSILATRALSNKLARVCYYIMRDQVEFREESVSN

SEQ ID NO: 328465 - protein, 341 aa, unidentified
MKNLFIGVDFSKEKVDVAIIFADGLTETAPRVFNEFKTTVSGYKQLVKWVEQNSCGIDSSLWLFCGENTGDYSKGLCNFLYGKGYDMWLENAKSIKDASGLRRLKSDRADASMIAEYAMRNYDKAVMYEPLSESLAQLRELFLYRQMVVRHRCSFQVRRGEKRLTMEKSPVKTMISQSGRHIVSELNKEVEKIDKRIAELIKSDEELTEVFTIVTSVPGIGTQNAVCLMVYTDNFRRFNYDSRKISCYYGIAPFGKDSGTSVHSEPHVHYMANRQIKAMLTQAALAAVNFNPVMARYYMRLVERGKKKQVALNNVKNKLVHLVTAMVRNRQTFTPEYKISA

SEQ ID NO: 328466 - protein, 356 aa, unidentified
MVTGPKHQKEKRSMEHFAGLDVSVKDTSVCIVDYTGRIVREVKVASEPEALLAVLTNSAYHFKRIGLEAGPLSQWLFSALGEAGLPVICVETRHMRAVLQAQINKTDRNDARGIAQMMRAGLYRPVHVKTLRSQKLRMLLTHRKLLQSKAIAVDNDLRGTLRNFGLKVGVVGTVKFEARIKELVESLPDLAALVEPLLIVRRVLREQIAVLHRRLLAIVRDDAVCRRLMTVPGVGPVVALTYRATVDVPARFKNSKAVGAVFGLTPSKYQSGEINRTGAISKCGDEMMRVMLYEAAQSMLTRTVKWSWLKAWAMTIARRCGLKKAIVALARRLAVIMHRIWVDGTEFSWTRQAVVA

SEQ ID NO: 328467 - protein, 341 aa, unidentified
MSDYSYFCGIDLAKNHFSLHAVDQNGKVILHKSVTRSKLLTTIANMPLMRIGVEACGGAHYWARTLNTLGHEARIMAVKYVIPYRTKGKNDLNDAVAICEAVQRPSTRFVPVKSPEQQAILSVHRMREHWVRERTALMNRMRALLSEFGLIIPVGRSSLMKHVPLMLEDAENELPHLARTGIADAYHHLGELNQRIADTEQVFDSFAKVSANVQRVMKVRGIGPQTATAILASIGNGSQFDKSRDFSAWLGLVPKQYSTGGKPRLGRITKHGDKYLRTLLVHGARTVIANLGDKQDKLSQWCRGVLERRGMNRAIVALAAKNARIIWSLLHNQTEYENYAA

SEQ ID NO: 328468 - protein, 428 aa, unidentified
MAVIGRAIGLDVHLDFCEVAICEAGELRSAGRIETTPERLELFAGSLGPGDRVALEVTGNAWEIARILEPHVAKVIVVSPADTGIRQARAKTDRLDARTLARLLAAGELDAVWAPDEWTRVMRRRLGRREQLVRSRSRAKNEIHAVLMRRLKGRPPVSDLFGVKGRQWLGGLEFPVEEQETVDGCLRHIEFLDREIAQVERLIATEALGSAEIRRLMSVPGVNVIAAASFMAAVGDIRRFATQRQLVGYLGLDPKVRQSGIAPAKSGRISKQGSASARWALVEAAWSVVRQPGPLHAFYQRLRFRRGSQIATVAAARKLACLFWCMLTRGEDYAHQQPSLTAKKLRLLEVRAGAPTQKGKRTGVWANRGAMREAEQRLAQQAESSYARMVRDWQAARPTTAKVGASVTPGRASQKPSKGKVARQTTSP

SEQ ID NO: 328469 - protein, 354 aa, unidentified
MSNKSIATIATMGIDIGKNSFHVVGLDRRGAIVLRQKWSRSQIEVRLAAMPPCLIGMEACVGAHHLSRKLQAHGHDARLMPAKYVRAYSKGQKNDFRDAEAIAEAVQRPTMKFVATKAVDQLDLQALHRVRERLVRQRTGIINQIRAFLLERGIAVRQGFRCLRTELPGILAKRSDALSPRMMRLIEDLASDWRRLDERIEGLSADITSLVEQDPACARLMTVPGIGPIISSATVAAIGTGDVFSKGRDFAAWLGLVPRQISTGDRTILGKISKRGNRYLRVLFVQAAWVVLIRPQSWERHGLKPWIEAAKKRLHHNVLAIALANKLARIAWAVLNKERNFEVTRTTAPSSQPA

SEQ ID NO: 328470 - protein, 338 aa, unidentified
MKTHVGVDLHQRFCYLTAVNASGKTLRQGQVVNEGEALRAWLRQVPGPRQVVVEASGFWPAFARAVGGESHRLVMVHPQRVKAIASARLKNDRVDSETLAQLSRCDLLPEAWMADAVTQQLRLRVRLRMSLGRQRARAKNQLQSVLHQEGFKKPVTDVFGKRGRAWLKDIDLSPAARLAVDTWLREVDHLDAEIGERKRELEWMAREDARARCLQSVPGIGPYAAMTILAELGEVERFESKRALASYAGLVPVVRESAGKRRRGSITHQGSNTLRWMMLQVAQVAARSSPAIRTWYAALRQRKPTQVAKIALARKLLTVVWALLHHGVCFDEQTFARD

SEQ ID NO: 328471 - protein, 319 aa, unidentified
MAKIVLGIDVSKLTLDVALIFDNRTLCKQFKNSLEGFKSLAAWLASLQITRVHACLEATGTYSEAVALFLHESGHLVSVVNPLRIKGYAGANMQRNKTDRLDARLIASFCQTQKPDQWQPPSEAVKHLQSLVRRVEVLEEMRQAEENRLANTVLEIKPSIERMVALIKEEILQLEQQIKQHIDRNSHLKEQSELLQTIPGIGRRTANLLLSEVEFDRYASARAIAAQAGVTPRKKQSGTSLKQTSLSKLGNARIRRALYFPAIVARQHNEIIKEFAKRLQKRGKTPMQIVCAAMRKLLHIAFGVLKHKRAFDASLAFSA

SEQ ID NO: 328472 - protein, 369 aa, unidentified
MARNGTLAKIQELKPSFQATTEQITIGVDLGDRFSHCCVLGPDVKILTEGRLRSTPETMARHFQDLPPSRIAIEVGAHSRWLSQLLAEWGHEVIVANPRNLRMIADSIRKSDQVDAHMLARLARVDPKLLSPIVHRKQESYPDLIQLKARDLSVKNRTRLMNAVRGVLKSAGLRLSPCGTSCFPSKAAMCLPDELKPSLTPLLETISHLNKQIYLLDKAIESTAQNRYPETIRLRQISGVGPITALQYVLTIGDPGRFAHSRDVPAYLGLTPRRHQSGSVEQQLRISKAGNKQLRSLLVQCAQYLLGRFGPDSDLKRWGTRMFERGGKNSKKRAIVAVARKLAVLLHRLWVTGDTYHPLYNVDADQVTP

SEQ ID NO: 328473 - protein, 317 aa, unidentified
MQTFLNVGVDVAKDAVVVACAAQSFAVHSVVNQRAALLAWLKSLPAGCRIGLESTGGYHEVLADLAYAQGHRVFLLNPLDTRHYARAMGKRAKTDRVDAELIARLIAQEHAHLRPYTPPTANQRKLDRMLRRRAKIVRLKSSLKQTMQNLSGFAAELKAVLLRLEALIGRIDVAMSAIAASSPSHEAAQHRLQTIVGVGPVVGMALTNTLERVPFRNADAFVAFTGFDPRANDSGHKTGRRRLSKRGPAELRRLLFNAAMSAAKTNVWRPIYEHYRTQGWSTTATLVIIARKIARAAWSIHHYHSTFNPERITNQKT

SEQ ID NO: 328474 - protein, 377 aa, unidentified
MEKDSRFVGLDVHAETIAVAVAELGGEVRSLGTIPNTPEAVRRLAKKLGPPETLRVCYEAGPTGYVLYRQLTALGVPCAVIAPTLVPVKAGERVKTDRRDAEKLARSYRSGDLTPVWVPAPGHEALRDLVRAREAAKKDQLRARHRLGKFLLRQGRRAPTGSKAWGVKHRAWLQTIRFAHAAQDATLLDYLTEIDHAADRIVRLERAIATAADVAPAPVRAVIAGLQALRGIAKLSAVSIVTEVGALSRFAKPRQLMGYSGAVASEHSSGPHRRRGGITKTGNAHLRRIVIEAAWAYRHRPAIGGTLRTRQQGLSEEVKALAWKAQHRLHGRYTRLLAKGKAPTQVVTAIARELLGFIWAIGVHIEQPTAGGAPAAA

SEQ ID NO: 328475 - protein, 413 aa, unidentified
MSEAPARPKRFVALDVHKQYVMVAAVDRDRRVVLPPRRVTFDRFDGWIAQQLRPSDAVVLEATTNAWHVVDQPRPLVAAVTVAHPLKVGEIAGARVKTDARDTLVLARLLSVGMIPEVWIPPAEVRDLRALVAHRQRLIRQRTQARNRLQSVLHRHNVVPPAGALFGPERRAWWAGLDLPPLERLRVRQDLVLLDSLGPLFAEVEEEFMRLSTTEPWAADLPFLMQLPGLGVVTALILLSAIGDIARFPAAKHLVGYAGLGAAVHDAGQTHRGGAITKQGRRELRAALIEAAWVAVAHHPHWKEQFTRLAQRIGKGKAIVAMARKLLVVVWHVLTARTADRQADELAVARKMMRWGAHGHVATRPGLSRGAFVRRQRAHLGLGAELASFAYNGKTVRLPAAEGGTSPPTASVA

SEQ ID NO: 328476 - protein, 367 aa, unidentified
MGNDNIVWIGMDTDAKKNQVALYRGWETQPAAEWEAGMDEKGIKRLIERLKREEGEVRCVYEAGPCGYELYRKLRRAGIGCDVIAPSLTPKKASDRVKTNRRDARNLGRLYRAGELTVIGVPDEKQEALRDLTRAREDVREDLTRRQHRLNRFLARQGCHYQDGEKWTQKHWAWIRKIRLEDSNAETVREESIRAVEQSQEQLKTYDAKIEENAGKPEYAKKVERYQTLRGVKTVTAMTIVAEVWDMRRYGRAPQFMGSTGLVSSERSTGDHERRGKITKTGNAHLRRVLVEAAWHYRHRPIAGQAIKKRRQGQPEAVVSIAERADQRLNRKFRRMVDRYNKKPVIAAVAVARELAGFIWAIGQLQD

SEQ ID NO: 328477 - protein, 323 aa, unidentified
MYTPVVLHIGVDVAKDEVVVACEEEAFAPRVLANERRAILGWLKTLPAGSCIGMESTGRYHRLLAGLAFELGLVVYVLNPRDCWHYAKGVGLRAKTDRVDARLLARIIAREAGKLHPWCAPSMQQQELEQLLRRRASVSRMRAGLVQSLEELSGFGPERQRPLLQQLKGLIACFDGRIKTLIEASGERLAAYRRLQGICGVGPVVAAALLNALERMAFARADAFIAFTGLDPRADDSGRRRGRRRLTKRGPSELRRLLYVAAMAGARTAPWKPRYEHERAKGLSSTEALVVLARCIARTAWSIYTHNTEFDPKNDSQWARHQP

SEQ ID NO: 328478 - protein, 423 aa, unidentified
MSETVSGAEPRFAAFVAIDWADQKHVWSLQPANSEKRQHGQIEHTPEAVESWVAMLCGRFGNQAIAVAIEQSRGALVFMLSKYEQLHIYPIHPRAAAQFRAALFPSGAKDDPVDAELLLDLLVHHRARLRPLRPDTEQTRLVQHLVEGRRRLVDEKTRQSNRLTAKLKLYFPQVLNWFDEVDSALVSALLERWPTLEDLQKARPATVRSFLTGHGCRGNERIEQHLEQIRQAVPAIRDLAVIQSSVTTTKILVDMISTLREGIATFDQQIDRAVTAHPDFAIWDSFPGAGPALAPRLLAAFGSRRDRYETAADMQKFSGIAPVVERSGKMEWVHFRWACPKFLRQSFHEWAGHSIGFCGWARAYYQLQRQSGHDHHAAVRALAFKWIRIAFRCWKDGVPYDDSRYVASLRRRGSPLAQAISQP

SEQ ID NO: 328479 - protein, 339 aa, unidentified
MDLHGGLDLHGDNVYCTLMDKEYRPVYEKRLPNDLPTILGALEPYRSRLAGLAIASTFNWYWLVDGLQANAYPTRLANPARMEENIGLKSANDKTDSRFIAKQMVMGVLPQGYIYPKEERPVRDLLRRRMRLVHMRTGEWLSLEGLVARHTGKDIGIQALNKLKEDELNTLLGNDPLLLQAARINRGHIEFLGDRIREMEKTAEEHVKLADGYERLLTVPGIGRILAMTIMLETGPISRFPGPGNYASYCRAVKAEHTSNDRKKGKCNGKSGNRYLAWAYVEAANFAIRYSPELRAWYQRKAAKTKRVLALKAVANKLAKACFFILRDGVDFDVKRLIG

SEQ ID NO: 328480 - protein, 456 aa, unidentified
MPGSKTTRVKSAGRLLTINPDAAGIDIGATFHVVAVPPDRDERPVRTFRTFSSDLHQLADWLKEVGVKTVAMESTGVYWIPAFEVLEAHGFEVLLVNARHVKNVPGRKTDVTDAQWLQQLHQHGLLRGSFRPRDGVVRLRAYLRHRERLVDYAASHIQHMQKALMQMNVQLHHVVTDITGVTGMRIIRAIVSGNQRPEQLAEFRDVRCSASKETIREALTGNYRPEHVFALRHALELYDVHQAKIAECDVEIAAVLRTLNEERPAPEEPLPAVRHAKGRNEPKFDARPALYTLLGADLTQIHGFGPYTVLRLVAECGDDMRKWPTAKNFTSWLTLAPGNKISGGRLLSSKTRRSASRAAALLRIAAVNIGRTQTALGAFYRRLAARIGKAKAVTATARKLAILFYRALRFGMTYADPGASYYEERHRERVIHNLHRRARELGFSLVANAAADSGVS

SEQ ID NO: 328481 - protein, 413 aa, unidentified
MQAYYVAGIDVHKAMLAVVVSEVKAGECEFQRRRFGATRTQLRELIEWLVGQGVQEVVMESTARYWRPVWVALEDTGLKRHLAHAHSNGARRGRKSDFRDAERLVHRLIAGELVLSYVPEDEQQGWRWLTRTRYQLVCERGRVQSQIESLLEDAQIKLSSVITDLLGASGRRILEALAHEQGQHDPAKLAELGHAKLRASRRELTDALDGRWLERHRFLLGLHLKRIQQLDGQIEEIQQQTASAMQSCQEAVARLIEIPGIRTEGALQMIAEIGPTAVAFPSPGQMASWVGVCPGQQESAGQSYSRRSAKGNWQMRRLLSQAAHAASHAKGSFFESLYRRLAPRIGPHKAIWAVAHRLCCLIWKILHQGVHYTEQGARTLTPQGIRCKQRKIIAEFRKLGFQVQFTPTNSAHG

SEQ ID NO: 328482 - protein, 397 aa, unidentified
MISRRWSRLYLVGIDVSKYKHNGFIATEGGVRFSEFVFQNSQEGFQVFLKQLQALDPHQEIRIGLESTGHYGMNLKQFIAASGYTYLEFNPNKTHQFSKAMSLRRSKTDKVDARVISNLLGIVDYKTLQSSFYHINELKQLVRDRDDIMTNRSKTLNRLTNLIDITFPEYKPFFRNNWGVTALFILKKYHSSVRIAKWTTRDYEQIKSVSMGKMTYPRFNNLRALAAKTVGVRSEIYDQRIQRVILDYEYSDASLQEIDARITELFEHAPSKLRSLPGMGPVMAATIYAEVGNFHLFPSATKLIAYCGYDVSVEQSGLSEHHGKMVKHGPPLLRKAVWTYAFQSLRFIPALHDYYLRKKSEGKHHKVALAAVCRKLIRIIHHIETNQEPFDALSIKQ

SEQ ID NO: 328483 - protein, 316 aa, unidentified
MKTQVFVGLDVSKQHLDVAVRPQGRHFVISNDDRGLKQLVKRLAALKPQLIVLEASGGYEFLATATLAEAQLPVALVNPLAVRQFAGATGKLAKTDKIDAQVLAHFAEAVRPEPRPLPDQEHQLLKAALQRRVQVVKMIGQEKNRLEKTFIPALRQDIQAHLTWLQQRLEQLDRDLNDQIRRSPLWRDRDRLLRTIPGIGPAISRAIIAQLPEAGTLPGKQAAALVGVAPFNKDSGRFRGKRMIRGGRSYLRRMLYMAAVVAARWNPVIRTFYQRLLAAGKPKKLALTACMRKLVLILNAMLKNNQPWNQFVNQAP

SEQ ID NO: 328484 - protein, 315 aa, unidentified
MALVPCFVGLDIAKDHIDVSVRPTDDRWQAEQSDGGIAQLVARLVALTPALVVLEATGGYETAVATALAVAQVPIAVVNPRQVRDFAKAIGQLAKTDAIDAAVLALFAERVRPDVRPLPDEAHQELIALVTRRRQLLEMLTAERNRLTTARRSVRASVQQHVRWLERRIQDADADLTTTMQSSPLWRAKDDLLRSVPGIGPITSSMLIALLPELGALSRREIASLVGVAPLNRDSGQHRGRRVVWGGRAAVRAPLYMATLVATRCNPVIRAFYQRLRGTGKPPLVALIAAMRKLLTILNAMVKHQQSWQPIHVEN

SEQ ID NO: 328485 - protein, 371 aa, unidentified
MGESSKTLFVGLDVHKDTIAVAYAPNDRGADVVSLGTIGTRQCDIDKLTRRLESKGATLVFVYEAGPCGYWLYRYLARRGFSCSVVAPSLIPRKPGDRVKTDRRDAVTLARLLRSGDLTSIYVPSVADEAIRDLSRGREDAVGDLKRSKVRLKAFLLRQDIRYEGRANWNAAHLRWLARVVCPTPAQQIVFQEYVHTVTEQSERLRRLESELHTAVKTWRLYPVVEAVQALRGLDLTGAGTLIAEVGDLTRFDTPRKLMSYLGLTPSEYSSGAHRRQGGITKAGNGHARRALVEGAWAYRYPAKVSRHLQLRLEHVPPQARAIAWKAQVRLCKRYRLLSARGKHVNQVVVAIAREMAAFAWAIARTVPVAS

SEQ ID NO: 328486 - protein, 367 aa, unidentified
MKDTTVFVGLDVHKESITAACVDAAHDAPVIDLGTVGTQQYAIDRLLKKRSGRGRLKLVYEAGPCGFWLQRYLTDKRLDCVVAAPSLIPRKPGDRIKTDRRDARNLALALRAGTLSTVHVPTPDQEQFRDVVRAWQQTKRDVSGARQRLKSFLLRHDIRYTGTANWSAAHRRWLSEMVLPAAPQQIVFQELVDAINERERRRDRLERQLDELAPHWSGYALSQALLAFRGIQKTVAYTVIAEVHDLSRFAHPKHFMAWLGLVPGEHSSGATRRQGPITRCGNRYARTLLTEAAWAYRYAPKVSRIIESRAQDIDPQVRDIAWRAQIRLHHQYKKLTARGKHKNVAVTAVARELAAFIWDAARLVPLR

SEQ ID NO: 328487 - protein, 392 aa, unidentified
MYIIGIDIGKNHHEASIVSPEGKQIGRSLRFATTHKGADSLMSFIFKNIGNSPCVFGMEATGHYWYPIYSFLKAKGYTICVINPIQSDSLRKMYIRQTKNDSIDSFLIAEVIRFGQFGTTSMADENILAMRQLCRYRDSVISSRTEIKLRIGTIMEQIFPEYEKQFSSLWVSTSMGILEKYLTPENIENAPIDELFEIIKDKSHNRLTKAKAISIKEAAADTFGIKIAQDAFSFQLKQLIDRMNFHDKQIEALDIEIMKYYEQFDCYLHTIPGIGIIGAATILAEIGDISRFKNSSALVAFAGIDPTVRQSGEFNSTHNHMSKRGSPYLRHAIFLAATTCSFHNSPLNAYYKKKRDQGKHHLTATGAVARKLTTVIYAVLRDSKPYEPKKFC

SEQ ID NO: 328488 - protein, 309 aa, unidentified
MDATIVGIDVSKDRLDVHVRPAGEELAFSRDAAGIEALVARLSPLMPRLVAVEATGGFETVVAASLHAAGLPVVVVNPAQVRAFAQALGKRAKTDPIDAAVIAHFAEATKPEVRPLPDAETERLADLVARRRQIIGMIAAERQRDKRATKRMRQSIARLVAALNAELAVLDQDITDAVRGSPAWREKEDLLASVPGVGPVIARTLIAELPELGGLNRRQVAALAGLAPFTRQSGQWRGKSFIGGGRATVRTALFQGALSAFRWNPTLKQFHQRLIAAGKPKMVALIAVARKLLTILNAILRDRIPWQNA

SEQ ID NO: 328489 - protein, 337 aa, unidentified
MKRYLGVDLHRTQFVVCTRWENGEQEIRQWRIGELAKFVEQLQSQDQIAVEAMGTTARFYDAVAGRVARVVVVNPHQFKVISESVKKTDRKDAQALALYLEKDLLPEVRMKPKQNRELMHLAETRDLLVKQRSALKGKINNLLAMQGIELKREALSSKIALARVLALPVSGMVQLELRILVEQIRALSESIAELDERLEEEGQQLPGYENLTSIKGIGSLSATVLLTVIGKISDFADENKLASYLGLVPKIANSNESERSGRITKQGNKLARTALVQCGLVAKRYSPYLSRFYDRIKQRRGGGKAKIALARKLVKIVYDTLKNQWVFEDFPSFTLAA

SEQ ID NO: 328490 - protein, 318 aa, unidentified
MTYVGIDVSKASLEVCALGDSVQRLQVNNTRSGWKQLTRWLKQWPTVWVALEATGTYGDGVSAWLHEAGIPVSVVNPARIKAYSQSQLKRHKTDAIDAQLIADFCRSQQPPLWQPPSPAERELRDLVRHLDDLKALRQAEKNRLEAKPASRAVVQHLHQLVALLDRQIDEVLRQIRDHLDRHPDLKAQHDLITSIPGLGDLSSYHLLAELGDIRRFSNVRQIVALLGLNPSQRQSGRSLHHTAGIARMGRSRLRAALYLPAVVASQHNPLLKVFAERLRASGLAKKAVVVAVMRKLVHLAYGVLKSNRPFDPHFASAA

SEQ ID NO: 328491 - protein, 404 aa, unidentified
MPNFYVGIDVSKFKHTCCIISDQGEVIQKSFDFSNSKEGFTSLLNALKLIAEPHRFQIVMEATGHYHEALFRYLLANEFQAQIKNPVVISRFKDSEFVDKAKTDKLDALLIANYALRHSFTPSLLKSYNILRIQKLARAKYYLYQDRMRVINHLHRYLDESFPEFVKFFKERDDKVKRYQGRNFFDSPTILWLLLNFPSAKKFANARIETSEKLRRMSKGSFSLVKFNKLREVAKNSIGVSFLETEIIIVQLVKDLISVDENNEELDRCLEPLIDEFAPQLLTIPGIGYRLAGLFISEIGDATQFSTPDKLIKFAGLDVRVYQSGTVEKRGGIRKRGSPLLRYALFQAAEKARIHCPELAEYYSKKKNEGKHWICALTHTARKILRTVWALLTTGQSYNPNSIH

SEQ ID NO: 328492 - protein, 346 aa, unidentified
MTTVTIGIDLGDKNHEVCVLDNAGEVIDRFMVGNTKIQLQKAFAKYAGALVAMETGTHSPWVSRVLVALGCKVLVGNARKLRAIWASSQKSDTKDAEMLARIARLDPKLLYPIRHRSQKAQVDLEQIKARDLLVRLRTDLINHVRGVVKSLGERLSKCATPAFHKRVQKELPDDLRTALIPLLEQIGSLTGQIRAYDKQLEEVAETAYPETVCLRQIQGVGLITALAFILTLESPDRFDKSRAVGPHLGLTPRKDQSGSSDKQLRISKEGDVYLRRLLVSCAQYILGPFAQDSDLRRYGERLIARGGRAAKRKAVVAVARKLGILLHHLWSTGEVYQPLHNAKPAA

SEQ ID NO: 328493 - protein, 427 aa, unidentified
MKNSTARKLRQIPAGYLIVGIDAHKKKHAAVVKTQDAFTRTKFKVSNSRDGFVELLERTKAQMVKTDSRGTIFAIEAGGRYWRTLAYFLEEQGIPFHLISPFTLKRRREGEDIDRRKNDYRDADMAAELLRTGKFTETKLPQGIYADLRAAYHTYYSLGRERSRATNLLNALLDSLFPEFHNVFKDVSTKTALAVLATYPSPHVIAEMSMEKFMDTMTAKYKGQHLIRKKLSPIYQAAHGSVGIHAGAGVISFEISLLVERIRLLTEQRQKVEELLVALGEWIPESKYLLSIPGLGHITIAGILGELGPLNLYRSGKQLVKMAGINPMQSESANKQASKTPMSKKGRPLLRYCLWEASLNVLNHNQEFKAWAKRLQERPLHQNPLKKREARGAVCKRLLYLVFALFNKRSFYEKNYKIETERELVTA

SEQ ID NO: 328494 - protein, 381 aa, unidentified
MIVRFEHPTQTVVFLDLLDGLRAAGRTVEVPMEPTGTYGDPLRYQLGCRTIPVFRVNNKHVHDAAEVFDRSSSKHDAKDACLIAWLHVHKRSARWLELPETRRSIRALVAQRELFDTPLRRLLSQIEPLLARHFPELEKFFDLSRRKTPFRLLEAFGSPAAVAQAGAEQVTQFLRKAARKSPDAVMVAALLQAARTTLGVALIADELQLVRMMSTEILRLMSMRDQVDARIEKAGADVPDVQAMRPCLGAVTAAVVYAYLGAPRDYSCADALEKAAGLNLVETSSGTDQGTKHISKRGPGIVRKYLFLAAMRLIQTDPVVKAWYQARTSFKADQKAKALIAVERKLCRALFHITADNPFDASKLFDTRRLALVVPNIQEAA

SEQ ID NO: 328495 - protein, 322 aa, unidentified
MRYIGIDVSKATFVVAYSSDKGGEIRTFNNTTTGIKQFIGALPKDGSIHCVMEATGNYSALLLYMLNVAGITVSMENPLKVKNFAKALLSTVKTDKSDARLITLYGEKMNPRPFKVQGEAILRLRQKRTVIRQLTKQITAMSNLRGSLACLPVPDKGATHTVDETIKFLEKKRDRLQAELTDLVEVEVSRQLALLTTIKGIGITLATALIITTGGFTYFQNAKQVSRYLGICPTYEQSGTSVNIKGHINRNGDAYTRGLLYIAAWPASRFNAQCKETYTRLRQNGKSGKLAMIAVANKLIRQAFAVVAHDKEYIDGFVSNRP

SEQ ID NO: 328496 - protein, 340 aa, unidentified
MEVSMIGLDIAKQSFQVHGVGADGSVLVRRQLRRSQVERYFAGLAPCMVGLEACASAHHWARVIAGYGHEVRLVPTRTVKAYVRRGKNDALDAAAICEAAGRPGVRLVAAKSMEQQSVLMLHKSRDLLIRQRTMLINALRAHLAEFGIVAAKGAIGAAALLTLLRNGDPRLPALAQQAVLALADQLESARGQVLALDRAILAWHRSDALSQRLAPIPGVGPLSATALAVILRQADHFSSAKAFAAALGLTPKEHSTAGKTRLRSISKMGNGYLRRLLVLGATSQLRRAPKATTPAAAWTRALLARRPARVAAVALANKTARIAWALVANQRSYDPSYRAC

SEQ ID NO: 328497 - protein, 313 aa, unidentified
MAQRTAVVGIDVSKEWLDVAVHPGGEHWRVTNDEAGWRALRRRLRGQGVRAIGIEASGGYERNAIIALVEAGLPVRNVNPWKLRQFAKAAGILAKNDRLDAHVIARFVDTLPSRPARHDPDLARLAELVTARRQLVDDRQRCSNRMELLCDTALRRLQTRRIRQIDADVVRLDRRIAETITRVPAFAERYERLSSVPGVGPVLAATLIAFLPELGSLQNRQIGALVGVVPYDFDSGKMRGLRCIWGGRARVRRVLYMAAQIAAMHNPVLKAFKQRLIAQGKKPKVAIVAVMRKLIVCLNAMVRDNLPWRPMHA

SEQ ID NO: 328498 - protein, 353 aa, unidentified
MRKLLGYQAKGKEVFIGLEDAKRTWKICARSEGDIIDQVSMPAKYEVLIKYLKRAYPECKIKVMYEAGFHGFWLHDLLESDDIECIVTPPNLLVMEKRNKVKTDKRDARRIAKNLENDDYISCHVPDQELREDRQISRTLNQIQKKVISTKNQIRRFLEFHGLDREMKAGAWSNKNYENLRGLKLSDSLSICLTSYLDTLSYLQKQQLKLTKELKKLSQKDRYQKTYNLFKGVYGIGFLTAIRFVLEWGDMRRFKNRSRFSSYLGFTPSEYSSGDTVHKGRITKQGNKYVRRWLVECAWLAKRRDPVLQMKYKRVLKSCGCKKKAIVATARKLALRLRYIALTEESYCLGLIN

SEQ ID NO: 328499 - protein, 418 aa, unidentified
MVISLAEKRRICMKQIVSVGIDVSKGKSTVCAMIHPNTIIKESFEVLHTVEEMSMLADYIGSLDGEIRIVMESTGHYHLPVAQFLYQKGFFVCVENAYIIRQFSRIMLHGAKTDPLDAKKLAKYGLAYWSELKPYKFHPSCYTELSLLSKQYQTYIKLLIAAKQNVIHLMDEMLPGFKEALDTASSVQFSKVKYVDFAKEFYHVDMIKTMGKEIFRENYKQWCKEKGYRFQSEKADELFHLAEDGIPTLPTEFPSTRLCMEVATEQVSQLGYALEQILSQMQNLAKTLPEYQTIRQMGGMGEKLCVRFIADIGDVRRFHNGKALVAYAGIDAPPYQSGQYTGTKRRISKRGNSALRKTGYEVMKSLKSHPPKTDTRVYDFIIKKENEGKSKKQAKIAGLNKFLQIYYARVMEIYKNIV

SEQ ID NO: 328500 - protein, 325 aa, unidentified
MNTKVIVGVDIAKNSFDVCVSGCSGTYHFENSAKGFEELLNLVSSHKISSFVVEATGNYHRALVEVLEFHDFRVAVVNPRLIKNFSRALGLRSKTDVQDARLICEYGMRMEPPIREQPDKELLKLKSMVSRRRQLVANRTMETNRLEAQTEQEIKTDIRRHIQWLNLEIKRIDEVLSGRIGKIPKLKEKVELLKEVKGIGPVVMAALLTQVPELGSLDRRKISALIGLCPYSRDSGNFSGRRMIWGGRSDIRSMLYMAVLSAVRFNPEIKAFYENLIARGKVFKVAMTACMRKLITIINAIIRDGEKKQSSVLPNSDRNVSLVEK

SEQ ID NO: 328501 - protein, 412 aa, unidentified
MEVIHRCCAGLDVHKETVVACVRQTRPDGGTDESVRTFATTTAGLLELGDWLVERQVTIAAMESTGVYWKPVWNLLESRLELILVNAREVKQLPGRKTDVKDGQWIAQLLSCGLLRRSFVPPLPQRELRDLTRTRTSLLQDKSRVANRLQKILEDANIKLGSVASDVLGVSGREMIRALIDGKMSPTEMADLARNRLRLKIAQLKMALTGKVSEHHRFMLRLLLEEIEHYEQQIAKLDQRIEEVMSPLEKTALKLLDEIPGIDQRAAQNILAEIGSDMSRFPSAGHLATWAGLAPGNDQSAGKRRSGRMSDGNRWLKGTLNQCAWAASRKKDSYFAAQHRRIAYRRGMKRATMAVAHSQLCICWELLKHGQTYQDLGRDYFDRTDDDRVKRQLVRRLEKLGYTVTLDKKNAA

SEQ ID NO: 328502 - protein, 408 aa, unidentified
MTVVGIDVSKGKSMVAAMKPGGELVAAPYEVRHSDIELSHLALDVLCMEPDTRVVMEATGRYHEPVAALLHSEGIFVSILNPLLIKQSGAGSLRKVKSDPKDALKIAKYGLDNWSTLREYTPMEAIRQQLKLCARQCDLYNKNIVMLTNNLISLSDKTFPGVNELFSSPEKADGHLKWVDFYRSFWHCDCINRMSPDAFEERYKKWCKRKGYHFSTDAADALYAASCGLYTTLPRDNNAKLLVTVAADQLIALRENQSKLEAEMLNVCKQLPEYETVMAMYGVGKSTGPHLMAELGDVRRFPHRSSIVAFAGVDPGVVGSGKMQLSSVTTSKRGSPQLRKALFQVVSTYVKCKPENEAVYQFYAKKRDEGKPFFVCTTAAANKFLRIYYARVKECLNAAESATQVEEG

SEQ ID NO: 328503 - protein, 347 aa, unidentified
MLIIGCDFHPGFQQVAIFDNRTGEIEEKRLQHPVEAETFYRSLTGQSVRVGMEACGHYPWFERLLEEMGIELWMGDAAKVRASVVRKQKTDRRDAEHLLQLLIENRFPRIWVPSLEVRDVRQLLVHRHKQVQSRTRTKNQLQAMALSCGMQKKRKLWTKAGRTELEQLPLLPYAAERRKRLLEALDGLEAEISELDRRVAEEARQRPEAVRLMTHPGVGSVTALAMVLTLGPAERFESAKKVGSYFGLIPSEESSGGKQRLGRISKQGSSFLRFLLVEAGQTAARLDPQLKRFYRRLAARKNRGVAKVAVARKLATRLYLMLREDWTYTQLCQAVMQVSSSHSVVGQ

SEQ ID NO: 328504 - protein, 344 aa, unidentified
MSSIVGGMDIHRKQVTFDYLDLVTGEVKCGQIAPADRANLRAWLKRFAGVPGVTFAVEACTGWRYVTEELQRAGIEAHLAEPAGTAAARGRKRRAKTDRADARLQRDLLAQGRLPECWIPPSQILEYRALLETYHDLRREHTAWVQRVHAVLFHQGAPVFCDLGRAGAPQELAALARAHLSPAGQQQIALYLRMLEVTGGELDALRRQLVSAAGQLRGARALAGELYGVGPVTALALTCWLGGAGRFSSARKAVRFTGLDITVYSSDSKRSPGHLSRQGPAVLRWCVYEAGKTHARAGAPDHDYYAAVKDRKGGKRAALSEARKIVRRACHLLGELGDDAFATA

SEQ ID NO: 328505 - protein, 334 aa, unidentified
MENIALIGIDLGKNSFHIHCQDHRGKAVYRKKFTRPKLIEFLATCPATTIAMEACGGSHFMARKLAELGHFPKLISPQFVRPFVKSNKNDFVDAEAICEAASRPSMRFVQPRTESQQAMRALHRVRESLVQDKVKTTNQMHAFLLEFGISVPRGAAVISRLSTLLEDSSLPLYLSQLPLKLQQHYHYLVEQIKDLESQLKRKLDEDEVGQRLLSIPCVGTLTASTISTEIGDGKQYASSRDFAAATGLVPRQYSTGGRTTLLGISKRGNKKIRTLLVQCARVFIQKLEHQSGKLADWVRELLCRKSNFVVTCALANKLARIAWALTARQQTYEA

SEQ ID NO: 328506 - protein, 360 aa, unidentified
MRIQRTSVGLDVHARSVVACAIDEDTGEVIRHRFGYDPAAVLEWVRSLPQPAAVTYEAGPTGFALARLFTAAGIECLVAAPSKLQRPVGDRVKTDARDALHLARLLRLGEIVAVAVPTIEQETARDLVRAREDNRGELMAARHRLSKLLLRHGIIYDGKQAWTGAHDAWLRRQRFDHPGLQAAFDADYEAVQQVRARKDRLDAIIQQMATTSDYAPVVRRLGCLRGISTLTGFGLAVEIGNWERFTGSSIGAFVGLVPSEHSSGQSRSQGSITKTGNTHARRLLVEAAWHHRKPYRPGAVMQARWAAAPSLAVSRGDDGNRRLHHKWQHFTARKKRSTIANVAIARELAGWCWSLAVMPD

SEQ ID NO: 328507 - protein, 359 aa, unidentified
MSIVAHTYPFVIGADTHSRNHAVAILAPTGEVIDEQIFPTSKTGLARAVDWACRRTGGDLDALWVIEGIGTYGAQLAQAVVDAGYNPAEAPSMNARAQRGKGKSDPIDARRIAAAALPLDTAQLRRPRDPDGPRAAIRILIAARDHMSTERTATINALIALARTIDLGIDARNTLPASRITIIAAWRTRTEPLAMTTARAEAVRLARRIEALDEELHTNRNTLTTLISDTPGVGLLELPGIGPVTAAVVLAAWSHPGRIRSEAAFANLAGVSPIPASSGNTVRHRLNYGGDRRLNRALHMAIVTRIRMDPTTRAYIEKRTAQGRTSKEIRRCLKRYLARQLYRHLATAYKMPNPALDNT

SEQ ID NO: 328508 - protein, 392 aa, unidentified
MYIVGIDIGKNHHEASIVSPEGKQIGRSLRFATTHKGADSLMSFIFKNIGNSPCVFGMEATGHYWYPIYSFLKAKGYTICVINPIQSDSLRKMYIRQTKNDSIDSFLIAEVIRFGQFGTTSMADENILAMRQLCRYRDSVISSRTEIKLRIGTIMEQIFPEYEKQFSSLWMSTSMGILEKYLTPENIENAPIDELFEIIKDKSHNRLTKAKAISIKEAAADTFGIKIAQDAFSFQLKQLIDRMNFLDKQIEALDIEIMKYYEQFDCYLHTIPGIGMIATATILAEIGDIHRFKSSSALVAFAGIDPTVRQSGEFNSTHNHMSKRGSPYLRHAIFLAATTCSFHNSPLNAYYKKKRDQGKHHLTATGAVARKLTTIIYAVLRDSKPYEPKKFC

SEQ ID NO: 328509 - protein, 357 aa, unidentified
MTTTTSMSEASGQRRVIVGVDTHKDAHVAVAVDEVGGHLGSASFSADRDGYRALIMWAMAFGGTVVFGVEGTGSYGAGLASAIRRSGIGVLEVLRSDRRDRRLRGKSDTIDAENAARAVLAGIVHAIPKTGDGIVEMIRVTKVAKDNAVKARSSAMISLKQVLVNAPDDLRQSLQGLPRMTLIRRCAGLQLGPVDSVTAATKNALRAIATRWLGLDEEIKSHDLLLASLTSTVVPTLVEAFGIGPDGAAEMLIVLGDNPERIHSEAAFARLCGTNPIPASSGKTTRLRLNRGGHRQANAALYRTVIVRMQYHEPTIAYVTRRTAEGKTKPEIIRCLKRLLAREVWALTRDFRQPQRA

SEQ ID NO: 328510 - protein, 348 aa, unidentified
MRFYTKQHKYSCGIDLHARSMYVCILDEEGKTVLHKNRKATPEALLRAIAPYREDIVVAAECMFVWYWLADLCAKEKIPFVLGHALYMKAIHGGKSKNDRIDSHKIAALLRGGTLPKAYVYPRKMRSTRDLLRRRNYLVRKRSELLTHLQNTNSQYNLPEFEKKIALKANRDGVAEHFSDPSVRKSIEVDLELLDFYDRLLSELERYIEKSAKGHDVHSWYLLRSIPGVGRILGLILLYEIHDIRRFPRVQDFVSYCRLVKCPRESGGKKFGAKNTKVGNHHLKWAFSEAACFFIRVNEQAQHYHSRLVSKHGKGKALSIFAHKIGRAVYFMLKRKEPFSMEKFFAHA

SEQ ID NO: 328511 - protein, 344 aa, unidentified
MTYYAALDVSLRSVAICIIDEEGTVCLERAVPSEVADIVTCLRGFDHGIDVVGFEAGTLSQVLAHGLGSDGFEVVCLEARQVNAALSAMRNKTDRNDARGIAQILRTGWYSRVHVKSRDSHYTRALLSSRKAVLRKCIDLENEIRGLFKIFGIKLPASLGHGPFDARVRPLIEEDVRLAEALLPLLDARLVLYRTYLVLDRRIKLAARNDAVCRQLMTVPGVGPVTAMTFKAAVDDPYRFRRSRTVGAHFGLTPRRYQSGEHDNPGRISKAGDADVRTVLYAAANALMSRTQRWSSLKAWGMRLQRTRGRRRALVAVARKLAVIMHRMWIDGSKFQWGKEAAAQ

SEQ ID NO: 328512 - protein, 398 aa, unidentified
MTGFIGIDVAKDSFTAAFLITNKLNIAQETILSFSVDQNGWQSFLKTWQSLPAQNWIVGLEASGPYSQLLLRHLQTLPYPVHMLSPLQVRKFRQSQSLRKTKTDPIDAHTIALFLHHQHLQGSLKPTPPSPNLRHLVRLQEQLTSQLVQVQNQIRQTLYLLFPELERRFARFPKAIRRLLACYPSAKQIAKANPDHIRTLLAQGQGSAPAISAAELQDLASSSLGLEDQMASLHLKHLLSLWESIEKQHHEVSHTLQAQTRLRYPQAWQIMTQIPGLGPNLVARFLALVEDPNRFPSRKALIAYAGLDPSVHQSGRFQVTSRLSKRGDPLLRKVLFLMAQALIRYTHRFHQAFQYYRQQGRRYREAVMIVARKVLVVLYALWTRMAPFQDTAPDSASL

SEQ ID NO: 328513 - protein, 442 aa, unidentified
MRIMYERCAALDVHKKTVVACVRITDKNDVVETEVRTFGTTTPDLLQMADWLNEWKVTIVAMESTGEYWKPVFNLLEGNVEVILVNARHVKQVPGRKTDVKDSEWLAELLSYGLLKASFIPPKPQRDLRDLTRYRRNLVQERSRVVNRLQKVLEHANIKLASVASDVMGVSGRQMMEALVQGESDPKLMAGLAKGRLRNKMEELVKALTGVVGSHHRFMLAQHLAHIDFLDEQVATVNSEIGARVEAMSRPPENDSETLSNAPQGKETRSEQLTWAESIEILDTAPGVDVKAAQMVLAETGIDMSQFPNEDHLTSWAGLAPGNNQSGSKRKNAKTREGNRNLREVMIQIAWAASRTKGSYTRALYRRLAARRGKKRAIVAVARSLLVSFYHMLTRKEAYHNLGEDYFDKRRRVAKVDILTKQLQKLGYDVRLEPLAPQVTLA

SEQ ID NO: 328514 - protein, 330 aa, unidentified
MNVHPQGREAVTAARANAGIDVSKGWLDVAWADRTERFANDAGGMESLTALLRQQDIDLVVLEATGGYEAAAAAALQAAGMAVAVVNPRQARDFAKAMGVLAKTDKVDAQVLRAFADVLARHEKRSQFLHEVPDETRSQLAAWVTRRRQLVDMRAMEAQRMAATRDKRSRQSLNKVIVFLDMQIAEIERDLDQFTREHFQDLRKLLRSAKGVGPVASNTVLATLPELGQLDRRAIGSLVGVVPLARDSGKHRGKRTCWGGRAPVRQVLYMATVSAIRYNPVIRAFHERLIAKGKPAKVAHIACLRKLLTILNAMARDGTTWDAQLHVIPA

SEQ ID NO: 328515 - protein, 361 aa, unidentified
MQKHIKSVAQMEKPSLTVGLDLGDRFTQYCMLNRDGEVVETGRIQTTEAAFRRHFQGEPVLRVALECGTHSPWISRLLEQFGHQVLVANTRKIRAITASESKNDRNDAEKLARFAAHDPRLLSPIQHRSLERQQDLDLIHARSTLVRARTMIVNALRGLVKSAGGRLPVCSTASFRARVESSVPATLAAAAKPLLQQVEALNQNIGEMDRLIEQLAARYSEIKLLRTVPGVGPVVAATYVLTLDSKDKARHSRQAGAFLGLRPRQSQSGDSDPQQRIAKTGNVYLRSLLVQAAQYVLGRFGPDSELRRWGLKLAASGGKRGKKRAIVAVARKLAVILHRMWQTGSSWQPFPQSIAQPARTA

SEQ ID NO: 328516 - protein, 345 aa, unidentified
MEIRIIGIDLGKTVFHFVGVNARGEVVVRKKGSRTQLLRFTANLRECLIGMEACGGSHFLGRALREQGHDARLMPAQYVKPYVKTNKNDYIDAEACAEAVTRPTMRFVPIKTDDQLDLQTLHRVRERWVVRRTAVINQIRGLLLERGITIRKGRNHIEQSLPGILEDADNKLSGALRVLLTQLRLEMQYLHGQIGETDKLIGRICGELEQCRRLVAIPGIGPITATATVAAIGNGAAFKKGRGFSAWLGVVPGEHSTGGKQKLTGTSRRGNKYLRKLFVQGAHTVLLQKTKQSSGLSTWLLNLTSRKRKQVATVALANKMARMAWAVLFKGEAYRPPTAAQVIAA

SEQ ID NO: 328517 - protein, 311 aa, unidentified
MSHELFVGIDVAKDSFQVASRPAQLSGSFLNTRQGYREFLTRLGDLPVILIVLEATGGYEKPLAAELVQAGYQVVVANPRQVRDFARGLGRLAKTDPIDAETLAHFAEVVRPTPKPPTSPEIATLAELVTRRRQLTDLLTQETNRSQMIHHVKVRKSIRKMIKTLEFQIRELDELIDDHIQADDDCQHKDRLLRSTPGVGKQTSAMLLSHLPELGTLDRHQIAALVGLAPFDRQSGQQTRRSHIAGGRKEVRSLLYMAALTARRCNPVIRHFAVRLEKRGKSFKVVITACMRKLLVMLNALIRDQILWTPK

SEQ ID NO: 328518 - protein, 325 aa, unidentified
MTNETREPVYVGIDVSKDSLEVALADKAASVRFVNDEQGVKALLEHLAGHHVAVVLLEATGGLEKRCAHALYLAGMTVVVANPRQAHEFAKSMGYLAKTDGIDARILSHFARTLHGSERFDKLLFKMATPQQEQLQALVTRRSQLVQMRVAESNRLNLAHALSAKSIQAVIKLLDKQIKTLDEDIGNRLKQHFAQKLKLLEGFKGIGEGTKAVLMAALPELGRLNRREISKLVGVAPLNHDSGKMRGKRSVWGGRADVRSALYMAALSAVRFDPTIKAFYERLRAAGKPPKVALVACMRKILSILNAVIKSNTAWEQRCPQASTA

SEQ ID NO: 328519 - protein, 405 aa, unidentified
MLYLGIDLHRKQMTISLRNQDGDVLLRRQVSTRWSKLEEFREQLHQAAAAGEKYVAVVEVCGFHDWLVKWLHQDQRCHQVLVVQPLGRSANKTDRRDANALSELLWINRERLLRGDRVQGVRTVHLPSAEQQADRRLTQMRDRLVRKRTQTLNQIHKILRRHNLEWERPTKTFQTRKVTQWLKTLQLEPMDRLAMNQLLVQWRLWEEQLVAADDRIAERFRANQDAQLLATMPGVSMFIAVAIACRIAPIERFPRGRSLANFLGLTPGCRSSGETERLGSITKVGSRMVRFLLAQVILHLLRRDTTVRAWYQRIKRRRGSKIGRVAVMRRTATIMWRMLSTGEPWRPGHPGSESPAAASDPRQAHQWRPRRTVLSALLASEGEAGGSSTGSSSLSPAEEVTPCRA

SEQ ID NO: 328520 - protein, 412 aa, unidentified
MEVIHERCCGLDVHKRTVVACIRIQKAEGGAHMDIKTFSTMSFDLLILRDWLAASKVTHVAMESTGVYWKPVYNLLEDQFQILLVNAHHVKALPGRKTDVKDCEWIADLLAHGLVKGSFIPPEPIRDLRDLTRYRKSLIDERTREINRLHKLLETANIKLASVATNVMGFSGRDMMHALLGGEADPEILAELARGRLRKKIPTLKKALEGRFRPHHRFMLENILAHVDFLDESIATVSEEVVSRLNPFAQAIKLLRTIPGVETRTAQVIASEIGTDMSRFPSANHLASWAGLCPGNNESAGKRKTGKTRKGDQWLRRTLVEAAHAASRSRETYLSSQYHRLVARRGKKKATVAVAHSILVASYHILANKTPYQDLGPDYLTKLNETNIKRYHVRRLEELGYQVNITPLEQAA

SEQ ID NO: 328521 - protein, 337 aa, unidentified
MDHFAGLDISMDETCVCVLDREGVVVHESKTASTAEAIAKELAKAPSCRRIVFETGRMAPVLYHGLSQLGLPVICVESRQAYQALRSLATHKTDRNDARGLAHLARTGFFKPVHVKSLPAHAIRSLIIARKKLVGQRVTLENQIRGLAVVFGVRLPRALTAAFIEKALKASEGVAGLSVALRGLAAARAAVMAAVAAIDADMRRMVRASAACRRLMTIPGVGQLTALAFVAAIDDPSRIRRSRDIGAYLGLVPRRYQSGEVDYVGSISKCGDRRVRTLLYEAANVMLTRYKGQLKLKDWAFAIARRSTMRKARIALARRLAIIMHAMLRDGTEFVPA

SEQ ID NO: 328522 - protein, 466 aa, unidentified
MARKSKKVTKKAQRQTPRSLKTIQPNSAGIDLGAKEHWVAGPTRDNDKPNVKCFGTTTPELYRLADWLQEQAIETVAMESTGVYWIPLFEILDGRGFQVLLANARQISNVPGRKSDMLDCQWIQLLHACGLLRGSFRPSDDICRLRALIRERSTMVDERSDWIRRMQKYLDQMNIRVHRAVSDITGVTGMAIIRAIVAGERNANALAKLRDPRCRKSEQQITEELTGNWRSEHLFNLRQALKMYDQLSAVIDDYDGEILSCIADLQLDDDDDTPVPPPSSKTKAQNIVKRGQESLREGFYRMSGFDLTTIDGISVNTAAVVISELGLDYTVFPDENHFVSYLRLAPNLSISGGKKVPKKFKATTCTRVSAALRMAALTLRNSKSALGGYYRRVAYRKGASVAVFAIARKLAQLIYRLVRHGQAYLDTGAQAYEARFNQRRLTYYTNTLKTMGFRVEPIPSFEPTPA

SEQ ID NO: 328523 - protein, 413 aa, unidentified
MKPISTSFAAKIGLDWADIKHDICLKPKTSKKLEYSVINHTPESIDEWALSLQKRFKNCPIAICLELKAGPVVYALMKYEFITLFPIPPNALAKYRKAFTQSGAKDDPTDAFLQLDYLLKHPESLRPLLPEDLETRILQRLVEDRRDFVEKKVRLTNWITASLKSYYPQVLQWFGDIDTQLFCDFILQWSTLEQAQHASAATLRQFFKARRCVQDSVIEKRIKAIEKSMPLTTDEGVIIPFERLTTSLVRQLSQLLATIQEYDTDIAQRFEQHSERELFESLPGAGAALAPRLLAAFGTNRERYASADELARYSGIAPVLERSGQKVWVHWRYSCPKFLRQTFVEWANQSKKYSYWAKEFYEGKRAAGKSHQATLRMLAFKWIRILFRCWQNRTPYDEATYLFALKKRKAMKV

SEQ ID NO: 328524 - protein, 362 aa, unidentified
MRIIGCDLHARQQTLAMLDTTTGEEVEVTLKHEGDNVREFYSSLPGPVRVGIEATGSMQWFVNLMEELGIECLVGHPAQIRAAEPRKQKHDRRDADLILKLLAANRFPAIWVPSKELQDLRSLLRHRHQWVRMRTRIQNALQSIALANGLRRGTALWSHDGQSRLASLPLAPHTAYRRSELQALYEKFEAEIEKLNQRVEEQAGKRLGARLLMTHPGIGPITALATEVFLGDPARFADSKALASYVGMIPREYSSGGRQRLGGLSKQGNPLLRFLWGEAGTHAARKDPELQRFYRRKLVQKGLGKASVAVARKLGIRLWIMLRDQIEYNEFCRRGQKQQKSSDACAGMPETPYGGKSRRPVD

SEQ ID NO: 328525 - protein, 421 aa, unidentified
MPNIEIGVDSMDKENFIYVGIDLHKETHTAVMIDCYNQKLGEITFPNRPADFPKLVAKVKKCNTDGKEVVYGLENAYGYGRALAVWLIDKGYLVKDVNTAISHQQAKHRGAMYRKSDSDDAKAIALATLNMLDKLPDACPNDAYWSLGQLVHRRDNIMKQRTRLVNQLHEQLCIAYPSYKQFFNDISRPTALYFWEHYPSRKYLKGKSVEDLRAELVPVSHNKCSTKTCEKILDAVASDKVKNNAYQDARDMVTLSIVSDLQHYDSQLAEVDKMLEQMYKMLGCTLTTIPGVNVITAVKILAEIGDIKRFSNANKLAQFAGIAPLHLSSSGKGKDVATKQGNRRLQAAIYFLAIQMVQVSSKGTPRNSVVRAYYEKRKAEGKTSQQALICISRRLISVIYGMLKNGTEYRMPVVENAGEKL

SEQ ID NO: 328526 - protein, 340 aa, unidentified
MESSYLGIDVAKAKLDCALLLPNGKWRSKSGLANTPQGFAELARWLDGHQANAPIHVCMEATGIYWEAVAEYLAQAGHTVSVINPFQIKSFANACLVRSKTDKIDARLIARFCAERHPEPWQVPSLSEQTLKALVLRLDALQAMRVQELNRVEVAHDAVREGIVAHIDWLDAQIKSLLADIRRHIDSDPDLRSRRELLDSIPGVGEHTMALLLAFCIHPERFANARQAAAFAGLDPRLHESGSSVHGKPRLSKIGHAALRKGLYMPALVTLYRTHWGQQFRQRLAASGKPPGPSHSSIINPLVVNHREKSFTVNALCHHLESRPRLFGQDFHGAKWSPAG

SEQ ID NO: 328527 - protein, 366 aa, unidentified
MKKTSTVRVNGNMIFKGHKLTIGVDLGDRWSFYCVLDEAGKIILEQKVPTTSEAMKQTFGKIPRSLIALETGTHSPWVSRLLTELGHEVIVAHAQKVELISKSNRKDDRHDARTLARLARIDPELLGPVRHRSAKAQIHLTVIRARAELVRARTALVNAARGLVKSYGQRLPKCGTQQVNRELAAGLHAELREVLEPLLQEVESLNERIQEYEVRMEKIAKENYPHVELLKQVKGVGTQIALTYVLTLDDPHRFPKSREVGCFLGLRPGRRDSGESQPEMNISKEGDRYLRTMLVQGAHYILGPFGEDSDLRRWGLKLAARGGKNAKKRAIVAVARKLAVLLHRLWVSGEVYEPLRNSQKAMRAAA

SEQ ID NO: 328528 - protein, 404 aa, unidentified
MKEFSKFVGLDVHKETIAVSVAEADGGEVRYVGEIANTPVALDKQVKQLRKGGANLSFCYEAGPCGYGIHRQLTDLGWDCQVVAPSLIPKKAGDRVKTDRRDSMMLARLHRAGELTAVWVPDEAQEALRDLTRAREDMKHLQRQAKQRLLAFLLRHGERYDGKSNWTLAHYRWMEAVKFEHPVQQIVFQEYIDTVKAMSKRIDALDKQVESAASESVFWPVIEGLMALRGVSLLTATTIVAEIGDLRRFASAPQLMAYLGVVPSEHSSGGTKSRGGITKTGNGHVRRVLVEAAWTYRHPARKTTVLQKRAERTSEAVQEIAWKAQTRLCGRYRLFEARGKLKVQACTAIARELAGFIWAIGQALPQPTANVQVKEIIMSMQCVGSRMGNGGRTLGHPMRRPATE

SEQ ID NO: 328529 - protein, 346 aa, unidentified
MGKSITDLSSVTTVGLDLAKHVFQVHCVDASGRVVVAKAIRRNKLLEFFASLPPCLVGLEASGSAHHWARELIKLGHDARMMPPAYVKPYVRRQKNDASDASAICEAVTRPSMRFVGVRSRENQAALMRHKAREMLVTQRTQLLNGLRGHLTEVGVIAPQGLRCARELAELIEACDETIPFEVCEALAPLVVQLRNLDEAIARLDRSIAKLAQKDETARRLMSIPGFGPITASAMAATIQDTSSFAGPREFAAYLGLTPKQNSSGGKPKLGRISKMGNRNLRKLLVVGAHAVLFHRKPHTDPLRMWAKRLIEKKPFKLVAVALANKMARIAFAVLRGKTVYREIPT

SEQ ID NO: 328530 - protein, 402 aa, unidentified
MNAVGIDVSKSKSVVAIMRPFGEIVSTPFEIKHTASDIHSLIELINSVEGESRIVMEHTGRYYEVLAHQLSEANLFVSAINPKLIKDFDNDSLRKVKSDKADAVKIARYALDKWQNLKQYNVMDELRNQLKTMNRQFGFYMKHKTAMKNNLIGILDQTYPGVNTYFDSPARSDGSQKWVDFASTYWHVDCVRKMSLNSFIDHYQNWCKRKKYNFSQSKAEEIYGKAKELVPVLPKDAITKLIIKQAVDQLNSASTTVESLRTLMNETASKLPEYPVVMAMKGVGTSLGPQLIAEIGDVSRFTHKSAITAFAGVDPGVNESGSYEQKSVPTSKRGSSDLRKTLFQVMDVLIKTHPQDDPVYQFLDKKRAQGKPYYVYMTAGANKFLRIYYGRVKEYLSSLPES

SEQ ID NO: 328531 - protein, 416 aa, unidentified
MQPTLFVGVDVHRQQNVFCVMDQDGQELSERFSFDNNRPGTQELVGRLAHLMQEGDYEQLQLGAEATGLYWLHFCMTLSQDPMLNQWPLTLYAVNPRLTANYKRSFSDLDKTDDIDAFVVADRLRMGRGLPHPFVYDERYLPLRFLTRYRYHLVHNLAREKAYCLAMLYLKASEYTRRDVKPFSDVFGAASRAVLQEFASLEEIAALPFDDLVEFIDVKGKRRFPDPTDNARRLQQVALDSYSLPEPFHAPIQLVLNMSLQHIAHMERQQKRLNSAIAEQMASLPQTLDTIPGIGPVFVAGIVAEIGDIARFQFNQAKVAKYAGFKWRKSQSADFVADETPLARTGNRFLRYYFCEAANIARIHDADYRAYYDRKFREVRKHAHKRALVLTARKLVRLVVRLLTTNQPYRPRRMTA

SEQ ID NO: 328532 - protein, 349 aa, unidentified
MNKKLFVGIDFSKETFDAAILKVSEESSIDLKIIGNEQFKNDVPGCKRFVKWLNKTCALSGDYSSVLVGGEDTGNYSITLPKQLYVLGIDCSLQNAYSIKCGSGKIVRDKTDKIDAEKIAYYFYRFRDQVRLYKPLSKDMESLERLYSYRYGQVRESARLQCQIKEYEHILKSEPNDETLKFMIQRLEEQERFLKEEIKTIEAKMVEMIEADEELNEIHECLLSIPGVGKITSLLLIVVTRGFTRFDNPKQLACFLGVSPHPNQSGTSVQNGNHRSWFADPYFASLLHMTALTASIHNPKFKAYDERLKSKGKPKLLIMNNIKNKLLTVAFTIATRRTKFYSDYDIKRA

SEQ ID NO: 328533 - protein, 346 aa, unidentified
MRFYNRPHTYYCGIDLHVKTMYVCILDGAGQVLVHRNVPSTPEAFLEIVAPYRDGLVVAVECMFTWYWVADVCAAEGITFVLGHALAMKAIHGGKAKNDRIDSHKIAILLRGGMLPQAYVYPAAMRSTRDLIRRRLHLVRKRGQLLAHIQNTRAQYNLPIFGRKLAYRTNRAGVVEHFPDPSVQKSIAVDLALIDQYDALIIDIELTIVREAKRHNADAFHRLRSVPGIGKVLALTILYEIHDITRFDRVQEFASYARLVKCQRQSGGKTFGTSGAKMGNVHLKWAFSEAAVLFLRHTEGKKLIARIEKQHGKGKALSILAHKIGRAVFYMLSRGTVFSMDKFLAA

SEQ ID NO: 328534 - protein, 472 aa, unidentified
MIKSVGIDFAGTGEHMVRCLNEEAQLCDSFSFPTTPDGLTKLEERIFRDGSNPVIVFEPTGLSWLPIAVYLRARHPNCRLVRAQSQKVVALRKYLHRYSKSDRIDALTLAKMPFVDDERLMEVYLPQAKAYTMQRLSRQRQRLESDIATRKTRIISILDGYLPGIRPTLSDLWSPQAKSFLRTHLNPWTTVNSGEKSLHRFLTRAAVRNKEDVQKSHALYLACQNVATIYELSRATGTIDDDFFSILQEEIDRELKLMEADEVESESIANRLEKWYQEMHPSDNLRTIPGVGEHTAPIFLAFIGDPARFRSQSAFASYNGVVPAARQSADVEAKGLKMSKAGPAMMRWALYQAGQIGRRYDPQLAWLYYREIVHNGKNHRQAMGAVMSHLGARVLAVTKEGKPYELRDIENKPITPEEARKLILSQYVVPEEIKRARRRRKNSGESALQRKGREVPAARVNEAAEAPQPVAV

SEQ ID NO: 328535 - protein, 474 aa, unidentified
MKAKNRPMQGKWHEMNRKQRRQMIRKMQSEDLTLEMVHPDAAGVDIGNESHYVAVPPIRDLQPVRRFGCTTAELKTMADWLKQCGIQTVAMQSTGVYWIAVYDILEQAGLEVYLVNARETKNLPGRKSDVQESQWLMKLHTYGLLRNSFRPSQEIRTMRTYWRQRNDLVRTAGRHIQRIQKALTQMNIQLANVLSDVSGMTGQAIIKAILAGERNPHKLSAFRDYRVKASEMEIALSLEGNWQDDLLFVLKQEQDGYEFCQKRMAECDGRLKQYLQQRNDRSQGASLPEEKRKERLRKKKKENAPAFDLRAELFRMTGTDLSQIDGIDATTAMAIISETGWDMSKWKTEGHFVSWLRLCPDNRISGDKIIGKGRLPTKNRATLALKMAASTLRISNTYWGAQFRRLRTRLGAPIAIKAMAAKLARLVYRMLRYGIRFVDHGAEFYEAQHRRQQIHYLKWKAAKLGLQITEAPAA

SEQ ID NO: 328536 - protein, 341 aa, unidentified
MERLYYIGLDIHKKTISYCVKKVDGTIVQQGKVSADRKTLLKWMEGLPGPWLGAMEATIFTGWVYDFLKPHAVDLKVAHPEMLKAITAAKKKNDRADAEKIVDLLRVNLLPECYMLSEEMRELRRILRYRNMIVRAAVKMKNKMSGLLMEVGATYSKEKLHRRKYFDTLLERIEDVPDSVKNMLKLSRSGLEMFEAVQKKLVRTLREDNLIRERVQRLKSIKGVGEVLALTWVLETGDSSRFHSARQAISYCGLCSAQRESAGKEQRGPISKKRNKHLQTMLIEAAKLAPRWNPQLAVIHERELSRGNRNRATLAVARKLVEYMLAVERQQKDFVPSELAA

SEQ ID NO: 328537 - protein, 406 aa, unidentified
MDIIYERCCGLDVHKKSITACVITPEGKELKTFEAMTDDLVALVQWLKEKGCTHVAMESTGVYWKPVYNLLEMEEITTLVVNAQHFKAVAGRKTDLKDAEWLADLLRHGLLRGSYIPDREQRELRELVRYRKSLINERAREVNRLQKVLEGANIKLAAVASDVLGVSGRSMIEAIIRGINDPRFLARLARGRMKSKKEDLERALTGLIGPHQRMLLAAQLKHIDFLDQQIALLDQEIEERMRPFEEALTLLDTIPGVGRRAAEQILAEIGLDMERFPTAAHLASWAGMCPGNNESAGKRKSGRTRKGNNSLRNILVEVARAAARTKNTYLSSQYHRIAARRGANRAAVAVGHSILVIIYHVLKRRKPYTELGADYFNRLKKEAAVHRAVKKLESLGYKVSLELNVA

SEQ ID NO: 328538 - protein, 346 aa, unidentified
MEKISIIGLDLAKQVFQVHAADATGRCLLRKQLKRREVLAFFAKLAPCVVAMEACGTAHYWAREIAKIGHEVRLVPPAYVKPYVKRGKNDIIDAEAICEAAGRPSMRFVPVKSMEQQSLAMLHRSRDLLIKNRTMLVNALRSHLAEFGFVAAKGIGKLPDLIEIVAAAPKAALPDMVRPALSGLLDAIALVNAQLGSIEKQLMAWHKTNPQSKRLDTAPGIGLIGATALCALVPDPSLFKNGRHLAAWLGLVPKQDGTGGKTRLGRISKAGDRYLRRLLVLGATSLLRSLKNKTTALALWVQGLLARRSKRAVTVALANKLARIAWAIMAKGEAYKPLAAAQAVSL

SEQ ID NO: 328539 - protein, 410 aa, unidentified
MEVLFPHCAGLDVHKGTVVACARHMANGSVRREVRTFKTTTKELLALSDWLTGEGCTHLAMEATGVYWKPVWHLLSDGDFTLLLANAAHVKNVPGRKTDVNDATWLADLLAHGLIQGSFVPDQQTQEMRTLLRTRKQLVRERSSHVQRLQKTLEDANIKLDSVISDIVGLSGRRMIEALIAGETDPEALAALAHRRIKATPDELEAALRGRVTRRHRFLLRLHLQQIDAIDAAIDQIDREVDADVEPFRAAIALLTSIPGVSVLSAEIILAEIGRDMSRFPTAGHLISWAGLCPKNDESAGKRRSTRMRKGAPWLKTTLVQCAWAASRKKASYLQAQFHRLRARRGAKKAIGALAASILTTVYHMLISGELYHHLGPDHFDRRAKARQTSRLVARLQNLGYDVQITPLAA

SEQ ID NO: 328540 - protein, 332 aa, unidentified
MQQSPTFVGIDISKETLDIYVVQDNVNKHYTIANQTKTVKKLFTSLMLAHPLLYIGMENTGYYNFNLYQALAELELDYYVIAPLHLKKSLGLSRGKNDKIDARRIATFLDLNLKNLSVYKPPRAILRQLNLLLTIRSQRIKIRKQLGNNKEQYQYIDGLDNNPLLQADVELIAHIEQQIKAIELQIQQLIASDNKLQQQYKLITSVQGVGKVLGWHLLVRTGEFAAITEPRKLACYAGIAPFEHSSGTSVRGRTRVSQYADKGLKTLFHMAAMSSIRLEGDLKDYYQRKVAEGKNKMSTLNAVRNKIIHRIYAVLKNQRPYQKYLTNPLAMS

SEQ ID NO: 328541 - protein, 350 aa, unidentified
MFSVGIDVHQKRSSVCILDQQGKKVKEFEVVGSWDNLIEAVAKLERPMAVCFEASTGCGWLCDKLAPLAARVEVAHPGQLRLIYRSKKKNDRIDAKKLATLLFLGEVPRAYIPDAAVRGWRGLVEFRCRTVQKRTRTKNALRTLLRGCGILGLHPRKGLWAQKGVALLRELELPTGQDRLRRDLLMEELDQLNRQVKRIEAELDRLADDHAGVALLRTIPGVGPRTAEAVLAYVDKPERFDRNKQIGAYFGLVPCQDASADKNRLGHITRQGPATVRGLLVEAAWQAVYRSGTLKAYYERIRQGKKERRKIALVATAHHLVRVMLSMLKSGEVWREEAAGATPQAAETAA

SEQ ID NO: 328542 - protein, 370 aa, unidentified
MAPASTLFVGLDVPKETIAVAYVGEEREAEVVSLGTIGTRQKDIDALVRKLQGKGKRLHFVYEAGPCGYWLYRYLTKQNLKCWVVAPSQIPKKAGDRVKTDRRDAVQLARLLRSGDLSPVYIPSVEDEAIRDVVRAREDVLKDLKAAKVRLKAFLLRQDIRYEGRANWTAAHLRWLANVVCPTPAQQIVFQEYVRAVSEQTERLQRLEAELLPLVQTWRGAPVVAALQALRGVQFLAAVTLIAELGDLTRFETPRQLMSYLGLVPSEHSRGERRRQGSITKTGNSHARRVLVEGAWAYRYPAKVSRHLQLRLAKVPKAIQDISWKAQVRLCKRYRRLVARGKNVNQVVVAIAREMAAFVWAIARAVQVAH

SEQ ID NO: 328543 - protein, 341 aa, unidentified
MKQQYVGLDVSLEQTSICVIDDAGAIVWRGKCRSTPESIHAVIAKHAPKAAQIGLETGQLSTWLFHELRARQLPVICIDARHAKAALSLQINKTDANDAHGIAQIVRVGWYREIAVKSIDTHGIRAMLVARAQLVTQKVKLTNCIRGLLKTFGMVLGGGKGRRFEAMVRERIAENPMLTTIIEPMLVVLLTTREQLAVFERLVRRRARVDHDVRRLMTVPGVGAVIALAYTTTIEDPTRFKRSSSVAAYLGLTPRRFQSGEMDRAGHISRCGDAMLRTYLYEAANVMLRRSTQPSQLSIWGRALSERIGARKSLVAVARKLAVVLHSMWRHRMEFRFEHAA

SEQ ID NO: 328544 - protein, 366 aa, unidentified
MLRKAELSCEADSENYLGGSSETMYFIGLDVHKKTISYCVKDAAGRVSKEGKIGSTRRELDNWIRTLPQPRMIAMEATIFTGWIYDHLLPHAEKVKVAHPLMLRAIAAAKKKNDRIDAGKIADCLRCDFLPECHMATTEIRDRRRTLRYRNLVLRQMVQMKNRVSGLLMESGVSYDKQRLHKVGYFTDLFSASEEINQSIRPLLKLSREHILRSQRLDRALTSSLERDPLLSERLRRLRTIPGVGPITALTWALEIGDYTRFRSVKEAISYCGLCSAEKSSADKVMRTPISKQRNKHIQHILVEAAKMAPRYSHELALVRDKEMQKGNRNRATLAVARKMVAYMLAVERRQQDFVPAEQLVGKAVA

SEQ ID NO: 328545 - protein, 421 aa, unidentified
MTDDIEWYVGFDWASETHCACLMDRAGRVVGKREVAHAGADLAELCDWLIRKTGAEPGRIGVAIETPHGPVVETFLERGFAVFAINPKQLDRFRDRFTVAGAKDDSRDAQVLGDSLRTDSRAFRRLVIDDPVRIELREWSRIEDELKRERTRLANRVRDQLWRYYPQMLQLSNDLAEDWLLALWRRMPTPAKAAKASEVAIQRILKAHRIRRIEAPEVLRILRQTPLTVAAGASEAASAHMRSLAERIGLINQQLKTAERKLEQLLTRLEQAAQDQAGQDQAGQMSEQRDVTILRSMPGIGRTNLATLLAEGSEPLGRRDYHVLRTLSGVAPVTRRSGKAWMVLRRLACNRRLRNALYHWARVATQHDPVSRQRYAALRGRGHSHGRALRSVGDRLLYVACTLLRRQVLFDPDHNSLEAAA

SEQ ID NO: 328546 - protein, 388 aa, unidentified
MSIAEDADLVVGADTHRDTRTAAICDFRGRVLSQLQASATPDGYASLLDWASAAAAGQRLAWAIEGTRHYGLGLVRHLASAGRQVAGIDGTRHVGKRRAGKSDPIDAVRAARELLARPRPGQLRADGDREALRLLMTDRDNAVQPGKTARTVLTSVIVTAPAGLREELRHLPAERRARACAALACPGGADRLTRVTYQTLTRLGQRIAALAAVAAGIEAQIAEIVEEMAPGLVTAEPGLGVLSAAQILLSWSHAGRIRSEQAFAMLSGTAPVPVSSGRTDRHRLSDRQPNRALHVIAVSRMRHHPPTLAYVQRRRAEGKTDKEIRRCIKRYLARHLYRALTRFERLAVSDQHQRLPRVDLPGLMRVGRLWLRVLWRGLTGHQRFMPPA

SEQ ID NO: 328547 - protein, 345 aa, unidentified
MEQISRIGMDTSKHFFQLHGVDAAEKVVLRRKLRRKEMIAFFKALAPTVIAIEACGASHHWARLLQSFGHEVKLIAPQLVKPYVKRGKNDAADAEALCEAMSRPTMRFVPVKAAEEQAALMLVGVRDRLIRNRTQLSNAIRGYAAEFGLAVAKGNAHLTPLFERVQVDESVPALARELFAAQAEEYAELQAKINDVETKLLAWHKADERSRRLVKIPGVGLIGSALLTMKTPAPQLFKSGRLFAAWIGLTPKDHSTAGKVRLGGITRAGDETLRSVLVVGATAVIQHVRRGGRGSPWIVNLLKRKPPKLAAVALANKMARIAWKLMVTGESYNPKSTLSALASAA

SEQ ID NO: 328548 - protein, 314 aa, unidentified
METSAQPVFVGIDVSKNKLDVALWPSGEGFAVERNANGLNSLCAKLAALNPVTIALEATGGFETVVAAALAAASLPVAVVNPAQVRAFAQALGKRAKTDPLDAAVIARFAEAARPAIRPLADAETQLLADLIARRRQIVDMIVAEKQRLGRAPAKRLKKSIERLLKALEKELSNLNGDIDTAVRASPLWRANEELLTSVPGVGPTTARTLIAELPELGSLTRKEIAALAGLCPFTRQSGQWRGKSFIAGGRASVRAALFMAAMVAARFNPILKAFYDRLAAAGKPKKAALIAVARKLLTILNAILRDQKPWQIA

SEQ ID NO: 328549 - protein, 319 aa, unidentified
MQESIYVGLDLGSSRCYQSVIAADGTLCGSRPIPTSEQHLRSAFAKLNGAVQVHLEAGELSSWVASIIEPLVQSVIISHPRSLAWIGKDSQKDDKVDARKLAELLRLGRVHQVFRQTDDSRRTFKYLVVHYEQLSREQARFKSKIKARLRTLGIIRQDARLFSMTGQTALLDAIKSVSIKQMLTQSFTVLNQMLASFDEAKRAMIEFSKQFREVQLLQTAPGVGIITACRFVAYLQTPHRFSNKRKLWRYCRLGVSRRESNGKRLAHPRLDSAGVGSLKDVSRKVFEAARRTKTDNSFKHFYEQSLANTKNAVHARLST

SEQ ID NO: 328550 - protein, 453 aa, unidentified
MAQRNRAVSLKPGKSRAALTITHPNAAGIDIGSAAHFVAVPPDRDDEPVREFPSFTVDLNAIADWLAACKVDTVAMESTGVYWIPLFELLESRGFTVLLVNARHVKNVSGRKSDVLDCQWLQQLMTYGLLSGAFRPAEQVCVLRSLWRQRGMLLRSQGRHVQHMQKALTQMNVQLANVIADVVGETGQKILRAIVAGERDGQVLGAMKNTRIRASTEEIAKSLQGNWRAEHLFALKQALDAFDFVGTQLTECDTQIEQQLQTLQMHDGEPAKGKKRGRGRNAPKFDLRTQLFKMCGVDLTRIDGIDVTTALAVISETGADMSRFPSDKHFASWMGLCPGTKITGGKVMSGATKRCANRAAQALRLAAAALRTSQSALGAYFRRMCARMDKPKAVAAAAHKLARLIYTMLTKGEEYTDQGQAYYEERYRERVLRQLSQRANKLGMQLVAAPRAA

SEQ ID NO: 328551 - protein, 318 aa, unidentified
MNTSNAECFVGIDVSKARLDVAESGGEAGWSVPNDPSGINTLVQRLRTLAPTLVVLEASGGFQMPAVAALELAGLPVAVINPRQARDFAKATGRLAKTDRIDAALLARFGQALRPEPRPLKPAQAQALEARVNRRHQLLEMLTAERNRLERAPACIHKDLNAHIRWLEKRLKDVDTELGKAVKATPAWRERDELWRSAPGVGPVLSASLLAQLPELGTLNRRQIAALVGVAPFNCDSGTYRGARHIWGGRASLRAVLYMGTLAAIRCNPTIRAFYERLRGAGKAFKVAMTACMRKLLTILNAMVRTGTPWQEKSACQA

SEQ ID NO: 328552 - protein, 350 aa, unidentified
MRYYQPQEHYQYFCGVDLHTKTMYLCVQDLAGRIQLHKNIRARPGAFLEAVEPYRDGLVVASECVFSWYWLADLCRAESIEFVLGHALYMKAIHGGKTKNDRIDAEKIAMLLRGGMLPQAYAYPPEMRATRDLLRRRSRLVRMRSELLGHVQLTRYQYNIPAFRKKLAYRAGRQGVDEHFKDAVVRHNVEVDIDAIDYLERAIKGLEAYLVRQTKVHDVQTFHRLRTVPGIGQVLAMTLLYEIEDISRFPRVQEFVSYARLVKGQKSSAGKKLGTQGGRMGNRHLKWAFSEAAVLYLRESERAKRCVARLEAKHGKGKALSILSAKLGRAVYFIMRRQETFDEDRLFATG

SEQ ID NO: 328553 - protein, 369 aa, unidentified
MSNLLFVGLDVDDTAFHATIITQSTGETWYFKCRPNSSYLIKKLLEIHSNSSDFKICYESTYLGFSLCRKLRQEGFNCDVIASALIPEMAGKKVKTDKCDSQKLATLYLKEMLTVVHVPDEEDEAERDLVRSRALIRDQVVATKNRIQAILRKAGLNYRQETSKEMLWSLEYRAWLKRKIKQLELTALKQNLLLLSSSLETLEDSLKTYNLHIEQLSESEKYSKKVGALISYRGINVLTAMKVITEIGDIKRFSHPQKLMSYLGFDIREYSSGGKERKYGITKMGNKIVRTALVEANQKSSYKPVVSHAIKTRRKHVPLEFIMIADKCMHRLYRKSSKLLKREKHKNKVKVACAREMVGFIWHSLNVAS

SEQ ID NO: 328554 - protein, 430 aa, unidentified
MICAAIERCAGIDVGKKFLAVCVLTGPLEGEPRAQRLRYGTTVAELVKLRELLQSEGVTHVVMESTGSYWKPVFNVLEDVVKVYVANPQEVKARKGHKTDDKDGWWLAHLLRHAMIHPSFIPPRPIRELRDFTRRRKRLLGDATSERNRVQKILEDANVKLGNELSDVFGASGQLMLDALLKGKATVEEIAQFARGKAKKKIPKIIAALEGHLMSDHHRKMIRYSLEHLRFLEDQIAGMDDEIRAKIREAKLEPQWELLQTVPAIAETSAAAILAETSGDVSAFPSVRNISSWAGLCPGNNRSAGKNKSSHTTGGNPWLRSALVECSWAATTKRDCFLKEKFWRIVSKTREHKKGPALIAVAHTLLRLVYQVLSTGEPYVEHGPPPLDARQRERIIRHHVRRLGKLGIAVYSTRAVGPATPSPNQPAEAT

SEQ ID NO: 328555 - protein, 404 aa, unidentified
MFYCGIDWSKDHHNLCIMNAAGARVSQIQFKHTLKGFEQIETERRKLNVPANECLVAIETTHNLVVDFLLDHNYVVYIVPPQATNAYRNRQRSSGAHTDGSDAALLASIMRTDRDSHRCLSPNTPLTQQMLVQVRLIETLRRSIQRQENQLRDVLFRIYPQALGLFSELTAQISLQFLIAYPTVQQAQALSLNAFKAFCREQHYSRPDLISRRYAHLIEPALEANPAVVEAYRDHVCILAELLLPQVSRRNEAKARLSRFFKQHPDAFIFDSLPGAGDLLAPSLLVKFGDHRDRFPTPSSVQALAGTCPVTEWSGKRKSIKFRRGCDKEFRRVSQQFARSSVPKSGWANAYWGEIRPRCASNSHAYRCLANRWLAVIWKLWQDRKPYDEEYHLQQRARRRRPKR

SEQ ID NO: 328556 - protein, 320 aa, unidentified
MTILTSQTVVGIDVAKAEIVVYRSDLQTIDTVKNDRTALKRWLKTLPAQSAVAVEATNIYHLDTVELAHALGHQVYVVDAYRVSNYRRGIGQRAKNDPCDARLLARYLTKEQHELRLWNPPPKAYTTLKSLLHRRATLVKNHTGLMLSWADEPLLKKALMAQKKAFEQAIQAIQKLLRKVSQESGIEGNIERCKGIEGVGELVATGLATSFMRGDFTDSDAFIAFLGMDLRVDDSGKKNGARYLSKKGDPEIRRLAHIAAMTACRSPRWKPFYESYLARGFSKTQALVVLARKLCRVAFALMKNQSEYQPTPMLQGCPAT

SEQ ID NO: 328557 - protein, 429 aa, unidentified
MKKKNIYMNQNQDLLTLFEEGGSSAKVMCVPIDYAKKDHTVMFCNGHGDILRKPFSIKNSPEGLDYLVKQVTRSCLHRSINPKHVFFGGEDVGSYADNFVSTLRSKGWLVAGVNAHDAKKQRTNMQASTDVLDLMGIATMLINRRANCDRPQSGIYLNLRNLVRHRAKLVKMTTQVRNQIHMVVDRLFPGFLDEKKSGITPFTKSSLYLMENRFSTPQIRRRRKEKLIEVLKQHGMPQPEQRAAQLQGYAQKVLMTPNEYMGTLQLTLFHHVRHLKCLQDNIEQLEKEIAVWLAQTQGAFLTTIRGIGIVLAAGVTGEIGDPNKQKPVNNLVSYSGIIPRVKQTGGPEGKTSTDKVAKRCNHNLKNYVVQSGMHLGLHGPTDLMADHKRRDAAGQHADFGMGQRYVRMAMSLMRNCQVYIPPPPSKQRS

SEQ ID NO: 328558 - protein, 356 aa, unidentified
MSYDVKYIGMDVHKEAIVIAVLNEDGKQVMESVIETKASSILQFLHGLRGELHVTWEEGTWAAWLYDLLQPQVQHIVVCNPRRNALLKEGSKSDKVDARKLAELLRTGMLRPVYHGENGLRTLRELGRSYQTLSKDLTRVMNRLKALYRGWGIPCAGTQVYAARCREEWLSKIPQAGVRRRAELLYQQLDGLQALRRDVRPEFLAESRKHKAAKLLRQIPCIGPVRAARLIGLMQTPHRFRSKRQLWTYSGLGIETHDSAQYRFVSGQVQRSKKPQQVRGLNRNHNHEMKEIFKSAATRASCGRGPFHDFYAGLLAKGMKPEMARLTLARKIAAITLTLWKKEERFDVEQLKTQAA

SEQ ID NO: 328559 - protein, 340 aa, unidentified
MNHYVGIDVSLEASNVCVVDANGKIVREGKVASEPEALIAWLKGLRLELTRIGLEAGPLSQWLFAAMRQAGLAVELLETRHVRNALKTMPVKTDRNDARGIAQLMRLGWLRPVHCKSIPAQETRALLTARKLLQTKLHDVEMSLRGILRGFGLKVGPTTPVRFEGRIRELVAGHPNLEAIAAGLLAVRVALRREFDRFEKLVRATARSDTRARLLMSVPGVGAIVSLTFAAAIDDPARFKSSKQVGAYFGLTPTKYQSGETDIDGRISKIGDAWVRAALYEGAHIILTKPLKGCTTLKSWAMKIARRSGMKKAKVALARKLAVIMHRMLADGTTFTTQPA

SEQ ID NO: 328560 - protein, 327 aa, unidentified
MEPQYDPEMYVGIDVCKVRLDVAIGQEGEIWQTANTTAGIRSLVQELLAYQPCLIVVESTGGLEKPLIDAFQEADLPVALIHPGRVRKFAAGIGWLAKTDRLDARLLAWYGFAAHPKPRPRPQPACEALSGLVRRRNQVIEMLTAERNRRSSCPISLSDALEEHIAWLTAERERLTSQIETMLTSQSEFHDKDAVLQSAKGVGPILSATLQAELPELGSYSHKQIAALVGVAPFNRDSGRYQGKRQIKGGRSGVRTTLYLATLSATRYNPVIRAHYQQLVGRGKLPKVAIVACMRKLLVILNAMIRDMRPWQPVSDALSGCTDQCPL

SEQ ID NO: 328561 - protein, 421 aa, unidentified
MKGLRTKRVRAVKEGTLIATVDIGVASNTGYCTTVDGRSTKSFSFDNTKEGFEKFWCMTIASKNRFGCDEVLVGYESTGPYAEPLVHYLANKQVNIVQVNPMHTKKMKEVNDNSPLKTDDKDPRVIADIIRLGRALTIVVPEGDAASLRRLNNARERHVGEQTAFLNQLQQLVFLIFPEFKTVLKNMKGKTAQYILKRYTIPERIGTLSKEALGEEMRKRSMGKFGIKEAESLIGLARETVGIKEGLAGIFMDIRHILLQLEAEGRFIGEIEAEMGVTLERIPCSVKLLSIKGLGTVSVAGLIGEVGDFSKFSTQSEIMKLAGLNLYEISSGKRKGQRRISKRGRSLLRKILFYAAIQMIRKNGIMYDYYARLTGRGMERMRALIAVSRKLLRIIHAIVRDNRDYVGQYQTPERRVIKMAA

SEQ ID NO: 328562 - protein, 351 aa, unidentified
MMIIGVDYHPSFQAIAFLMEETGECGEQELNHSDGQAEKFYRDLKQRGISVRIGMEATGYSRWFERLLAELGFELWIGDPAEIKAKRVKKLKYDRYDARLLRRLMLENNFPRIWVPDPENRDLRQLLWHRHRLVQMRTRIMNQLQALAMNEGYRWKKKLFSEQGRAQLEKLALAPWASRRRQELLELLDRMNPTIEELTAAVEREARKRPEVQRLMTHPGVGPLTALAYVLIIGTPTRFQRGKQIGTYVGMIPSEDSSAHKQRLGHISKQGNSLLRFLLVEAAQAAARCNPEWRRRYMHLAMRRHRSIAKVAMGRRLGVRLYWMWRNGCEYSPKFEFGSYAGQLGTGHGVK

SEQ ID NO: 328563 - protein, 355 aa, unidentified
MKRRHFIGVDCHCLFCEIAVIDTAGKVVQRDRRDTTIPALLEVMQNVPRPRSLVIEEGPLAGWLWRNLRAAVDEMVVSEPRRNRLIAKDGDKDDDLDAEKLAQLLRGGFVKSVHQVDSLERAVFKQQVALYHHRVRQRVRESLRLTSLFRQHGVMIREKDYVAAEDRPHLLERLPAAETLREMVTHLWCSYDALVEQEEKWRRRLIALAKQEEVVQRFEALPGVGWIRAATLYAYLDTPWRFRSKAALWKYMGIGLERQRSGNGPEHLGIPMQAHRLLKGTILGAAHSAVALGNNPFADLYRRWIAEGLSSKLARRNVARAQSATLWGMWKNGSAYRPEWVGVAAAANPATKVSR

SEQ ID NO: 328564 - protein, 346 aa, unidentified
MEHYAGIDVSLEWSSICVVDALGQIVKEAKISSEPTTLVAFFEAFGFVVKRIGLEAGPLSQWLHAGLKRAGFEAVLLETRHVKAALSAMTVKTDRKDARGLAQLIRMGWFRPVHAKSIRSQEVRALLVARKQLLGRLIDVELSMRGILRGFGLKVGPVTRKGFEARIRELVRGQATLERIAGAMLSAREALKAEYERLHKTVLAIVRDDAVCGRLMTVPSVGPLVAITYKSAMDDPNRITKSKAAGALFGLTPRKYQSGEKDVTGGITRAGDEMVRTALYEAANVLLSRITRFSKLKRWGIDVAKRRGSKRAKVALARKIAVILHRMWVDGSTYRWSEAQPIAAQA

SEQ ID NO: 328565 - protein, 429 aa, unidentified
MDERDSSRIEAFRQLKKEIRGSKEHLIVGIDIGKNKHHAFLGTAIGNKLRSIIVENNASGFEHLLTMVQFFSDRERLKKIVFGVEPTSVYHKPLSEFLIRNGFLVVYVTNEAIKKNRALLDGRWDKNDTKDAANVADLIGQGKCQYYDFPQMNLRDIRSLLLLRKRLIKQAHSARIRIRNNLVAQYFPELDKFWNKSEKENLAIVRWCLSPHKINKMEFENFYKMVAPKYRGETQYQRISKIWEMSPYSIGCLAGLALDLEARILVEGLNRIQCDIIEVDRTIKVICSCFDEYKLLLTIPGFGPYISAVVLAAIGNPDRFQNMKEVIRLAGYDLNANRSGKKSNSAVPVISKKGKVDLRYALYQAALIASSSNRYFRAYFHMLLQGREREKGIRTKMRVKLATKLLVVAWTLMKKKESFDPQYIRLKTK

SEQ ID NO: 328566 - protein, 345 aa, unidentified
MSVYVGIDVHRKRSQVAVIDQSGEVLTNRNVPNGAEPILRVIGGLPAGTPAAFEAAFGTGWLVELLEDYGFTPHLVHPLRCKAIASARLKNDKVDAAILGQLLRADLLPEAWIAPPPVRQLRALLRHRVQLVRLRTLLRNRIHAVLADHGHDRPSGCWSGPGRAWLASLHLPAVSREVVNDDLALIDALQDRIDRLDWEIHQRARSDPRVKVLTQLPGVGPFTALVILAEIGDVSRFGSARKLASWAGLTPTVRGSDRVAHYGHISKQGSAWLRWVLCEAAQTAKRHPQFAAGYQAIAQRRGKKIATTAVARKLLTRAWHLLTDAEHTAAVQPAEAAAASRARTR

SEQ ID NO: 328567 - protein, 371 aa, unidentified
MKNHSIFIGMDVHKNSIDIAIAEQGREGRVRHYGKIDGTLAALDKVVRKLVSKGSQLHFVYEAGPCGYQIYRHLSAQGLDCAVVAPSRIPKQSGNQIKNDRRDALMLARSHRSGDLTAVYVPRAEDEAIRDLTRAREDAKSDERKSKQRLLAFLLRSGIRYTGGSPWSKAHMRWLSDIKMPHRSQQVVLQEYIDTVNQCKQRVERLTEQLQQILPEWQLFPIVQALQSMRGVSTIVAATTVAEVGDLKRFQTPSELMSYLGLVPSEHSSGQKTKRGSITKAGNGHVRRVLTEAAWSYHLPARVSRALLKRQEDLPESVCEIAWKAQLRLCSRYRQLWHKGKAKQVIVTAIARELCGFMWAIANEIEDPANA

SEQ ID NO: 328568 - protein, 318 aa, unidentified
MIYILGIDIAKAKFDVALMINDKFLTKQFANNAEGFDKLKSWYQAKAVDQLHACLEATGIYGEQLARYLQAQGHKVSVVNPARIKAFAGSKLSRNKTDSADAKLIAQFCYEQNPAAWQAPSPELKRLQAIVRHLDVLKHTRQQQLNHLESATEAIVVNSFQQIIAYLDKEIAELNNQIFLLFEQHPTLNRNKELLQTIPGIGKLTAIKFLAEVPEIIHYQSAKQLAAHLGVSPRRDESGELKRRTRLAKIGNQRVRKALYFPAITAKNHNAMVKAFCQRLADKGKSKMAIIGAAMHKLVHIIYGVLKHQQPFNENLVA

SEQ ID NO: 328569 - protein, 356 aa, unidentified
MNQLRQLDFSGQQIYAGIDVHKKSWKVCIRNKDMELNTFSPKTSPAELSAHLKKNYPGANYKVVYEAGFCGFEYQREFTKLGVDCIVVHPADVPTTDKEKQRKSDGVDCRKLSKALSESAIKGIYIPGVEQQDDRSIIRVYDQCVQDQTRYKNRIKSWLDFHGITIPDDYENKHWSRRFIIWLKAVPLATESARISLDILIKGYEDARAHVLMATRQLRALSRSDRHKLQIELLRTIPGIGQITALWLVVEIGDINRFKGLDNLCDYVGLVPKVQSSGEKEHVLGLTHRGNKGLREKLVEASWMIIRKDPAMTMAFTDFCKRMEKNKAIVKIARKLLNRVRFVMKNQKQYQIGQVE

SEQ ID NO: 328570 - protein, 327 aa, unidentified
MQTTSRVVGVDVSKATLAVCHQPGSSPQHLEVRNTPAGFRELVRRCGTGSLYVLEATDTYYLGVAYHLVAAGAEVAVLNPVVVRRFIQMHLGKGKSDRKDAQWLLRFGQQQATPRWQPEEQALVECRQLQQAAELLIRQQTMIRNALEALLHQPLVCAEVRRQLQRTLRRLEQQVQHLEAALLARVEQRYAAEVPLLCSIPGIGRKTAALLLLFARGFAGLDNYRQLIAKAGLCPHEYTSGTSVRGQTRITKTGGNLIRSKRYLCSWSACRANAACKALYERLVAKGKHKKLALIAVCNKLLKQAFAIVRSGVAYQPNFAQKTVHMT

SEQ ID NO: 328571 - protein, 347 aa, unidentified
MRFYNNAHPYYCGIDLHARLLYVCIIDDKGEVLVHKKIKDDKDALLQLLRPYIGSVILGVECMHCWYWVADWCDDNGVDFVLGHALYMKAIHGGKTKNDKVDSFKIATLLRGGNFPIAYHYKKEMRATRDLLRRRTKIVRHGAMLKSHVVNTNSQYNLPPTQVNLKNICSRDELRGRYEDPAVQRNIDLDMNILDFYAKELAQVECFILSSARQHNPEHLKLLNTFPGIGKILSLTILYELGDISRFDSVQRFASYCRLVKCKAESAGKVYGTSGNKIGNAHLKWAFSEAAVLHLRGNDKAKNYLIQLQKRMGKGKAISALAHKVGRCIYFMLKNGTRFDEERFLKG

SEQ ID NO: 328572 - protein, 412 aa, unidentified
MEAIIERCCGLDVHQKTVVACVLVGAPGVHPTKEVRTFRTVTRDLEALRDWLQELGVTHVGMESTGVYWRPVYAVLEGCFELIVGNARHIRNVPGRKTDVKDSEWIADLVRHGLIAKSYVPPRPLRELRELLRYRRKLVESQAAERNRLLKLLETANIKLASVASDVFGVSGRAMLRALIAGETSAEAMADLARGLLRRKRADLILALDGRLEEHHRFLLAMQLRRLEAIEADIAALDLRIDERLEPYRAPHTLLMQIPGVDWVVAAVLIAEIGVDMSVFLSVYHLSAWAGVCPGNHESAGRQKSGRARKGNIHLRTILVSAAMSASRVKGSYLKDKFHRLKARRGGLRAALAIAHKILVAAYHMLAKNLPYRDLGEAYLDQISQTRTVANLKRRLERLGYRVVLEPNAQAT

SEQ ID NO: 328573 - protein, 346 aa, unidentified
MKKGYAAQRQFVGVDLARRRSVIARMDRDGVLVDCVQIDNSVEALVAEVAKAGAGAPVAVEATFGWYWAVDALEAAGHEVHLAHPKGNASMHNRRVKTDARDAAELARLLRMEDLAESWIAPPRIRALRELVRHRHKLVKTRSGLKASVHAVLGKCGVVLPLGDIFGPVGLRQLAGVELPEPYAWRVASQCRLIEVITAEVDLAEAAIAVAFKDDPGYQALLTIQGIGPVFASVFVAEIGDVRRFATPHALASWAGLTPRHYESDNKARRGHVTKQGSRLLRWAATEACQRIREPSLAHKRALILDRRGRSAANISKVAAARRLMHVVYYTLRDGHARCLDTAAAS

SEQ ID NO: 328574 - protein, 341 aa, unidentified
MNGSKNVVGIDIAKRVFQLHWIDRETGEIVSLQLKREKFLEHFANRQKCLVGMEACGGAQHWARKLTAMGHQVKLLPGKAVKGFVTGNKNDCQDARAIWTAVQQPHVKAVAIKTEEQQAILALHRMRSQLVKFRTAQINGLRGLLSEYGEVMPQGKAGVRKGIAEALARLADRLPAMVIDTLREQWARIEKMDSEIGTIEQRIKLWLKEDEACRRIAEIPGVGPLTATTAVAIMGDAKAFKSGREFAAFAGLVPRQVGTGGRIKLLGISKRGDTYLRTLLIHGARSVLTHAKDPGPWVTELRQRRPLNVAVVALANKMARTIWAMLAHERTYQREFVSQPA

SEQ ID NO: 328575 - protein, 317 aa, unidentified
MDELRSVSICVGIDVSKDRLDVHLRPSDEAFAVARDDKGLETLVERLRGLDVALIVLEATGGFETTVAAALAGAELPLAVVNPRQIRDFARALGTRAKTDAIDAKVIAIFAEKIRPQARPIASQEAQRLGELVARRRQIIEMIGMEQNRRSRADDKRLIKQIDRHIAFLEKELAEVDSDVDAGVRASPVWRETEELLTSVPGVGPVTARTLIAELPELGQLDRRKLAALVGVAPFNRDSGTWRGHRMISGGRTSVRTVLYMPSLAAIRFNPVIRANYQRLVARGRPKKVAIIACLRQLLTILNAIVRDATPWAVQSD

SEQ ID NO: 328576 - protein, 381 aa, unidentified
MAMTRIPESNRPSDCLLLAFELGQRAWKLGFAVGMGQRPRLCQIPAGAVSALENQIARAKRRFGLPAEAPVVSCYEAGRDGFWLHRYLLAHGITNHVADSSSIEVNRRARRAKSDRLDLGGLLSLLARYVQGDRRVWRVVRVPTVDEEDARQLPRTLETVTADRTRLINRLKGLLVTQGVSMRIGKDFLEQLETVRLWDGTPMPAGLRERLARDWAQLQNVETQLREAKAGLTLRQPDAVTPTGRALAQLQTLRAIGPIGSWTLATEIFGWRQIRNGRQLGALVGLVPSPYQSGETHYEQGITRAGNKHVRRIMVQLAWRWLYYQPDSALSKWYQHRFAGNGTRMRRIGIVALARKLLVAVWLYLETGVVPEGAHLKAAEV

SEQ ID NO: 328577 - protein, 385 aa, unidentified
MANHNDLSRSLVALEQSNTIIAVIEMSLNYWLIAGIVPGVDRHPLKKLNVDEKALLQLLRQWRDEAAKAGYVITRMAVAFEAGRDGFWLARWLRARGVEAHVIHPTSVAVPREHRRAKTDRLDTELLKRAFLGWLRGEPEHCSMAAIPSLQEEDAKRPTRERENLVGERTRIINRMKACLVRFGIRNFKPTLRKAPERLNELCTPEGDLLPPNTLAELRRDMARLRFIIDQINEIETARLQRLEQAPVEGPTAMVRLVARVIGVGIETADMLVHEILSRNLRDRRAVARYAGLTGAPDESGSKRREKGLAKAGNARVRRGMIQLAWRFLLHQKDSALTQWYRARTASDGRQRKTMIVALARKLLIALWRLVTTGEVPTGVVLRAA

SEQ ID NO: 328578 - protein, 347 aa, unidentified
MRFYNKQHKFYCGIDLHARKMYVCILNEQGNTMVHKNLKTEPELLLEIISPYLDDVVVCVECMFSWYWIADFCVEHKIPFVLGHALYMKAIHGGKTKNDKIDSYKIAKLLRGGNLPMAYPYPAKMRATRDLLRRRIYMVRQCGLLLAHIQNTNTQYNLPAFNKKISRKYNRDGVSERFQEPAVKASVNADLAMVDAFNTLISQLDWQIEQAARQHNYHDLYLLRSIPGVGQILALVILYEVENIKRFPSVQDFSSYTRLIRPDKESDGKWAGKSNKKIGNAHLKWAIREAAMLFLRESDEAKGFVDRLAKKNNKGKALGIFTHKLGRAIYFMLKNKEAFNMELFFRQ

SEQ ID NO: 328579 - protein, 375 aa, unidentified
MKEKVRFLGLDVHAETIAVAVAEPEGEVRSLGTIPNRAESIRKLIKKLGPAAKLRACYEAGPTGYVVYWQLAELGVECEVVAPTLVPVKAGDRVKTDRRDAEKLARCYRSGDLTAVWVPDEGSEALRDLVRAREAAKQDQTRARHRLSKFLLRSGQRPPTGVRPWTRPYLIWVAELRFTQIAQESTRQDYLHEVEHMRERVARLEQAIMEAVKLASPALQQVINDLQALRGIADISAVTIASELGQVSRFESARQLMGYCGVVPSEDSSGKRTRRGGITKTGNAHLRRIAVEAAWSYRRPPGIWYGLRRRQESISQETKEIAWKAQHRLHKRYLKLGAAGKDQRKIVTAVARELLGFIWAIGTRAETVSRQQVAA

SEQ ID NO: 328580 - protein, 344 aa, unidentified
MKYFAGLDVSLDETAICIVDEDGTVIREGKVASEPDDLHAWITAAGMTLTRLGLEAGPLSPWLHARLRAAGLPAICIETRRMKGATAAMAVKTDRNDARAIAQAMRTGWFTAVHVKTPESQELRLLLSNRRVLLEKQIAIGNEIRGTLKAFGLKVGPVSVARFEARVVELLGEKPRLSALVRPMLAARQALRRQHAILHRMVLDVVRSDTVCQRLLSVPGVGAVVVLTYVTGVDDPARFAHARDLGPHFGLTPRKYASGDIDRNGPITKAGDGAVRKALCQAALSLLTRVERWSALKAWGMAVAKRRGLRRAVIAVARKLAIVMHRIWIDGTTFTWSREGVAAA

SEQ ID NO: 328581 - protein, 340 aa, unidentified
MDVRTLGIDLAKNLFHIHGVDGQGRTVVQRQLRRRQLLPFVAQLQPCLVAMEACGGAHYWAREIAKRGHEVRLMSPRFVRPYVKSNKNDARDAEAICEAVGRPSMRFVAVKSQAQQDMLALHRVRSLLIRERTALMNQMRGLLAEYGIVVAQGAAPLRRALALILEDRDNGVSELMRELLGEMSERLRLSEHRLKGYDRRVAEFARADERACRLMAVEGVGPLTATALIAAVGNARQFRSGRELSAWLGLVPRQHSSGGRSVLLGISKRGDRYLRTLLIHGARAALRFAVRKRDPRSRWIGAVRERRGANIAAVALANKNARVLWALLAHNEDYQAPAAA

SEQ ID NO: 328582 - protein, 430 aa, unidentified
MEEVDEQELHVERIAALDLGKAVLEACVRVPHESKPARRMQEVRTYPTTTAALLQMADWFRCWGVTRVVMESTGDYWKGVYYLLEAEGFECWLVNARDVKNVPGRAKTDKLDVVWQAKVAERGMCRPSLVQPPPIRQLRNLTRYRRSLIRDRTREMQRVEKLLEDAQIKLSAVVSKLFGVTGRLILDALVAGQRDPTVLARLAKGRLRPKTAQLQEALRGFFTDHHGAILAMMLTNIDRLSTQITTLDTMIEQAIAPYAHRAQQLAQITGAGPTSAQEIIAEVGVDMSRFPSAAHLVSWAKFCPQTHESAGTRKHKGRAKGNPWLAATLGNMAATAARTGEGFLGARHRRIARRRGPQKAIVATGNAILVIVYHLLSDPTAQFRDLGADYFTTRIDKNRRARNLATALQAVTGQKITIRDGQAVIEAEAA

SEQ ID NO: 328583 - protein, 330 aa, unidentified
MKKWNVILGVDVSKLTLDICCAERNLHIKIDNCSKGFAVFKKWCKEKGIDLNTTLVIMEFTGGYEYRFVQFCQSLSIDYRRVPGLEIKSSMGMVRGKSDQADAYRIGRYGEDKSRRLEPSNPLNDKILTLRQLLSFRKRLVRERAGLQSTLKEREHMYGVKKNDHITRIAKEKIKANDKHIRQIEEEIMGTIKNDEAMWLNYRIITSIKGIGKVNGWMTIVYTENFTSFTDPRKYAVFVGVIPFPNDSGTSIKGKKRVSHLAHKEIKQELNQAAKTAMIHDAEIRAYAERKLQNKAYPLVLNNIKFKLILRMFSLVKRGEKFVENYKTAA

SEQ ID NO: 328584 - protein, 457 aa, unidentified
MKTKYFMGCDVSKGYADFIILDESRQCVEENFQLDDTFAGHNCLYGRLTDFFSNHSDAQLFAAVESTGGYENNWHATMRRYQSSLNIKVARLNPCGVNAGSRADMKRTITDAVSARSIAEYLISHPDNIPYEQEDAWASLRKQWSFVQMLTKQKAQMLNQLESLVYTANPELLSYCRDGVPNWVLTVLKQYPTAAKLARAKISCLAKISYVSKERALLLKSKAKSSVASSTDAVACQLITATVKQVLALKKTIGNQNKFLAEQCREPEVELLKTFNGIGDYSAIGLLLEIGSVKRFASAKKLAAFFGVHPVFKVSGDGAAGFHMSKQGRKAPRSILFMVTMSAVKSNTLIRGLYQKKVDAGMERMAAIGLCMHKILRIIYGMLKNQTTFNPEIDLHNRKKALSRKNRPVHDKNRRYQRYDDSAPVSRRGKKKRLERQLSQDAFDTECGIKNTAPAVT

SEQ ID NO: 328585 - protein, 332 aa, unidentified
MYLGIDIHKQYAQVAVMDEAGEIVEEVRVENANLDELAQRYAGARAAIEATSNYYHIYDTLSEYLDVTVAHPSKLTLIANTDKKTDRVDAKELARMVRLDSVPESYVPTDEIREARALVRGRQKLVQNRTEFANKIHGLLSDHGITRQVKPLSVSGRESLRELSLPMPWNELLTSYLTMIETLTEEIERLDAAIEERAGSLAETQLLMTIPGVSYYSALMIYAEVGEIERFDRDKEVVSYAGLNPVIRESGDSRIEGGISKRGSRQLRWILVQCAQTAVHTCQDEYLSRFYDRLAGKKGSQKAIVATARKLLVSIYHMLDRKEVYDPPGVSS

SEQ ID NO: 328586 - protein, 343 aa, unidentified
MEGLYYIGLDLHKRTISYCVKTRDGFLVDEGKIEATRESLGQWVKGLPGGWIGAMEATMFTGWVYDFLKPYAHDLKVAHPEMLKAITAAKKKNDRADAGKIADLLRVNLLPECHMLSEEIRDLRRILRYRNHIVRTAVKMKNKISGLLMEVGISYSKRRLHGRKYFHELLDRLEEIPPSVRDLLQLSRSGYELFQSFQRRLVEALGTNHLIRDRVCRLMTIPGVGEITALTWVLEIGDPGRFTSVRKAVSYCGLCSAQKESGGKEQRGPISKKRNKHLQTILIEAAKLAPRWNPQLAMVYERESKRGNKNRATLAVARKLVAYLLAVDRKQSDFELSVKMQAA

SEQ ID NO: 328587 - protein, 331 aa, unidentified
MNYSHFVGLDVGKNTFDASLMSADEKEVSHNSFDNTSGGIQALLAWIASHQLSLSEVLFCAENMGNYVTELSVSSVYMGFSLALVCPLTIKKSIGLQRGKNDRIDARRITDYAVLHYRKLKLYKLPDKDLVRLRGWIIVRDNLGKQKVSGIKLLETFSQMSRLVDVAEPISLLEEQLDSIKEKILKVEEAMEKLIAANSFLYSNYILLRSIKGIGIINAIVLLCVTDNFQRFDDPRKFACYCGVAPFEHTSGISIRGKTQTSPLANKEVKVYLTRAAITAIAWDPQMKAYYKRKVAEGKHKASVINAVRAKIIARAFAVIRRLAPFVTLVA

SEQ ID NO: 328588 - protein, 372 aa, unidentified
MGHHTEAFVGIDTSKLRNAVAIADSGRGGEVRYLGEFPATEAAIQKLVAKLAAKYHYLTFCYEAGPTGYGLHRLLKSLSHECLVVAPSLVPKKAGDRVKTNRRDAVSLAKLLRAGELTAVWVPDERHEAMRDLSRARQAVKKDLQGKRQQISSLMLRLGRIYPGKTTWGPAHMRWLTSQKLEHREQRIVFEELLEGIRQESERMERLEDAIREVVPEWSLAEVVAALQAMRGIDLIAAVGVLAEIGDLSRFQNPRELMGYLGLVPTESSTGDRVKRGSITKAGNGRARRILVEAAWSYRYPPRVSRDKRPKVEAAPRRAREIAWKAQTRLCGRFRSLERKGKRRTVIVTAIARELSAFIWAINRELTPPQQA

SEQ ID NO: 328589 - protein, 377 aa, unidentified
MDCTSTAAGSILHCALELSKNTWLLGIQFPDRPQPSLYPIKGGNTEDLMAKLTAARDRCAKLNGRAPSIVLCYEAGYDAFWLARFLKARGIECLVVDSASMQVNRRARRPKTDRIDVGKLLRGLIAWLQGDRHVWSVVRIPSVDEEDLRRSHRERDYLVHERTAHINRIKGLLFAQGIRGINVKRQYKTLNVDKLVTGNGHPIPPRLASEIVREIARLALVQEQIAILERERDERPTPCTATEKKRAQLMQLNSIGPAISAVMTREVYYRQFDNRRQVAGFLGLAPSPYDSGETERSQGISRAGRGQVRGTMIQAAWLWIKHQPRSTLTRWFLERTVGQGGRVKRIMIVAVARKLAIALWRFLEHGLVPQGAILSSK

SEQ ID NO: 328590 - protein, 375 aa, unidentified
MGADAGGGCNSSRADGAEPVEIHGGRFDGHRSEAWSPHRLFAKPARLHGQQTVCKEGITKMNDSVAIAGIDVSKDKLDVHLLPSNLAFTVSRDRRGLTTLAGRLRKAGVGRIALEASGDYERMVMEALEAEGFVVQLLNPTRVRRFAEACGMLAKTDPIDARLIALYAQHFPDKGLSRRPEQARKLGEFLSVRTMLMGIVGEARNRLEHLREPTLRSLAERFLADATARLKQLEAAIAKVIAEDHAMARKAKLIRSFVGAGPVLTSNLLARVPELGYVGRRQAARLCAVAPSDRKSGKSKRRSKVEGGRNHLRPILHMVAVSAIRSNPVFAAFAKRLIAAGKSKRLVIAACTRKVIVVLNAMLRDQTPWRHANAA

SEQ ID NO: 328591 - protein, 430 aa, unidentified
MKSNTQNAKIEAITEKTLVLGIDVGSETHYARAFDYRGIEYSKKPFKFSNTEAGFVTLKEWILDLKERHEKDKVVPGMEPTGHYWFNLGKFLQDNEMKPVLVNPHHVKKSKELDDNNPTKNDRKDPKVIAGLVREGRYMIPYLPDGVYADLRTASNIRFQLQAELTRIQNRISRWFNIYFPEYKTVYGKPDAKSGMLILKQAPLPEDILTLGIEGVNQIWRDAKMRAVGKARAKTLIEAAEHSVGSKEGAVSARMEIRMLLEDYESRNIRLQEVMTLIAELVNQIPMAEKLLEIKGVGIKTVSGFLAEVGDISRFNNPKELQKLAGLALVENSSGKHNGRTTISRRGRKRLRYLLFEVAMSLVAKNPEFRELHTYYTTRRLNPLKKMQSLMAVAAKLIRVFYVMLTKGVDYDPKKMVGDIKRPAVYLQAA

SEQ ID NO: 328592 - protein, 414 aa, unidentified
MSEFEYGALVGLDWGDTSHEVALWDEQRQTRTSERVEHTPAALRAWIEPLHARFGGAPIAVAIEQSRGAVFDALSGYPFVVLYPINPRSAARYREAFHPSLSKDDPTDAASLLDLLRKHRNELRPFVPDDASTRLLRLLTEDRRELVDRRTQHVQRMTDRLKTYYPQALRWAGALITAQACDFLQRWPTLQAIQSARPAAIRAFYQRHHHAVTWIDQRLAEIGADVAFHDDQVIIDTAVLLVGSEVAQIRALNASIATYDEKISSAFAAHQDAPIFTSFPGAGEQLAPRLAAAFGTDRKRFDSAVNVATRCGIAPVLRRSGKTATVHMRWACPKFLRQTFHEYARVSIGCSVWARAFYKQQRARGHSHHEAIRALAYRWIRVLYACWKNCIAYDETRYLQQLARRGSHLVTLAA

SEQ ID NO: 328593 - protein, 343 aa, unidentified
MTEVTTIGLDLAKSVFQVHGVDGVGQVVVRRQLRRRQVLAFFRKLPPCLVGMEACASSHYWAREIVALGHEVRMMPARYVKPYVKRNKNDAADAEAICEAVTRPSMRFVPIKTPEQQAVLVEHRTRQLLVRQRIMLVNALRAHLAEFGIVAGVGRNGLEKLLAVIENEQDDRVPPPARRCLLALRAQLVMVKRQILEADRRILVWHRASEMSRRLDEIPGVGPLIATALIASIPDPHAFRSGRDLSAWIGLVPRQHSTGGKERLGKISKAGNRYLRSLLVVGALSVIRRAKETGSSRRAWLVALMARRSTKVAAIALANKIARTAWAMMVRGTRYREPLPQAA

SEQ ID NO: 328594 - protein, 411 aa, unidentified
MSRRCIGLDIHRDFCEVAIWEQGKVRSAGRIEARPKALAEYAATLRPTDEVALEATSGAREVAQILAPRVGRVVVANTHRLAAISESKRKTDRHDARTLAQLLAAGVLESCWLPDEKTRALRRRVSRRHNLVVARTRAKNEAMAVLHRNLSRRPPMSDPFGAKGRRWLGALELPDDEVETLSAALRQIDFLSGEVEVIERELARFTAGSAEARRLMTVPGVAMVTAVTFLAQVGEIERFASPGQLVGYLGLDPRVRQSGNGAAFTGRISKEGASLVRHVVVEAAHSGIRSPGPMQAFYERVRSRRGHAIAIVASARKMVTLFWHLLNRGEDYRHAIELVTQKKLRKVELMAGAPRRRGGGRCEGPNRDERREIDRDRARAAAEEYRRLVAERHKETDTEKRRAAMQTEPRT

SEQ ID NO: 328595 - protein, 355 aa, unidentified
MALSSPCIAKPSYSLYCGIDIAAKTFTAKVCKGDEEPSKALNFKQTAEDFAQLKKFLLAPELPPDQILVVMEATGTYWTLLASYLDHNGFGVSVINPAALHDFAKSLLLKSKNDQLDAQTLARLGRSHKPTRWTPPPAIYRELSQRLSQRADLMEMRQQLKNQLHALSVCEAVPSVVARLELLIETLSQQLKELDKEIKKVVSEEPLWAASVELLETITGIGWLTACWLVTLTLNFTTCEKAESLVHYAGLAPTPRKSGTSVRNRPMIGHGGHGPLRAVLYTLASSAIRFNPVIKAYYLHLRENKGKAYKVARCAAARKLIHLAFAVVTSKQVFDPDYLVHLKAKKLAEGLAVAV

SEQ ID NO: 328596 - protein, 377 aa, unidentified
MKKELYLGLDVHKDCIATAVAEAGRRGEVRDMGAISNELHAVEKWVARLRKAHGKEVVLHACYEAGPCGFGLARRLRQLGVECEVVAPSMTPMRSGDRVKTDKRDARKLARLLRAGELTAVYIPAPTDEAIRDLCRARTDAVDDRRRSRHRLKGFLLRQGYRYQGKSSWSAAHERYLRELVLPHPAMKAILEEYLIAIEAASERIARCEVAMRDLLEKWRLAPAVQALMAMKGFQTVAAMILVSELGEIHRFAHPRQVMAYLGLIPSENTSSDKRRQGAITKCGNAHARWLLVECAQHYAAPPKVSKELSRRQEGQSHEVRAISWRAQNRLHSRYTHLMVRRLQRNKAIVAIARELCGFIWELLRTQRCYQAQSIST

SEQ ID NO: 328597 - protein, 345 aa, unidentified
MSECYSGRQFVGIDLHRRRSVIVRMTTDGDPLECIRISNDAERLATVMARAGESPEVVLEATYGWYWAVDALREQGAQVHLAHPLGVKAFEYRRVKNDERDARDLADLLRMGRLPEAWIAPPATRELRELVRHRAKLVGMRSNCKAQIHAVLAKCGIQVSMTDLFGLAGTELLDRLELPKPYAARIASLRRIITALDFEIDAFAGQVRARLARDPGFVAVQSIPGVGPILGAVFVAEVGDVHRFARAEELTCWAGLTPKHHESDKHVHRGRITKQGSRLVRWAAIESVQILPKTSVVGRIRDRVGDRRGRNIGVVAAARVQLEFVFYALRDHRVRALQGTRPVAA

SEQ ID NO: 328598 - protein, 322 aa, unidentified
MKREEKKKQAAALYVGIDVSKARLDLAVHPDGRTWSEDNTARGIKAVIREMKRLKPEAIIVEATGGLERMLVAELGVADLPVVVVNPRQVRDFAKATGRLAKTDVIDARVLGHFGEAIRPEVRPLPDEQTRELADKLARRGQLVEMQTAEKNRHKSAPESTKDGIQKHIDWLEEQIHELDDDIHRMLRGSPLWREKDDLYQSVPGVGLITSTTLMADLPQLGALNRKQIASLVGVAPHNCDSGQKRGHRMVWGGRARVRAVIYMAALCGTRFNPVLRSFYRRLVDSGKPKKVALTACMRKLLTILNTMARTGEAWDPIRAAA

SEQ ID NO: 328599 - protein, 321 aa, unidentified
MTYIGIDISKDSFVVAYSADKSSKTRTFKNTTKGIHEFIQTISKDEHHCVMEATGNYSALLVYLLSEASVTTSLENPLKVKSFARAMLSTVKTDEIDARLIALYGEKMQPAPYQLRSDAILTLKQKRTVIRQLKKQLIATRNLKGSMEVLPFFDAKCRRSVEKTIAFLEKQIKDLEEDLSSLARSEYKKQMDLLTSIKGIGVTLAAALIMATGGFTYFDNAKQFTRYLGLSPTYQQSGTSVNVKGHINRNGDSSLRSQLYVAAFSSLRCNTECRACYDRLRSHGKPGKVAVIAVANKLVRQAFAVVTQETPYMDGYVSSKK

SEQ ID NO: 328600 - protein, 363 aa, unidentified
MIVIGADTHKRTHMLAGVDADTGRVRSGRQIAADDGGHLQAVRWARKLSSERVWAIEDCRHVSRRLEEALLAAGERVIRVPPKMMGASRRGEREAGKSDEIDALAVARAVVKDGVERFPAAYLDERAMEIRLLSDHRDDLVRERTRIQNRLRWHLLQLCPELEAQLPKGGLDRHVVLERIAKRLRAFAGDQRARVAREQLSRIRTLTREAGQLERELHRLVEAHRPALLAERGCGTLTAAALIGRTAGAERFPTDAHFARQAGVAPIPASSGRVVRHRLHRGGDRQLNRALYMIAITKARIDPQTKAYLERKRAEGKTKREALRCLKRHLARHIHRLLSMPAIDPDQSAPVELNAAISGRCLT

SEQ ID NO: 328601 - protein, 398 aa, unidentified
MEQFRIEHGPAGVARLVARCLELEPDPAQVRVVLETRHGLLVEALVDAGFSVLPVNPDLVARRRGPAKKKDDAEDARICCLLALDAYLELRKLIPHGQIGAELRAIARDDERAARDERRIGNRLRADLLAVFPAAIDIAAGDLASAVFLQLLQRWPSAQALAAASRQEIEDFARSARHGWPGRFADRVTGAMATAQLTVRPELARAKAGSIQLAAAQLLLLRAQRRQWERRMGELLLGAPRTGRDHTAKDPDPGKAFPGGEIYLSMPGLGDRLAARVAGEIGEHPEQFTTPNALQCYAGRAPVTRRSGRSEFTIARRLAYNHYLGDAVHQWAFCSLRYSAWAREFYDTKITAGHSHHAALRALGNRWLEVLWHCLRLDTPYDEAIHTANRNRALNHAA

SEQ ID NO: 328602 - protein, 342 aa, unidentified
MGLSPVYNPVLGPDPTKMTEVGMKGKRVIGVDIGKRWLDVAYEDTKEIERHANEPATVAALVAGFDATRDLVVFERCGGYERELEAALASTGVPWAVVHSASVKAFRQVEGIKAKTDPIDARLLQAFGSDRLKAGKLRLGRAEDVTLDALVARQRQLKTALHAERCRRETAAIVCVRASIEHMIAQLEAELAAIADELSAHESNNPRLAFKEAVLCERKGVAQATARALLGELPELGRLDAKQITALGGLAPRVHRSGRMDRRRGLSPGRTCVKVILFNPARTAMRWDADIRAFSNRLRLRGKPGKVIMVAVMRKLLVGLNAALRDALGKEEVSRPATQVAA

SEQ ID NO: 328603 - protein, 479 aa, unidentified
MPRHVAPPSKSRVTDQARRAAEEAAKLVSMPVRHEHAAGIDVGDATHWVCVDSTDDGSGPVREFPAHTPGLRQLVAWLRRCGVTTVALEASGVYGHVLLLTLMEAGFHTVVTSPSFTRQIKGRPKTDRLDCQWIQRLHKHGLLPPIFQPDEATQTLRDYVRQRANLVRLSGQHIQRMQKALGLMNLKLTKVLEDVTGVTGLKIIRAILAGERDPHELAKLRDRHCKHDEADIARALDGRYRPEHVTELRCCLALWEKYQEVIADVDAVIAGQLRAMRSKSDLPPLPKKPRVRGRKPHDPTFDVRTALYLMLGVDLTAIDGIDEVHALTLVSELGTDFSKWPTVSQFTSWLGLCPNFKKTGGKVKSSHTRKGKNRAARALRLAAWSLMRNKGYLGAYLRRQRSRLGAPKAITAAAHKLARIVYHLVRYGVAYVKETEAAYAEQVRQRLEKQLRRRAQELGFELRPVEPPVTPSVGEPATA

SEQ ID NO: 328604 - protein, 350 aa, unidentified
MIIIGCDYHPGFQQIAYVNTDTGELSEARLGHKEQAEQFYRDLRTHGRTVRVGMEASGHARWFERRLIELQFELWIGDAAAIRTKRVRKQKTDRQDAQLLLRLLVEDRFPKIWVPDAENRDLRQLLWHRHRLVQMRTRVMNQLHVVALNAGLRRKKALWRPAGRVELEGLLLAPWASRRRQDLLDLLDRLTPKIHELNGKLEQIVERRPVTRQLSTHPGVGPLTALAFELVIGTPQRFACAKQIASYVGLVPAEESSGERRRLGHISKQGNVLLRFLLVEAAQVTVRSDAHWRNQFFHLAMWRGRKIAKVAMARKLAVELYWMWRRGWDYAQMQQLGSHAGEPGNRHGVQ

SEQ ID NO: 328605 - protein, 337 aa, unidentified
MELYCGLDLHSRNTYIGILDTDFKRVFKKRVSNNFDFILETLEPFRDQLKGIVVESTFNWYWLVDGLMDAGYDCVHLANPSAIKQYEGLKHSDDKHDAYFLAQLLILGILPQGYIYPKEDRPVRDLARKRMFLVKHKTAHILSLQSLIARCCGQRISTNQIRTLTLADLQQLLKEEYLLLSAQANLNIIAFLIQQIKALEKAIKKKVKLDKAFEQLMTVPGIGFILAMTIMLEVGDISRFAKVGNFASYCRCVSSQRLSDGKPKGSGNRKNGNRYLSWAFVEAAQLGRRYSQRFGRYYDRKAAQTNTIVATKALSNKLARICYYIMRDQVSFKEELF

SEQ ID NO: 328606 - protein, 353 aa, unidentified
MEIVGALDVHRRQITFKTLERDSGEVRRGRIAPAARADVREWLERFAGCEGEFALEGTTGWRFVVEEIARAGHRAHLADPAETAAKRGRKRRAKTDSTDCDLMLKLLLAGELPESWIPSAHILELRTRVRMRKTLIDQRTAWQQRLAAQLFHQGAPAGLRLRTRAGRDALEQVELSPAGRELAALALRMMDTIDTELAPLDRWLCSYARRQPGCRALMARLYGVGPVCATAILAELGDCRRFARSNDAVRHSGLDVTVYQSDSKRAPGHISREGPEVLRWALFEAAQQASRRASPDHAYYRQVAERIDHNRACLSVARKLCRRAHHILRELGDQALAPVEPNEQPGEAIAAAA

SEQ ID NO: 328607 - protein, 433 aa, unidentified
MSSPYALMVGLDWADQKHALCCKDTATGKTNTQMLEHSPERINEWVLDQLARHPGGRIAVCLEQKIGSVVYALMGYAEVDLFPVNPATLAKYREAFHPSGAKDDPSDAALLLDLLEKHPEAMEIWRPDTEETRLLQRLCQDRRKAVDMRTKCSNSLRSKLKEYYPQALQLVGESLETEMCCAFLGKWPRFQDVAAARPESLRKFYYKFNSRSETTIKARLDLIAASRPLTGDGAVIESAICWVRAMVRQIRDLNKTVEEYDQRIGELFKNHPDSGIFNSFPGAGRQLAPRLMTLFGTDRGRFKTALDVATFNGVAPVMERSGNQMWIHWRWHCPKFARQSLVEFAGHSLGGSAWAKAYYNAQIKRGKDHQAAVRALAFKWVRILFRCWQTRTPYDERAYLAALQRHGSWLCEAIEKESEGANEKDPEFKPKTA

SEQ ID NO: 328608 - protein, 508 aa, unidentified
MSVVAAPHQAHEWAKGPAKVQPNSNFFKKEKEVIRSVGIDFHQGRHRARCLDDGAQPCDSFSFQTTPEGLATLEERVFRDSANPIIVLEPAGLPWLMVAVYLHSRHPDCRLVKAKTQKVAALRRYLRGPVKSDRIDALTLAKMPFIDPEQLDEIYLPPAEIHALQRLTRQRKRLEDDVTGRKVRIGAIIDGYVPGIRRAFNNIWSSQARAFLKSRLNPFVVIRDGESALHTFLNKATAWGKWSRADTREILLVCQSVVSICELSQPAGTFNEDFFVDLQDEIARELKLMEMEEAESESLAYRIAELYRKLHPSDNLGTIPGVGEHTAPIFLAVVGDPVRFRNQSAFANWEGVVPGARQSSSMEAKGLRMTKAGPSIMRMALYQAGDIGRRWDPQLAAVYYREMVNHGKTHKQAMGAVMSHLGARVLTVLKEDRPYELRNADGNVISKTDARRLILSKYHVSEDIRRERRRRNPVKVQRIYREMTTYKTNEAAKAPQPVEVMAISRKQV

SEQ ID NO: 328609 - protein, 341 aa, unidentified
MEEYIGLDVSMKETAISIRRDGKRIWRGKCASDPAVIASLLRKHAPSAKRVIFETGPLSVWFYHALCAEGLPAICIDARHAKAALDMAANKTDANDADGLAHLAEVGFYREVRVKGFDSMLTRTLVSARTRLVRITTELSNQIRGLMKTFGLVVPAGKGSKFDEHVRALLVDQKDLAAIVLPVLEAWRSMRLRAAELGRQLIADARKSEACQLLMSIPGVGTVTAICFTTAIEDPNNFKKSRSVGAWLGLTTRRYQSGQVDYDGHISRRGDRHVRSLLYEAATVILTRSSAESGLRTWGLALKERLGFKRAAVAVARKLAVTMHAMLRSGEMFDRTAGATA

SEQ ID NO: 328610 - protein, 412 aa, unidentified
MQTLVERGCGLDVHQATVVACLLMVRKDGKVQKQIRSFGTATRELLSLRTWLLSEGCSHVAMESTGVYWKPVYAILEGPFQIVVANAQHVKKVPGRKTDVKDAEWIADLLCHGLLRSSFVPPQPIRELRDLTRYRRKLVEAQAGERNRLLKLLESANIKLASVATDVFGRSGRLMLRALLEAKTTPQEMAELAKRKLRSKIPELELALEGRVEEHQRFLLKLQLDRLERVESDIAFLEQRLPEKLKPYADQLARLDQIPGVDWTLAAVIIAEMGVAMSVFPSVSQLASWAGVCPGNNESAGKRKSSRVPKGNVYLKTGLVEAANAAARTKGSYLRDKFYRLKARRGYKRAAAAIAHKILVSIYHMLSQNVCYSDLGDLYLDNLNKHHLTRNLVHRLERLGYSVTLTLQQNAA

SEQ ID NO: 328611 - protein, 350 aa, unidentified
MKKVVKQVVGIDVAQDELVCCFGKLHDDLAIDLVTRHTFGNKLPGFKKLTDWLEPLVNKGVQLRFVLEATGVYHQGFAYYLHDMGYSVSIVLPNKISNYKRTLDVRTITDKTMADAIAQFGLERNLDNWQPPKGIYGTLQQLTRERSQLIDEKVVIKNQLHAENAEAKPNKKSIDRCKKRLALIERQVKEIVQEIGELIRTDEGAQRIVLLVCSITGIGILTAATVLGETNGFELIRNKRQLTSYAGLDVKEKLSGTSVKGKPGISKKGNRHLRRAMHLPALSAIKHDERFKAIFARTVSKHGIKMKAVVAVQRKLLEMTYTIYKTGVAYDKEYFKKQTEVMEAGGNEMA

SEQ ID NO: 328612 - protein, 428 aa, unidentified
MVSRAYRAARVNNVDWERLARGNEGVNITLGIDVGKRDFWPVCRWETGRFERPWRVKNPEEIPVLIALIQRMSADHKLVVAMESSGTYGDALRQALTDAKITVVRVSNKASHDYAEIFDGVPSQHDGKDAAVIAELAGLGKAQPWGYEAPSEWNQELSYWVEWMVAQRQILTNWQGRLEGLLSRHWPEVTRVLKLTSVTLLRALEHYGDPRSLAADPDAVEQLCRWGGAYLAPKKAQRVVEEARYSVGVRVGEWQRRQIREYAREALLALHQVKEAQRRLRELAVGNKVLEAQGKAVGIPTACVLWTCTGDPRNYHAAAAYRKAMGLNLKERSSGAFQGQIRISKRGSARARQWLFFAALRLVQHSEVRPWYEAKKARNEDDARKVVVAVMRKLAMALYHIGVKGEDFQPRRLFARIRRRNVGGKSKT

SEQ ID NO: 328613 - protein, 343 aa, unidentified
MVHYVGLDVSLKQTSICVVNQLGSIVREGVVDSEPEAIAVFVRLNAPGAVRIGLETGPTATWLWTELKQLGLPVICIDARHAKAVLKMQINKSDRNDAAGIARIMQTGWFKEVRVKDLDSHSVRALLASRALLVKIKRDLENQIRGLLKNVGLVIGRAKFNVFTVRAEELIEDRPELMAVVRPLLKARQAIEQQTDDLDRKVLKLARYDAQVRRFMTVPGVGPITALCFKATIDDPTRFKRSRSVGAYVGLTTRRHASGEVDWTGRISKCGDAMLRSYLFEAAGVLLTRVPKWSALKAWGIRLAKRSGLRKAKVAVARKLAVILHRMWIDGTEFNWSTKKAAA

SEQ ID NO: 328614 - protein, 364 aa, unidentified
MFYLGIDQHRKQLTVNLRNEQGGVVLKRQVSTQWDRVRKFFEDLRRRAEPEGGFMAVVEVCGFNDWLLKMLDEYGCVESVVIQPEKRSRRKTDRRDASQLAELLWVNRDRLLAGEKVNGLRRVLPPTEQEGQDRQLTALRKRLVQLRTKTINQVQHILLKHNLQQECPTKGRQTQKARKWLVALALNEIDRLEMDQLLAQWELWEEQLEEVDKRIEQRQRAHPMASIVATMPGAGAYSSLALACRIGPIERFERPGSLANYWGLTPGCRNSGEATDRLGSITKQGSAMARFILSQMVLHVLRKDAYMRAWYRRIKKRRGSKIARVAVMRRLATILWQMVKYKQAYIMGGPEAVRKTQAAVAMLS

SEQ ID NO: 328615 - protein, 363 aa, unidentified
MYSERTSVGLDVHARSVAAAAIDSVTGELKQARLTPSHDHIRSWLDGLAGPVAVTYEAGPTGFGLYRSLTEAGVRCVVAAPSKLQRPAGDRVKTDAKDAVHLARLLRLGEVSPVTVPSVAQEAARDLVRAREDCRGDLMRARHRLSKLLLRQGIVYSGGQAWTGAHDAWLRRQRFDNRATQLAFESDYDAVLAVSARRDRLDTAINDSAADSEFTPVVRRLACLRGVSTLTAFALAVEIGDWYRFSGNSIGSFVGLVPSEHSSGASRVQGSITKTGNTHARRLLVEAAWHHRARYAPGKTMHDRWELAPPAARARGDAGNRRLHARWVTFNLRRKRPVIANVAIARELAGWCWSLAVLDSDTS

SEQ ID NO: 328616 - protein, 338 aa, unidentified
MAQVTTIGLDLAKHVFHLVALNEGGREVKRKMLRRSQVLSYFAQQPPCLVAMEACATAHYWGRELENRGHRVRLIPAQHVKPYVRGNKHDYNDARGIAEAATRPDIRGVAIKTMEQQDLQALQRLREGCVKERTALCNRARGLIAEGGIIIGQGVNTLRRRLPELQAEPDNGLSPFFRQLLGEVYQQLCELDARIERYTRELNRLAQIDDACRRLQTIPGFGPIAASAFRCAIGDGAGFRRGRDVAAAIGLVPGQHSTGGKPVLLGITKRGNPYLRSLLVHGARAVVTQAARKDDRLSRWINRIRAERGFNKAVVALANKLARIGWALLRHQTVYQPA

SEQ ID NO: 328617 - protein, 365 aa, unidentified
MWEAPVDNYRTSIGLDVHARCVVGCGLERSTGEVFERRLTPDHREILDWIKSLPSPAMVTYEAGPTGFGLARALDAAGIACLVAAPSKLQRPAGDRVKTDARDARHLARLLHLGEIVAVTVPSVEQEAARDLVRAREDCRGDLMAARHRLSKLLLRQGIVYYGGQAWTTRHEQWLRSHRFDAPGLQLAYHTAFDAMLATLDRRERLDEAITAMAADSVFTPVVTRLGCVRGIATLTAFGLATEIGDWHRLDGRSIGAYLGLVPTESSSGSTRSQGGVTKTGNGHARRLLVEAAWHHRPRYRPGTDLRRRWDAACPAARARGQAANRRLHDRWARFDARKKRPVVANAAIARELAGWCWSLAVIDD

SEQ ID NO: 328618 - protein, 337 aa, unidentified
MNPATVGLDLAKNVFHVHVADASGKTIDSKRLTRRDLLPYFKALPLCLIGIEACATAHNWARQLQGLGHDVRLIPPSYVKPFVRRGAKNDATDAAAICEAVTRPNMRFVPIKSREDQAFLMLHRARGLLVRQRTMAACAFRAHLAEYGVIVAQGIHRVDALIAKLDEIRADLPNDASFALDALVGQLDTLNRQIDRIDVRLAEIHKTNAICRLLATIPGIGPITATAFAATVPDPSTFRSGREFAAWLGLTPRQNSSGGKHRLGGITKQGDRYLRHLLVLGARTVVRYPKARSRVDGPWIEALLERRRPMVAAVAVANKLARTIWAMLSTGEVFRNT

SEQ ID NO: 328619 - protein, 358 aa, unidentified
MGKSIIDTSSVTRVGLDLAKRVLRIHAVDATGSVVIARSVNRRTLLKFFDALPRCVVAMEACSCAHHWGRQLLELGFAAVRLIPPAHVKPYVRRNKNDAADAAAICEAAGRPGQRFVAVRSVENQAALMRHRARELMVGQRTAALNALRGHLSEIGVVAAQGVQNAYALKDMAAEGFDANGEIVVPDCVRLALAPLVRQIDALDEAIEVIDRELEASARTDETAKRLMTIPGIGPVTAMALLATIQDFAAFSSGREFAAFLGLTPREHSTGGKPRLGRITKMGDRYLRKLLVQGACSALGHRKGHNDALRRWASGMLERKTVKYKFKLTAVALANKLARIVYALATKGGHYDDRPVAA

SEQ ID NO: 328620 - protein, 410 aa, unidentified
MEVILRCCAGLDVHKDSVEACVRQTSAGGKVEHEVRHWATTTRELVEMAEWLSAMGVTHVAMESTGVYWKPIFNILEAQFEILLANAHHLKNVPGRKTDIKDCQWIAQLLQHGLLKGSFIPPRPQRELRDLTRQRTQLVDEASRISNRIQKVLEDANVKLGSVVSNVVGTSGRLMLNAIIAGQDNPAELADLAQRRLRSKIPELEQALYGKLTEHHRWMLKLLVDQLQTNEQFVARLDERIAELTHPLKPVLEKLDAIPGVDRRVAEVVIAEIGPDMTPFPSDAHLASWAGIAPGNNESAGKKRSGKTTKGSRWLRQALVQAAWAASHKKDSYFQAHARNLMHRRGRKRGLVAVAHSLLIVIYHMLNDNTAYRDLGTQFLDQIRANHLTRFHVRRLQQLGLQVTITPQTV

SEQ ID NO: 328621 - protein, 325 aa, unidentified
MIDSYVGIDIAKAKFDVAVLIPKSPIRYRTFPNSAEGYQNLSSWLEGELFAFEPHFCMEATGRYGEQLAFFLHDSGHPVSVVNPSCVKNYARSKLRRTKTDKVDAALIAEYCSKESPMLWKPIPKASRELQQMTRELEHVKCLLADEKNRIKSGSHISSVRDCMESRISFFEAQIKLLEEQINSHIEESKLLKRQKKLLLTIPGIGSTTANALLAEIPDISKFKSARQLVAFAGLVPREQSSGTLQGKTRMSKVGSSRLRKLLYMPTVSAKRYNPVIIALCSRIEATGKSKMVAIGAAMRKLVHIVFGVLKSGKSFNKRLHLLEV

SEQ ID NO: 328622 - protein, 344 aa, unidentified
MTTKLMAGIDLHSNNMFCAIVDMDGKRIFEKKLPCDLESVVRALKPFKKRLERMAVESTYNWYWLVDGLQDHGYPVVLANPAAMKQYDGLKHADDKSDGFFLAEMLRLNILPTGHICDREVRPVRDLLRRRMGLVHKRTSLILSLKSLHTRVTGRDLSTGKIKALEPQDGEKLFEHPADRLITRLDLQLVEQLGQSIQQIEASVLARVKNLPDYQVLQTMPGVGKILGMTITLETVEAQRFASAGQYASYCRCVDTQRISNGKKKGENNGKCGNKYLAWAFVEAANLAQRYDANCRKFYDRKKAQVNGVVATKALACKLAKAAWHMMSQNRPYDSSRIFPGAKT

SEQ ID NO: 328623 - protein, 365 aa, unidentified
MTKSISRKATQRSEQLGAYSDRVSTIGIDLGDRSSHCCGIDDEANIVAEFRVATDATSFEEAFRGLARKTIAIETGAHSPWVSRLLESLGHEVIVANSRKLRFIYENRRKDDRVDARSLARVARLDRTLLEEIRHRREGAQVDLELVRARDVLVTTRTRLVNHVRGVVKSFGKRLPACDPSALPRKATTAIPPVLLEALTPLLDMIESLSDQIRLYDRAVEHLATIEHPEVAKLRQVSGVGALTGLAFALTLDDPHRFRQSRSVGAWLGLVPAKDDSGERRPQMRISKEGDHYCRRLLVGSAQYILGPFGPDCDLRRHGLAIAARGGKNSKKRAAVAVARKLGVLLHKLWVSDAVYEPLYNKIAA

SEQ ID NO: 328624 - protein, 410 aa, unidentified
MDVIVERAGALDVHKASVMACVRVAAGRGRREEHIAQFSTTVQGLLGLRDWLAAHRVTQVAMEATGVYWKPVWAILEDDFELLLVNARHVKQVPGRKTDVSDAAWLAQLLEAGLLRASLVPPKPIRDLRDLTRYRKAQIRDRQREANRLHKVMQDTGIKLDSVASDLLGKSGRAMLDALVAGTTDPDVLADLARGQLRKKLPALREALEGRFSSKHALIVGQILAHIDFLDEAIDRLSEAIEEQLGPFGQAQVDLLCTIPGIQRRAAEVIIAETGADMTKFPTAGHLASWAGVCPGNDESAGKRRSGRTTKGSKWLRQTLTECAKAASRTKDTYLAAHYARTRTRRGANRATTAVAHSILTACWHMLQTGETYTDPGGDYYQRRDPERVTKRLVAQLQRLGHTVTLQEAA

SEQ ID NO: 328625 - protein, 309 aa, unidentified
MLADQVDVVIGVDTHKHTNTAAVVRASTGGVLDEATVPTTPAGHEELLAIARSHGSLRAWAIEGTSSYGTGLTRFLRANDEWVFELERPTRSDRLGGKKNDPLDAARSAREALARPDLGQPRSTGDRTALSVLLAARRSAFDGATVAERQMLAILVAAPETLRERFSKLTTTVAVAKAARMRIVNDGDAETVTTTTVVRSLARRSLELRSEAKEHEGALTVVIRRWRPDLLEQKGVGPIVAATVLCSWSHRGRFRSEAAFASLAGVAPVPASSGLTVRHRLNRRGDRQLNRALHTIVLSRIRFDEETQA

SEQ ID NO: 328626 - protein, 344 aa, unidentified
MDHYAGIDVSLESSSVCVVNASGKIVREAKVASEPEALIGWCGSLGLELARIGLEAGPLSQWLYAAMREAGLAVELLETRHVSDAFKAMPVKTDRNDARKIAQLMRLGWFRPVHCKSIVAQEIRAMLTARKLVQSKLLDLENSLRGILRGFGLKVGKTTRTKFAERIEELVKGHPNLQTIGQALLRVRAVLLAELNGFEKRVRAMSRLHEKARLLMSTPAVGPIISLTFACAIDDPSRFSSSKQVGPYLGLTPKKYQSGETNYTGRISKHGDASAREALYEAAHLILTKPIKGCSELKSWAMRISRRAGANKAKVALARKLAVIMLRMLKDNVPFNPAAKAAAV

SEQ ID NO: 328627 - protein, 357 aa, unidentified
MKVTTIGIDLAKDVFGLHGVDGEGRVAFKKRLVRSRLLEYMSQLPPCLVGLEACSSAHYWARKIERLGHRVRLMSPRFVKPYRKSDKNDANDAEAICEAVTRASMRFVPIKSEAQHEVQALHRVREQLLKSRTALVNQVRGLLAEHGIVAPQGIARARRLLLELLADPERHGLSGLFRETLQEMAERLRFFDERVAAYDDRIERVFKEDERCRRLAKIEGVGPLVATAVVAAVGNASEFKSGRELSAWLGLVPRQHSSGNRSQLLGISKRGDRYLRTILIHGARAALRRADHKSDQRSRWALRIKLARGYNKAAVALANKNARIIWALLTRGENYRPPAISVASPTAGRISLIRVQA

SEQ ID NO: 328628 - protein, 355 aa, unidentified
MNQEKYIGMDVHQATISVAVMDSSGKLIMECILGTKAATILEFIQGLRGSLSVAFEEGTSAAWLHDLRKPHVAHLVVCDPRKAALLKDGSKSDRIDARKLAELLRGNQLKPVYHGDDGVRTLKELGRSYLTITKDVSRVMSRIKALYRGGAIPCSGTTVYAPRHRAEWLAKIQEPGVRLRAEGCYQQLDLLQPVRQEARPHLRLESRKHHAVKLLRQIPSIGPIRAALLVALLQTPHRFRTKRQLWAYSGFAVETHDSGEYRYVRGKLQRNRERITVRGLSNNHNHDLKNLFKGAAISASTRPGPLCDFYVALLEKGMRPTMARLTWARKIAAITLTIWKKGANFDAQQLHRQAA

SEQ ID NO: 328629 - protein, 432 aa, unidentified
MRRTRRHTVAACVRTRGPSGERVQEIHTFGTTTVELLALRDWLTAHRVSLVGMESTGIYWRCVYYVLEDALQCWLLNARHLRNVPGRKTDVKDAEWICQLVEHGLVRPSFVPPKPIRELRNLTRYRKAQIEERTREAQRLEKILQDAGVKLSSVATDILGVSGRAMLTALVQGTRDPDVVSDLARGQLRTKIPQLKHALAGRFGAHHALLVGMILSHLEFLDEAIEHLSTEIEEVIAPFEAEVELLTTIPGVARRTAESIVAEIGVDMSRFGSSARLASWAGMCPGNNESAGKHRSGKTRKGSKWVRTALIESARAASRSKGTYLSAQYHRLRGRRGSSRATVAVGHSILVAAFHILDRVQPYSDLGADYFVHRHDPQRHANKLVRQLRALGYGRHPPTREGGVAGRGHFHHRCTLQVSCWTGGHGSSAGKP

SEQ ID NO: 328630 - protein, 392 aa, unidentified
MYIVGIDIGKNHHEASIVSPEGKQIGRSLRFATTHKGADSLMSFIFKNIGNSPCVFGMEATGHYWYPIYSFLKAKGYTIYVINPIQSDSLRKMYIRQTKNDSIDSFLIAEVIRFGQFGTTSMADENILAMRQLCRYRDSVISSRTEIKLRIGTIMEQIFPEYEKQFSSLWVSTSMGILEKYLTPENIENAPIDELFEIIKDKSHNRLTKAKAISIKEAAADTFGIKIAQDAFSFQLKQLIDRMNFLDKQIEALDCQILEYYEKFDCYLHTIPGIGMIAAATILAEIGDINRFKSSSALVAFAGIDPTVRQSGEFSSTHNHMSKRGSPYLRHAIFLAATTCSFHNSPLNAYYKKKREQGKHHLTATGAVARKLTTVIYAVLRDGKPYEPKKFC

SEQ ID NO: 328631 - protein, 377 aa, unidentified
MKDRVKEVFVGIDVAKASHAIAIAESGRSGEVRSFGTIAATPEAVRRLVTKLSKNYERLHFCYEAGPTGYGLYRQLTELGYECIVIAPSLTPVRLGDRIKTDRRDAVRLARLFRAGELTAIWVPDATHEAMRDLVRARQSAVEDLRCKRQMISSLMLKHGRSYPGKKTWGARHQRWLQQQKFDHPGHQIALQEMVLAERHARERVDRLMTTIEELVPGWSLGGVVEALQSLRGVALIGAVTFMTEVGDVRRFDHPRQLMAFLGLVPSEHSTGMSTRRGSITKAGNARVRRTLVEGAWAYRWAPRIGVKQFYQHRKVSSEIQDIAWKAQSRLTGRYRRLTKRGKKSTVVTTAIARELVGFMWDIARRSMPTEEKLNSA

SEQ ID NO: 328632 - protein, 382 aa, unidentified
MQTITLYLGLDVHKDSITIAIAEPGPKGEIRTFGTISNDMGRLEHALGRIRKAHPQALLEVAYEAGPCGFVIARRLKQLEVPCLVAAPSLIPKQPGAPFKTDKRDACAIARLLRAGELTAVYVPEATDEAIRDLCRARTDAVDDQRRCRYRLKAFLLRHGYRYQGKANWSQPHMRYLRELVLPHPAMKAILEEYLQGIDAAHNRVRRIELSMLALLESWRLKPAVQALMAFRGFQLVAAMITVSELGDIHRFEHPRQLMTYLGLVPTEYSSGPRQRLGGISRCGNGHQRWLLAECAEHYLLPPKISKELSKRQQGQPEAVRQLSWKAQTRLHLRFIKLLSRRLQRNKAKVAIARELCGFIWALLRTLDCYKQTPISQPPAAN

SEQ ID NO: 328633 - protein, 418 aa, unidentified
MQVWAERCAGLDVHKKTIVACRITPDAEGHELVEKLTFGSMTRDLLDLADWLADAGCSHVAMESTGIYWRPVYNILEARECFDIIVANAAHIKSVPGRKTDVRDAHWIADLLRYGLLKKSFVPSPEQRDLRELTRLRTKFVQERTSMINRVHKTLETANIKLASVASEVHGVSGRSMLAAMIAGQTDPAVLAELAKGRLRNKRSELEAALSGHVRAHHRIILSELLTQIDNLDESIERLTEAIDAALQEATGPFMTAVKLLMTAPGVQRTAAEKVLGEIGPDMDRFNGPRQLAALCRLAPGNNQSGGKNRSGRIRQGSVPPRQAMLEIAMSAVKAKGTYPAALYQRLAARIGKGRAIVAVAHSLLQAIYWMLKNQVPYKDLGGDYFTKGREKYIVQSMTKRLTQMGYAVTLEQIPIAA

SEQ ID NO: 328634 - protein, 323 aa, unidentified
MQSVPVFVGVDVSKARLDVAASGSDEAWHVTNSSDGIAKLVGRLREIGPALVVMEATGGFEVPAAAALAAAEIPVVIANPRQVRDFAKSTGQLAKTDAIDAHILALFAERVRPQVRALPDEDARALDAIVGRRRQVIGMITAEKNRLGLALPAVRKNIEEHIRWLERQLERVDADLDRRIRKSPVWMAKHNLLRDVPGVGPNLARTLIAELPELGRLSHKQIAALVGVAPMNRDSGLFRGKRMVWGGRASVRCALYMSILSATKWNPVIRVFYQRLRAQGKPPKVAMVACMRKLLTILNAMVRDGREWDPSIPLDQLRIQHSC

SEQ ID NO: 328635 - protein, 351 aa, unidentified
MAEKLNTAISVIGIDIGKNAFHVVGLDKLGAIVLRQKWSRSQIEPRLANIPPCLIGMEACVGAHHLSRRLMALDHDARLMPAKYVRPYSKGQKNDFRDAEAIAEAVQRPTMKFVATKTADQLDLQALHWVRDRLVGQRTGLINQIRAFLLERGIAVRQGRRFLRAALPEVLATRADILSSRLMRVIEDLAGDWHRLDERIDQLSDEIEALARQDAGCVRLMSVPGVGPIIASAMVAAIGTGDTFSKGRDFAAWLGLVPKQISTGDRTILGGISRRGNRYLRVLFVQAAWVVLIRPKNWERSGLKPWLEAARRRLHHNVLAVALANKLARIAWSVLARGRNFEVTRLGEAIA

SEQ ID NO: 328636 - protein, 311 aa, unidentified
MNRKKIHVLGIDLAKNIFQLHGIDNLGQACFKGKLSRNKLLAFFGELSPCVVAMEACSGAHYWSRKARISGHEVRMIAPQFVKPFVKGNKNDAADAEAIAEAATRPSMRFVSVKTPQQQDINVIHRVRQRLIHNRTQLANQIRGVLAEYGIVMAKGRQKVGKLIQDLLGGEQSPSDLTPLTMDLLGELWDEWNRLEEKISQQDVRIAKISAETDECQKLEQITGIGKITSTALVAVMGSPHNFKNGRQLAAFLGLVPKHSGTGGNNRIGKISKRGNVYLRSLLVHGARSALRVILQRFRSGTFGKKILFDV

SEQ ID NO: 328637 - protein, 477 aa, unidentified
MNKTQGNNLQAPGTKTKRRKRNKGMCLEERPILEPNAAGIDVGAREMFVAVPPGRDENPVRVFATFTEDLERLTDWLEQCGVTTVALESIGVYWIPLFEILEQRGIRPCLVNARHMKNVPGRRTDWHECQWLQFLHSVGLLRAAFRPGQDICAVRTLVRHRNELVSAASQHVQHMHKALTQMNLQIHHVISDITGLTGLAIVDAILAGERDGAELAKLKDPHIKADTETIRKSLEGNWRPEHLFTLGQSRALYRIYQQQIVSCDLEIERMLGEFEPRVDPTQKLLPPDGKRNRAGRKRRRKNGHPHPEFDLRTEVYKLFGVDVTQIPGLEENALPLFSEVGRDMSRWPSAAHFVSWLALCPDNDISGGKLLWRGARRVKNRAGHLFRLAAFSLHHSPTPLGNYLRRMKTKLGPKGATMATAHKIAVIFYVMVKKQVEYDQSIWATRDAQREKRLETKLKRQAKQLGYELVPIQPKAA

SEQ ID NO: 328638 - protein, 335 aa, unidentified
MCKQFWVGVDLAKDSFVASVASVEHQPSEWASLPVREFTNNGHGLLSFLAWLEKHNVNREVVSGVCLEATGRLAWRWGERVGDRLGPLSIVNPARPVAFAKSIGLRDKTDRIDACVLALYGAAMRPVSKPLPTSYERQLRELASLCESVKQDRIACENRLREKPESKVVRKCLRREIVHLARELECLETEMDNLIAQNATLEQHRVRIQTIPGVGAKTARMLLAEYGDLRAYSRNELVALAGLYPKHFQSGSSVHKKPRLAKGGGRRIRAVLYMAALTARRFCPHLKRFAQRLKERGMSNMAILGAVMRKLLLLIRAVVVSGNAYDPHFGLEQSP

SEQ ID NO: 328639 - protein, 384 aa, unidentified
MSTISSRTQRCKKEEPAMIKNSTAFVGLDLGDKRSNVFILDQGGEVIEETRIPTSEPAFRRKFASLQPCRIAMEAGTHSRWASRLLEQLGHEVLVANPRRLRLIYENSRKADEADAEHLARLARLDPQLLSPIRHRGPEAQAHLTVIRSRDSLVRARTLLINHVRGSVKSTGARLRACSADSFHHRVAPAIPTELAPALMPVLETIASLTAQIHAYNRQIEQLCQEHYPEARHLRQVSGVGAITALAYVLTLDDPDRFHKSREVAPALGLVPKRDQSGSRDPQLRITKTGDSYLRRLLVGSAQYILGPFGPDCDLRRWGLKLAERGGKNAKKRAVVAVARKLAILLHRLWVTGDIYDPFYHSQPGQTSVTQTHLRVRQPEAVCA

SEQ ID NO: 328640 - protein, 338 aa, unidentified
MAIVTVGIDLAKNVFAVHGVDGAGKPVLVRPNVARGKLLELLASLPPCLVGMEACSGAHHWARLLVAHGHTVRLIAPKFVIPYRLSGKRGKNDAADAAAICEAVSRPNMRFVPPKSLEQQSQLLVHRARQGFVVQRTATINRIRGLLSEFGIVLPLKAATVRREAMCQLEDLPGWANTVIGDLLSEVSRLHERIAQYDRHIGMIAKASAPARQLMQLAGVGPTTATAVVAMIGSGHEFKCGRQLSAWLGLVPGQYSSGGKQRLGRITKAGDPYLRMLLILGARAMLASAKDKSDATSRWAVQLAARVGYWKAAVAIAAKNARMCWAVLARGEAFKLPA

SEQ ID NO: 328641 - protein, 318 aa, unidentified
MNVIGLDISKDTIDATLITVKGGQDYIKIANNTEGFENLINWIKTKRIRKIAISMEATGIYYEQAAEYLNALYTVYVINPLKIKEYAKSQFSHTKTDKADSKLIAEFANRHLDKLTPFRPSENPILYKLVNLLQQLKEQQKETQNRLHTAKDIYIKSTHEAIIELLEEKIDQTSKRIEGMIKQKESLNIEYQNLQTIPAIGKETAVILLRHLTDKNFETANKFVAFSGLSPKIEQSGTSVNKKGRLSRYGHRQLKRALFMPALVAYRMNAFPQLVRNLEAAKKPKMIIIVALMRKLAKIAFYIHKTKKPFDKARHQTV

SEQ ID NO: 328642 - protein, 354 aa, unidentified
MQYRKIKAEFYCGVDVHPKQSYLFILDKSGEKRLGINIHNNFAKFKESVNPFLPNLAVGCESTYSYYWLADGCQSTGIPFYLGHAMYMKAISGNKQKHDPLDARTIADLLRTSFFPEAYPYPREMRPTRDLLRRRHRLVRLRAEAFSHLQMTGHQYCIEGISPQAVKDRKNRRTLVDLFKEKDLQDLLSSDFDVIESLDPVIEQLEIKIKASALHHNPKNYALLKTTPGVGDMLALVILYETHDIRRFPTHQKYSSYVRVVKSDRTSAGKSVGSKNQKIGNPYLKWAFNSIIISAQQTSESIGKYYHRLESKYGRPRARGRIAHKFAVAVYYMMKNGVPFSEELFFKGRNERTG

SEQ ID NO: 328643 - protein, 345 aa, unidentified
MPVVTVGLDLAKTVFQAHGVDEAGQTVLRRRLGRSELIAYFAKLPPCLIAMEACSSAHHWARELGDLGHDVRLIPPHYVKPYVKRNKTDAADAEAICEAAGRPSMRFVPIKTRDQQAVLVLHRSRSLLVRQRTASINAAWGLVGEFGLIASKGRYRVSELRQRMNAMASDQIPAIACQAINTLFDHIDVLEEQIAAVERQIVEWHRNNEDSLRLATAPGVGPITASAIVAAVGEGRQFQSARHFAAWLGLTPRMHASGKKERIGRISKGGDRYLRALLIHGARAIVGTLFRKNVTPRPWLLALAARRPTNVAAVAVAHKTARALWAMLTRGEKYRRPVAATPSAA

SEQ ID NO: 328644 - protein, 410 aa, unidentified
MKRVIGMDIHRTFAEVVFWEVGHLRPAGRVDMTRTGLEGFGRMLSKEDEVVIEATGNAMAVVRALEPHVARVIVANPMQVKAIAYAQVKTDKIDAGVLASLRAANFLPEVWLPDVDIERMRRQVARRNQVVRHRTRIKNEVHAILHAHLIPCCPHDLFGRPGRDWLGRQALPDDERTAVARHLRELDRLGEDLDVLDRDIAQAAINDPAVKRLLTITGVNLVVAAGLVAAIGDVRRFASSEKLVSYIGLNPRVRQSGLGLAQHGRISKQGRSHARAMLVEAAWAAAKAPGPLRSFFLRIRARRGHQVAAVAVARKLAVLCWHLLTKETDYQWARPALVANKIRTMELQAGQPPRKGNKRGATYVYNVKELRDREIDVARHAEQVYEQFVRGWQRRAPTKRRTGAANEERL

SEQ ID NO: 328645 - protein, 353 aa, unidentified
MPFVKPVSPPLKYVVGIDIAKSSFVACLGRLDLQQQLSFGKETTFENTAAGFAALLSWVARQQQAAVPLWFVVEATGVYYEELAYFLADKQQLLSVLLPNKVKHFARSTELKNKTDQLDARLLARLGLERSLPAWQPPTAALRQLRALARERQVLTKQGAQLKARAHAYQHSYQPDKRTLARLAAQHQLLVQHLTALDQDLAELLAAEPELARKLAQLTSISGIGLTTAIIVVAETSGFVLVENERQLASYAGLDVVQRQSGLAAHATRISKRGNVRLRTALYLPALSSLRYNPQQIAFYTRLRARHPSGKPGVIAVMRKLLVLCYSLWKNDRPYDPCYQLAHQVSQKIAPAT

SEQ ID NO: 328646 - protein, 417 aa, unidentified
MLKIVFPICCGIDVHKTFLVATIASTDRSSVTTYQTKRFSTFTKDLENLSKWLLDNQCTDVCMESTGKYWIPVYNVLELTCEVILAHPKYVKSLRGKKTDRKDSVWIADLFKHGLVKASFIPEKAIRDLREVMRYRTKLVSMKSSEKNRYQNALTVSNVQLASVVSDTFGKSAQALINQLLQQPKDTSFDVLPFLHGSLKKKAEQISESLNGSIDDIQAQKIRSCTSHMAELDSHIEDLQVAADLLASPFTAALRIIESVPGIGHLSALTILSEIGTDMSKFLSAKHLCSWAGLTPCNDQSAGKKKSTRISRAGCYIKPVLVQCALAAIKDKSFPYYGQRYQVLKHRRGHKKAIIAIARMMLSVIYTLLSRGELFSKELYEESLKNPMVILSQEEQFQRLAKKFGYVVVKVHEPVPV

SEQ ID NO: 328647 - protein, 336 aa, unidentified
MYCAGIDAHLRYLQIAVLDRFGKLELNTRVSTREAEELARVLDPFRPLEVVVETCPFWPWIYDLLVPVGVTFHLAHAKELRFIANAPQKKDAVDATVLARMLLSGLIPKAYPRTPEQRETLRLVRHRTALVRERTRLACRIHAQLQQSRVLIEREQLLRKRTREWLESEAWPQLAPEQQALISTHFELIDRTTPLINRLDRRIEKQAEGDRKAQLLMTIPGVGPYRGLLLATELSPIGRFLRVRELVSYAGLAPSTRSSGGHTRHGSIPKGANRWVRGALVSAIPSHLRVAPESSLSAAYETLKQRLGWKVARVAAARKLARIVYRMLKTRESWRG

SEQ ID NO: 328648 - protein, 344 aa, unidentified
MKHYVGVDVSLKETAICVVDENGVVIREGKALSEPEAIVAWLNESGLPIVKIGIEIGGLARWLYSELRAAGLHAVCIDPRRLRGVTKTMPIKTDRNDARAIAQVMRVGWYTVVHIKGDVSQELRMLLNNRKTLLIKQIDIENEIRGVLRVFGLKLSGRISQATFEQQTNELTDGHPRLAAMLRPMLVARAALREQYGVLHKMVLEIVRREPTCQRLMTIPGVGALTAITFLTTIDDPDRFQRSRDVGAHLGLTPRKYASGETDRNGAISRCGDVMLRTILYQAALALLTRTKRWSALKAWGVRVAKRRGLRRAVVAVARKLAIVMHRIWADGSEFRWTREEATA

SEQ ID NO: 328649 - protein, 411 aa, unidentified
MLKIVFKICCGIDVHKDFVVACIAKTDDKNVTTYQTKRFSTFTNGLRELSEWLCSNSCKDVCMESTGKYWYPVFNILEDSCKVIVAHPKYVKAIRGKKTDKKDAKWIADLFKHDLVVSSFIPDRCIRQLRDLCRYYCKLTNLTTSETQRTHNCLTVSNIQLANVVSDINGKSAQKILSKILENPNDTSFDIESLLHKSMLPKLDDIALAIDGVITTEQASKLQIIKKHFDNLNICKSDLENLIYEMAKPYEHEIALLQTIPGINSKLTAIRIIAEVSNDVSSFPTSKHLCSWAGLTPTNNESAGKKKSVRISKAGCYIKPLLVQCGLAALKSKDNPEIGNRYKNLKMRRGHKKAIIAIARMLMTIIYHILQDKVCYDKELYSHYNQLPTSKEITVEQAIALAKRQGYKLVC

SEQ ID NO: 328650 - protein, 442 aa, unidentified
MQVVYRRCCGIDVHKDSVTATILVFPDEGEREMRTQQFGTHWKELQRLAQWLRSSKVEKVAMESTGVYWKPVWNVLERTLSLILANPYQVKNIPSRKTDRKDSEWLADLLAHGLIRPSFVPAPEIRDLRDLTRYRVKLTSEYNRTHNRLHKVLEDANLKLDTVLSDLMGASGRAMVKSIIAGQTDPGWLADYAKGSLRGKREELELVLRGNIRDHHRYLLSELMADLDFITEKILRVEAEIARRMESYLDQVTRLCTIPGVDVLTAWTLIAELGPDMSVFPSAAHAASWAGLCPGNRESAGKRLGNRTKKGNRWLRRALCQAAWGLSHKKDCYLTALFLRRAAKSGVKKAIIATAHQLLVIAYCLLRDRSEYRELGGGYFDRLNPIRTQNRLVRRLERLGLQVILKPARLPTTSPAIPPAKPPRGRPCKCLQRAIPCKHRPL

SEQ ID NO: 328651 - protein, 326 aa, unidentified
MEHELHYIGIDTAKEKLDVDVLRPDGRHRTKKFANTTKGHDELVSWLKGHKIDHAHICIEATGTYMEPVAECLYDAGYIVSVINPALGKAFAQSEGLRNKTDTVDARMLAEFCRQKRPAAWEAPHPLERALRALVVRHQALTDMHTQELNRTETAREVQRPSIDAHLLWLEAELKRLEKQIKDLTDDDPDMKHRRKLLESIPGIGEKTSAVLLAYIGLKDRFAHARQFAAFAGLTPRRYESGSSVRGASRMSKAGHVSLRRALYMPAMVATSKTEWGRAFRDRLAANGKKGKVILGAMMRKLAQVAYGVLKSSVPFDASRHNPVAA

SEQ ID NO: 328652 - protein, 359 aa, unidentified
MTGLPLPDIAPSGHVVVGVDTHKYVHVAAVLDTAAGLRSTLSVSADRNGFERLLAWAGSFGRIIAFGIEGTGSYGASLTSFVRQHNILVIEVSRPDRRLRRLNGKSDTLDAENAARAVLSGAATATPKVANGTAEMVRQLKVSYDTAVKARTAAMVTLKAMLIHAPDDLRASTEGKTPVTLARMFARLRPGSLRDTSDSIRHVLRTLSRRWLSLDEEARSLDKMIQDLVQKAVPQLMEAYGISTHIAAEILIVVGDNPERIKSEAALAKLAGVSPIPASSGMTSGRYRINRGGHRQLNAAIYRAAIVRMRSHEPTKEYVARRTAEGKTKRDIVRCLKRYIIREVYRLLQHGPKLAEYTT

SEQ ID NO: 328653 - protein, 397 aa, unidentified
MIAVGIDISKAKSTVAVIDSDGTVLASPFTMAHTQPEMEAFVTYLKGLGKPTTILMEYTGHYHYPVLKKLQDEGFPVCIVNPYQMKKYGDVEIHKAKTDKKDALRIAAYALEKSYKLVPYSSMEQKYEDLKFLSRQYNQRISYVAKLKVQLIALLDQTMPGITRILPLNSRNPEKCALLLFIKRFKSFDEIQRIGKARFLASYDVLAKKASERSASSKGLSIYELAVDSITTRGEDPYIWLSQNQCVDLLSATQNAADEIISQMRNIAETIPEYKVLRAMHGVGDRLGPIILAEIGDVHRFHSGKALNSYAGNDAPPYQSGQFESRNRHISKRGSSALRKACYEVMQALKLIKPQDDPVYLFMLKKEQEGKPFNVAKMAGVNKFLRIYYARAMELYK

SEQ ID NO: 328654 - protein, 345 aa, unidentified
MEHFAGLDVSVKDTSVCIVDETGEIVREVKVASEPEALLAVLKSPAYHFKRLGLEAGPLSQWLFSALAEADLPVICVETRHMRAVLKAQINKTDRNDARGIAQMMRVGLYRPVHVKTLRSQKLRMLLTHRKLLQSKAIAIDNDLRATLRNFGLKVGLVGAVRFEARIRELVEDLPDLAALVEPLLIVRQALREQFGILHRRLLVAVRNDEVCRRLMTVPGVGPVVALTYRATVDVPVRFRKSKSVGAVFGLTPARDQSGERDRMGTISRCGDEMMRTALYEAAQVMLTHSAKWSWLKAWAMQIARRRGMKKAIVALARRLAVIMHRIWVDGTDFRWTREELATAA

SEQ ID NO: 328655 - protein, 403 aa, unidentified
MNNVAGIDVSKGKSMVSVLRPFGEVVAKPFSIGHTGSELKELADYLKSLDGETRVVMEHTGRYYEPVARFLHEEGVFVSAVNPKLIKDYGNNTLRKVKTDKADARKIARYGLDNWAELRQHTPMDTIRMQLKTLNRQQSLYAKTKTMMKNNLIALLDQTYPGVNALFDSPVREDGSQKWVDFATAFWHVDCVRNMSLTAFAERYRKWCKRHGYNFSQSKAVEVHAGAQDLIAMLPRDALTKTMVRQAIDALNAISASMERLKAEMQALAAQLPEYPVVMAMHGVGDSLGPQLVAELGDVTRFTHRNAITAFAGVDPGADQSGTHEAKSTRVSKSGAPELRRALFLVMDCLLKTQPQDDPVYRFMDKKRAEGKPYLVYMTAGANKFLRIYYGRVKEYLASLEEN

SEQ ID NO: 328656 - protein, 427 aa, unidentified
MNCNEVTRHREFCQFKAEVRLSRDYLIIGIDVGKDRHHAFLGTTTGRTLLRRLLFDNNKAGFERLVAKASQLQVEHGLSRAVYGLEPTGNYHKPLSSWLLKQDRLLVLVSSKAIADNRQTLDGRWDKNDTKDSANVADLVAQGKCQFFEVPDRQLVQVRNLLSLRRRLRKDEHSVRMQIRNGLVTKYFPELDRYWGNCLTENLAIVRWCLDPRKIRSMEFEDFLRQVTRRERGIRQHKRLMRIYETAAVSIGCPMDDIAEFEANLLVDRLEKIREKIGQTETEIKDLCDSFPAYRRLLTIPGYGPYVSSIVLARIGDPHRFNSRKQLIRLAGLDLNAKRSGKRSNAAVPVISKRGNSELRYALYQAALIATYHNDRFRALFARYLQGREQERGIKTKMRVKLAAKMIVIAWTLMKTNTNFDPLLIGV

SEQ ID NO: 328657 - protein, 387 aa, unidentified
MVQINDLSRSLAAFDPISTLVVVVEMSKASWLVSGVVPGVERQPLKRLEPDATALLRLIERWRNEAVRAGRPISRIALAYEAGRDGFWLARWLIARGIEAHVIHSASVAVSRERKRAKTDRLDAAMLMRVFLGWLRGERGHCGMVAIPTMEEEDARRPNRERESLVNERSRIVNRMKSALARLGIRGFKPHLRKAPERLAGLRTAEGTGLPANIIEEFRRDMARLALVREQISSIEKTRAERLERAPDTGPHAMVRLLARVIGIGIETADMLVREILSRNLRDRRALARYAGLTGSPDESGLKSREKGLAKAGNARVRRGLIQLAWRFLMFQKDSALARWYRTRTEGPSGARKTTMIVALARKLLIALWRLVTTGEVPDGVELRPAA

SEQ ID NO: 328658 - protein, 425 aa, unidentified
MRFIALDVHRDFCEVAIAEGGQVRRAGRVETTPATLELFARSLAGDDQVVLEATGNALAIARIIESHVGRVVLANPKAVKSATQTAKTDKLDARTLAKLLAAGFLPEVWTPDERTRILRRRISRRAQLVRQRTREKNQVHAILIRNLKERSPATDLFGAAGRRWLAAQELPADEREMVDACLRGIDFLDREVAAIDRALADLVLASSELRRLMTLPGVNFVTACALLAAIGDVRRFPTARHLVSYLGLDPRVRQSGSEPARHGRISKQGPGETRHVLVEAAWHAARTTGPLRAFHERVASRRGRNIATVAVARKLAVIAWHMLNRGEDYAFARPSLVREKLRRLELMTGAERRKGKRNPVRVFATREQHRLDKELAAQAERAYRRLVQDWQPAISKGTGAAPGRASCGPSSGQAARQETAPPPAL

SEQ ID NO: 328659 - protein, 351 aa, unidentified
MDTIGLDLHQRESQLCVCDADGTVTERRIVTSRERFTAVLGNRPRTKILLEASTESEWVARHLESLGHEVLVADPNYAPMYATRSRRTKTDRRDARTLMDACQTGAYRLAHRLSDPRRHIRAELAVRDALVRTRTRYVALAKTLVRRDGLRVASSESHLVAQRIGALSLSPALEAELQPLFTVLAPLNEQIAAADGRIATLAATDPLVARLATAPAIGPVTASAVVATVDDITRFRSAHQFEAYLGLVPGERSSGEKRHVGPITRAGNSRVRWLLVEAAWRLLRTKSAEAAALRGWAHGVAGRRGKKIAVVALARRLAGILYAMWRDGVPFDASRIRNPRIAAAEGTARAG

SEQ ID NO: 328660 - protein, 372 aa, unidentified
MRADRKRGKVKGCRMNCLVAGIDLGDRESLATVLSPIGDVADRFSFPMNEEGYAYFASRVPKDARVAFESTIMAYPISRALRMHGYMDVTVAHPKTLAWIVRSKKKNDKADSLKIAKLHMAGMLPESHLLDRDQQITRDLLVQRVKLGVEIGRLKNSLIGYLKREGVYDSLPKTGDNFSVKRRHAILSLRFDDKRDLILGTMMGRLEFLEGQCIPLEDSVRENARVSDDVKLLMSITGVDYYLASLLSSFIGDVERFPSDDHLASFFGIIPTSRDSADVKRRGRMTKDGSSIVRWALSIMVDTVMLHNEPIREYYQSVKKRTGSGKLAHVATMRKLTRMLYHMLKTKQHWKWENPLLTERKMVRLEDGGDGS

SEQ ID NO: 328661 - protein, 343 aa, unidentified
MQSITTIGLDIAKSVFQVHGVDANGLVVIRRQLKRRYILAFFEELPPCLVGVEACASSHHWSRELQALGHTVRLMPPAYVKPYVKRQKNDMADAEAICEAVTRANMRFVPTKTPEQQSGLVLHRTRHLFIRQQTSVINAIRAHLAEFGVTAPVGRKGIEDLLGVIADPSDKRVPDVVRACLAALGSQLLGLKKRILDFDRMILAWHRSNQTSKRLNCIPGVGPLLATALVASVADPKAFRSGRNFSAWIGLVPKQHSSGGRPRLGSISKKGDRYLRGLFVAGALAVIRYAKLHGTKYRPWVAALLARRPTKVAAIALANKLARMAWAMMARGERYNYPAALRV

SEQ ID NO: 328662 - protein, 346 aa, unidentified
MKIVGCDFHPSFQQVSIFDISTGEVVELKLMHATGEAERFYRELDAPVLIGMESIGNSLWFERLMERLGHELWIGDAAQIRASYVRRQKTDRRDAGHILILLLEKRFPRIWVLSSLERDQRQLLLHRHRLVQMRTRVKTELQHLALNQGMQKQRGLWSVRGRAELEELPLEGWTRRRRMDLLKVLDMLEAQVVELDEAVGQVAFANAGARLLMTQPGVGPITALAFVVTIGDWSRFKRGKQVASYLGLIPSERSSGQKRRLGAISKQGNVFLRTMLVEAAQSAVRHDEQFKKEYAHRCHSKPTGVAKVAAARKLAVRLYWMLRTQTPYAHAVHNEGSPSHPVVGAS

SEQ ID NO: 328663 - protein, 438 aa, unidentified
MNYNNHPKLNYVYVGIDCHKEVHTACVISPFNETLETLTFKNDYKDFKNLIDMVSKYTKDGIQAIYGLEDVKHLGHTLASYLIERGFIVKHILSSYTAIERAKHPIIDKTDEIDARCIAKVTLDEFLNLPNVKEEELYWTLKQFIKMKTNINRSNAKLKNKLHAQLLHHYPNYSNFFSSIDGKSALDFWENYPSPNMIKDFTPEQLVEDFKSKGGKGGFSIKKATLILNYIKDYNYSKEMEYQENRNQLIITIIRNIKNNNLQKEQLDNDIINLYDKLNVHLHTLIGLTKTTSAEIISEIGDIKRFSNSSKLAKYCGIAPINRSSGGSDKVKRNEFGNRTLNSYIYYLACRSISTGKDMTTPQNAIFLDYYYKKISDGKTKKQALTCVMRRIVNIIYKILNENIPYQHPKNLNTKCLDNVSEKMLKIKDEKKKIIKNC

SEQ ID NO: 328664 - protein, 332 aa, unidentified
MYSIGLDISKSSVNVHVPLGALDLEIENTLKSFKLLYAKLKKLYKKEIDKVTFVFESTGSYSVLLYKFCADKDIKIFMINPKQARNFARAIAQRNKSDVIDARVLSEAIVVARGKEIKVPTIDPVAEEMKELMVYYRLKVKQRTQLSNHLESLTAKAGSKALCRTVKSEIKSLKKSEECIIEDVHAIIFKSEYLKAKYDAITSVKGIGKIGGIVLLHLFIHYPHANQRQIVSLSGLDPIIRESGTSIRGKSRISKAGSRLYRGTLFMTAMASTLHNPQMKTFYERLKANGKHTTVAQIAVMRKLIVVAHSLFKSGEMYDPELYKKTTGVQAE

SEQ ID NO: 328665 - protein, 347 aa, unidentified
MKHYAGIDVSLNSSSVCVVDESGKIVREVKVASEPVALINWFKSLCTRMERIGLEAGPLSQWLYGALRESGLPVELLETRHVKAALSAMPVKTDRNDARGLAQLMRLGWFRPVHCKSIAAQEVRALLTARKLVQSKLYDIEMSLRGILRGFGLKVGPTTSQSFAARINHLVAGQASLETVAQALLSVHAAALREFKILEKQVRQIGRADERVRLLMSAPGVGPLVALTYVSAIDDPKRFTSSKAVGAHFGLTPKKYQSGETDITGRISKIGDSTVRAVLYVAAHIILTRPIHGGALKSWAMRLAKRAGMKKAKVALARKLAVVLHRMWVSASTFDFEKANGCMRAAA

SEQ ID NO: 328666 - protein, 298 aa, unidentified
MATYCGVDFHARQQLVKWCHTADGEIHEQQLEHQSIAEVREFYLQFSGEVIVGFETSGYSSWFEAMLEELGHQVWIGHATEIRRRARSRQKTDRRDAELILDLLLKDEFPRIHRVSAESREVLRQLRYRHRLVQQRTRSYNSLQAIALGAGVSLKAKLRTRKGKERLLGLSVTTAHHQQRQEWLDLIAQFNGYIERVETELDLIAEADERVQLVRTHPGIGLLTGLALVHTLSPVSRFANSRKVAAYVGLEPREYSSGERQQFGGISKAGSRLLRLLLVEAGHKAINQVTKPSIKTRS

SEQ ID NO: 328667 - protein, 449 aa, unidentified
MSRPQVIDDEEHERIHDRVAAVDVAKDSGMVCTRTPHPSRPGARRSTVWTVKARMGTIRALGRQLRKDGIEIVTLESTSDYWRIWFFVLEACGLAVQLVNAAQAKNLPGRPKTDKLDAQWLARLTELGLLRASFVPPKAIRDLRDYTRARTRLIQERTRCWQRLEKLLEGALVKVSSVASKLTTVSAQDMIKAMIAGERDPQVLAGLARTRMRAKHDDLVAALDGMFDDHHGELAALLLDQIAFLGTRIAQLGARAADLTAAMPEAWGINPDGTTGPDAGATPEAPVLSAVARLAEIPGVSEDLARAIIAEVGLDMSRFPDAAHLVSWAGLCPRASQSGPRTRAGKKNQGDSWLRSHLGQAATSAARTTTFLGERYGRIARRRGKAKAQVAVARSILIIIWHLLSDPAARYTDLGAGYYQTRLDTDRKIRNHIRQIQALGFDVTITKTA

SEQ ID NO: 328668 - protein, 345 aa, unidentified
MPIVGGLDIHRKQLTFDFLDTVTGEVKRGQVAPADRAHLRAWLARFAGRDDVAFALEGCTGWRYVAEELAAAGVVAHVAEPADTAFARGRKRHAKTDKTDSRHLRELLAEGRLPECWIPPPVILECRALLELYHDLRAGHTAWVQRIHAVFFHQGAPALGDGALRTGKDLAAVRAAAAARLSPAGQLQVAVALEVLEALDARMHQVRHQLLSAARHLTGAKVLAARLYGVGPVTALAMTCWLAGKDRFSSARKAVRFAGLDITVWSSDRKGPPGRLSRQGPPVLRWAVYEAGKTHARSSAPDHRYYAQVKDRQDGKRAALSEARKLLRQACHILAELGDDALSAA

SEQ ID NO: 328669 - protein, 342 aa, unidentified
MEEDAGRQFVGVDLHRRRSVIVRMTADGQRLGPAVRIDNDPFELARQVASWGEAPEVVVEATYGWYWAADVMAEAGARVHLAHPFGIMGFAQRRVKNDERDAADLADLLRMGRLPRAWIAPPEIRGLREAVRYRAKLVALRTGLKAQVHSVLAKQGVRVPMSDLFGLGGGKLLDGLALDAPFHARVVSLRRLIDAVSFEVDITAKRVAAQLSNHRGYWAVQAIHGIGPVLAAIFVAEIGDVTRFGRPQQLCSWAGLTPRHRESDTKVRRGRITKQGNPLLRWAAVEAVQRQQVGPIGATRARLTDKRGANIAKVAAARKLLTLVFYGLRDGHIRCLSAAPAR

SEQ ID NO: 328670 - protein, 349 aa, unidentified
MKKIVKQVAAIDVAQKELVVCLGRMYDDWSPQLYAHKTFANTVKGFEVLLLWLKKMTDETIAVRFVMEATGIYHESLAYFLDEKGYEISVVLPNKISNYFRTLDVKTITDKTASEAIVLFGLERKLDCWQKPKAIFKKLKQLTRERDQIVEERTMVKNQLHAEQTEAEPNKKSVQRIKERIKMLNSQESEIKAEVDALIKQDEQLTQHVNVICSLTGVGLLTAAIVLGETNGFELIRNKRQLASYAGFDIKEKQSGTSVKGKPRISKKGNKHLRKAMHMPALCAIRYDERFKVVFARLVSRHGIKMKAAVAIQRKMLEMIYTLYKTGNRYDKNYLKKNDSLIEQHENVL

SEQ ID NO: 328671 - protein, 367 aa, unidentified
MRKISTVQMIGNEIFKKQNLTIGLDLGDRWSFYSMWDETGQIVLEQKLATTCEAMRRAFEKLLRSRIVLETGTHSPWVSRLLTELGHEVIVAHAQKVQLITKSSRKDDRHDARALARLGRIDPELLGPVRHRSMRAQIHLTVIRARAELVSARTALVNAARGLAKSYDGQRLPKCGTQRVSRELAAGLRTELREILEPLLEEVESLNERIQEYDKRIEQIAKEVYPETTLLKQVKGVGTQIALTYILTIDDPHRFPKSREVGCFLGLRPGRRNSGQSEPQKRISKEGDRYLRTMLVQGAQYILGHFGEDSDLRRWGRKLAERGGKNAKKRAIVAVARKLAVLLHHLWVTGEVYEPLHNNQNAEPAAA

SEQ ID NO: 328672 - protein, 319 aa, unidentified
MAQNGLVVAGIDIAKDKADVSIRTLSQRQTFPSTAEGRRQLISWLRKHKVTKAVMEASGGYEREWARAIREKTIEVRIVDPKRVRHFAQSAGRLAKNDVIDADTISWFAEIFGEAPSQAHDVAREALQQMVNARQGLLDIRTMLSNKGEQDVPEPVQKSHARLLKTIAVELAKLEAAITALVKATPHFAKRAEIIESVPGLAATTAAGLIAAMPELGEVSNEAIAALLGVAPYDDDSGKRQGQRQIKGGRRKVRNLFYMASLGAATRHNSMLKTFYHRLIAKGKKAKVALVACMRKLIVILNIMIARGEKWDANRYAVG

SEQ ID NO: 328673 - protein, 426 aa, unidentified
MNCTQNYKIDQVTEQTLVVGIDIAKRTHYACFVDDRGRVLRKSFPIFQSKEGFRQLYEAIQEAMQAFGKPQVIVAVEPTGHYWLNLAYFLEEHGIPLVMVNPAHVCRSKELDDNLPTKHDAKDALVIARLAKDGRFLVPRLLHEIEADLRVGSTLKEKLRKEQTAVKNAIVRWTDRYFPEFWTVFRDLGKTALSVLEWTPLPADMASRSAEELIEVYRQSEGLKCPQKAKIQALIDAAKDSIGVTEGTTMARFEIAALVRRYRQLEAEIAALDAELKALVQTTMEYQWLKTVDGLGDATIIDLLAEIGSFAHYRDPRQLVKLAGLTLKENSSGQRKGQKHISKRGRKRLRSVLFRAMIPLIRHNEAFRELQEYYTTRPVNPLTGKQSIVALCRKLLNVLFAICTKKQAFDAERMKQDVLSQVQRAA

SEQ ID NO: 328674 - protein, 346 aa, unidentified
MHYIGMDCHITTLEFAVVNEAGRLVKAHRVATSVNGFMEFVKAVPPPRAIYMEEGTLAAWVLETCVRFREKLVITDAKKNHWIGSSGQKDDSIDALKLAQLARGGYIKEIHHPVGQRRRFRELMIAYHDTVRSTTRIKNKIKAKFRQNGIRCAGATVYSKTYREEWKGKLPQEATLLLILDGLWRQLKQSEQTEKELLAAARVKAKQYLEIKLFKDIPGIGFIHAATVSAILENPYRFANKRKVWMYAGLGIMTRSSGGKTYSEKLSTDYNRLLKYTLKQAAETTIQAKDNPFRRKYLDMTLLHGIAPHRAKLTIARDMLATMWAMWRKGEKYSPEIREKAAYKQG

SEQ ID NO: 328675 - protein, 389 aa, unidentified
MIYVGIDVAKDKHDCCILGSDAEVIYPVFTITNDREGLEKLYEKMTMASEDLAEVRVGLEATGHYSQNLLNALIAKGLSVCVINPLHTNLYRKGLSLRKTKTDKVDAYSIAVMLLTDKTIKPYSISSYHNEELKSLTRYRFDKVQERAKLKSSITRLVNILFPELEKLVSTLHAASVYALLSELPGASFIADCHLTRLTNLLRNSSQGRYDREKTIAIRNAARCSIGHTSSAKSMELKHTIHLISVLSAEIDEIELAIRNIMDSIASPIITIPGISYRMGAMILAEIGDFSRFDNPDQILAYAGLSPSTYQSGQLYSNYARMEKRGSRYLRYALFNATRFVCQWVPSFSQYLNKKLGEGKHYFVAISHAAKKLVRTIYHLVLSGEPFCI

SEQ ID NO: 328676 - protein, 342 aa, unidentified
MKDSIYDQYIAIDWSIKNMAIARMTKKSNKIIIIDVPSDVVELQTYLKNLRGTKILAIEETTTSQWLYTELEGCVDKILICDPYRNKLLGEGAKTDKIDAAKLVHLLKAGLMKEVYHSAEKFIYIRRVVSGYEDMVKAGVRLKNQRYALLRTCGKNGKEKDINLGAQGEQFVLECLDRQIKAYEEEKKGFEKEFVRLSRKYPEIKHQKSLPGIGTINAVKIVSRVVSPYRFADKGHYLSYAGLIKLEKISGGRSYGKKNPRYCRQLKSVYKSGVLAAIGGNNPINDYYEYLIREKNYPDHYARNRACRRLAILSLGVFRSGKKYQPYRRDCVKGNKEIPSDL

SEQ ID NO: 328677 - protein, 333 aa, unidentified
MQNFYFIGIDVSKKKLDICVMSNSKVLKEEQVSNHPQAIATVIAGIKEELSMSNDCFIICAEHTGQYTYPLICACKSVGSKLWLENASQIKYCSGVTRGKNDKVDARRIAVYAMRFFDKAKPYQRPTEELMRLKQLEAERSLYLTDMAKYKAQLSDQEGFMEDKIFKRKAKRLKEMIKSLEKTLKEIAQEMADVIYSSEELSRQMRLLKSVEGVGPVVAMNMIIATEAFTRFDNPRQFNCYVGVAPFAYTSGSSQHSRNRVSQRAVKYIKCLLHMAAVAIAHKKTGDLKTYFERKVAEGKNKMTVLNAVRAKLVARMFAVIRNNRVYQPILSV

SEQ ID NO: 328678 - protein, 314 aa, unidentified
MGTTWVGIDVSKASLTIGVWPTKEHWTVSNDEMGIAPLVDQLRELTPERIVLEATGGWERPVMGALLAAGLPAVVVNPRQVKDYRRSLNQLAKTDRLDALVLGRFGESTRPALHPLPEPALHELQGLLARRRQLVEMVSSEKNRLATALPETRPEIRDHIAYLEQRLSRYNDQLGQLIEASPAWLAKSQLLQTVKGVGPVVSSTLIGDLPELGTLTNGKIAFLVGLAPINRDSGQFRGTRRIQGGRAHVRAALYMAARVAVRYNPRLRDFYQHLLDRGKLPRVAIVAAMRKLLVTINAMLRTNTAWRDLPSTNP

SEQ ID NO: 328679 - protein, 436 aa, unidentified
MGQVIIGVDPHKLSATIEVVDQQEKLLGAGRFSTDQAGYAAMRLYVKSWPDHLWAVEGANGAGRPLAQRLLEAGEHVVDVPAKLSARARLFDTGQNRKTDALDAHSIAMVAVRTEGLRVLKVDGELEALRMLADRREALTRRRVAVVNRLQALLAELLPGQAKKDITTGQAKALLASVRPRDIAGRTRRRIAAEELAELIAVEAKMKKATAELKVMVVARDSTLMDLHGVGPVVAARILADVGDIARFANRNRFASWTGTAPLDASSGEQNRHRLSRAGNRRMNHMIHIAAITQLRLDTDGRAYYRRKRTEGKKPMEALRCLKRRVSDAIYRQLVADAQRADDARLEAGPGGHCGASLLSSAAGLHPHTGTSDRPLPGPAPTTLPLTAPPRKPRPGPAPQHPRRRAGAVKVERPTGRTTLTATSAGAHSKEPIPTP

SEQ ID NO: 328680 - protein, 325 aa, unidentified
MNKFSHYYGIDISKDVFDVMDEQGAHYQYQNDLSGFKRFCKQLKENSCCVMEATGVYQVQLADYLFEKHVFVSVVNPLVIKRFIQMNLRRIKTDKADAEMISKYAQMNRLQGYKPAPVYVRESRIIVENIDLLIKSRTMFKNRMHAMTHKASKHRLVLINPIKRAIKDLTIQIQKLEDELKRLIESSEPDLFSRLQSIPGIGKSTAMFMIVISDGFKKFESAKQFTCYIGLSPVEKQSGTSVKGSSHISKQGNGKLRNLLFLCSFNACKSNKACEALYQRIVAKGKSKKLALIAVANKLLKQAFAIAKSGLVYDAEYRSIKPSLN

SEQ ID NO: 328681 - protein, 342 aa, unidentified
MEKLVIGIDFSKETMNFCCLQGSVDGVVLEGAVSNDREGCREMIRKLRALHNGLKVCDFLFCGENTGCYSLEVADYLFSKKYLIWLENPLQIKLSSGMRREKTDAADARMIAEYAFRYHDKAKGYNPQPKSIQKLKAWLKAHDYLRGIKVSLQNLLQSMPVVPGTLQETLEDIVAQLKQTDKKIRELLKKEDEFSMNASLMMSVPGISCISTAAILVDTCNFTRFTNPRKYATHTGCVPHKHDSGTTIHRKPQVSKASNRYINSLLTQGAVSLITHNQEIKEYVIKKKKEGKHTGCIINNIRNKIIHRLFAVIREQKSFDPNHRCEMQKKMHLQVGSGDTSF

SEQ ID NO: 328682 - protein, 418 aa, unidentified
MRVDTDEPEIIERVAALDVAKAEVVCCVRVPGRGRQRMQEVRTVSTMTAALLGLGDWLAELGVTRVVMEATSDYWRAPFYLLEDRFETWLVNAHDVKHLPSRPKTDRLDAVWLCKVAERQMLRPSFVPPPAIRNLRDLTRYRVDLLAARTAEKQRVEKLLEDALIKLSVVVSDPFGVSGRAIMAALIAGERDPSTLAELARGRLRSKTDRLTEALTGRFTDHHAFLLSQMLHRVDAVSADIATVQARIDEQMGELAPAVAKLDAIPGVGPVAAQMILAEIGTDMSRFPTPAHLTSWARFAPGVNESAGRPTGKAASGKGNRYLARVLGEAAVSAARTDTFLGERYRRIARRRGKKRAIVAIGRSILVIIWALLSDEQAQFIDLGPDYYASRNNPERKARHHIRELQALGYSVTLNPAA

SEQ ID NO: 328683 - protein, 349 aa, unidentified
MGQVSTIGVDIAKSVFQIHGVDADGTVVIRRRVGRARVLEFFADLPPCRVGMEACATAHQWARELEKLGHDTRLMPPTYVKAYVKRGKNDAADAAAICEAVTRPSMRFVPIKNVEQQSVLMLHRTRDLLIRQRTQLINALRAHLAELGLVAAKGREGLHQLVTVVTECGDERLLSNARFACQAIVTQLHAVQIEISGLDKRITQIQRTNADCKRLNTIPGFGVILSTAVAATMADPKVFRTGRDFAAWIGLVPRQNSTGGKERLGSISKQGDRYLRRLLVVGATSVINCARARPYKYPWVIELLGRRPTKVVAVALANKMARIAWAVLAKGEPYRAPTRSSNAVVPAAA

SEQ ID NO: 328684 - protein, 344 aa, unidentified
MVTFGVDAHKRTHTIVVIDDHGKPLGQTTIGTTSKDHLGLVQWAARFGAERRWAVEDCRHLSRRLERDLLGAGEQIVRVPPKLMAHVRDSARTYGKSDPIDALAVARAAQREPDLPAARLDGPERELRLLVDHRESLVAERTRAICRLRWHLHELDPGWEPKARSLDAQRTLDEVQRRLDDQSGLVARLARELTSRCAELTVSIKSLEVEIADLARQLAPTLLAIPGCGTLTAAKILGETAGVERFKSRDAYARHNGTAPLPVWSSNKARHRLSRTGNRQLNAALHRIALTQARWHPQAQAMIERRRSAGNSGREAMRILKRRLSNAVFQALRTDQLEQLSPAA

SEQ ID NO: 328685 - protein, 363 aa, unidentified
MSEAGPTDIIVGIDTHKHTHAAVAITRLGARLGELTIQVGSDGYRELEAWARSLGPVRTFGIEGTGSYGAGLARFLREAGHVVREVSRPDRGQRRRHGKTDHLDAEAAARAVLGGQATALPKSGTSEVEMIRHLKVARDTAVKARTQAMLALKAIIVGAPAALREQLDKIRGTMALVRHLASLRPGPLTTTTASAKASLRAIARRWLDLDAEVRSHDTHLHRLAEGCAPEMVAAHGMGTVTAAEMLVLVGDNPERIRSEAAFAKLCGACPIPASSGKTSRHRLNRGGHRQANAALHRVVVVRMRTHQPTLGYLQRRTAEGKSKREIIRCLKRFVAREIFGYLCRTPRWCREGGGNSVAAPPAG

SEQ ID NO: 328686 - protein, 355 aa, unidentified
MTSTKYIGMDVHTESISMAVRNSVGKVVMESVIETKASMILQFIEGLRGDLHVTFEEGTAAAWLYDLLKPHVARLVVCNPRRNALLKVGNKSDRIDARKLSELLRGNQLHPVYHGEHGLRALKELVRSYLTISKDLARVMTRVKALYRSWGIPCSGTQIYSQLHRVTWLSKISEPGVRLRAAFYFQQLDALRTLRQEVRQELLAESHKHSAWKRLCGIPSIGPIRAAVALGVLQTPHRFRTKRQLWSISGFAIETRSSADHRHVNGQLQKVKKRVSIRGLNQNHNHDLKNLFKGAAVIASTKPGPFQEFYTALLAKGMRPEMARLTLARKIATIVWIVWKRGVSFDAQYLKPQTV

SEQ ID NO: 328687 - protein, 442 aa, unidentified
MIMSKSTKKNKKIRKISQIPVINNYAAGIDVSDTEMMVAYPIKKDILEVQSFGCFTRDLHSIAQCLKEYSISSIAMESTGVYWIPLFLLLQEKGFEVYLVNAKHVKNVTGRKDDEGDAEWIQKLHSCGLLQASFQPDNSTRTIRSMMRHRKNLVRTSATYLNRMQKAYELMNIKLHTIISDIDGKTGTLITEAILRGERDPEILADLRDSRIKASREDIIKSLEGCWTPEHLFELDQCYQLYRIHREMIQECDKEIEQQLIEQIAKKNNGELPVFPKSRRKVSDKYNTIFDAKKYLTEIMGVDVTEIFGIGEISALTIMSEVGTDMSKWKNEHCFTSWLGLAPNTKISGGKVISSRIMKKKHHAGQAFRMAACSLWGAKNPLGEYYRRIKAKAGPGKAVVATARKLAIIYYKMVSCNESFNPTALIEYQNKYKDLKINQLKK

SEQ ID NO: 328688 - protein, 356 aa, unidentified
MSRDTKYIGMDVHKEAIVIAVFNDSGKLVMESIVETQASSILQFIHGLRGELHVTWEEGTWAAWLYDLLKPHVHEVLVCNPRRNALLKEGSKSDKVDARKLADLLRTGMLRPVYHGENGLRTLRELARSYQTISKDLNRVMNRLKALYRGWGIACSGTQVYAARYREEWLHKIPHAGVHRRAELLYQQLDGLQALRRTLRPELLAESRKHKAAKLLRQIPCIGPIRAARLLALMQTPHRFRGKRQLWTYSGLGIETHDSAQYRYVRGQLQRSKKPQQIRGLNQNHNHEMKEIFKGAATRASCGVGPLRDFYVALLDKGMRPEMARLTLARKIAAIALTLWKKEERFDAEQLKPQAA

SEQ ID NO: 328689 - protein, 347 aa, unidentified
MRLVGCDLHARKQQVAMLDSETGEVQEVELCHHGEDVERFYAALPRPVTVAIESTGYALWFHALMRQLGHTLLVGDAAKIRAMIVRKTKTDRRDALHLLDLLKHDRLPVIWVPDPATRDLRALLAHRTRLVRMRTMVTNGLHAIALSYRLVGGSKQLTRARVAELQRLALPVHTGHRRDESLELLGWLDAHIRQLDNRVAEAADGDPGARQLLTHPGVGAVTALTTVLVLGPVRRFPGSKEVASYVGLAPTLHASADTRHLGPITKQGNALLRMVLVQAASSAARYDDDLKRLYLTLLRRRGHAKARVAVARKLLVRLFIMLRDRIDYEEFRRRGRAPQGPRQPIPA

SEQ ID NO: 328690 - protein, 337 aa, unidentified
MKVTLIGIDLAKSILQVCGVNHAGKRVFNRQVRRTRLMELLMQHPDATVAMEACSGSNYWGRELQQRGFKVMLIPPQHVKPFVKGNKNDRNDAFAITEAARRPDLKCVEPRTLIQTDLIQLHRVLDRMIRQRTALINQLRGFLNEYGLIVAKGKEKLLAAMPGLLEDAENGLTPASRVLFQELYEQWRQANEAINRLEKGLKRQANNDEAAQRLMKMKGVAEKISTATIAHAGNGRGYKSGRHFSANLGLVPKEHSSGGKQKLGGITKRGNRYLRRLLIQGAWSVVRNADKNDDRMSRWARQLVERRGKHKAVVAVANKMARIMWSMLYHQTEYRAA

SEQ ID NO: 328691 - protein, 427 aa, unidentified
MNDSTYKPTLCVGADVHLDEIVLRAVDKAHGHEVLQRFRVTNNLPGAQVAATTIAQTASELGCARIEIGWESTGMLWIPFHRYLSTEPLLQPFELELVCFNPKLVSKFKDGLVLRSPKNDDRDAFDVAARLRFGELPVSYVPSDFWQGLRRLTRYRFRLSKTLSQEKNRFQSYAFLKYSDWKRVKAFSDVFGATSIALLTEFTVAEVQAMTHDQLVDLITRRGRGRFHDPTATARAVRQTLRTSYPIHPQMDEMVTAALAAGWDHIRYLKRSMKHLDRLIARYIDLVPNPIITIKGLGAVITAGILAEVVDVLRFPEEKHLAQFMGLTWRKSSSGGFVSQNTRLTKVGNVYLRYYFVLGANLLRQHNLEYKAYYWRKYQEVSKYQHKRALVLTARKLVRLVHALLTKNQPYVRPRTSDRDQEDDQLQ

SEQ ID NO: 328692 - protein, 347 aa, unidentified
MNGMNYAGLDIHKKSISCCVRQADGTIIQEGTITASRQALDEWVRRLPQPWTAGMEATLFTGWIYDHLVSVGAVVKVAHPAMLQAIAAGKKKNDRVDARKIADLLRCDYFPECHMASREIRDRRRVLRYRNLLVRQAVQMKNKVSGLLMEAGVPYNQQKVHQKKYFAELLQKQKKEMPPSMPELLRLSRSTVEALTGMQRQLMQALERDDLLAARVERLASIPGVGRVVALTWALEIGDISRFASVKKAVSYCGLCGAEKSSGGKTERTPISKQRNKHLQTMLIEAAKLAPRWNAELGLVYECAKQKGNRNHRATLAVARKLVAYLMAVDREERPFDTHLRVAGNAA

SEQ ID NO: 328693 - protein, 364 aa, unidentified
MHYVNNTEVSSHEETRRQFNGGPGAIKLGIDVHQDFYVVVEQVGGSNPKPPQRFQKEAFLFWAARLKQKSGAEVYALYEACGFGFSLQRQLSSLGVQCHVVCPQKLDEQNRRVKTDGLDAKALCLKLDRFVQGNRDALAIVRVPTEEEEQLRAIHRQREQLVKARKQLEAQGRSLLVNHGLEPVQNWWKPRTFAALPMPLWMKELLANSQPILVALQQKIAALTVQLQSAASPDQPRGLGKMTSVVIDREIGDWKRFNNRRQVASYTGLCPGEYSSGNTRLQSCVTKHGNPPLRAALVELAWRLVRFQPNYKPIVKWRATLAKGALATGAARKKAIVAVARQLAVDLWRIRTGRLSAATLGLIN

SEQ ID NO: 328694 - protein, 423 aa, unidentified
MDILYEQVAGLDVHKDTVVACVRIVAEGKTKRECRTFSTTTDQLVELRAWLEECRCTQVAMEATGVYWMPVFRILGEGLFELIVANAAHIKNVPGRKTDVNDATWIADLLACGLIKASFVPNEEIQELRSLTRTRKQLVREQTRHVQRIEKTLAEANIKLNSVISDIMGASGRRMIEAMIKGVRQPRQLAELAGKQIKATPKELYDALHGRLTDHHRFLLDLHLKQWDGLDKTIREIDREIDQRIGRLRTKGESGEVPFRTLIELLSTVPGISTVSASAIVSEIGCDMSRFPTAGHLVSWSGLCPGKNESAGKRKPSRLRKGAPWLKTMLVQCAWAAKRKKDSYYRAQFFRLQTKRGPQKAICAVAASILTAVYHILKNGIEHHDLGGTYFDRRPVELKAGRLVARLKKLGFNVQLQPIAEAA

SEQ ID NO: 328695 - protein, 411 aa, unidentified
MDILFPHSAGLDVHKRTVVACLFALGPDGVWQRHQRSFPTMTADLEALARWLLSYGITHVVMESTGVYWKPVFNVLAAQCEVWLVNAHEAMNLPGRKTDYSDAEWLTRLMRCGLLKRSFIPEVGQRDLRDLTRYRTRLTQERAAAANRLQKILEDANLKLAAVASDIQGVSARAMLEALIGGESDPAVLADLAVGRLRAKLPALVEALSGQVREHHRFFFRELLDHLDHLGQCIATVNARIAELTVPYAALIQRLMQIPGVKRHTAEVILAEVGPNVTPWPTAQHLASWACLCTGNHISANKRRSGKTRRGQQWLRTALVEAAWAASRQKDCYLAAQFQRLRARRGERRAAVAVAHSILTIIYHLLADPTTVFQELGGDYFVKKNPEQERRRAVKRLAALGYEVILTPISG

SEQ ID NO: 328696 - protein, 457 aa, unidentified
MPARRKKPQSGAVSPVHTIDPDAAGIDIGATEIYIAVPADHDPHPVRRFATFTEDLIAAAGWLAKCGIKTVAMESTGVYWIPLFQILEARGMKVCLVNARHVKNVPGRKTDVCDCQWLQHLHSAGLLRPSFRPEQQVCAVRSLVRYRDSLVQLSAMHLQHMQKALDQMNLQLHHVISDLGGKTGMAIIDAILAGERDPRQLATLRDPRTKASQETIAKSLVGDYRREHLFTLRQSLTGFRQNNQLIADCDVEIESLLKEFSSGDGPGAEAVPEPQAELKRKPRRNEMSFDLRTQLHRIFAVDLTQIPGINTLTAHTLFTEVGRDLSKFAHVAAFTSWMGLCPDNRVSGGKILHARTRKVNNRVAKALRMAAQALSRSHGWLGQYYRRMRAKLGGPKAITATAHKLARIVYHLLTTGQAYDETVFAQQEAQNKQRNENRLRQQARKLGFALTLIPEQL

SEQ ID NO: 328697 - protein, 394 aa, unidentified
MIYAGVDIAKTDHVIGAVDERGAEMCRPMPFKNAEAGLERAVAWLEGLAGSPSDVVVGMEATGHYWMACYSFLVARGYSVAVINPMQVKAVRKLKKLDKVKNDRIDAWLIAETLRIGQYDETRLATDEVASLRSLSRYLQSLRGMAAELKTQCVCLMDAHFPEYAGIFSDMFGAGSRAVLSKSPLPFELARRRADSLARDIAEASRRGGKSAGYAAKIKAAARSSIGVRLGQEAASFQVKSLIRQIEFAESECAKVEARVRALLDEVEPLVLTIPGVSYATGAQIVSEIGDVSRFRNASALVSYAGLNSSVSQSGQFDSGGGPITKHGSPYLRRALWLAANRARQYDPGLRAFYDKKRAEGKPHRVAVTAVARKLCHIVFAVMRDQVPYDPGRE

SEQ ID NO: 328698 - protein, 372 aa, unidentified
MKDVSIFVGLDVHKDSIDIALVEADRKATVRFYGTIGGDLADLEKAVRKLRKAHPFAVFHFVYEAGPCGYDIYRHLTRAGYECMVVAPSMIPKRSGNRIKTDRRDAIMLASLHRAGELSPVFVPREEDEAIRDLVRAREDAVKAQRVAKQQLKGFLLRHGIKFAGSGDWKPSYMKWLAEVKMPSAAQQIVLQDYISAVTDGTERIARFNGQIREVLPSWELAPVVYALQAMRGVALLVAVTVVAELGDLKRFDNPRQLMSYLGLVPSEHSSGGTRRTGSITKAGNGHVRKVLIEAAHTYRLPARISKTLLERQEGLPKAVRDIAWKAQVRLCARYRKMVARGKKNQTVICAIARELCAFMWAIAREVKPITA

SEQ ID NO: 328699 - protein, 365 aa, unidentified
MKKISTVARKQSRNFSEQRLTIGLDLGDRSSWYCVLDEHGEVVLEQKLGTTPKALKAGFGGMPRSRIALETGMHSPWVSRLLSELGHEVIVAHARNVRLIGESRKKDDRLDAQTLARLARIDPQLLSPVKHRSARAQADLTVIRARAGLVRARTALVNTARGLAKSYGERLRGCNVRNMNPEKAQELSPELQRALEPLLAGIESLSERIREYNEGIEKLAQESYPQVARLKQVKGVGTLIALTFLLTLEDAHRFRKSRDVGCYLGLQPGRRNSGQSEPQMHISKEGDPYLRTLLVQGAHHILGPFGVDSDLRRWGLKLAERGGKSGKKRAIIAVARKLAVLLHRLWVSGEVYEPLRNQRAMPAAA

SEQ ID NO: 328700 - protein, 337 aa, unidentified
MEREQQYVGIDLHRRRSVIVRRNEAGETLETVRIDNSAMALATELAKAGEHPEVILEATYGWYWMADVLAESGASVHLAHPLGNNWGHRRVKNDERDATDLVDLLRLGRLAESWIAPPALRELRELIRYRAKLVHLRTGLKAQVHSVLAKEGVAVPMSDLFGVAGQRLLDEVQLARAYRIRVESLRDLIELCNREIAMLEKEVAPYFAGDLGYHAVQAIPGVGPVLASIFVAEIGDVTRFSSARHLCSWAGLTPTHHESDDKVNRGHITKQGSRLVRWAAVEAVTRQRGATPIRAHHHRVAERRGTRIGRVAAARKLLILVYYGLRDGEIRCLAETG

SEQ ID NO: 328701 - protein, 400 aa, unidentified
MKGPIVSIDVSNGNSHFQCFTQRGTKMGKVHRISHTVEGFNCLKSKIEELEKKTNEEVVAVYEATGVYTKPLERFLEKNEIKQYSISPLQSAKQRKTEIHNKKTDKKDPESIAEVYYIKELREDEKEADLYHELRTANRVYEDCLVHLRKYKVTFQSHLSIVFPGYMKLFQDGYSQISLQLLEMYPHPDRLKNKQPEKVAKKLNKQTDHSFEVCLKTAEKVIAFANKTYPGCDKEDAWVAVLVDDIHHLQDTMEEAEAKLDKIIELAKATPYYSIILSIDGIGPNLASRIIAEFGDISKFKTRGAMVAYVGNDPNRAESGDIEGYHLSISKKGNKRLRCILYLAVTCSIRSRKENPINAFYQKKRQQSTPLKSKAAKVACITKLIRTIHGMCKTGTVFTS

SEQ ID NO: 328702 - protein, 330 aa, unidentified
MKIWNVILGVDVSKLTLDICWAEQNQHIKIENCSKGFDVLKKWCKTHQIDLKKTLMVMEFTGGYEYRFIQFCESLSISYYRVSGLEIKNSLGMVRGKSDQADSYRIGRYGEKNSKEISESKPLNKSILLLKQLLSFRKRLVRERAGLESTVKERKHMYEIKKADLVIRIAKAKIKANTKHINEVEQEISAMIRSDQSISQNFKILTSIKGIGKINAWMTIAYTENFTSFPDGRTYAVYVGVIPFGYSSGTSVKKRTRVSHLAHKALKQELNQAAKTAIIHDKEIATYAERKLQTKEYPLVLNNVKFKLILRMFALVKRGEKFVENYNQVA

SEQ ID NO: 328703 - protein, 387 aa, unidentified
MIYVGIDIAKLNHFASALSSDGEILLQPFSFSNSYDGFCKLQSKLEPFGTDNLVIALESTAHYGNNLVEYLVLHGFNVCILNPIQTSSFRKNNIRKTKTDKLDTFLIAKTLMANPTRFVTKRDIDILHLRNLGRFRQILIKKRTRAKIQFTSYVDQAFPELQYFFKSGLHIHTCYALLKEAPTPEAIASMHLTHLTHLLGTASHGRFTRNMAVNLRILAQKSVGSNDSSISIQITQTIAQIELLDSQVDTVESQMKTIMRSLDSVIMTVPGIDYVNGGMILGEIGDIFRFPNPAKLLAFAGLDPAVYQSGNFQARRTRMSKRGSRVLRYALMNAAHNVVKNNQTFKTYYDKKMAGGRQHYNALGHCAGKLVRILYKMLTENIAFQLS

SEQ ID NO: 328704 - protein, 486 aa, unidentified
MAKRKESTFERLQRGQPLNRRERREVANGLNSPDPGWEIVHPHAAGIDIGNESHYVAVALGEDEHPTREFGSWTADLERMADWLQACGIQSVVMQSTGVYWMAVYDVLQRRGFDVHLVDARGTRNLPGRKSDVQECQWLLKLHTYGLLRRCFLPGEEIRRVRTVWRLRDQHVKEAGRAVQHMQKALTEMNVQVHNTISDLSGVTGQAIVRAILEGERDAARLAALRDSRIQASEPELVQSLRGNWQEDALFELRQAVEAYDFYRQQMKQCDAQLEQYLAALPSREPVAAPPTAETPEASRKRPVRRGFRKPRKTPGNQPALDLRTELQRILGVDATSIDGIEVMTVQTVVAEVGADLSAWKTERHWASWLNLAPKREVSGGRVIRHTREHRTNRVGNAFRMAAQSLIRSESYLGARFRYLRAKLGGIKAVKAMARTLACLYYRLVTRGQAWVDRGAAEFERRRQEREFAMLQRKAGDFAMKLVPAV

SEQ ID NO: 328705 - protein, 431 aa, unidentified
MKNITKNRRLSEISKTTLIVAIDIGGYEHHARAFDWRGIEQQKKAFKFKNDRYGFESFLSWIERIQLMSGFTEVMVGLEPTGHYWFALFDYLLSRNLRLVITSPISVKQTKEAATTSASKSDPEDPKAIAHVMISGNYQEIYRPQGNYAELRKAYTLRNSVMEQKKATANRIHAWASTYFPEWHKVYSSVQRIGFLTLLRRAPLPSDIVKLGVHGILHHWHECQLLGGISRNRAERLVEEAKCSVGVTEAAEMARVEIQMLLQHYDLQEAQLTRLDKRLEELVEQYPGGKRLMQIPGIDLQIAAGFLAEVGDIRRFPSAAQLQSYAGLDILRNSSGKRRGQSRISKRGRNKLRRIMFVAALCVVNHTSEFRAVHQYYKHRTKNPLKAMQSLIAVACKLLRVFHVMLTKDVDYDPDKVTCGLVVKSSEKQVA

SEQ ID NO: 328706 - protein, 362 aa, unidentified
MTAVMIGVDPHKGSHTATALDATEHELACLRVRAGRRQVEQLLAWATPFEARTWAIESANGLGYLLAQQLVAAGEVVLDVPATLAARVRVLSSGQSNKNDPNDARSVAVAAMHAPMLAAVPVEDHRTVLRLMAKNHTDLARWRNKICCRLHALVAELVAGGISKEVVVSDAFALLESIHPEGVAAIERHRLAGQLADELVHVDDQLKLAKANIRTAVAASGTTLTDIFGVGPVVAAMLIGYTGDPFRFPTSGHYAAYTGTAPIEFSSAGRVVHRLSRRGNRRLNHALHIVAVTQIRHAHSPGRGYYDRKRAQGKTPREALRSLKRRLSDIVWRQLVDDARRAADCGGPGRTTRDDCKACVTG

SEQ ID NO: 328707 - protein, 370 aa, unidentified
MRIIALDVHRSFAQMAILEKGKIRDAGRIDLEHGRLLQFATKLKPDDEIVIEATGNTSAIVRLLSPFVGRVVIANPILVRAIAWAKVKTDKIDAAVLAKLHASGFLPEVWMPDEETETRRRVVAERTQLVCQMTRLKNRIHSVLHANLIPPYKGTLFSKRGRAWLEAQPLAEDQRRVVLRHAGELDRLGGELAQVDKSLAKTALQEPRVKRLMTITGVDVTVALSIVAAVGDIERFSSPEKLVSYFGLNPRVRQSGDKPAYHGRITKQGRAHARSMLVEAAWVISGVPGPLRAFFMRIRGARAPHMRCDDHRLRDRVATSTLLFATRSPEPRKNSKISFADPSRSRRTIATCSLRLGQAAHTARWPAGQP

SEQ ID NO: 328708 - protein, 393 aa, unidentified
MRLAIGVDVAKDMHWVTALTEHGDVVLDRRVVNTPDELAALAAELVALGGERTVGMDVVGGIASLATAVLLDAGERVVHVPGLAVNRARQGTTGGEAKSDPRDARVIAEQVRTRRELRPIAAESAPLVELRLLVGRRRDLVVEQTRRLARLHDLLVTIHPGLERRLDLTTKGALYLLTRYVTPAELRRAGRARLVSFLRTCPHLQRLEALAAAALEAAHEQRLALPGEAVAAVLCRELASDALRTRERLGTLDQQLTELLARHPDGTLILSLPGMGVILACEFFVEAGSLARFASPDALAAAAGLAPVLRQSGKMRFLRRPRGGNKNLKRILYQAAFCSLQHPVSRAFYDRKRREGKRHHQALIALARRRVNVLWAMLRDRHPYQVRPAGQAA

SEQ ID NO: 328709 - protein, 499 aa, unidentified
MGKGSGQNPTEPESFEEGTNMIYSVGIDLHQGRHRARCLDDRAQSCDGFSFETTPEGLALLEERVFRDGANPIIVLEPAGLPWKMVAVYLRSHHPDCRLVKAKTQKVAALRRYLRGPVKSDRLDALTLAKMPFIDPEKLVDIYLPPAEIHALQRLTRQRKRIESAISGRKIRISAIVDGYLPGVRRTFSDAWSLPVRAFLRSQLNPYAVVREGEEALHAYLSKACPRSKWSRAETHLVFLACHSVAGVCELSRSAGTVDEEFFTDLQDEIARELRLMESEEAESESLAHRIAELYRKLHRSDNLTSIPGVGEHTAPIFLSAVGDPARFPSQSAFANWEGVVPGARQSSDVEVKGLRMTKAGPSIMRMGLYQAGDISRRWDPQLAAVYYREMVYHGKNHRQAMGAVMSHLGARVFTVLREDRPYELKDTDGNTISKGDARRLILDKYKVPEEIRRERRRRNPKASNTVGVPRQDREMATYRMHEAAKAPQPVQVKAISHQ

SEQ ID NO: 328710 - protein, 412 aa, unidentified
MNQDKLYVGIDVSSKNNVCYLMQSDGSKHSSFSVPNNRNGANIIVDRVTSVLLLQDIPQVVIGMEATSVYGDNLMRFLRESGGLGHFDRHMYMLNPKQVKKFRDAYSDLPKNDYVDSFVIADHLRFGRINKEVYMDDYKYQALKMYTRARHQLVQELTREKQRLLNTVFISFSGLTQEKIFSNKFGAASMALVEEFSSLDELAYMNTDALADFIREHGKNHFENPEEIAEAVQRAAKLSYRPPQVIADAARQMIAISMNTIRLLQKQVKEYDKAIEKMLETIPQTLTSIKGIGNVYAAGIIAEIGDINRFPGQASVAKYAGLVWTQHQSSDFEAEDRRMIQGGNHHLKYYLCEAANALRRCDPEFKRFYSLKYKEANKHNHKRALALTARKLVRLVYTLLKTNRLYIPPEEY

SEQ ID NO: 328711 - protein, 450 aa, unidentified
MISKAYRATRVNEVDWERLARGKEGLDITLGLDVGKHDLWPVCRWADGRFERPWRVRNPGEIPRLLALIQRMSTGRKLVVALESSGTYGDALRQALADAGITVRRVSNKASHDYAEVFDGVPSQHDGKDAAVVAELTALGKSQPWAYQPASPWEQELESWVEWMVAHRQILTTWQGRLEGLLARHWPEATSVLKLSSGTLLRVLKHYGDPQALAADPEAANRLARWGRALLSLEKIERLRADAGSSVGVRVGEWERRQLGDYAEQALAARREVARAERQLRRLAVGHAVLQAQGKVVGVPTACVLWASTGDPRKYHAAAAYRKAMGLNLVERSSGTYQGRLRISKRGSARARHGLYFAALRLVQQCGVRPWYEAKKARDEAGARRVLVAVMRKLAVALYQVGVHDEEFQPRRLFGRIGRGGGRPEPPPSGTRSRRPAPEGAAPETRAPMS

SEQ ID NO: 328712 - protein, 352 aa, unidentified
MEKITTVGLDLAKQVMAVHAVCADGRRVLRKALRRDQLLNWSEALSPCVIAMEACGGAHYWARELARQGHTVRIIAAEFVRPFRKSGKNDANDAEAICTAARQANMRFVAMKSVEQQAALCAHRLRQGLVEERTALINRLRGLLTEFGVVAPLSPEKLRRELARCQDPEDPRLPATVRELVSDQLTALDQLEERMSVYAEQIAAQARGSEVAKRLQTIAGVGPTTAAALVATVGEPQEFRNGRQFAAWLGLTPKQHSTGGKTRLGRITKRGDAYLRTLLILGAKSALQAALRKPPAVRHRLQQWIVTVLDRIGYHKTLVAIANKHARIIWALLVKGEDFVVQHLTPKVVAGA

SEQ ID NO: 328713 - protein, 374 aa, unidentified
MKRILKIGMDVHSKSYTLCAMEPVIGTDDRIFATIEVTADHKNILMFIENLKQKLGMDNEYDIQCGYEAGCLGYSLYNQLTAAGVNCVILAPTTMLTQQGKRVKTDVRDARMIAQCLSYGGYHPVYIPTEEDDSVKEYVRMRDDHKIMLKTVKQQINALCLRHGFHYDGTKWTLKHVAWLRKLELSPLYRETLDEYLASYDEQTAKIERFDRRIEELASQKAYAEKTKELGCLLGIKTHTALSLIVETGDFYRFAKGNIYASYLGLVPGERSSGEHMNRTGITKAGNTHLRKLLIEAAWGICKGAVGHKSKELRARQRGNKAEVIAYADKANARRRSRYYRLIRHGKAKNTAVTAVARELACFVWGMMTDNITA

SEQ ID NO: 328714 - protein, 371 aa, unidentified
MKLVQSKAGKDDSMAKLSKTSPVVGGVDTHKDLHVAAVVDQNDQVLGTQSFATTRQGYKLMLAWMLSFGNLQRIGVECTGSYGAGLLRYMQAAGVDVLEVSAPDKLDRRRRGKNDDFDAESAAHAAYEKRRTVTPRSRDGMVESLRVLKVCRKTAVQARRIALQIIQTTIVCAPDRLRDTLRKMTRMQLIRTLAAWRPDLTAFRDIEEAYRIALKSLARRYLELHDEVAELDIMIQAIVTDLAPELIARNSIGLNSAAQLLLTAGDNPQRLRSEASFAALCGVSPVPASSGKTTRHRLNRGGDRAANSALHIIAIGRLRLDTKTQEYVARRVAPGHSKLEAIRCLKRYIAREVFNIIARRHKQINQAQIAA

SEQ ID NO: 328715 - protein, 349 aa, unidentified
MRAKPCGASVYGIDLGKNLFHVVGTDSSGHLVQRVSLNRQTLFHFFSNASVALIGMEACPGSQWLTRKLTAMGHTVKIIPAQFVKPYVKSNKNDLVDAAAIAEAVTRPSMRFVTPKSTEQLEIQTLHRIRDRVVGSKTQLINQIRAFCLEFGIAIRQSVGLFKADFPAALADDSNDLTPRMRVLLEGLWVEFGALETRLAELNKEIEVLATRSEVAHRLMSIPGIGPLCATALIAAVGDGKQFGKARDMAAWLGLVPRQYSTGGKTTLLGMSKRGNSYVRRLLLHGARSCVLHLNRQRDQLGSWITKLATRMHTNKVAVALANKLAKVAWVVLTRPGSLYRGDRDVAAM

SEQ ID NO: 328716 - protein, 407 aa, unidentified
MNPLFVGIDVSSKNNVTYLMKPDGSKHSSFSVQNNLGGAKLMSEKIVLAMETMGLNDVVIGLEATSIYGDSLVYALREDRRLGRYQRKLHVLNPKQVRKFKESYPDLPKNDWVDAFVIADHLRFGRIGKEVYMDDYRYKSLQTLTRARFDVVQNLTREKQHFANYLFLKCCGMAQDKDIANSSATTIALMERFETVDELAYADLDELTKFIDETGRNFADPAAKAKAIQTAARNSYRLPITVNNSVNQAMAVSIATMRALGKQIKVLDKAIEQQFEIIPNTLTSIPGIGKVYSAGIIAEIGDIHRFSSQASVAKFAGLVWTQHQSGDFEAQHSKLIKSGNRYLRYYLLEAANSVRRCDSEFRRYYDLKFKEVNQFQHKRALALTARKLVRLVFRLLKDNRLYKPPEG

SEQ ID NO: 328717 - protein, 447 aa, unidentified
MLKINETTQAPEVFAPVLQMPVETRGSRRELAKRRRRVERIEGKTLVIGLDVARERQALTFGFGREIIGRQRMDVAPQHLGAAIVDVARHLCERHGLERVVIGLEPAGCYWELAAEGFERAGLDYVLVHTLAVRREREATHYNMEKHDPRDADLIFGLVSDGKFTETRLCDTAERAQLNALAREYLLVRKHTAAERTRMTNFLTRVLPEFFELFSDADGITALAASRALLPFSELTALTPAEWHARVRGHADERRTLRTRVAVLQKLIRAAHCDPHRRAGEGMPVRIAQAAERHRLFTTQKQQLRERILELYAPMPEAVWLNSIPGSNPLYHAITLGLVGDFNLYDSPRALVKLAGSDVNFHESGDWRGQSRISHRGRSRLRAAAYQQARALVRNENTVYRARFQHLLDRTTRPALKLQQAYTALANSYLRTAHVLVTQNKLWESPR

SEQ ID NO: 328718 - protein, 424 aa, unidentified
MKVTYQTCCGVDVHKSFLVATIVKTTGGIEPSYQKKRFSTFNNSILEFKQWLLDNDCRDVCMESTGKYWVPVFNLLEDKINVVIANPKWVKAVKGNKDDTKDSKWIGDLFRLGLVKGSYIPCKKVRILREYTRYRYKLVSCRSSEKNRYQNALTVCNVALDSIVSDIFGKSSTSIIDYLLEQSGTSINHEEIASKLLRSLKSKEDAVIESVEGYQMTDAQKYRMRLVRAHMDYITAEINDVDKMIENMISSNPDFENAVQFLCTIPGVKRDSAITIISETGTDMSQFSSSKRLCCWAGLTPGSNESAGKKKSVRITRAGVYLKPALVQCAHAAVKSDKSPYYKKKYESLVKRRGKKRAIIAIARMILTAIYQMLSTGEQWNPSDLYKIDMPVALVEKQKAKAIKQAKKLLQREGLLPPDEPLAS

SEQ ID NO: 328719 - protein, 465 aa, unidentified
MAKKRNNKSKDSKRHRQSLKTIQPNSAGIDVGSREHWVAVPPSKDGTSNVERFGTTTPELLRLADWLKEQQIVTVAMESTGVYWIPIFEILDSRGFEVLLANARQISHVPGRKTDILDCQWLQLLHACGLVRGSFRPSDNICQLRALIRERNKMVQQRSDWIRRMQKNLDQMNVCVHHAVSDITGVTGMAIIRAIVDGERDPHALARLRDSRCRKSEKQIAEELTGNWRPEHLFNLRQALKVYDQLCAVITDYDSEILTYIAMLQPQDATDTSAPPPASKTKAKNISKRGQEPLRQALYDLSGFDLTSIDGIGVDTATVIVSELGLDFTAFPDESHFVSYLRLAPNLSISAGKKVPSKFKATTCTRVSTALRMAALTLRNSNTALGAFYRRVSWRKGASVAVFATARKLAQLIYRLVRYGQAYVDAGAQAYETRYNQRRLISYTKALNKMGYNVEPLSTGEAIPT

SEQ ID NO: 328720 - protein, 505 aa, unidentified
MAQPTTRDQPTSSSPPGGQPAQAQVHRRAYSRRKARATLKGEALRQREAAQVEALPVRHPHAAGIDIGSRSHWVCVGFAADAASCLIREFPAHTAGLKAIAAFLREHQVQSVALESTGIYWVPLYELLQAEGFEVLLVDPSYSRQLRGRPKADRRDCQWIYRLHSVGLLAAAFRPDEQTCQLRAYLRQRANLVHQASRHVQHMQKALEQMNLKLTEVLSDITGVTGRAILRAILRGTRAPEKLARYRDKQCKASEAEMAQALTGTYREEHLFELKLAYEAWQLALGQVDKVDTQTALQLGRMKCDRALPPLKPKARPKRRVNSPRFDVRAALYYVVGLDLTEIEGVSELTALTVLSEIGPGVSRFATARKFCSWLGLCPNWQKSGGRVKSSRTRRGVNRAAQALRVAARSLHHSQGALGGFLRRMKGRLGVQAALTATAHKLARIVYLALKHGMTYVRQSQEEYEAQMKEKQLKALQRKARQLGLEVVEKPSVSGATATAAPVQG

SEQ ID NO: 328721 - protein, 440 aa, unidentified
MSKRAYRATRVNDVNWDLLAQGKEGLGITLGVDVGKFSLWAVCRWADGRFERPWRVQNPHEIPTLLALLKRVSVGRALVAAMESSGTYGDALRQALADDQIKLQRVGGKAAHDYAEIFDGVPSQHDGKDAAVVAELAALGKAVPWEYQPADPWEQELAYWVEWMVAHRQMLTIWQGRLEGLLARHWPEATQVLKLSSVTLLRVLKHYGNPKTLAADPEAGKRLARWGGAFLAPEKIEQLLAAAGASVGVRLGHWQQRQIQDYAEQALAARHEANRAQRRLRSLAEGHKALQAQGKVVGVPTACVLWVSTGDPRKYHAAGAYRKAMGLNLVEHSSGTYQGRLRISKRGSARTRQWLYFAVLRLVQKCGVRPWYEAKKVHDEDDARRAVVAVMRKLAVALYYVGVHNEEFQPRRLFGRICGCRSSPAKPKTRTRSKPMAEKV

SEQ ID NO: 328722 - protein, 391 aa, unidentified
MVCVGIDVAKDKHDCCILDSDGTVRADCFTIPNNSDGFKRLLQTIQDCTQKSDKIKVGLEATGHYSYNILGFLLDNGLPTYVINPLHTNLYRKSLSLRKTKTDRVDARTIATMLLSDVDLKSYTDIAYHNEELKSLTRYRFDKVQECAKLKQSVSRLATILFPELEGLVSSIHGTSIYALLSEYPGAKQISEVHLTKLTNLLTTASKGRYRKEKAIQIREAARASIGSVMPAKSLELKHTIKLIQELASEIDEIEDSIQKIIDELNPPILSIPGMGVNSAAVILAEIGDFSNFSSPDKILAYAGCSPSTYQSGKLTNCYAHMEKRGSRYLRHALYNATKYVCYWNPVFAEYLAKKRAEGKHYNVALSHAMKKLVRLIYALQKSGKTYLTAA

SEQ ID NO: 328723 - protein, 456 aa, unidentified
MAKSKKAKMIKSPDGNKLAIVNPDAAGIDIADKEMQVCVPEDRDGDNNRCFGSFTCDLNTIVEWLQACRITTVAMEATGIYYLQLFLKLQDAGIEVLLCNPRDVKNLSGHKTDSADAEWLMLLHRYGLLKPCYQPGNAARQIRNLIRQRNNILRSADKQVLYMQKAMEQMNIKLSTVITDITGMSGRDIINAILAGKRDSMELASLAQANCKTPREDIAKALEGTWDADLLFMLQQSVDAYDFFNMQMKECDKQIEALLDAYQARLDAGTDALVRHKRKKSDRSKNAPEIDIEKYAFAIWGVNVFDILGLKDLAVMQLIGELGHDFIDKFETAEKFCRWCNLTPENKISGGKILSSRVQKRKNPVGQIFRKAAAPMAREKSEMGNYYRRIRAKSGALQANVATAHKIAKIFYTMIKTKEKYNPAKVGLDEREITQKKILRLERALEKLNQKHKMAS

SEQ ID NO: 328724 - protein, 345 aa, unidentified
MNIIRVGVDIAKSVFHVHGVERHDQTQWQGKYSRHKWLDAISRKVPAGAEIGMEACASSHYWARELQKRGYHVRLIAAQFVKPYVKSNKNDRVDAEAICEAMSRPNMRYVAPKTVAQQDIQAAHRIREELVGQRTAKANQIRGLVGEYGIVAPVGIQQLRRALPTWLEDAENGLSDSFRILLNGLAEDLQHLDDRVAKLDERIADSVKQDPVAQRLMTLRGVGPLTASALSGALGDAKAFRRGRDFAASLGLTPRQHSTGGRDRLLGISKRGDSYLRKLLVHGARAVLRHVDGKDDGLSHWLKGLASRKHVNVATVALANKTARIAWALVHNDTDYDNNLAAASM

SEQ ID NO: 328725 - protein, 385 aa, unidentified
MFDLRKESPNGERTAVGIDPCSEFLQLAILSPKCEPEFKKLPLSPSITEEIVKSTDPAKTQIAIESYGSYGKLFIFELLKRGYDIREVNPHVSKKLAGLYREEHSDLRDAESLAKALFLIPDLPKVSFSERKLWLSKLSRSRKKMIKDLNGYLNRLHRALVESYGVIYKKLFKILFSKKALSFFESYPTINDALSRKREVTKLIGKAKCDLLLQLGQWEDGFYLETLRMEIRSLIEIIRAIDKVKKELAKRIEEIGEEDKEMKILKTFPGIDSLTGAALLSEIGDIERFGRESSLSSYCGVSPVRWQSGTGRIRSKRRKRFSRRLRGTLYFISLSQIRINPESNKYYWRKRREGKTHWQAMNALSRQLIKIIYYMLKNPIKDLLL

SEQ ID NO: 328726 - protein, 318 aa, unidentified
MNTKTNQSVNVGVDTGKFQLDIYIRPLDIYFTVSNDEKGIKEAIKIIKQHAPGRIIIEATGRLEMPFIIACANANLPFVVANPIHIKRFAGAIGQRAKTDKLDAQLIAHYGEAIQPKLSQLKPDTMQAMSDLVARRNQLLVMQTMEKNRLQILPKELAMTIKPILTVFKNQITKIENKIVALIESCPDYQAKNCILQSMKGIGKIASASIISNLPELGYMTNKQASALVGVAPMNRESGRYKGLRKIQGGRHQVRTVLYMAMMSAIQSNPVFKETYQRLVAAGKPKKVAIIACIRKMVVILNSMLRDGVMWEAPKATN

SEQ ID NO: 328727 - protein, 408 aa, unidentified
MDLQVMYPACAGLDVHKRTVVACALTSAGRQTRTFRTWTGALQSMAHWLASQGVTHVVMEATGAFWKPVYNILEGRFTLVVANPERVRAIPGRKTDVKDAEWLATLLRHGLVPPSYIPDRDQRELRELTRYRTAKTQERAREVNRLQKTLEGANIKLAAVLTDVLGVSGQRILDALLHGEEDPATLAALADWRVKAKRADLEAALVGQVSPMLRFVIQEQLQSIRTLDDQIARCDVEVERRAPFREEVARLRTIPGVGQRTAEVILAEIGTDMSRFPTAQHLAAWGGMCPGNRESGGKRRPARTRKGSPWLRGALGEAAWSAGRTKTGYLRALFQRLAARRGRKRAVVAVGHALLVIAYHLLRDKTTYQDLGDAYFEQRDRDAVKRRAVRQLQRAGFTVHLEPLPEVA

SEQ ID NO: 328728 - protein, 341 aa, unidentified
MKNKSFIGIDISKNVIDVSIFCEETPIKDFSHDVFNNSRKGFGEMCTWLKKNHVVLSNCLFGMEFTGSYSMELEKFLYARNYQFCMLSTHVVKHYPMGPKDKSDKIDSAKIADFLYRYNGTECVKPYKMPDKTMQRLKALMNERKFLVEQRTCFMNRRQLCTTKEDTQLYDGYIKKLSHDIENIELEEQKLLATDDSLLSTYKNLLTIPGIGFVNAINVIVITRNFTAFETARQYASYVGVAPHSHTSGTSVRWRPRPSARCDGQAKADLSMAATVAVQYDAELQSFYNRKLGGKQDSDTKRKALNAVKFKLVLRMFAIGKQNRKWEPLDSKSSNEKLAIS

SEQ ID NO: 328729 - protein, 345 aa, unidentified
MKHYAGLDVSVKETTVCIVDEGGRICREMKVASHPDDLVEALKNPAWNLARIGLEAGPLSQWLFSGLAGAGLPAICIETRHAKAFLKAQVNKTDRNDARGIAQMMRVKLFRPVHVKTLMSQKRRALLTARKLLQEKAIAIENDIRGLLRNFGLKVGIVGAAKFADRIQDLSGDIPELRDIMEVLLAARQKLREQFTVLHERLLSIVKGDTVCRRLMTVPGVGPVVALAFNATVDIPARFKNSKDVGPALGLTPRLHQSGEDNRVGRVSLCGDAMMRTLLYEAAQVLLTVVKKWSWLKAWAMNVAKRRGRQRATVALARRLAVIMHRIWSDGSEFRWAREEATAMI

SEQ ID NO: 328730 - protein, 320 aa, unidentified
MLSFCGIDVSKDRLDVMVLPDEYSSSVPNDPAGWAILVEQLRGFSITAIGIEASGGYERGAVRSLQAAGMPVRQVNPFKLRQFAKASGVLAKNDPLDARMIASFVGIMPTRPAQRTTPAAEQLVEMLAVRRQLSAEKTAAENASRLLEDLMLQRLSRRRIARLAADIELLDKRLVEIVATDATLAHRYRLLTSMPGVGPVLACTLIALLPELGGMSRKQVAALVGVAPYAFESGTLKGRRCIWGGRANVRQVLYMAAMSASNWNPVLKLFHDRLKGAGKLPKVVIVAVMRKMITTLNAMVRDDIAWADRLSGWHSVTTAR

SEQ ID NO: 328731 - protein, 371 aa, unidentified
MRFYDRQHRFYAGIDLHARFMHVCVLDATGTVVYDHNLACHFETLLKAIAPYREDLVIGAECMFGWYWLADRCAEHNIPFVLGHALYMKLIHGGKAKNDRLDAHKIARLLKGGNFPLAYVYPKGMRETRDLLRRRMYLVHKRAELITHIEILNAQNNLPPFGKKLSYAANRAELHIPERFTHPSVQMSIAADLELMDKLDELIGKVELYLKRSAKVDDVQTYHRLQTVPGVGPILALVLLYEMHDLARFEQVGQFLSYARLVRPEHESNGKKLGWGGKKTANAHVRWALGEIACLFLRSSERAKRWKQRQEQKHGSGKTLGILAARLARSIFHMIRKQEAFDEDRFWGGQIEVAEPAPSSKKPAKSRKKAS

SEQ ID NO: 328732 - protein, 449 aa, unidentified
MLEPQEIQDEEHEQILERVAAIDVAKASGMVCMRVPDPARPGRRRNLVWPVDATTGAVLELADHLAAERVQMVTLESTSDYWRIWYYLLEAAGLDVQLVRAADLRRAPGRPKTDKLDCIWQAKCTEKGLLRPSFVPPAEIRVLRDYTRMRIDLTRERTRYYSRLEKLLEDALIKVSAVAGKITAVSVRDMVEALIGGERDPIVLAGLARGRMKAKHDKLVQALNGRFDAHHGELAKMLLEQIDGLTAQIDLLTTRIEELIAAIPEARGVDPDGTTGPGAGLVPGSPVLPAVDRLDEITGIGRDAAQVIIAEIGLDMSRFPTPGHLVSWARLTPQTMQSGATTRGGKTGKGDPYLKGVLGSAVAAAGRTDTFLGQRYRRLARRRGKLKALVAVARSILVIAWHLLSDRGARFHELGGDYYTTRIDKNRKTRSHVRQLEALGYTVVLAPAA

SEQ ID NO: 328733 - protein, 463 aa, unidentified
MLPVSNARLFGVLHIVDALIHTEMKGCITVSKFINDFVVGIDISSEFSVVAMLEPNGSLIRKPFRIDHNPKGFNTLLEILKKEEERLKQKPIYFVESTGIFHLPLFFFLKSNDLKGFVLNPLCVYSTKNFDLRKVKNDAKDAESIARLAKFQEVKFSLVPEPQILALRMMAREYYALSDMLTEMKNRLCTDLYLLFPGYINVFGNPFGKASLEILRRYPSPRDVLAADRNELASLISKISRKTTAWAQVKLNTLLEISKLAESIPMDFGVLSLKIKYHLDGIESLQNSLDGLLKQLQLMIESPGFPVKVRRYIELLKAMPGIGFLTAVTLIAEIGDFSKFNSPKAFVAFFGIDPGVNESGKFKGDRNKISKRGTRFGRRVLFTAALASIRTTRNGDAINPVLRDYYHQKCENKKKKVALVAVMHKLLNYIFAVLRDEKPFALRSPKDHQTWRHAKETALKLVA

SEQ ID NO: 328734 - protein, 331 aa, unidentified
MDGEKRFVGIDIAKAALDVFIGSGGAAFSVTNDEVGIRELLRHLAPGDFVILEATGGLEMPAASALAAAGIAVAIVNPRQVRDFARATGRLAKTDRLDAEVLARFGEAVRPEARPLAAEQAQTLEALVTRRRQLVEMLTAEKNRRARAPKILHRSIDEHIGWLEKRLAGFDDELAELIRDTPMWRERDELLRSVPGVGKVLSSTLLAQLPELGMLNRKQIAALAGLAPFNRDSGNMRGSRCIWGGRAQVRRVLYMATVAGVRSNPAIRTFYLRLRANGKHAKPALIACMRKFLVILNAMLHHKTHWQTPALAPSTVALSPLPGAVSEHGCC

SEQ ID NO: 328735 - protein, 361 aa, unidentified
MKQYDYTGKEVYVGIDVHKKTYSCVIICEGEVVKRDTMPAKAEILVSYLKNTFSGAVIKTAYEAGFSGFHLHRYLVSHGINNIVVHPGSIEVASRDRVKTDKRDALKIALQLSAGRLHGIFVPSQEREEKRSMTRLRTNILKLRHQVGQQFKGLLFTQGLIEVEDDTVICPRWLSQKLSEVEQGNYSNDFCYSVHQYAEQWMQLTKRMKEIEARLEIQANDEKSLQMIYESVPGIGPIHARQLANELGNMIQFKNEKQLFSFTGLTPSEHSSGEHTRQGHITRQGNSVLRRIFIEAAWIAITKDPSLKEIFNRLSNNRGKKRAIVGVARRLAGRIRSCVLTGALYEIKPTQEACSLQEKVA

SEQ ID NO: 328736 - protein, 331 aa, unidentified
MKKIIIGIDVSKLTLDVGHYTSEGRVKSNCVVIENNSTGYNDMLTWLKKKKFKLKDLLICMEHTGIYTDQLTKFLEKKKIQYTLQSPLHLSKSLGIVRGKSDEIDAFRLSEYADEKKGKIKVSKRAPENQIRLKQLSSERKQAVCALAKVRQVKTEITVHQKVSSQKRKEKQIVVLKKIILEIEKEMQSLIDSDKELSMNYMLLLSIPGIGPVNAINTIVFTRNFTIFPDARSYACYVAVAPFPHQSGTSIHKRTSVSKIGNRYLKAELSQAARSAINHDPQIKKYFNRKYNGKKGPDSNYGKVLNAIKFKLICRMFAVIKRQTPFVGLDF

SEQ ID NO: 328737 - protein, 353 aa, unidentified
MHATTVAIDLAKDVFELGFADDQNRIVERRRLGRSAFARSLRDRVPLCVIMEACGSAHAWARTFERQGHRVRLLPAHDVRPYVRRNKTDRADVGGLLEAARCPDIHAVPVKSPQQQGVQALHRIREHLKASRTATINLIRGLLREFGIVIASGASKVHPAVLAALDDVDNEVPAALRDTLAEQLVRMQDLQRQVATIERRLAEFAERDAQSQRHLHAPGIGVITATAISASVGPLARFRSGRHFASWIGITPREHSSGNRRHLGRISKRGDSYLRMLLIHGARAALRSARIRQQHNTPLNRIEQWALSVQERQGHNKAAVALANKTARRLWASELHGARYDPNHGGRERGGTP

SEQ ID NO: 328738 - protein, 345 aa, unidentified
MDSMHYIGLDIHKKTISFCVKRMDGTICQEGVVPARRSDLDLWMESLAQPWMAAMEATIFTSWVYDHLRTRCHTVKVAHPAMLKAIAASKRKNDRIDARKIADLLRADLLPECYMAPTAIRELRRSLRYRNLLVRQMTQTKNKVSSLLMESGVEYNKQKLHQKKYFRDLLKTAEHMPVSLPPLLELSRTTLDCFSKMERQLVKGIQLDPLLCERIERLMTIPAVGPITAITWALEIGEVSRFRTCKQAVSYCGLCGAEDSSAGIVKRTPISKQRNKHLQTVLIEAAKLGPRLHADLALIHTKELEKGDHNRATLAVARKLVAYLLAVDRRKTGFTRKGNTAQQAA

SEQ ID NO: 328739 - protein, 416 aa, unidentified
MNAAGSDVSSRKSTVAVLRPFGEVVKLPFDVRHSAEDLAALAAQLKSIDGETRVVMEHTGRYYESIAKVLHEAGLYVSAVNPLLIKEYGNNSLRKVKTDKADAMKIAKYALDNWTELRDYTPMDTIRYELKTLNRQFQLASKQKTATANNLIALQEQSFPGIRKLFDSPVRSDGTQKWVDFTHDFWHVDCVRSDSQNAFAERYRKWCKRNRYQFSMEKATEVYAVAKSAVVLVQKTSVTKTLVQEAANQLTAISRSVETYRSEMNKLASQLPEYPVVMEMYGVGESLGPQLMAEIGDVRRFERKQSLVAFAGIDPAPSESGDYCSRSNRTTKRGSPYLRKTLFNIMKVHLQRAPADEPVFQFLDKKRAEGKPYYVYMTAAGNKFLRRYYGKVMAYFSTLEGLPPVDMETPGLHHAE

SEQ ID NO: 328740 - protein, 440 aa, unidentified
MLMSKLPELDARAAFVDVGSEQMHVSIAGGPPQVFGTVTLQLEALRDWLLADGVHSVAMEATGVYWLPLYGVLEAAGLEVLMVNGRQMRNLPGRKTDMKDCQWGATLHAHGLLRAGFVPPAHIRKLQDYMRLRAEHVRSAAAHVQHMQKALERMNIKVHDVISSLTGVSGLAMVRAILKGERDPGRLLGLCDKSIQRTKAERIKEALRGTWAEEHLFALRQGLQSWEHYQQHITECDRRIEALLKQDGDGDAPPDSSAKVRRRAGANAPHIPHLREMLTQLCGGRDLTVLPAHTEYTVLQLVGEVGTDLTKWPTEKHFTAWMGLAPGSHQSGKRNRTVKRKRNRAGRLFCVMARSLARSKYIALGGFYRRMAARRGGLVANIALARKLGALFWRVMVKGMDYVERGLQHYEDKVLQTKQRALHRLAKQLGHQVIPLPTPA

SEQ ID NO: 328741 - protein, 350 aa, unidentified
MVCSKIAIGFFIGPVWLKEPKGSHRKEGSRKMSKYSMVCAGIDVGKHKLDVACGGRSERLQVDNTADGHRKLSAWLGRQRVKRVGVEATGGYEQAVVVQLRHAGFEVIVFQPAQVRAYARFHLQLAKNDKIDAALIAACTSDTKKVFAPPDPRLAPWAQRLSFIDQITEDIVRLKTRCESCRDERIRRYWREDIARLKKLQKSELKALVAEIRQHRDLAERLDLIASVDGIGLPTAVVILVRMPEIGRISREQVAALAGLAPFDADSGQQHGARHIKGGRARLRRSLYAAALPAALRWNTRLIPLYRRLMAAGKEHKAALIACARKLLIYANTVVERGTPWVREQASLRP

SEQ ID NO: 328742 - protein, 401 aa, unidentified
MRMGMGYDVCCGVDVGKYSHHMVALDASGEVLAEGPVRQSEAAIREALAPVAAAGRARVVVDQPGPLSSLLLAVAADMALDVGFITPRAMREGICLFGGEVKTDARDARVIAELSLRIPSLVRAVKGATEASEELSALLSFDREATERCRRAEARVHELLLRSCPALGELLGGQRVKRKLPLALLERYGGAVGLSEAGRDEVLRFARGLGRVGASVEPRVDEVFAAIGSQTVVPPGTRFTEELVRIEAAELRAALGARRVASARIGEVLAGLPEAEILMSMPGLGPVTCATFLAEVPDVGAFAGPSQLAAYAGLAPRVRQSGRSLNSTTRPRGGNRRLKRVLVLSAARSVDFCEESRAYYDRKRSEGRCHYSACMALARRRINVIYAMLRDGKRYGEQQEG

SEQ ID NO: 328743 - protein, 388 aa, unidentified
MEARTVNNLPPAASRDETVRCFLAIELSKKSWIIAVNTPLSDKISRHRLEGCDCKGLLELIERIRTRVARELNRPVEVISCYEAGYDGFWLHRLLEAHGVRNLVIDPASLQVDRRARRAKTDKIDAERLLRSLMAYLRGEPKVWSVVRVPSVAEEDDRRLHRERDRLINERVQHVNRIKGLCAVHGIYDYEPLRSNRLARLKQLRTGDGRELPQRLTAEVVRELQRLELVLKMIKTIEAERDAIAVSKISTHTHAKKIQDLVKLKSIGPEIATALVGEVFYRRFNGRHQVASYVGLTPSPFQSGSLNHDQGISKAGNPKARTIMIELAWLWLRHQRNSPLSVWFRERVGTARGRIRRITIVAVARKLLIALWRYLETGMVPTDAVLKG

SEQ ID NO: 328744 - protein, 353 aa, unidentified
MEEGANVMIMIGCDYHPGLQEIAVLDTETGRRREQWLSHVFGSEPVRQFYASLPRPVRVGLEASGYSQWFEELLEELGIELWVGDPARIRKAAPRKQKTDRNDARLLLELLEQDRFPRIWVPDTATRDLRQLLMHRHKLVTMRGAIGNQLQAIALNRGIQKKKGLWSQQGREQLRSLQLPHWTTKRRDELLTLREQWDREIAELDRVVEREAERNLDARYLMHHQQGVGPITALATVLTLGPVSRFPSAKKVASYAGLIPAEYSSGERQRLGHISKQGSPFLRWALVEAATVAVRYDPEMKRAYWRLVERRGKPVAKVAMARKLLTRLYWLLRRRAENSAARRRDRVAEKPEA

SEQ ID NO: 328745 - protein, 316 aa, unidentified
MTEEVYVGIDVSKAELVVAVRPSGERMTLGNDRAGIKRLVGRLDELKPKLVVVEATGGLQRQVVAALWMAGIAVAAVNPSWVRNFAKGRGVRAKTDRKDAELLALFAERERPEPRPPADAETQALQELVMRREQLLEMLVAEKQRLHRASGTMRKELRHHIAYLEGRIKELEQDIDKTVRRSEAWRRKSEIVRSVPGFGPRFSAMVLAKVPELGTLNRKQIGALVGVAPMPDDSGSRHGRRVIAGGRFEVRNKLYMCAMVAARSNPVLKQFYARLVARGKPKKLALAAVMRKLIVTLNAMFKTNSLWRPPCPDLSV

SEQ ID NO: 328746 - protein, 325 aa, unidentified
MMIIGCDFHPSWQQVSWLDTETAETGEQKLVQASGDAERFYRQVPAPALIGMEATGNCHWLVDLLAELGHELWVGDAAQIRASYVRQQKTNKRDAAHLLKLLVEGRFPRIWMASSEVRDLRQLLLHRYKLVIMRARVKNELQHLCLNQGVQRKRKLWSAAGQQILRELPLKPWAGRRRDDLLKLMAMLDQQIEPLDQAVQEEAQRDKMALLLQTQPGVGPITALAYVLTMGDVSRFPRGKQVASYLGLIPREHSSGGRQKLGAITKQGNRMLRMLLVEAAQIAVRYDPEFRKQYLHRCHSKPKAVAKVAAARKLAVRAMTGHICL

SEQ ID NO: 328747 - protein, 315 aa, unidentified
MAMPVATTQSIVGVDVAKDELVIYHVESDRLETISNTKTAIKKWLKTIAKPVAIAIEATNIYHQEFAELAHADGCMIYMVGGYELSHYRKGVNVRAKTDALDARLLARYLTNEGDHLRPWTPPSPLYCRLISLFRRRAALVQARVSLKQSWENEPLLKTAFKNQISAMQRLETLLEKTILTQIEEAGLGAQLKRCMKVEGIGTLSGARLLASFQRGDFRNADAFIAFLGMDLRIADSGKKKGRRCLTKRGDPEARRLLHNAAMAASRTSAWKGFYESMRGRGLSTTQALVALARKLARVVFALLKNQSEYSPKAV

SEQ ID NO: 328748 - protein, 392 aa, unidentified
MSHQDYHFDASRSLTALEQGSTIIAVIEMSQSKWLVAALVPGVERHPLKKFDAQEEGLLKLLHRWRNEAGQAGREIKRIVVAYEAGRDGFWLARWLRARDVEAYVIHPTSIAVSREHRRAKTDRLDTELLMRAFLGWLRGEKRHCSMVAIPTIEEEDARRPNRERQNLVTEQTRIVNQMKAIFVRFGIRAFRPTLRKVEGKLKDLRTAEGSPLPENTRAELCRHLARLRVVRDQIRAVEQERLRKLAAAPAVEKGSHVMVRLIARVLGVGIETADMLVNEVLSRRWRDHKAIARYAGLTGSPDESGKRRRERGLARAGSARVRCGMIQFAWRFVRFQKGSALAQWFAARTADRRASTRKTMIVALARKLLIALWRLATRGEVPPGIILRPAS

SEQ ID NO: 328749 - protein, 394 aa, unidentified
MKLIGIDIGKNKHFFCIMDQQTGEIISQPVSFSNDKEGFDFLIQKIKSYSKDSVLIGMEDTGHYHFALLKYLLNLQYTVALINPKTTDFNRKMQGGITKNDKLDTINICDVLDTPERKKQYRISKVNSFDLYEQKQLTRHHHNLKEEENVYKNRLQKCIDIVFPEFNKLFNSKYGTVYMNILKTFGSAENVANTDIRTIRKCFEIEGRGNRISLTPERLKECARSSIGISSSAEVIQIKHLTAQIELIEEQLTEIDKKIEEFSIQNNSPILSIPGISHFSGTSILAELGDISNYSKPSQIIKFAGVAPLHYESSQFNAQHTSITKKGSKYLRKTLYQIILPVIRHNQVFYKYYQLKISQGKGHRCAQGHCVRKLLRIIYHLLKTNQQFDPQLLR

SEQ ID NO: 328750 - protein, 403 aa, unidentified
MNMNAIGIDVSKGKSMVAILRPYGEIVSSPFEIKHTSSNIQSLIAQIRSIEGESRIVMEHTGRYYEPLARELSLAGLFVTAVNPKLIKDFGAHSLRKVKSDKADSVKIARYTLDSWTELKQYSLMDELRNQLKTMNRQFGFYMKHKTAMKNNLIGILDQTYPGVNTYFDCPAREDGSQKWVDFATTYWHVDCVRKLSLNAFVDHYQKWCKRRKYNFSKDKAEEIYGAAKELVPILPKDDLTKLIVKQSIEQLNTASRTVEELRTLMNDTAAKLPEYPVVMGMKGVGPSLGPQLMAEIGDVTRFTHKGAITAFAGVDPGVNESGTYEQKSVPTSKRGSSSLRKTLFQVMDCLIKTKPQDDPVYAFIDKKRAQGKPYYVYMTAGANKFLRIYYGRVKEYLMSLPE

SEQ ID NO: 328751 - protein, 453 aa, unidentified
MPKTSSSMPQNLTRMNPGAAAIDIGSTMHMAAVNPDCADMPIRSFGTFTHDLHDLAAWFRSCGVTSVAMESTGVYWIPAFEILEQHGFEVILVNARYAKNVPGRKTDVSDAAWLRQLHSYGLLRGSFRPNAQVATLRAYLRQRERLVEYAAAHIQHMQKALMEMNLQLHHVVSDITGVTGMKIIRAIVSGERDPDVLASLRDVRCHSSVETIRASLIGNDRDEHVFALSQSLELYDFYQAKMLECDRKLEGSIASMTVDPDAPLPPLPKVRTKTKQTNAPSFNVRAALYGLTRTDLTQIHGLGSSLALKLIGECGTDLRAWPSAKHFTSWLCLAPGNKISGGKVLSSRTRRSSSRAAALLRLAATTIGRSDTALGAFYRRLAGRIGKQKAVTATARKIAVLFYNALRFGMVYRDPGAAAYDERHRGRVIANLQRRARSMGYELAPMTAGDCVS

SEQ ID NO: 328752 - protein, 356 aa, unidentified
MEQHSTMTIGVDLGDKRSHLYVLDNQSGEELERGDIATRQKSVQKWFSRREPATVVIEVGSDSGWVSRVLTELGHEVLVADPRRVRRLAGNDDKDDALDAEFLARIGRMDRKLLKPIKLRSEPTQCALGLLRSRDELVQARTKLINHVRGAVKTLGVRLPNSSTESFHKLQAQIPQQLRESLSAVIICIESLTEQIRCCERLIEQKCEREYPQTELFRQVAGVGAITALAFALVIEEPSRFSRSRTVGAYLGLTRRKYKSGQSDPELRISKRGDRLLRRLLVNSAHYILGPFGPDSDLRRWGLKYAAGGGKNAKKRAVVAVARKLAVLLHRLWTTGEQYEPLRNNSRTPQGAAEAV

SEQ ID NO: 328753 - protein, 371 aa, unidentified
MRGSALSSTTPAPRARRRHSVGEVVLGVDTHRDAHVAAVLSLTGAVLATDEFPATAAGYRDLLKWARKSGTVGRAGVEGTGSYGASLSRYLLAQGVDVFDVNWMDRADRRRRGKSDPLDAQNAARVVLSGRARARAKTGDGPVQIARMYKLTKVSAVKARTQAINQLKAVLVTADPVLREELAGLGNAELFRTCALFTGVSSREDAGAESVVQATRITLGLLAHRIGQLSEQIRDVEARLARLVECHAPQLLDVVGIGPDTAVTLLITVGDNPERLDSEASFAALCGVSPVERSSGRRQFRRLNRGGNRQANAALHRIVFTRLRVDSRTQDYYERRIKEGKTRREIVRCLKRYAAREVFHLVKQLQPVPRS

SEQ ID NO: 328754 - protein, 424 aa, unidentified
MNSSSWAVFIGIDWAAEEHAVCVLEGETALHTVLPHEAGAIEAWVQGLRQRFGSRPIGICLEQSRGALLYALMKYEGLTLFPINPKQLARYREAFSPSGAKNDPGDAELLARFLREHHPRLRMWRPDDAVTRGLRLLCEDRRHWVDQRTAVGNRLLQALQEAYPLALTLVGRHIYGRWFVALLTKYPTQRELQRAAPKRLVQWLTRLRRVVDDPPADPARDPRVVAIKQALPLVTDEAVLLQGRLAVSHLVQQLQLLNAAIDQYDQQIATQLAQHPDAQLFASFQGAGPALAPRLIAAFGADRQRYDSALEVQQLSGIAPVQRQSGKTCVVKKRHACSKFLRQTFHEFAKCSLAKCRWARAYVAMLRSKGQNYHAAVRALAFKWIRILFRCWKLRVPYDDNLYLRQLHQKHSPLLAFLPPLAPT

SEQ ID NO: 328755 - protein, 333 aa, unidentified
MEKDSRFVGLDVHAETIAVGVAEPGGEVRSLGTIPNTPEAVRRLVRLVKKLGPPETLRVCYEAGPTGYVLYRQLSALGVPCAVIAPTLVPVKAGDRVKTDRRDAEKLARSYRSGDLTPVWVPDPGHEALRDLVRAREAAKKDQLRARHRLGKFLLRQGRRAPTGSKAWGVKHRAWLQTVIAGLQALRGIAKLSAVSIVTEVGALSRFAKPRQLMGYSGAVASEHSSGPHRRRGGITKTGNAHLRRIVIEAAWAYRHRPAIGGTLRTRQAGLSEEVKALAWKAQHRLHGRYARLLAKGKAPTQVVTAIARELLGFIWAIGVHIEQHTAGGAPAA

SEQ ID NO: 328756 - protein, 328 aa, unidentified
MKKLFIGIDVSKDVFDYCCLDQENQIVLRGKADNTKQGIKKFCKLINALKGYSLWICMEHTGYYDSLLAFEFAKKKLCYSLLNPLELKRSMGITRGKNDRIDAYRIASYALSNSHKLQPYILPAEELRVMKVLMSSRDRLTKVSVQLQNGLQGLRVVSRTMNLKKHIEENKAIIKQMKVRIKDVEKQILEIIKSTPELKENYDKIEKVIGVGKITATKCIIETNNFTKFTDARKFNCHCGLAPFEYSSGSSVKSRTKTSHISNKSLKGILYKAAASAIQHDPQLKHYYNRKLKAGKEKLNALNAVANKIVLRIFAVQKRDEPFVKFLV

SEQ ID NO: 328757 - protein, 343 aa, unidentified
MQAVTTIGLDIAKSVFQVHGIDAAGQVVIRRQLKRRYVLAFFQKLPPCLIGIEACASSHHWSRELQALGHTVRLMPPAYVKPYVKRQKNDATDAEAICEAVTRANMRFVVTKTPEQQSGLVLHRARHLFIRQQTAVINAIRAHLAEFGIIAPVGRHGVEELLNVVADPNDKRVPEIARACLLAFGAQLRRLKEQILEFDRMIRAWHRSSETSRRLDDCPGVGPVLATALVATVADPKSFRSGRNFSAWIGLVPKQHSSGGKNRLGSISKQGDRYLRGLFVAGALAVIRYAKIHGTKHRPWLTALLARRPTKVAAIALANKIARMAWAMMAKGERYKEPIALAA

SEQ ID NO: 328758 - protein, 341 aa, unidentified
MASQYVGIDLHRRRSVIVRQTPEGEVVDTVRIDNDPVALSCAVAAAGPNPEVVLEATYGWYWAVDVLQACGATVHLAHPLGVKAFAYRRVKNDVRDASDLADLLRMGRLPEAWIAPPYLRQLRELVRYRAKLVALRSGLKAQVHAVLAKEGVAVRVSDLFGKQGMDLLADTRLATCYRMRVDSLLELIDAFDGEVAWLTDAIAARLRHHPGYHAIQAIPGVGPTFAAVFVVEIGDVTRFKRPAQLCSWAGLTPRHHESDATVIRGHITKQGSRLVRWAAVEAVQVLPHDWKLRHDRDRIAARRGRAVGKVAAARKLLTLVFYGLRDHHIRCLDNATTGAAA

SEQ ID NO: 328759 - protein, 416 aa, unidentified
MKKHNNSGKKSEPTSKRTKSRGPVQRDTKEVLAELVGKLKEKLDPTKVAATSAGEKHQRGELRPNLDRLTVGVDLGDQWSHYCILGLEGETLAEGQLRTTQEDLATFFQGLNGARVVVEVGTHSAWVQEVIRGCGHEVLVANPRLMDGSKRRKRKNDRIDANKLARLGRVDPESLYPIQHRSREVRQDLVMLRARDALVAARTEIINTTRGLIKSMGTRLPKCSSRSFAQKGEEAVAVEMREALLPLVRLAATLSADIKEYDKKIETLGQEKYGHTALLRQVKGVGPITALAYVLTLENPQRFAKSRDVGPYLGLVPKQEDSGESQPQLGISKAGDTMVRKLLVGSAQYILGPFGPDTDLRRYGLRLCECGGKNAKKRAAVAVARKLAVLLHRLWVSGEVYEPLHYAMSAPIAAAA

SEQ ID NO: 328760 - protein, 429 aa, unidentified
MQNESTPDARGPVFCGVDTHADSHWLCVLDWRGRKVLSRQFPADAAGYEALAGAIAAAGEPACVAMEGTSSYGAGLTRHLASLGMPVREALSPARMQRRRPGQGKCDEADAERAARAAMSGSRLGTPKSQDGWVDGVRCMLAARSGAVKARTSAINTARSLLTTAPEGLRSRFRGMGGPRLMEELPSVRAEGALGAALGALADLWAAARDAALDMELAIEASLEENCPALLAMYGCGPVSAAKLAVAAGDNPGRLRSEASFAAICGACPIPASSGKTVRHRLNRGGDRQANSALHEIARQRVMRDPETAEYAERARGRGKSDREVMRCLKRYVAREAYRALMHPHEIRRPEDASELVAARRAAKVSQVRAASILGTSEKYISMLERGQRELKPIRRAYEAWVEAGLPLDWDRQAFEAERKMDSKKHLAK

SEQ ID NO: 328761 - protein, 391 aa, unidentified
MIFVGIDVAKDKHDCFILNSEGTVLADVFTIANNRIGFETLLSRIQSCSQGESKIKVGLEATGHYSYNLLGFLLDSGLTTYVINPLHTNLYRKSLSLRRTKTDRIDARTIAMMLMSDVDLKSYSNTAYHNEELKSLTRYRFDKVKERAKLKSSVARLVNILFPELEKLVSSLHIAVVYALLSNYPGASYIANANTEELAETLCTASKGRYTKSKTAEIQVAAGVSIGSKMPAKSMELKHTIALIRELDKEISEVESAIDKITSQMDSPIFTIPGIGRHMGAMILAEVGDFSHFASADKLLAYAGLSPSTYQSGQLQNCYAHMEKRGSRYLRYALFNAAKYVCLWCPTFSAYLEKKRSEGKHYNVAISHASKKLVRLIFAMQRSGKAFLADY

SEQ ID NO: 328762 - protein, 435 aa, unidentified
MWWNSQWLLYLTLKGVLTIKVVYQTCCGIDVHKSFLVATIIKTTSGVDPSYQKKRFSTFNNSILQFKNWLIENQCRDVCMESTGKYWGPVFNLLEDEMNVTIANPKWVKAVKGNKDDTKDSKWIGDLFRLGLVQGSYIPCKPIRILREFTRYRYKLTSCRTSEKNRYQNALTVCNVALDSVVSDIFGKSATSVIDYLIEQSGNSINHEEIASRLLRSLKKKSDSVIESIEGYQMTDPPKYRMRLVRAHLDYITSTINDIDTMLDSLIAPYENAVQLLCTIPGVDRNSAITVISEIGTDMTPFSNSKRLCCWAGLTPGSNESAGKKKSVRITRAGVYLKPALVQVAHAAVKSDKSPYYKQKYERIMKRRGKKRAIIAIDRMILTAIYQMLSTGEAWNPTDLYKTDMPEPLKEKQKEKAIKQAKKLLIREGLLSSSK

SEQ ID NO: 328763 - protein, 424 aa, unidentified
MDKEIDPLKKNSKSPTKKEQTSRRTRLQRPVQRKTKEVLAELVEKLRGKLELKATPLRLGEAGQRSELRPNLDRLTVGVDLGDQWSQYCILGLEGERLSEGQVGTTQADVAEFFGAIMAARVVIEVGTHSAWVQEIIAGCGHEVLVANPRLMEGSKRRKRKNDRIDAHKLARLGRVDPQSLHPIKHRSREVRQDLVLLRARDALVAVRTELINTTRGLVKSMGTRLPKCSSRSFGHKAGEAIPEPVREALQPLVQLAEGLSACIAGYDRRIEELASKKYGHTKMLRQVKGVGPITALAYVLTLENPERFSKSREVGPYLGLVPRQEDSGESQPQLGISKAGDTMLRKLLVGSAQYILGPFGPDTDLRRYGLRLCERGGKNAKKRAAVAVARKLAVLLHRLWVTGEVYEPLGYRASGTIIQPAAA

SEQ ID NO: 328764 - protein, 328 aa, unidentified
MECLSVGIDVSKRELVIAVHPTGDQWTTATTPAGIATVVKRLQTLGPGIIVVEATGGYERALVAALAVAELPVAVVNPRQVRAFAQAIGRTAKTDAMDADVLALFGGRLDPAPRPVTDVATQALAALVARRRQLLEMIGMERGRLEHAPPTGHLTRELRRHIRWLERRVTDVDDEIGTCIAAHPTWRVQEELLRSVPGVGPTTARTLLGELPELGQLDRRAIAALVGVAPFNCDSGQQRGQRHIWGGRASVRATIYMAALSAARYNPVLRVFYRRLRDAGKPAKVALVATMRKLLTILNAMLKHQSPWATQVASTPASLSGPARAATV

SEQ ID NO: 328765 - protein, 375 aa, unidentified
MSTAMTRKDEDTRTLYVAFELGEKEWKLAMSPGFETRPGLRSVRARGTTRLLEILEKERQRFGAKQIVSCYEAGRDGFWLDRFLRAHGIDSRIVDSASIEVRRRARRVKTDRLDAQKLLTMLHREALGEKGVWSVVHVPSVADEDARSLQREYRTLVKERSRSSNRIKGLLASQGLVAPRVDRRLPGWLASARLWDGSPVPSGMRARVEREFARWCFTHDQVLALDKERRDRTKDEADKSLEKVRALYAIKGIGLGAAWTWGLEFFSWREFRNGKEVGALSGLAPTPHQSGELEHELGISRAGNRWVRGLAIEIAWGWLRHQPDSALTHWYNERFARGGPRARKVGIVALARKLLVALWRYVETGALPEGAVLKV

SEQ ID NO: 328766 - protein, 313 aa, unidentified
MARIVFMGIDVSKKTLDISIDNKHQRIENAERAISEFIRSRMTNNIFVKLCAVESTGGYEKLVIKLLREHNIAVHRAHPNRVYAFAKACNHFAKTDKLDAKLLEKYAEFITKNDEVVECIVSQKQEELKELRAVERNLNDDVHANMCRLHKVTGKAREYIEKQVEFAKKQLEQIRQDIEGIINSDPDLKEKSKLLTSYKGVGRKIASILLIEVPELGRLDNKEIACLIGVAPKTNESGRKVSKAQIIGGRFYARKALYMSAVVAIRHNRKMKALYQRLVDSGKATKVALVAVMRKIVVCLNAMIKNNNFYLDA

SEQ ID NO: 328767 - protein, 320 aa, unidentified
MDHEGRAVLRKKFRRGQVLKFFATVPPCLVGMEACGSAHHWARELSAQGPQVRLIPPQYVRPFLKTNKHDAADAEAIAEALVRPTMRFAPIKSAAQQAVLMLHRSRELLVKQRTMLINAVRGHCRELGMTASQGASRVNALIVLIETPDDPRLPTFAREALGVLIVQLQAVKEAIRTLESKLQAWHRSQQASQRLATIPGVGVITATALVATIGDGSQFKSGRHLSAWLGLVPRQHSSGGKSRLGRISKRGDGYVRRLLVHGSRAVLRWQRAAPKRPAPWIGELLARRPTNVVLGAMANKTARTVWAMMRDQQDFNAVCR

SEQ ID NO: 328768 - protein, 412 aa, unidentified
MRAVALDVHRDFCEVAIVTEGRLRSAGRIQTRPDALELFARSLAPEDWVALEVTGNAWAIAGILEGHVARVIVVSPTDTGIRQARAKTDRLDARTLAKLLWAGELDGVWTPDERVRVMRRRLARRAQLVRARSRVKNEIHAVLMRCLKDRPPASDLFGIKGRRWLADQQLALCERETVDAGVRQVDFLDTEIAHVERLIAADALGWPEVKRLMTVPGVNVIVAATFMAAVGDIRRFGDRRKLTAYLGLDPRVRQSGAGPANHGHISKQGSNSARHALVEACWSTVRQPGAIAAFYQRVRSRRGHSIAIVASARKLACLFWCLLTRGEDYAYAQPSLTQKKMRRLELAAGAPRWQGGRHVWSTNDAMRQAERALAEQAELAYRRSVADWHATRPATAGASATQGHASQEPSKS

SEQ ID NO: 328769 - protein, 431 aa, unidentified
MGGSTRFKFLIDNLLPFRKGPNMEAIIERCCGIDVHKKTIVACLMTGQPHEKPQATIKTFSTMTRDLLACRDWLIEEGCTHVAMESTGVYWKPIFNILEDSMEVILANARNVKNVPGKKTDVKDCEWIAQLLRHGLIEGSFIPPKPIRQLRDLTRYRQQLIYQRSSEINRLQKFLEDANVKLSSVVTDITGVSAQEMIQHLIQEDMTTQEMAQLAKGRLRNKIEQLEKSLEGYLSNHHRLILRLSLQMIASYNEAVKKLNTEIDQRMEPHQEIAERLSTIPGVKNETLIAEIGTDMNRFPSHAHLASWAGVSPGNHESAGKRKSGRTTHGDKWLKATLVEAAWAASKTKGSYLKSRYHRLAARRGKKRAALAVGHTILITAYHIIKEHLVYKELGADFFDRLNEQHLLNRLTKKIAALGYKVDIEKLPLAA

SEQ ID NO: 328770 - protein, 345 aa, unidentified
MEHYVGLDVSLKLTAICIVDRTGKIEREGVVSSDPEAIAIFIKSHAPHVARVGLETGATATWLWTELNKLGLPVICIDARHAKAALKMQINKSDRNDAVGIARIMQCGWYKEVHVKDLDSHAVKALLVSRALLVKIKRDLENQIRGLLKNLGLVIGRAKMNVFAVRAAELTEHRPELAAAVVPLLSARAALEQQIADLDRKVMRLARKNAQARRFMTAPGVGPITALCFLATIDDPTRFKRSRSVGAYLGLTTRRYASGEIDWTGRISKCGDKMLRSYLYEAANVMLTRVARWSALKAWGIRVAKRTGLRKAKVAVARKLAVVLHRMWIDGTEFKWSKEAANQPA

SEQ ID NO: 328771 - protein, 347 aa, unidentified
MRFYTNQHRYYCGIDLHARSMYLCILDPQGEILLHRNMPCTPELFLKAIAPYREDIAVAVECIFTWYWLADLCAKENIPFVLGHALYMKAIHGGKAKNDKIDAHKIAVLLRGGMLPMAYVYPALMRSTRDLLRRRMHLMRKRSELLAHIQNTNSQYNLPEIGKKIAYKANREGVAERFDEPSVRKSMEMDLSLIDHYDKLLTEVELYITQTAKVHDVNAFHRLRSVPGIGKILALVVLFEIHDINRFPTVQDFVSYARLVKCAKESAGKRHGTSGKKIGNVHLKWAFSEASVLFLRGNPAGQRYVEKLTSKHGKAKALSILAHKLGRAVYYMLKREKAFAMNQFFGS

SEQ ID NO: 328772 - protein, 428 aa, unidentified
MDEINRNRLEEFRQLRQGIRHSEEYLVIGIDIAKDRHHAFFGTPTGKTLLRRLVFSNDHEGFRRLLDHTEALRVQHGLKKVVYGMEPTANYHKPLGEYLIGLGRTVVLVSGVTVAKNRESLDGRWDKHDVKDSANVADLICQGKCLYYEHPSAELRGLRGLLSLKRRLKKQEQGYRVRIRNHLIAQYFPEMDGDYDRLGAEGLSVVRWCLAPVQITRLDVEPFVQRVTSRRITGVKRRRLEAIWEKAGESIGCDGVPGLEHEAKVMVEGLRQIREVIKETEDKIGELCKEFPEYHCIMTIPGFGPDVSAKVLAAIGEADRFRNGKQVLKMGGLDLSADRSGKDSDRAIPEISKRGKADLRYALYQAAMIGSIKNRDIMIYYTNKIRGREKEKGIHTKMRVKLAAKLLVIAWTLMKKKEAFNPDYLSAA

SEQ ID NO: 328773 - protein, 419 aa, unidentified
MSNNSTSNAIRQVQPGYLHVGVDLALEENMVVILDERAKRLDRFKFPQDRGGYEYFFRRVESVRQRNNVAAAVLSMEPTNYFWKLLAQEAEERQCPYHLVNPYTVKKHREGNQLDPSKDDPRDAEQIAELSRTDHYTQTRLQKGAYEELRQYATLHEQLVHGIRREEQVLWGLTGQAFPELIQVFKDLEAKTSRAVLQGCGCAAVIRTLTEEAFLAQVRTHFIGKRLHLSKVRRAYQLAATSIGLTEGLQALQLAFRLHFAQLEVLQSQLNQLTEAMTACLKTLPEAPSLLSMSSMKAPSVALFLAEVGDPRRYRTAAQWVKLAGIQPAPNTSGKKQRSKTPMSHHGRPRLRTLLYFTCLRLVRRDAYFAQLYSDLQRRSKNPLTKMQALGVLMNKLLHILWALAKTQTCYNPSFAQSI

SEQ ID NO: 328774 - protein, 344 aa, unidentified
MMYIGMDVHQVSTTFCLFDPSATDRQRYRTLTRPTTVEAIRAVLEPYDGCCKVTFEVGTQAQWVAKIVRPLATDVEVANPSRIPWLFRDGRKNDRLDARKLVTLLYLDQLPTVHLPSEAVSAWRALINHRRTLVKRRTMIKNQIRSIVRTFGCRCPHKSCWTRAGVAWLRSQTFDEARHFMVATMLDELAFVGSQLVKMEGQLDGIAETRPNVALLRTVPGVGPRTAEAIVAFTDIVGRFSNRKQFASYFGVTPTEDSSGLIQRHGHISKRGPSVVRWLLVEASHRVIARCPALRAFFDRVHRGQKNRYKKAIVATGRKVLTICYGMMRDQTAFDARKVVRSAA

SEQ ID NO: 328775 - protein, 353 aa, unidentified
MTITALNQPILVGVDTHADTHHVAVINEHGKKLDDREFDTTAAGYRDLDRWLRSRGTVIRVGIEGTGSYGADLARYLRRHDYDVAEVPRPNRRLRRSQGKTDTIDAYAAARQLLDGSQTTAPKNRDGAIEAVRALRVARNNAVKTVTAALNALRSLITTSPEELRSRLRSLSRARLLATCAGFDPGPGRLTDPIAATELALQSLAQRVLDSQAHAAELKKRLNDLLAHIAPATMRVFALGPDTAAALIISIGDNPERLTTEAAFARLCGVAPIPASSGKTTRHRLHRGGDRQANQALHTAVVVRLRYHDNTKIYAARRKHDGKTTPEILRCLKRYLAREVFRALRTDYQAMTT

SEQ ID NO: 328776 - protein, 349 aa, unidentified
MEHYAGIDVSLELSSVCVVDAKGKIVKEAKISSDPVALVAFFRGLGIAIERIGLEAGPLSQWLHAGLTQAGFEVVLLETRHVKAALSAMTVKTDRKDARGIAQLIRMGWFRPVHCKSVGSQEVRALLVGRKLLLGKLLDVEFSIRGILRGFGLKMGMVTRRNFEARARELCAGHSMLEQICAAMLAARSALQTEYTKLHKAMLTIVRKDEVCRRLMTTPGVGPLVAITFKTGIDDPSRIGKSKAVGALFGLTPKKYQSGETDVTGGITRVGDEMVRTALYEAANILLSRVTRFSALKRWGMDIAKRRGTKRAKVALARKIGVILHRMWVDSTNFRWTKEAPNAPRLIQA

SEQ ID NO: 328777 - protein, 419 aa, unidentified
MSLNRSVPSFFMQVLYTRCAGLDVHKDTIVACVRCVSPPMHQEVRSFGTTTTQLLELADWLGEHGCTHVAMEATGVYWKPVWHVLEDEFELVLANAAHIRNVPGRKTDVNDAMWIADLLAHGLIRSSFVPPHAIQQLRDLTRTRKQLVREVSQHSLRIQKVLEDANLKLGSVLSDVLGKSGRAMLDAIVAGETDPARLAALAQGTARNKTAELREALRGRITEHHRTMLRLHLQVIDALHRTLGELDTAVGKALAPIQQRTRLLTTMPGVSDLTASVMVAEIGVDMSRFPNAGHLISWAGLCPRSDESAGKRRSTRVRKSGTWIKTTLITAAWAAVRVKTSYLRAQFLPIKARRGAKKAILAVAASMLTAAFHMLRDGTEYNDLGSEHLDRQDRSKTIRRLLKRLQDLGCEVPQMAHET

SEQ ID NO: 328778 - protein, 391 aa, unidentified
MICVGIDVSKDKHDCCILSSDGQLLLKPFSVPNNRHGFDSLYSAILSFENDPDKVKVGLEATGHYSFNILGYLLEKGIHCFVFNPLHTNLYRKSLTLRKTKTDKVDSKIIAKMLLSEVDLKPYSKTLYHNEQLKSLSRYRFSKIRERGNLKQQLARLVNILFPELETLVPSLHLSSVYALLEEFPGASYVAKAHITRLSNLLCASSKGHYKKDKAVEIRNAASSSVGSVMPAKSLELKHTIQLIRILSEEIDEIETQIQEIMEKIQSPITSIPGLGFRMAAMILSAIGNFSKFDSPDKILAFAGISPSTYQSGKLDNAYAHMEKRGSRYLRYALYNAAIYVCHWDKTFSAYLQKKRAEGKHYYVALSHAIKKLVRVIYRLQLTGEPYRPAV

SEQ ID NO: 328779 - protein, 410 aa, unidentified
MQVLYPRCCALDVHKLTVVACLRIAEDSKVTTEVRTFDTTTASLIGLRDWLAANKCTHVAMEATGVYWKPVWHILSDGEFQLVLANAAHVKNVPGRKTDVSDAEWHSDLLAHGLIRASFVPDTQTQELRALMRTRKQLVREAASHIQRVQKTLEDANIKLDSVISDIMGKSGRAMIEAMIAGETNPAKLAAFADRRIKASPSQLSAALRGRVTKQHRFLLRLHLKQIDALEAAIAEIDQQVEADIAPFRAAVKQLSSIPGVKALAGQVMVSEIGIDMSRFPSDGHLVSWSGICPRNDESAGKRRSTRLRKGAPWLKTTLVQCAWAAVRQKDTYLRAQFYHIRARRGPKKAIIAVAASILTAAYHMLKEGKMYQDLGPNHFQRRNKDQQKHLLVKRLADLGYTVALTPLAG

SEQ ID NO: 328780 - protein, 424 aa, unidentified
MKNCNKQNEKIELVDEKTLVIGVDIGSYDEYARAFTCRKQELSKKPLHFYNTAEGFKTFKDWAVNIMKANGLEKIIVGMEPTSIYWEALATYCKDNGMILVHVNPAAVHKSKELDDNDPSKNDRKDPKVIAGLVADGRYQFPYMPEEEYAELRELSNLRIRTQESLTQCKNRLSRWYSRYFPEFKGAYKNVVSKTAMMILDLYPLPEDIVTLGVEGILQIWRSKKVRGAGERKARKLYEAARNSIGRKEAASIARIEFKSIKEDLDRYQERLDEIEKKADEILPKIKNVDKLFEIKGVGKATVLTFLSEIGEISRFDNPKEIQKLAGYAIVTNESCKHQGEKRISYRGRKRLRWVLYQTALSVIAKNAEFRQIHAYYTTRANNPLKGIQSVVAVACKMIRIFYKILTDGVSYDGTKMTQDIVHA

SEQ ID NO: 328781 - protein, 340 aa, unidentified
MKNGLKLLGIDIGKNSFHLIGHDAGGHQVLRKCFNRNRLLQFAAQIEPCTIAMESCGGSHWLARKLASLGHRVKLIAPQHVKPYVTGNKNDFIDAEAICEAASRPRTHYVAVKTVEQQVLSVQHRLRESLVCHRTEAINRVHGFLLEFGIALPATKAAIAKVPELIDDSRSDLPLQFKRVMEHLLEDIHRLDTEIKACDAQIKQQLAQDDAGTRLMTIPGIGPITASAFVADLGDASNFRASRDLSAFLGLVPRQFSTGGRPVLLGISKRGDRHLRTLLVQGSRALMIRIERRDNALGQWVRDLLARKHPNKVACALANKLARIVWAVLRRGSTYNASMI

SEQ ID NO: 328782 - protein, 352 aa, unidentified
MAMTIVENHLLSVTGGIDTHRDFHVAAVVDPNGGLLGVETFDTTTGGYRRLVAWLAAFGDIDLIGVEGTGSYGAGIARHLTGKGIRVVEVDRPNRQARHRAGKTDAVDAIAAARAALSGTATGVPKTRTGPIEAIRVLTVARRSAASEWTAILNQMRHICFTAPDELRQRFQDLTPITLVKTCAALKPRRSDDDIVRFTTLSTLRELGRRALFLREQKKRLDADMKPLIDDIAPGLIAVFGVGYHVAATLLIAAGDNPHRIRSEAAWAHLCGVAPIPASSGKTQRHRLNRGGNRQANSALHKIMVTRMAYDDRTRAYMTKRTKDGKTLGETSRMLKRYIAREIYHHLPTTMT

SEQ ID NO: 328783 - protein, 429 aa, unidentified
MTVQQSTPESDVLVAIDISKFRHDVLIEAPGWRSRKRMVVPNDAGEFRRFAEYLHSLNRPVHIAFEATGDYHRGLAHFLLADGFQLHLVSSLALARTREALHNSWDKNDPKDAQVILHMLRDGVVQHYHDPLAYGVNDFQELSKTYHQISMEKTRTLHRLLTHYVPLYFPEIEPHFHSTRSEWLLRLLNVFPTPASISALPMDEFVQQAWSLVGRKVSKQRLLEDIYRTAQSSVALPVAAGSEAVAMFQLVLQQMRTLCQLRDQIEERADQYLQNNSDYHRLRQIPGIGPIGALTILAEAGDLRRFAHYRQFLKFCGLDLATYQSGRFRGASKISKHGNARLRCVFWMAAQVAVRMKENSFRYKYERYLRDKSADADTKRKACVAVSAKIARVAHSLIKTGADYRPFFEAAAPSGRIRSARAVEATSTS

SEQ ID NO: 328784 - protein, 378 aa, unidentified
MRKIALDLGSRKTAYCEAQDGQVVGRGTVADVRSLEPLLGPEQPEAVVAIEACREAWYVHDLLTGWGNQVVLVDTTRSRRLGIGQHGRKTDRIDAEVLALALERGGIPVAHLLSPHRRELRRRLGVRRALVESRAQMVTTARGLAREQGERLPSCASHHFVSNVRKLQLKTELSTVLEPLLKLLDSINTELESVEEVLAKLCVTEPIISLLATAPGVGPIVAASFVSVLDEAKRFSSAHHVESYLGLVPSEDSSGGKRRLGAISKKGNKYVRALLVQSAWTILRSSERQDPLRLWAEAVAARRGKPVAVVALARRLVGVLWAMWSKGAAYEPARLALATSRGLTSSAQTLQFRADALKKAGKKQSMKRLAAQEVTAST

SEQ ID NO: 328785 - protein, 347 aa, unidentified
MNHYAGLDVSLEETAICVVDSSGQIVKEARAASEPETLIAALREIDLPLERVGLEACSLTAWLHDELHSAGLPAVCIETRHANAAMKTMPNKTDRNDARALAQIMRTGWYRQVHVKSRQCRLWRSLLVARRTVLNEMRSIENVVRAVLREGGLKLGTPSRAAFAERVRDLMAEDASVKPLVDPLLTILVTMLDQFARLTKQVLDIVRREKVCRRLMSVPGVGPITALAFRATIDRPDRFRRSRDVGAHLGLTPARYQSGETDVSGRISRCGDELARTALYEAAHTLLVRSRKWSSLRAWGMKVAKTRGMARARVAVARKLAVILHRMWSDETEFRFGRNPAAALAAA

SEQ ID NO: 328786 - protein, 343 aa, unidentified
MKDSIYDHYIAIDWSIENMAIARMTKKSNKIILIDVPSDIVEMKVYLKKLKGSKILVVEETTTSQWLYTELRDYVDRMVICDPHRNKLLNDGPKTDKIDATKLVHLLKAGLIKEVYHSTDKFLYLRRFVSGYEDLVKAGVRLQNQRYSLLRACGKRGYELAGTKLDSPGDQFAMDCIDRQIEVYKQEKEGYEKEFARLSKDYPEIRHQKSLPGIGPIHAVKIVARVVTPYRFADKGHYLSYIGLIKLERVSGGRSYGRKNSRYCRQLKGVYKTSTWAAIGGNNPINDYYEYLIQEKRYPEHNARHKACRKLAILSLGVFKSAKKYQPYRRGHVKGYQEIKPGL

SEQ ID NO: 328787 - protein, 390 aa, unidentified
MIYVGIDVAKDKHDCFITNSDGEVLYNVFTITNNYEGFDSLYQKIKSVMKAPQTIKVGLEATGHYSYNLLGYLIDKGLPTFVINPLHTNLYRKSLSLRQTKTDKVDARTIAYMLMSDVNLKSYSDSLYHNEELKSLTRYRFDKVKERAKLKTSISRLICILFPELEKLVPSLHMSSIYKMLAEFPSAKHISNAHLTRLTNLLSETSKGHYGKETAIAFRDAARNSIGSNMPAKSLELKHTIKLIQELDSEIDEIENEIKTIMDKINSPILSIPGINYRMGAMIIAEIGSFDRFDSPDKLLAYAGLSPSTYQSGQLDGAYAHMEKRGSRYLRYALYNATKYVCHWDSVFAAYLAKKRAEGKHYNVAISHAAKKLIRVIYHLEKTKQQYIKS

SEQ ID NO: 328788 - protein, 356 aa, unidentified
MTTLEKQNCLYVGIDVHKDTHTAVGVSPFGEKLFEVTIGNYKSDFLALENEVKKHSGILSPFFGLEDVRGYGERLAEHLYQSFPVYHVPSILVDRLRQNATHPEKSDSLDALGVAKVMIQSIDTLLPYTISEEGEKAKQLKEISIDREDLVLERTRLKNQVHTLLYRIFNNEYAKVFKDPFSLKALAHWSKSKPKCDPFLLKTMKRKVKRIRDLHYEITDLEKDMDRLLKENYTIQTASGCGVVLASTIIGEIGDIQRFNSPGALSKYAGCSPRERSSGKKTRHVKTRSGNRRLNCAFHRMALSQISRMGNEKARVYFKRKVSEGKSKSQALVCLRRQMVNIVWNMMKYKTVYRNA

SEQ ID NO: 328789 - protein, 390 aa, unidentified
MDARTVNNLPPAATDHGAVRVLIAIELSKRSWIVAVNTPLSDKISNHMVKGWKELLELIDKIRTRVGRELKQPVEVVSCYEAGYDGFWVHRLLEENGVRNYVIDPASLQVDRRARRVKTDNVDVIKLLRSLMAYLRGEPKVWSVVQVPTIAEEDDRRLHRERDRLINERVQHVNRIKGLCAVHGIYHYEPLRSDRMKRLEQLRTGDERQLPPRVKAEICRELQRLELALQMIKALERERNVMAQGKTPSTYGNAKKVQQLVKIRSIGPEIATVLAGEVFYRQFNNRRQVGSYVGLAPSHFQSGPSSRDQGISKAGNPKARTVMLELAWFWIRYQPNSALTIWFRERVGSAKGRIRRIAIVAVARKLLIALWRYLETGMVPIGAKLKASNQ

SEQ ID NO: 328790 - protein, 419 aa, unidentified
MTDTMTAGDTKTLDQMLVPIDVSKYFHKAMIIGPKGQTLHDPFEIDIYQEGLDKLLSKMKEAKAKCKAKRIIFAMEPTSYYHQVLMEKLGKLGHEIQLINPCMTARVRSLDYDHLKTDDIDLKVLGQAVQLGKGKTFKAKAHNMIKLRTVTRQRIARTKYIKYLKIQIHQHLDALWPGFSNRHERDKALVRNIWESQMAWAILQICPNAGKVAKMRPNELISMFRKHHVRGIGPKKADMIIKHAQTAVTLSQPLSEHKFNLRQDLQLLHHLNSMVSSLENRAVRMLPPEAEFLLSVKGMSPFYAAAFLAEIADIHNFRTPKQLIKYTGLNVSIKNSGLFKSKETHMTKFGNSHLRYAVIMIARNLARCHPDFKAHYEQFRKRGMKHNEAIGCVATKLLKIFFYLLMRGENYSSLKFHNA

SEQ ID NO: 328791 - protein, 352 aa, unidentified
MMLIGVDPHKSTSTATAVEPESNREVASIRIEATLREYRRLLTWAGRWPQRRWAIENAEGLGRHLASWLLARGEQVVDVPTTATARVRQLSRGGGRKNDRIDAAAAACVAALQGDARPLEAEGTTDVLGLLDERRANLSQARVRAVNQLHALLRALLAGGAPRGLSAAAAAALLRTVRPAGAAERVRKQIAGDLVVEIRSLDSRLKANEAAMAELVKSSGSTLTETVGIGPVTAARLIGRSGRPSRFPSSAAFAAYSGVAPVEVASAEHARHRLSRSGDRQLNSALHIVAVTQIRTAGSLGNIYYRTKMAEGKTEREARRCLKRRLADHVWRTMIADEKRQRAKPASDSDAA

SEQ ID NO: 328792 - protein, 350 aa, unidentified
MKVTTIGIDLAKNVFQVHGVDEHAKTVIKKQLKREQMAAFFVNMPACLIGMEACSGAHHWARKLTAMGHTVRLMAPQYVKPYVKSQKNDAADAEAICEAVGRPNMRFVAIKTVAQQSVLALHTVRAGFVSERTALSNRMRGLLAEFGVVIPQGLSKLSSRLPEELEDASNELTGVVRLLMQDLLEQLKTLDALVKKLEKQIKVWSRQDEQACLIEQVPGIGPITASAMVASLGDVKNFEDGRQVSAWLGLVPRQHSSGGKTVLLGITKRGDSYLRTLLIHGARSAILAAQKRKDGPPPWLASLLGRKHPNVAAVALASRNARTVWALLAHKRDYDPKHGLDKRISAALAA

SEQ ID NO: 328793 - protein, 319 aa, unidentified
MAQNDLVVVGIDVSKDKVDACIRRLALRQSCPSSAQGHRRLVAWLRKHQVNKAVMEASGGYERDWAKVLRASSIEVRIVDPKRVRSFAQSAGRLAKNDAIDAEMIAWFAETFSEAPGQTQDAAHEELVALAKARISLVDLKARLQSQNEHAAPRPVQKTRERLLKNLVCEIAKLEAAISAHIKATPHLAERAEIIESVPGLAETTSANLVAGMPELGQVSDEIAVALLGAAPYDDDSGNRRGERHIKGGRRWVRNAVYMPCVGAATLNNPVLKAYYDRLIAKGKKPKVALIACMRKLIVILNTMIARRQKWDPSRYALN

SEQ ID NO: 328794 - protein, 374 aa, unidentified
MSSNVCHQIIYLAIELSSSSWVIAYRVPRNDKAKLHRLEAGDGAGLLAFIAGLRHRLDPPDDASTLVVSCFEAGRDGFWLHRLLTAHGVINHVVEPTSILVTRGARRAKTDRLDAVGLLRVLAAKFAGDPGACRTVVVPSVEEEDAKRPHREREFLVQERVRIENRIAALLATQGVRERPSLRSWDADMRALRTGDGRPLPTHLVAELNRLRRRLSLTLEMIRELDAVREQALEAQHDSASRTVKALCTIRGIGVNFASVLTREVFYRTFDNRRQIASYLGLAPTPFQSGGMDRDRRINRAGNSRARKTLVQLAWLWLRYQPESSHAAWFRDRVGSLQGRIRRITIVALARKLLIAIWRFVTLGLAPEGAIIAA

SEQ ID NO: 328795 - protein, 459 aa, unidentified
MGRHKSQGSVWEGLKVVHPHAAGLDIGSEEIWAAVAPAENQEPVRKFGTFTPDLQALADWLLACGVDTVAMESTGVYWIPVYEILEARGLQVHVVNARHVKNVPGRKSDIQDCQWIQGLHSVGLLRGSFRPAAEIVALRAYLRHRAGLIEHRAAHIQHMQKALQQMNLQLSQVVSDITGMTGLAIIRAIVAGQRDPQQLALLRDRRCKKTVREIAKALTGNYRPEHLFALQQALALYDFYSAQIAACDAEIERQFANLKPASDDLPPLPPSPKPDSHSKNAPTFDARAHLYRITGVDLVAATGLNESTVQTIVAETGTNLDAFPTEKHFSSWLGLAPHNDISGGKRLRSRTLPTNNRAGQAFRMAAQSVSKSPNSAFGAFYRRMKARLGAQQAIVATAHKIARAYYHMLKHRVPFHDMGGEEYERRARQREIHNLQKRAAKLGLSLVQTPTADALAGSF

SEQ ID NO: 328796 - protein, 364 aa, unidentified
MNKCHLNTELSSHEGTRCQFNGSSAIIKLGIDVHQDYYVVVKQEGGTNPKPAQRFQKHVFLHWVAKLKEEGAEVHAVYEACGFGFSLQRQLGDLGIKCYVVCPQKLDERNKRVKTDALDAKALCLKLDRFLQGNRDALALVRTPTEAEEQKRAIHRQREQLVKARKRLEAQGRSLMVNHGMEPVSNWWKPRTFAQLQVPEWIKELLLNTQPILLALQEKIRALTAQLQAAAEPKQPRGLGLLSSVVMDREVGNWDRFKNRRQVGSYTGLCPGEYSSGDTRVQSCVTKHGNPRLRAALVETAWRLVRFQPDYRAVKKWRHLLAKGALTTSAARKKAIVAVARQLAVDLWRIRTGRVSAEELGLIN

SEQ ID NO: 328797 - protein, 367 aa, unidentified
MKKISTTSGKAIRKMHPEKLTIGLDLGDRSSWYCVLDERGELVLEQKLSTTPKGMEEVFGGMPRSRIALETGTHSPWVSRRLSELGHEVIVAHARNVRLIGESRRKDDRLDARTLARLARIDPRLLCPVKHRSAKAQAHLTVIRARAGLVRARTALVNVAHGVTKSYGERLRGCSPRNLNPEKAEGLSPELQVALEPLLQEIESLSARIGEYNERIESIAQEHYPETALLKQVKGVGTLVALTYMLTLEDPHRFQKSRDAGCYAGLQPGRRNSGQSEPQLRISKEGDAYLRGLLVQSAHHILGRFGADSDLRRWGLKLAERGGKNGKKRAIVATARKLAVLLHRLWVSGEVYEPFYSSSRRVLVAAA

SEQ ID NO: 328798 - protein, 400 aa, unidentified
MISVGVDVSKGKSTVCVLKPYGEIVCSPFEVLHVEKELESLDSLLQKLDGEIRVVMEATGIYHFPILSFLQEKGYFVSVVNPYAMKKYAKDNSIRGAKTDRLDSSMIANYGIEKWYKLQKHESDEGTYAELKLLGRRYRYYMELHVKALQELTHILDYVMPGIKKLFNSWDEASGKDKLSDFVERFWHFDLITSMSLDEFADEYLIWAGEKKYHRSRSKAETIYELASGGIPTLSSSTPSTKMLVQEAVTVLRAVNNSLSLILSRMQELAKSLPEYSTVRAMGGVGDVLAPKLIAEIGDVRRLHSAKALIAWAGIDPPPYESGQFVGSKRRITKRGSSTLRKVGYEVMRVLKSHKAPKDDVVYNYILKKESEGKDKKHAKIAGLNKFLRIYYARVMAVYQ

SEQ ID NO: 328799 - protein, 355 aa, unidentified
MDSKKYIGMDVHKESISIAVMNGAGKIVMECIIETKASMILQFIDGLRGDLQVTFEEGTSAAWLYDLLKPHVTKLVVCDPRKNKSMREGNQSDKIDARRLAELLRLDHLTPVYHGEHGLRTLKELVRTYLTVTKDLTRVMSRVKAIYRSWAIPCTGKQVYAQRHRAEWLGKINEPGVHRRAEFYYQQLDALRVVRQEVRRDLLAESKKQKAWKRLCEIPSIGPIRAAVLLGILQTPHRFRTKRPLWNYGGLAIEMHSSADHRKVDGQLQRSRKNVLVRGLNRNCNHDLKNLFKGAAAVASSKPGPFQEFYTALLAKGMRPEMARLTLARKIATIVLIVWKKGVCFDAQHLKPQTA

SEQ ID NO: 328800 - protein, 344 aa, unidentified
MGEVSTIGLDIAKSVFQVHGVDVAGAVVIRKRVSRAKVLEYFGELPPCLVGIEACPSAHHWGRELQALGHTVKLIPPSYVKAYLKRSKNDANDAAAICEAVTRPSMRFVPIKTKEQQTALMLHRTRQLLVRQRTMLSNALRGHLAELGIVSAKGRNGTGELLGIIADGADNRVSPAVRSILEVLARQHSAIGIEIASIDKGIMALHRGCEASRRLAEIPGIGPVGATALVAEIGDWKTFSSGRSLAAWIGLVPKQHTTGGKDRLGSITKQGNRYLRWLLVVGAMAVIRYARKHGTEKRPWLGRLMERRPTKVAAVALANKIARMAWAIMVRGERYKEPKLSLAA

SEQ ID NO: 328801 - protein, 397 aa, unidentified
MIAVGIDVSKSKSTVAILNGDGSIRAKPFDVHHVADELQALVDYIKRTSEPPTILMEPTSHYHYPLLKAFTEAELPVCLINPYQMKKYGDTELRKAKTDKRDSLRIAQYALEKSYSLIPYTPQDQKYEDLRFLSRQYSQRISTLTVAKVQLLSLLDETMPGITTILPLKSRDPDNCVLLRFIKRFKSFDVIRKMGKTRFLDSYQVLVKKTKDRFAGSKGLAIYELVLNSVTTRGENPLSAMTQDQCVDLVSTSQKAADEINLQMRIIAETMPEYKVLRSMAGVGNRLGPIILGEIGDIRRFHSGKALNAYAVNDAPPYQSGQFESRNRHISKRGNPALRKACFEVMQALKLTKPQDDPVYLFLLKKEQEGKPYNVAKMAAVNKFLRIYYAHAMELYK

SEQ ID NO: 328802 - protein, 351 aa, unidentified
MREYIAFDSHKRYTWVEREEVESGRLVHQRLAHSPGVIRSYLGQCEQGTAVAVEATGNWYWIVGEIEQAGMRPLLVHPRKAKLMMGMINKTDRLDTHGLNRLQRNGTLPTVWIPPGELRDLRELTRTRLVLGQQRTRLKNRIGATASKYGLPASEASDPFGKGVRAELEQRIALLPPQALWVTQQLLLQLDFVMGQIEQMEQRLGPLVRITPAMQLLKSLPGIGIILAATVALEIGDIGRFLSAEHLASYSGTTPRVHASGGKVRYGPLRKDVNQYLKWAFVEAANSVAVNHLRCPERHVSQLYQRLRERKGHSKAIGAVARHLAESAFYVLQSQQPYRDPALKAGCAREV

SEQ ID NO: 328803 - protein, 361 aa, unidentified
MRIIGCDLHARQQSVAMLDTETGEVLNRTLMHEGKEVREFYSQLPRPVLVGIEAIGPMQWFLQLLDELGIECRVGDATKIRAAEPRKQKHDRRDAELILKLLVENRFPAIWRPSQELLDLRALLLHRHHWVRLRTQVQNALQAIALVNGLRRGPSLWSYDGQAKIAFLPLPPHASYRRSMLQTLYRKMEEEIEQLSAQVAEQAEQRAGARLLMTHPGVGPITALATDVFLGDPQRFADAKALASYVGLIPREYSSGAHQRLGALTKQGSPFLRFLWNEAAAHAVRRDPDLKRFYRRKLVQKGLGKSRAAAARKLGIRLWIMLRDQIDYEEFCRRGQKQQSSAACAGMLEVGNGANRHRPVG

SEQ ID NO: 328804 - protein, 354 aa, unidentified
MPKTAITQIAVIGIDIGKNSFHVVGLDRRGAIVLRQKWSRSQVGERLANMPPCLIGMEACVGAHHLSRKLNVLGHDARLMPAKYVRPYSKGQKNDFRDAEAIAEAVQRPTMKFVPTKTVEQLDLQAMHRVRERLVSQRTGVINQIRAFLLERGIAVRQGRQFLRTELPTVLAARSDVLSTRMLHMIEGLARDWRQMDERIDKLSSEIEMLAHEDAGAERLMSVPGIGPIISSAMVAAIGTGATFSKGRDFAAWLGLVPKQISTGDRTILGSISRRGNRYLRALFVQAAWVVLVRVKNWERYGLKSWIEAAKKRLHHNVLAIALANKLARIAWAVLARGSNFEMRRSNELSTQPA

SEQ ID NO: 328805 - protein, 464 aa, unidentified
MGKNKKQKHKSKQHQKVNTSHLEQLNINAAGIDIGAKFHYVAVPNGRDPEGQDVRHFSTFTADLHELTDWLRQCNIDTVAMESTGIYWIPVFEILDSQGFDVRLVNPRNVKNAPGRKSDVLDCQWIQQLHTYGLLQSAFRPKDQICKLRAYLRQRRMLISYASHHTQHMQKALEQMNIKLTQVLSNITCVTGMKIIRAIISGERNPVKLAKMRDERCRNSESVIAKALEGNWRSEHIFALQQAVELYDFYKKQIIECESRIQDHLDSFEDRSNGTPLEKPRRKSSRSSNQFHFDARRYLYQITGVDLTRIEGIEASTALDIIGEIGIDMSFWPTEKHFTSWLGLCPGSKVSGGKVLSSKTKPSANRAAHAFRLAAYSLQRSKSAIGAFLRRKKAQKGAPKAITATAHKIARIFYNMLKHGTEYIDLGQEYYEQRYQDRVISNLKRKAKQFGFELVNIKEHALLT

SEQ ID NO: 328806 - protein, 419 aa, unidentified
MSYKEGILIYCGIDWAERTHDVALVDDSGQLLAKRHITDDAAGYKMLLDLLVEYGDSQENPIPVAIETSRGLLVAVLRTGKRQVFAINPMAAARYRDRHSVSRKKSDPGDALVLANILRTDMHAHRPLPNDSDLGRAVTVLARAQQDALWNRQQLSNQLRSLLREYYPAALAAFEPWRNGLCRPEARELLKVAPTPARAARLTRTQLEAALKRAGRKRSITVEAERLRAVFRDDYAHQPPLVEDALGKQMLALLVQLEAACTAADDLAEAVEEAFPQHPDAEIILSFPGLGVQLGARMLAEIGDDKTRFTDARGLKSYAGASPITRASGKKSTVTRRWVKNNRLNHAGYLWAFASLTASPGAKAHYRRRRDEHGDWHAAAQRNLFNRMLGQLYHCLQHGRRFDEAVAFPAPASAVARVA

SEQ ID NO: 328807 - protein, 507 aa, unidentified
MIADRAERPVESTITKVTLMAKGKRSTFERLWSGKGNRKQRKEVIRRLYADDPGLDVVHPHAAGIDVGNKSHFVAVRPDRDAEPVREFGSWTADLHRMADWLAARGVKQVAMQSTGVYWIAVYDVLQARGFAVCLTNARDTKNLPGRKSDVQESQWLLKLHTYGLLRNSFRPPEEIRSLRTLWRLRSRHVQDAGREIQHMQKALTTMNVQLANVISDVSGVTGQAIIRAILQGERDPHQLAALRHYRIQASAEEIARSLEGHWQEDVLFELRQAVERYDFCQQQIAACDQRLAQNLGVLPSRTIAEVEPAAAAPATHRPAEGKREHKRKRGRGKPRKNEPQFDLQEELQRICGVNLPTIDGVDVMTTQTWVSELGTDMRPWPTEDHLVSWLNLSPKRQISGGKLIKHERNKAKNRVAEALRMAASTLRESDSYLGARFRSLRGRLGPGKAIKAMAAHLARLIYRMLTRGQDWVDHGAEVYQKRREERERRALERKAGALGLRLVPSE

SEQ ID NO: 328808 - protein, 352 aa, unidentified
MERYVGVDAHARSCTLVVMSATGQHLRSLVVETNGDALVRAVQGIGGRVHVCLEEGTQSAWLYELLKPHVAEIVVSMPPEKRGAKSDERDAWTRANELRTGTIETRVYKAPRQLAALRCAVRAYDFAVTDVARAKNRLKSVFLSRGVRAESGVYDPARREEWLAQLPLAYQRLASWTCREIDELLPLREEAESWLLAEAKTHPIIRKLSTVPGMGPIRSAHVVAIGGTPDRFRTRRQFWSYAGLGIITRTSAEWGQERGGEWLRSPKVQTRGLSRRRQPRLKAVFKGAATTVISQLPEHPLHADYQRSLRSGTKPPLARLTLARKIAAIVLSMWRHQEVYNPKRRRLAVPRP

SEQ ID NO: 328809 - protein, 321 aa, unidentified
MQPVTVTVYAGVDVAKASLQLHLQGRQTEFPNQPAGLAKLRQQLQTIPHVHVVCEATGGYERPLVQALHRAQIPVSVTNPAQVRAAAQAQGQRAKTDRIDAALLTDYGQRYQPKPTPPTSTSQDQLVALTQWLTQLVQAQALAKTQAEHHEAAFVCKQHTKLMAHFQSQIEAVEKQIRALLEQDAVLQQRVDCLDQIIGVGPRTAWLVLAHMPELGQINRQEVAALAGLAPWTRESGTMKGMRCIGGGRPEVRLALYMAALSAARFNPVLQPFYQRLRAKEKPGKVALTAVMRRLLVYMNHQLKALAATQAATKPKNAKIQ

SEQ ID NO: 328810 - protein, 297 aa, unidentified
MLVTVGVDTHTDVHVAAVLDPAGRLLETRAFPATTRGCAQLATWAGSFGQVDKVGMEGTGSFGAGLLRFLAGYGLAVIEVDRPDRADRRRNGKPDPLDAESAGRAVQSGRATGTPKSRDARVEMIRVLRVARRGAMKARIQAGAQLDALIVTAPEPVRAPLRKLTSKQRIRACAALRPGPVSDPASAVKTALRALARRWQALQAEIDDLDAQLTPLVTSVAPDLLALPGVGVETAGQLLVTAGDYRDRLRSEASFARLCGAAPIPVSSGRTDRHRLHRGGDRQANSALWRIALVRMS

SEQ ID NO: 328811 - protein, 381 aa, unidentified
MNATTVAVDLAKQVFAVCVGDAHGHGGKTTVFKRAEFLAWLKTLPAGTPVAMEACGTAHYWARTLLALGLVPRIMAAEFVKPYRKNQRVKNDSRDAEAILAALHAPGMRFVTPKTEAQQQRLCWHRLREGYKEERKALLNRIRGLLAELGYLAELGVAKLRRTLAQMLTPDEDGALAPEPLREMIQGVLAQLTALDARIEECSAHIARQSRIDPSVAALQKCPSIGPLIADALVATVGDARHFKNGRQFAASLGITPSQNSSGGKNRLGKITRRGDSYLRGLLIHAAGAVLNAAIRKHTAQPEKLSRLQQWMIGVYQRAGYAKAKVAIANKHARQAWAMLARGEAYNSEAWQAWQAAHGEVQAADHPQDDLPTAALAVASV

SEQ ID NO: 328812 - protein, 387 aa, unidentified
MQRNDLSRSLVAFDQNSTLVSVIELSLKSWLVAGLVPGVERSPLKKQGADPDMLLALLHRWRAEAIKAGRQVERIVVAFEAGRDGFWLARWLRARGIEAYVIHPTSIPVSREHRRAKSDRLDTQLLMRSVLGWLRGEVKHCRMVAIPTLAEEDARRPNREHEMLVKERSRIINRMKATMVRLGIRSFNIKLRKAADKLAGLRTPEGVALPANTLDELRRDLARLHLIREQLGAIEKARLARLKGAPQEGAHPMLLMLAKVLGIGVETADMLVHEVLSRDLRDDRAVGRYGGMTGAPDESGSKRGEKGLAKGGNARVRRGMIQLAWRWLMFQKGSALAQWYRTRTAGARGDVRKTMIVALARKLLIALWRYVRTGEVPAGAKLRPAAI

SEQ ID NO: 328813 - protein, 762 aa, unidentified
MADWSAALTDWLKPFVEKLGHKKRRQMCPLYVAGLIGPGERKSIEPMAARMAPDRYDRLHHFISDGLWDSAPLEAELAKQADRLIGASDAFLVIDDTSLPKKGEHSVGVAPQYASMLGKRANCQTLVSLTLARQDVPIAVGLRLFLPESWTSDPLRMARAGVPEPFRRPLTKPEIALEEIDRLTAQGVRFGAVLADAGYGLSAAFRQGLSARGLVWAVGVPKHQKVYPAGVSVIFPVAGRGRPRKNQIPDQLSVGAETMLAEAKWRKVSWRRGVKGPLSARFAAARIRIADGPPQRILDKGQQHMPGEEAWLIGEWRSSGERKYYLSNLPAKTSLKTLATAIKARWVCEQAHQQKLWGRQRCWHYRRWKQTMESPMPQLNDLSRSLTTLVQDQTLIAVIELSESSWLVGGAVPGVERQPLKKLTPDEKELLRLLHRWRDEAVKSGRTITRIAVAYEAGRDGFWLARWLRMHEIEAHVIHSSSVAVSREHKRAKTDRLDNAMLLRVFMGWLRGERGHCGMVAVPTAEEEDAKRPHRERESLVGERTRIVNRMKGALARLGIRGFKPELRKSPQRLDGLRTPEDLPIPSNSLDEFRRDLARLEMLREQIATIEQARLERLKQAPATGAHAMVRLLAGILGLGVETADMLVQEVLSRNLRDRRAVARYAGLTGSPDESGSKRREKGLAKSGNARVRRGLIQLAWRFLLFQKESVLAQWFRARTEGVKGARKKTMIVALARKLLIALWRMVTIGEVPQGVVLRPAA

SEQ ID NO: 328814 - protein, 458 aa, unidentified
MRKQPRRSPKVAVTPTLRRHNPAAAGLDIGAEEIWACVPADRDAHPVRAFGTFTADLLALADWLAQCQVTTVAMESTGVYWIPIYEVLEARGFEVALVNARHLKHVPGRKSDVQDCQWIQQLHSYGLLTASFRPAEDMRVLRAYLRQRAMLVEHRAGHIQHMQKALQQMNVQLTQVLSDISGTTGVQIIRAIVAGERDPQVLARLRHGRCQRSEAEIAKALSGHYRPEHVFALKQALALYDFYTTQVQECDTYLEQHYAAIKPTYDEQTPPSPLGPDPKPNSHAKNAPTFDVRACLYRILGVDLTATDGLEASSAQVIVAEIGTDMSKWPTEKHFASWLGLAPHNDISGGKVLRSQPLKGNRRAAQALRLAAQTLGRTPTALGSYYRRMRARKGPTQAITATAHKLARMLYHVLKHRTPYQPQSQETYEQHLRQRAIRHLKRSATRLGFTLVPQPVAA

SEQ ID NO: 328815 - protein, 360 aa, unidentified
MIVQGTSVGLDVHALSVVAHAVDEETGKVARARLCPDHGEVLGWLHQLRAPVRVTYEAGPTGFGLARAITGAGMECLVAAPSKLQRPAGDRVKTDARDAAHLARLLRLGEITAVRVPEREIEAVRDLVRAREDARADLMRVRHRLSKLLLRQGIVYSGGTPWTCVHEEWLRRHRFDDIHLKAAFDHSFDAVLAATAARDRLDEQIMVVAASPRFADPVNRLGCLRGISALTGLALTVEIGDWSRCSGSSIGAYVGLVPCEYSSGNSRVQGSITKAGNTHVRRLLIESAWHHRKSYSTSGPTLRARWAKVDPALRARGHAGNRRLNKRWRSFTERGKNPLVANVAIARELAGWCWSLATMH

SEQ ID NO: 328816 - protein, 392 aa, unidentified
MFFIGIDVAKRSHQAAVTDISGNVIVKPFNFKNSSDGFTKFLSIVESNAIEKNDCTIGLESTGHYWYPLYFFLIENGFDVKVFNPIQTAAFREITIRKVKNDNLDSLLIADFTRFGRYSETYIPDENMLALKNLTRFRLSISDICGSLKKKVIAILDQVFPEYTGVFSDVFGKTSKQLLEQFSTPDEFMDISTTKLTNLLLKVSRGRNGREKAELIKTAAQSSIGISYALDAFSFELKQLLAQIEFMENQLSDVDAEMEKLLSQSEYAVITTISGIGPMLGSVIVSEIGDIERFETSSKLVAYAGLDASVKQSGEFNSSRNKISKRGSPYLRRALWMAAFMSLQCDPALYDYYSRLRARGKSHRLATTAVARKLCIIVWAIMKSKQPYSPHI

SEQ ID NO: 328817 - protein, 474 aa, unidentified
MLPENVKQKLSSMKLYLGGDVSKGYADWVILSEKKQAVLDNFQLDDTYAGHCKLYAMLEAYFGKHRDLEIYAAVESTGGYENNWFSTLKSYQKVFNLKVARVNPTGVNFNRRAGLKRNVTDAISALSIAEYLINHPDNIKYDQDDQWKSLCRHWNFVEMQKHQRVQTINQLETILYSANPTLMRFKKDNLPNWLLELIIQCPTADTLAKARPEKLAKIPYLSLARAKTLVAEAKQSIASATDKNAEILVSQIARQIKSFDQNIKSQMQLIERDLTCPEIELLKTFKGIDTISAIGLLLEIETIERFPTVKGFSCYYGLHPKFKQSGDKIIGVRMSKQGSKNMRKILFNIAKGAITYNPLITAVYEKKLSHGMKKMAAIGVCMHKILRIIYGMLKNKQAYNPLIDKENCERSKDKQQEKQQQENANIDKSRRYQEFDVKAPISRKQTKKRREHDLSQCEITSQSTGSTCSSETKL

SEQ ID NO: 328818 - protein, 317 aa, unidentified
MRKHTTVCAGIDTGKRKLDVALAQCPHRLQVDNNCDGHTALSAWLRKHRVKRVGIEASGGYEQTVVARLRRDGFVVIVFQPAQVRAYAKFHLQRAKNDRIDAALIAVCTAATQIVRAPPDPRLEPFAEHLTLVEQLTEDIAHVKTRRETCRDHRIRRYWDGEIVRLKKLLQIELKALIAAIRQHRDLSARLDLIASVGGIGPKTAVAILVRMPEIGRITREQAAALAGLAPYDDDSGDHSGARHIDGGRERLRKSLYAAALAAAFHWNPQLNVIYRRLIAAGKPHKVALVACARKLLIYANTVVERGTPWTNRPVEI

SEQ ID NO: 328819 - protein, 373 aa, unidentified
MSDYDAYIGLDVHKDSISVAFAEAGRLGEVRLIGTIANEPDAISKLVRKLGDRHGLLEFAYEAGPCGYNVFRQIEGLGFACRVVAPSHTPVRPGNRQKNDTRDAVMLARLLRAGELTSVWVPDPVHEAMRDLVRARSVASHDARKARTLVQLFLLKHDLRYPAKSWTSRHRTWLRNRQFSHQAQQIAFQSYLNRLEQAEARKKELEEQIALVSQTWSLGHTVSNLQAFKGVGLVIAATLVAEVGMFSRFDNPRKLMAYLGLVPGEHSSGGSIRSRGITKTGNSALRALLFEAAWCYRGSVKVGNWMHKRRPEIPQPIIDIAWKAQVRLNTRYRKLVGSGKKSNVAITAIARELLGFLWDVACRTEAATASTTA

SEQ ID NO: 328820 - protein, 317 aa, unidentified
MNNTEIQTPVNVGVDVGKANLDIALHPSGQLYTIPNTEAHIRRFVRILKNYEIERVVVEATGRYEHALVQACNQAGLPIIVVNPISVRRYAQAIGVLAKTDRIDAQVIAQYAATLKPEFKPIPNKTSQKIKDLLVRRSQLLEMSTMEKNRLQILPKSLHRSIKSMLRMLQNQIETVTRQIEQEVTKVDQWRTKMEIMTSVPGVGKVLAYTFLSELPELGSLNRKEIAALVGVAPINRDSGKLNGKRRIRGGRHRVRTVMFMAMLSSIQCNPVFKRFYERLKAQGKIPKVALIACMRKMIVVLNTMIKNQESWRGEMA

SEQ ID NO: 328821 - protein, 359 aa, unidentified
MNKLTKIEEFFNNVNLTADDELFVGIDVHKRSYHVALYLNDAPAVDFVMPVKKEILSQKLITTTSALKQIAYETGPSGYSLARYLHQNSLPVVVAATSRIPRPSGGDDKTDKLDSRKLVQYAAKGLLKPVAVPTLKQEADRQLYRMRHRQRRNLAKVKTQIKSFLMMHDIAEPNGLTTWSKNSIEQLRTLRLRKTLRLSLDELIGDLDYYSLRVKTLDRLLAEHLNKALLGRRMALLKTHPGVGTVVSCQFTTELFHYRDFNSTREVFKYLGLSPKIHQSGDRSVRGSINKAANSRVRSNLIQAAWRWVAVDIKAKKTYMRLLNNCGGIKQKAIIAMARNLSGHLWTMLIKGQPYDPTK

SEQ ID NO: 328822 - protein, 368 aa, unidentified
MGAALQADGEYEVRVYGLKHQKEKRSMDHFAGLDVSVKETSVCIVDDTGKIVREVKVASEPEALLAVLKNPAYHFKRIGLEAGPLSQWLCSALAEAELPVVCVETRHMQAVLKAQINKTDRNDARGIAQMMRVGLYRPVHVKTFRSQKLRMLLTHRKLLQSKAIAIENDLRGTLRNFGLKVGMVGKAKFEARIKELVENLPDLAILIEPLLIVRRALREQVVILHRRLLAIVRDDAVCRRLMTTPGVGPVVALTYRATVDVPARFRKSKSVGAVFGLTCAKYQSGEIDRSGRISRCGDEMMRVMLYEAAQSMLRSKKWSWLKAWAMQIARRRGMKKAIVALARRLAVIMHRIWVDGTEFRWTREAAAA

SEQ ID NO: 328823 - protein, 392 aa, unidentified
MSQHFRFDASRSLTALEQDSTIVAVIEMSQTKWLVAALVPGVERQPLKKFDAQEEMLLKLLHRWRCEAGKIGRNIKRIVVAFEAGRDGFWLARWLRARDVEAYVIHPTSIAVSREHRRAKTDRLDTELLMRVFLGWLRGEKRHCSMVAIPTIEEEDARRPNRERQNLVTEQTRIINQIKAIFTRFGIRTLRPTMRKLAEGLEDLRTAEGTSLPQNTLSELRRHLARLRFVRDQIRAVEQERLRKLAVAPAAETKSPDAMVRLIARVFGAGIETADMLVNEIFSRHWRDRKAVARYAGLTGSPDESGSRRRERGLARAGNVRVRCGMIQLAWRFVRFQKNSALAQWFAARTADGRASTRKTMIVALARKLLIALWRLVTRGEVPQGIVLRPAS

SEQ ID NO: 328824 - protein, 335 aa, unidentified
MNQARMHVGVDVGKDSLDICYPNGDKEHIRNTKRCRATLIKKARTLGAVISFEATGPYGEALESECVASGVPAVRLDAWKTRKYAESQGMLEKTDSIDSEMIRDYAASLRPDQLHFVRERSAGYRKLKRAVSVRRNLLKAKALIASQLEGDLDAEIKSAIARAVASIDRQVERMDAVCVAAIRSDERMGAIAARFGQVVGIGPVLISTALASCPDIGSFTSKGIAKFAGVAPLENRSCTITKKPRPRRGRRDLRCALYMAAVSACRSNHRLRRTYEGLVARGIPKRAALIALARHIIILMNYIAKYPDFKPEVDPKKAAQMALPKRRPGRPRKNP

SEQ ID NO: 328825 - protein, 360 aa, unidentified
MTKQVMAGIDLHSNNLMIGIVDQSGKRLKHQKVDCDLKQVAAVLEPYKARLKSVAVESTYNWYWLVDGLRALSYPVVLANPAGIEQYSGIKCADDKNDAYFLAELQRLDILPTGYIYDAKLRPVRDLLRRRLSLVHQRSALMVSFKSLYTRTTGQAMNLSKLKSLEPSQAAALYEHPANQLIARIQKEHIEGLDKSIARIEKTVLQSARELSYYEKLNTLPGVGKILGMTITMEVGAIERFKTPGDFASYCRAVDSKRTSNEKNKGRNNRKCGNKYLSWAFVEAANFAKRYDETCRRWFDRKMARTNTVIATKALACKLAKVAWHVMVENKDYERGRMFPQECGRAAVSQVNGLAKTPGD

SEQ ID NO: 328826 - protein, 350 aa, unidentified
MIVIGCDYHPGFQQIAYVNTDTGELSEARLGHKEQAEQFYREFSRRGVTVRLGMEASGHARWFERLLSELQFELWIGDAAEIRTKRVRKQKTDRQDAQLLLRLLLKNRFPRIWVPDAENRDLRQLLWHRHRLVQMRTRVMNQLHVVALNEGLRRKKALWRPAGRAELEGLSLAPWASRRRQDLLDLLDRLTPKIQELTGKLEQIVERRPVTRQLSTHPGVGPLTALAFELVIGTPERFACAKQIASYVGLVPAEESSGDRRRLGHISKQGNALLRFLLVEAAQVTVHSDPQWRSHFFHLAMRRGRKIAKVAMVRKLAVALYWMWRRGWDYEKMQQLGSHAGEPGNRHGVQ

SEQ ID NO: 328827 - protein, 421 aa, unidentified
MKGLRTKRIRTVREGALMATVDIGMASNTGYCITADGRDTKPFKFSNTREGLDKFWDMITISKKRFCCNEVIVGYESTGPYAEPLLHYMMSKPVKIVQVNPMHTKRMKEVNDNSPLKTDDKDPRVIADIIRLGHALTVVVPEGDAAYLRRLNNARERHIGERTALFNQLQQLVFLIFPELKTVMKNIKVKTAIHVLKKYTTPDTLGKLSIEALGEEMRKKSYGKFGIKDAEALINHAKNTVGIKEGIAGLVLDIRHILMQLEMIDGFIAEIEAEMVAILLRIPYSARLLSIKGLGTVSVAGIIGEVGDFMKFGTQSEIMKLAGLDLYEISSGKRRGERRISKRGRSLLRKILYYTAIQTIRKNGIMYEYYVNLTSRGMKRIMALVAIARKLLRIIYAIVRDDSEYKADYGLLKRKVIKKAA

SEQ ID NO: 328828 - protein, 343 aa, unidentified
MEHYAGIDVSLESASVCVVDATGRIVREAKVASEPEVLTAWFRGLGISLSRIGLEAGPLSQWLYAGMQEAGLPVELLETRHVRDAFKAMPVKTDRKDARGIAQLIRLGWFRPVHCKSLPAQETRALLTARKLVQSKRHDLEMSVRGILRGFGLKVGATTPRTFEGRMRELVRGHPTLLTVMEALLTARAALGEQLQRLEKRVRSLARDDQRARLLMSAPGVGAIVALTYVAAIDDPGRFRSSKNVGAHFGLTPNKYQSGEADVTGRISKIGDAGVRTALYEAANVILTRPVRGSSLKSWAARLAVRAGMRRAKVALARKLAVVLHRMLADGTSFLATRAAAMA

SEQ ID NO: 328829 - protein, 432 aa, unidentified
MNPFSVSPEPSPVAAWVGLDWADQQHVICLYEVATGQSTVSRLEQKPEALQDWLSQLRQRFGGSPVAIVLEQARGAVIYALLSADFVRLYPVNPQSLASYRKAYAPSGAKSDPADAVLLMEMVRNSPERFRAWKPDDADTRSLQLLTQNRRQLVDQKTALTHQLTSLLKTYYPQALELPGVLDSLQACDFLTQWPTLEALQHARPGQIRQLYREHGHPSPEQLDRRLEQIREARPLTTDPAALLSGSMMVQALVQQLRPLLGAIERFDRQIAVLFGKHPDRPLFDSLPGAGAVLAPRLVAAFGTDRDRFQSAQQAQQLFGIAPVTEQSGRQRWVHWRWACPKFLRQTFHEFAGHSRHWCGWAKALYHRLRRCGKGHHAALRVLAFKWIRILFHCWKTRTGYDEQIYLKSLQKRNPTLWAEIQLLPPRKKKVA

SEQ ID NO: 328830 - protein, 342 aa, unidentified
MTITIGIDPHKGSHTAVAVDSNEHVLDEIRVRSCSTQTVRLREWADRFEERTWAVESAHGLGYLLAQQLVAAGEDVVDVPPVRASRVRVLGSGKSQKNDPNDARSIAIAALRADDLATVCADDHGQVLKLLSKRHRDLGRLKNKASCRLHALLLEMVPGGAGFRITTVTRINAVIDEFEPTDAMGRQRQDIARDLAGDIDRYNDLLDSSKQRIQAAVAASGTSLTTISGIGPITAAMIIGQAGNINRFKSKHHFASYNATAPVEASSGSKVRHRLNQRGNRQLNWALHVIAISQLRHDTLGRQYFDRKVAEGKTTKEAIRSLKRRISDVVYCHLASDARQQR

SEQ ID NO: 328831 - protein, 406 aa, unidentified
MTKRKTGDHPDLKMVNPQAAAIDIGSTMHMAAVNPDADIMPVRAFGTFTKDLHDLADWFQSCGVTSVAMESTGVYWIPAFEILEAHGFEVILVNARYAKNVPGRKTDVSDAGWLRQLHSYGLLRGSFRPEAEIATLRAYMRQRERLTEYAAAHIQHMQKALMEMNLQLHHVVSDITGATGMRIIRAIVGGERDPEVLAAFRDIRCKSSMDTIKAALVGNDREEHVFTLTQSLELYDFYKAQIETCDRKLEAAVAALTVRAEGDLAPLPKARIKGRQHNAPSFDVRAALYGVLGTDLTQIHGLGPSLALKLVAECGTDLRAWKSAKHFTSWLCLTRSLGASCCPRGRAGPQVARPLSCAWQPLRLAKAIRPWARFTADCHHALASRRRLRRRRARLRSCSTMPFAMA

SEQ ID NO: 328832 - protein, 321 aa, unidentified
MSAYLGLDISKLTIDACLLDDRGEHVKKIANNPKGFVQLTRWLENRKVKSVHVCMEATGSYYEGVAEHLSDAGILVSVVNPSQIKAFSQTLLMRAKTDAVDAHLIADFCRKHEPSAWIAPTADERKLRGLVRFCGKLKETRASYLVQRETPNLVPEVEQSITEVIASLDEQIDKVESEINDFIDGDSDLRRRRDLLCSIQGIGKTTAATILVETPRLEEFTDSKAVSAYAGLSPKTRTSGTSVRGSGAICKTGNARLRKALWWPAIAAIKHNPRLAAFAARLTALGKPNKKIIIAAMRKLLVLAYGVLKSGRPFDGALTPS

SEQ ID NO: 328833 - protein, 394 aa, unidentified
MIYVGIDVASTKHDIVILNESGELFKKAFSIKNDLDGYKKLLSEISSAKEFFNDLNVRIGLESTGHYSRNMLHFLILARFEVMFINPLLTNMDRKALSVRKTKTDAIDAKAICMFLIRNQHDFKPYTLSSYHIDELKTLVRQRKSLKTQINKEMNLLHAYVIQAFPEYDKIFKKINSKASMEVLSRYASLSEFKRVRLETLKELIRKSSKGHHGQIEAQMIKELPLSSVGIDSSALSFSIKQTIERILMIDDQVHDIEREIVHHVDDSKTTLLSVPGVGYTTGAIILAEIGDIHRFKTDDQLLAFAGLDPSVYQSGNFEGSYKISKRGSSILRWAIYQAAQAAVKFDPVFKAYYLKKKSEGKRHRVIIGHVTKKLLRVIRSILKNNTTYSLNTH

SEQ ID NO: 328834 - protein, 338 aa, unidentified
MNTYYIGADVHCNKTELAVESKNKIIQRFSVPTTIPAISEVLKSLPGKKHLTFEEGPMAGWLYRNLTDIADTIIVCDPRRNKLIASDGDKDDKIDAAKLACLLRGKYLRCVYHSTDDKIVELKRWDGLYLDRVKQATACINKIRSQARMYGIRIPRQALRDVQYRQEWLCSLSIDSVVQRLQILWIGYDASAQQAKMSKQQLSKLAGRYPIIRYWGKLAGVGLIRATTILAYLDTPWRFKKKNKLWKYCGVGLVRQVSGSRAGRLKMNWSSNKRLKNAVMGAAISAIRHKDNIFRHYYERIVKDGITLGNARHAVARKLLTVMWGMWKNMSRFDESLC

SEQ ID NO: 328835 - protein, 344 aa, unidentified
MTYYAALDVSLRSVAVCIIDDQGKYHFERKIPSEVEDIVQCLEAFDGEIDRIGFEAGMLTQYLHYGLTAAGYQVVCLETHHVKESLKAMRNKTDKNDARGIAQLLRTGWYQAVHVKSLQSHEIRALLASRRVILRKCVDLENELRGLLRIFGTKLPSRLAHGIFEDEVRAPIEADPALRRALLPMLELRGMLYQAFLKLDTQVRAMAREDAVCQRLMSAPGVGPVTALTFKAAVDDPTRFKNSRNVAAHFGLTPKREQSGEVDYDGRISRKGDTQVRCALFLAAHAVLTREKQWSSLKAWGVKLAKTKGHRKATIAVARKLAVILHRMWIDDTDFQWRSEDRAA

SEQ ID NO: 328836 - protein, 348 aa, unidentified
MQRYIGLDVHATSCSFGVINEQGKKVGQAVVETNGAALVEHIKTIPGRKSLCLEEGTQSAWLYEVLSPHVDQVVVTRVEQKSAGNKDDIPDAFRLAEMLRLGNVLPVFKEKGRFGKLRAQSDLYSKMSSDSVRVQCRLKALFRSRGVPTPDADVFAPEQREQWLKKLPAAYRPAAEVMYRQYDSACRAKQEAAELLKKESHLHPISRMLETAPGMGPLRVAQLMAIVVTPYRFRTSRQLWSYSGLAVEMRSSSDWIRTEQGWQRVNLDKTRGLNRSYNRTAKYIFKGAATSVLQHRMQPLYNGYLRQLEQGTKPPMAKLTLSRRIAATLLAMWKNKEVYDPAKYRCET

SEQ ID NO: 328837 - protein, 417 aa, unidentified
MEVLYSRCAGLDVHKDTVVACVRVASEGKVSREMRTFDTTTAGLLALSSWLAESGCTHVAMEATGVYWKPVWHILAADGFALILANAAHVKNVPGRKTDIADAAWLADLLAHGLIRASFVPEPALQEIRTLLRTRKQLGREKTAHVQRLQKTLEDANIKLDSVITNVIGVSGRAMIEALIAGESDPAALARLAHRRLKASPGKLSEALRGRVTPHHRFLLRLHLQQVDAVDTAIAQIDQEVEANLAPFRAAAQNLTAIPGVGALASRIIVSEIGIDMSRFPTAGHLLSWAGLCPRNDESAGKRRSTRLRKGAPWLKTTLVQCAWAAIRKTGSYLQAQFRRLRARRGTKKAICAVAASMLTAAYHMLKDGTEYQDLGASHFDQRSKQSQARRLIKRLQDLGIAVDIKPSHEPPVLVSC

SEQ ID NO: 328838 - protein, 362 aa, unidentified
MLYTGIDLHRRSITLCTLNTEGALVARAQIKTHRQAVLDYFGRWSEPHQAVVECTSNWYWLCDLLRSQDITPVLAHAKYLKAISYAKVKTDAVDAHTLAQLLRLGYVPEAHQLPPEYRAMRDLLRQRMVMEHKRTILMQHAASILAKFNVVDLPCSAADPAFAAFVASCALPEQYAMTVLMFHQQCVQVCEHKRLLESYFKARLRPSITLQLLVSIAGIGDITGAIIATETGDIHRFPDAKHYCSYCRLAPGAKDSGGKHSHRSGSKDGNQYLKYAFTEAAIKAMMYYPDIKRFAARVEHRSNPTIARTVVAKELAKLVYYVLTRQQRCLGFKGSTITKRSDWPRTCKPLRLTGDASLLPTV

SEQ ID NO: 328839 - protein, 344 aa, unidentified
MDHFAGLDVSVKETSICIVDDTGRIMKEVKVASEPQALLKVLGNPAYRFKRIGLEAGPLSQWLFSGLAEAGLPVVCVETRHMQAVLKAQINKTDRNDARGIAQMIRVGLYRPVHVKTLRSQKLRMLLTHRKLLQSKAIAIENDLRGTLRNFGLKVGIVGKVRFEARIQELVENIPDLAVLVEPLLIVRRVLREQIVILHRRLLAIVRDDEVCRRLMTTPGVGPVVALTYRATVDVPARFRKSKSVGAVFGLTCSRYQSGEIDWSGRISRCGDEMMRVMLYEAAQSMMHSKKWSWLKAWAMQIARRRGMKKAIVALARRLAVIMHRIWVDGTEFRWTREKAAAAA

SEQ ID NO: 328840 - protein, 402 aa, unidentified
MNAVGIDVSKGKSMVAIMRPFGEIVSAPFEIKHTASDIHSLVELINSVEGESRIVMEHTGRYYEVLAHQLSKANLFVSAINPKLIKDFDNDSLRKVKSDKADSVKIARYALDKWQNLKQYNVMDELRNQLKTMNRQFGFYMKHKTAMKNNLIGILDQTYPGVNTYFDSPARSDGSQKWVDFASTYWHVDCVRKMSLNAFIDHYQNWCKRKKYNFSQSKAEEIYGKAKELVPVLPKDAITKLIIKQAVNQLNSTSTTVESLRTLMNETASKLPEYPIVMAMKGVGASLGPQLMAEIGDVSRFTHKGAITAFAGVDPGVNESGSYEQKSVPTSKRGSSDLRKTLFQVMDVLIKTHPQDDPVYQFLDKKRAQGKPYYVYMTAGANKFLRIYYGRVKEYLSSLPES

SEQ ID NO: 328841 - protein, 398 aa, unidentified
MKKSTTAKKTRQALTKNDQETIRKKAAKQRLTIGLDLGDRSSRYCILDEAGEVVSENSVPTTKGGLDSLFGKMPSSRVALEVGTHSPWVSRQLAGLGHEVIVANPYKVKLITQSVRKNDRVDAQKLARLARVDPKLLSPIRHRSAEGQADLAVIRARAELVEVRTGLINCVRGLVKPMGERLKPCDADQVKESMAESLSETAQVVVGPLLKSVETIREQIGVYDRKIEEIAQRYPEVELLTQVYGVGTLIGLTYILTIEDAQRFQHSRDVGAFLGIQPKQRDSGDSQPELGISKTGDRLLRSYLVQAAHCMLRKGAPDSDLRAWGLSKAGGGKRAKRRALVGMARKLAVLLHRLWVTGEVYEPLYNRKAAQAAARGKAKAAAKGKAKVAARGKAKVAA

SEQ ID NO: 328842 - protein, 416 aa, unidentified
MFYVGIDIAKRSHVACVMREDNLLEIKPFAFSSSQAGFRKLQMQLLSLACDVSEVFIGMEATGLLFDNLYRFLKALGYRVVLLNPYQTAKFREMDTMKRVKNDNIDAQMIAALIKSGRFSEGYVNDDQLQSLRTLYRHRASLDDQLKAIKRQTQTILAVVFPELEQVISDPFNVTGLALLEKYPTAKHYEYASAKRILKTFRSIKGNNFNEARANRLLTLSKESIYSGAGKEGYTATVRSNIKLMRLLKEQMHALETIMLSLFDAKEATEEEQHEMRELIDNLRTIPGVSDKTILALLAECGNLDRFHSAKALTGYLGLYPTLEQSGDTQKNGRLAKRGARLAKKAIYLAAIAAIRHNDELRQVYRNYRSKGRAKKECIIITARKLLAIIYAIYTHNVPYNPQRVFVASPNLSKRP

SEQ ID NO: 328843 - protein, 350 aa, unidentified
MTISHYIGFDVHKKSVSYCVKTGDGTIVEEGRLRATHEALRQWAGKRPEPWRGATEATLFSGWIYDTLKPFAAKLQMGHPAQMKAIFASKKKNDKLDARKIADMLRADLLPACYVAPTEMRELRRMLRYRNLVVAQAVQMKNRMSGMLMEVGAEYSRRRLHGKQYFSELLDRLEEVPESVKDLLRLSRGSLEMFETVQRQLLDRLRKEPLLGKRVELLRSIRGVGEVTALTWALEVCEPRRFPSIDDAVSYCGLTSALVESAGKQQRGPISKQRNAHLQTVLIEAAKLAPRWNPQLAAVHERELQRGHRNRATLEVARKLVAYLLAVDKSGRPFQIRTPPTTETEAQKVA

SEQ ID NO: 328844 - protein, 353 aa, unidentified
MDKITRVGVDLAKNIMQIHAVDGAGHVVVRKAIARERFMSWFANLEPCLVAMEACSAAHYWARKLRALGHDVRLIPPQFVAPYRKGGVHVKNDALDAEATCEAASRPHMRFVPVKSAAQQSVLVLHRMRTGFVEERTALVNRLRGLLVEFGVFLPQGINQLRKHFVERIEDGNNELAGPARQALMRGWAQWQSLDDEIAWFDRQIAEHASHDPQARRCMDVCGVGRLTASAAVATIVDAQQFKNGRQMAAWLGIVPRQKSSGGKQRLGRITKQGSDYLRTLLFQGARSAVLTAHHRQDRLSCWIVQLRARVGYSKTLVAVANKHARILWAVLAKGERFDPSHAPARTGGAAGA

SEQ ID NO: 328845 - protein, 319 aa, unidentified
MTDQTSAKYVGIDVSKGRLDVAIGEQGEYWDVANDEKGILKLVERLKLVEPALIVLESTGGLEIGALTGLYSAGLKVALVNPGRVREFARSLGLLAKTDKLDARLLARFGEAVKPSETRLPDEQEQHLAGLVGRRRQLLEILVAEQNRLHSTQPSLKGNVEEHIRWLQDALAKLDQEIQEYVRQSELWKSKSNLMRSVPGVGPVTASTLLGELPELGQLDRKKIAALVGVAPFNNDSGYRRGKRRIKGGRSSVRNVLYMAALSASKYNPILRAFYQQMIKRGKEKKVALTACMRKLLTFLNAIIRDSVPWKSALKQVSP

SEQ ID NO: 328846 - protein, 309 aa, unidentified
MGIDVAKATLDIAVRPTAETWRAPNDAPGIDALVMRLGAWAPTLIVLEATGGSQGPLVAALVAAALPVVVVNPRPIRACAQAVGILAKTDRSEARVMAHCAEAVTPAPRPLPDAETQELRALRGRRRQRVAMVSAERARLDTAPPSVQDAIQAHIARLTTPITGLDDPLTHARQTHPAWQAKDDVWQRIPGVGPVLARTRLGQVPAWGPLGAQPLAALSGVAPCNRDRGTRRGRRPVYGGRAEVRAVLSMGALVATRHHPVIKAFYERLLAAGKAKKVALTACMHKLLTIMNAMVRDLKRWQPREVPIA

SEQ ID NO: 328847 - protein, 339 aa, unidentified
MHVTTVGLDLAKNVLQVHGVTTDGDVAVNRALRRGQVRGFFESLPPCRVGIEACGTSHYWAREIARLGHEVRLIPPAYVKPYEKRGKSDAIDAEAICEAVTRPSMRFVAVKSPEQQSVLALHRVRDLLVRQRTQIVNMLRGVLAEFGIVIRQGAGHAIAFARRCLEGAEQDLPDLARDVVTNLGHQLVALHRRVLWYGRRLNRVAAQDARVARLRTIPGVGPVTASAIVATIGDGHQFRNARSFAAWLGLTPLNRSSGGKERLGRISKMGDRYIRRLLVLGMTSRIKQIQHRPDQFDAWFADILDRKPPKLAAVAMANKTARIIWAVLTREQDYQLRAA

SEQ ID NO: 328848 - protein, 344 aa, unidentified
MPEIAHSAVAVVGIDIGKYSFHVVGLDRRGAIVLRQKWSRGQVEARFANMPPCLVGMEACVGAHHLSRQLKALGHDARLMPAKYVRPYSKGQKNDFRDAEAIAEAVQRPTMKFVATKTAEQLDLQALHRVRERLVSQRTGIINQIRAFLLERGIAVRQGQRYLRSALPGILATPTDALSPRMVRIVEDLAGDWRRLDERIEGLSEEIEALACNDCGCERLMTVPGIGPIISSAVVAAIGTGDVFSKGRDFAAWLGLVPRQISTGDRTILGKISKRGNRYLRVLFIQAAWVVLIKPKSWERHGLKAWIEAAKKRLHRNKLARIAWSVLARGRSFEVRSAAATQPV

SEQ ID NO: 328849 - protein, 414 aa, unidentified
MLKIVYPICCGMDVHKSFVVACIATTNERGVTTYKSKRFSAFTGDLHRCAAWLAENNCKNVCMESTGKYWIPVYTILEPTCTIVLAHPKYVKAIRGKKTDKRDAKWIAGIFKHDLVAGSFIPPADIRQLQDLVRYRWKLTSFTTGEKNRVQNCLTVSNFKLDDVFSDVFGKAASAITTRILDNPAEKTTDVSNFRTKGMKATDERVLAAVDGEMCAKQAEKLRIIRTHMGRLELCKLNLESLILTTAEKYLPQLNLVLTAPGIQSFAAIGVISEIGVDMSVFPTSKHLCSWAGLTPQNNESAGKKKTTRISRAGTYIKPLLVQCALCAIRAKQFPEVHNRYLSLKKRRGHKKAIIAITRMLLTAIYNMLKKNEPYGPELYHKGDRSPTHREVSVDEAIFILQRQGYLVTAPPTP

SEQ ID NO: 328850 - protein, 334 aa, unidentified
MKQVNQVGVDVDSEALVCMMKRVGQPLPQATFANTAAGHKKFIRWVTKGARPAQICLEATGIYSLEFALALHEAKNVAVMVVNPRAIKDFGRACMQRAKTDAVDASGILEYLERMPFTAWQPPAPEILELQAINRRIVQLNTELTREKNRRHAVEFAGASANAIGNDIEVNMHHLERRIERMHNSGLNLVRGVPALATKLAHLVSTKGIGEASAMRLLAELLVLPDDLAAPQWVAHAGLDPRPYESGTSVHRPRRISKVGNRHLRAALYMPALVAIQHQPNVKAFYDKLIAAGKKPMQAVVAVMRKLLHAIWGMLKHDQDFDGNKFFNIAAKTA

SEQ ID NO: 328851 - protein, 415 aa, unidentified
MTEQRNKVCGVDIHKKFLIATILSRDGTKMQKRFATVVDDLLNFRDWVIKENCDCVAIESTGVYWYPVHAVLENKVELILANPHQIKHTPGRKTDALDSEWIAEVALNNLIDPSRILPKEDRELRRLTRARESLVKIRSQMKNQVHQGLESCSIKLSSVLSDSFGKSGRHILDGLIKGKSIDKIIDGIPSKRVKKNSDQIQAAIKTGLDQTQVFLIESHLDTIDGLTRKLDEIDLEIKQRTSGRKDNLKIAMSVPGIGFTAATTILAEIGNYRDFSTPDKLAAWCGIVPNVYQSADKLLTGSITKQGSKHIRWILVQVAQAAAKKRGSKLRKFFLRVKSRKGHNVAVVALARKILCILHHLLMNQEIYQEDGIEKSRPAKIDWSSATTDKMSLETMIQIIAKAGYEVRKIERNGG

SEQ ID NO: 328852 - protein, 447 aa, unidentified
MSRGDRNRNARLARLRELVPLSNAIVGIDLADDTQAVVVADHDSRVIARRRVSARAWELGEVLDWALTWATGAGFASVTVACEPTGHRWRVLDQLAAGRGLALVCVQPLLVYRARESEDLTRDKSDPKDAVLIARLASELRCYEPERASAVWARLRHLGARRSQLTTGATAAVNQIRDLLECAWPAVLAASGSPFRSVSWCASLAVVLDRCAGDLSRVRRLGLNRFTAAVRRELPRWGGIRPCLRIIRAVFAALADPAGVTAHRPGALERAHLALGDWRDIRARLADTETRMCAVMEELGLADLVTTIAGLTVIGAAAILAETGDPARFATARALVKHAGLCPRDNASGAAQGKTSISGRGRPGLRLAAWRAVWAAMPNNPVMAARFGYLTTRQDNRLARQQARTACAAALLRWIHVVITRHVAWDPAIAAGASPARRTRPALSTNS

SEQ ID NO: 328853 - protein, 314 aa, unidentified
MIGCFVGIDVSRSRLDIAVRPTGRVWSVTNDEVGIAALVAELTALRPELIVLEATGGMQSHVVAAAGAVGLPIVVINPRQARDFARATGRLAKTDALDAAVLAHFAEAIRPTPRPLPDETAQQLAALVGRRRQLVEMRTAEGNRLHGTAPNLRPRIERHIAWLDQELETINQDLETMIQGSPLWRAKEDLLRSVPGVGPTVARTLVAELPELGHLNRKEIAALVGVAPLNRDSGTLRGRRAIWGGRASVRLVLYMAALVASRRNPVIKAFYDRLLAAGKTPKVALVACMRKLLTILNTMLNHGTSWDPARVSAA

SEQ ID NO: 328854 - protein, 320 aa, unidentified
MSQNTTAIMNQNTKPVYAGLDIAKASLQLHLQSKSSDLANTAKGHARLIKRLAAVPGIHVICEATGGYERAVVAALHAASIAVSVINPARVRQFARASGELAKTDPIDAALLTAFGQAFAPEATPQRTATEIKLAALVSRRAQLIQVSVAEKQRADICEEPALQKLFKAWLAQLEKQMAKVESLIDQLLAGPSALADQVRRLEQITGVGRITAVAVLATLPELGQLNRRQAGALAGLCPYNRDSGKREGKRCIGGGRAEVRCALYMAALSASRSNPLLKTFYDRLIAAGKPAKVALTAVMRKLIVLMNHLLKNPSFSLAH

SEQ ID NO: 328855 - protein, 318 aa, unidentified
MENTAQWVGIDVSKATLDVYLRPMGKSLKVANRELDISKLVEELLSYDLNLIIIEATGGLETELIIQLQAALLPVALINPRQGRNFAKATGKLAKTDAIDAQILAHFGEAMKPPMLAIESDSARQLSELMSRRRQLVEMQTAEKNRRSRARGKALADIEEHIDYLNRRLEKLNQEIEQLTQTNQQWLAQVKLLKTTPGIGPVISTTLVSDLPELGQLTGKQISRLVGVAPINHDSGQHKGKRMINGVRAHVRATLYMGAVVAMRHNSVIKTFYDRLVERGKPKKLALTACVRKMLVILKAMVRDNQPWSVPDNLQPMS

SEQ ID NO: 328856 - protein, 350 aa, unidentified
MNITRVGIDLAKMVFEVHGIDEKGKTVLRKQLKRAQVLEFFANLQRCLIGMEACGSAHYWARKLVALGHEVKLMAPQLVKPYVKSNKNDRNDAEAICEALGRPNMRFVPIKNPEQQALLALHRVREALVTARTAQVNQIRGLLAEFGLVMPQGVAKIRTRVPEMLEDGANELPGLMRELLARCYEQFQSLDARVHELEAHIVRWHRNNEASQRLAEVPGVGPITATAYVATVGDGQAFKSGRQVAAWLGIVPKQRGTGGKQQLLGISKRGDVYLRKLLIHGARAVLRHLKPEQAHSWLAQLARRRHHNVAAVALANKNARVLWALLAHGREYQQAHLPMRPLGARPGQAL

SEQ ID NO: 328857 - protein, 475 aa, unidentified
MAHKQADEAKRREPRKQPRRPQPSLLERIQPDAAGVDCGERSHFVAVPVERDPEPVREFPTFTAELIRLADWLAQCRVKTVAMESTGVYWIPLYEILEERGFEVVLVNARDVHNVPGRKSDVQDCVWLRELHSVGLLRASFRPSADMVPLRSYLRQRETLVEEASARVLRMQKALTQMNLMLHVVVTDITGATGLAIISAILAGQRDPDLLAAHRDYRCHASRAEIAAALTGNYRAEHLFALRQNFEAYQFLLKQIEECDAAIEALLATLAEKQPPPQAALPAARRPPQLNNHAPRFEIRTPLHRLTGGADLSQIHSIGPHAALQLIAEIGTDMSRWKTEQHFSSWLALAPHNKVSGGRLLSSRTAPSANRAALVLRRCAMSLSRTATALGAFYRRLAARVGKAKAITATARKLAVLVYRALSGRLVYQDPGAIRYHLINRAREIKSLRKRAKLLGLELINLSTGEVLLNANPVS

SEQ ID NO: 328858 - protein, 369 aa, unidentified
MQIRSFVGLDVHKATISISIADEGRSGLVRFVGVIPNTAEDVAKMARRLSRHGELDFCYEASGCGYGIYRQLTELGHRCTVAAPSLIPRKPGERIKTDRRDSEKLAILHRSGDLTPVWVPDATHEALRDLVRARVDASMHLMRARQQLLAFLLRHGRTYATGKHWTQRHRAWLASQTFQQEVHRIVFQDYVETVWTAQERRDALIERIAAMVASWSLGPLVEALRGLRGIDLISAATFIASTGDLSRFQSPRLLMGYLGLVPSEHSSGGTIRRGGITKTGNREARRMLVEAAWSYQYPARVAKEKAEILVRLPKNIRDIAWKAQTRLCARYRTMIARGKKPTVVVTALARELAGFIWAIGQEMRTPMTT

SEQ ID NO: 328859 - protein, 413 aa, unidentified
MDIIYQCVAGLDLHKETTVAAVRSIGPAGKVETDLRTFGTMTRDLLELAEWLAAHGVTHVAMEATGVLWKPVWNILDGRFELLLVNPRELKQVPGRKSDIKDAQWIAQLLQHGLLRSSFVPGRSQRELRDLTRHRAQLEGEHTRAANRIHKLLEDANIKLGVVASDILGVSGREILDRLVEGEEDAASLAQSARRRMRSKIPQLELALQGKFLPHHRFMLKQLLSHLDHLDQQIGQFTARIEELMVPFVDEELKEKLDAVPGVDVATIQNITAEIGVNMNQFPTAGHLASWTGICPGNEESAGKRKRSKTTKGNRWLRRALTQAAWAATHTKDSYLGAQYHRLAGRRGKKRALVAVAHTLLVIIYHIIKYRVDYEDLGADYFLRLEPDRQKRYLVKRLEQLGYEVQLAEKHAA

SEQ ID NO: 328860 - protein, 348 aa, unidentified
MGHFVGLDVSMKETSVCVVDAAGRVVLEQKVPTEPADIITLLSSLGVSFCRIGIEAGPLSQWLVNALTEADLPVICVETRHMKALLTAQQINKTDRNDARGIAQMMRVGLFKPVHVKTLVAQEQRMLLTSRKLLQRKLLDLECDLRGTLRNFGLKVGIVSGGRYEARVCELVTDFPRLAAIVGPLLNVRRVMRQQLAVLHKMLLDTVRDDPVCRRLMTAPGVGAVVALTYRATVDQPQRFVHSRAVGAHVGLTPKRYQSGEVDYDGGVSKCGDALLRTMLYEAAQVLLVHSGKWSWLKAWGMRVAQRRGIRRAIVAVARRLAVVLHRMWVDGSEFRWSKDSTAVPAAS

SEQ ID NO: 328861 - protein, 483 aa, unidentified
MKPKATEKNKKGAEHRTKGHWHEMNRKQRREMTRKMLSEDISLEVVHPDAAGIDIGNESHYVAVPPSRDSQPVRCFGCTTAELKAMAAWLKLCEIRTVAMQSTGVYWVAVYDILEEAGLEVCLVNARDTKNLPGRKSDVQESQWLMKLHTYGLLRNSFRPSQETRTMRTYWRQRNDLVQSAGRHILRMQKALTQMNLQLANVLSDISGATGQAIIKAILAGERNPHKLAKFRDPRVKASEEQIARSLEGNWQADLLFVLKQEQEGYEFCEKQMAECDRQLEQYLQQREDRSQGAPLPEEKRKDRRKKKKGNKPQFDLREGLFRMTGTDLTRMDGIDVMTATTIISEAGWDMSKWQTEDHFVSWLRLCPDNRISGNKVIGKGRLPTNNPISIALKMAACTLRESKTYLGAQFRRLRTRLGAPIAIKAMAAKLARLVYRMLRNGMKYVDQGAAFYELQHREFQIKRLKSKAEKLGYRVIAIPAAA

SEQ ID NO: 328862 - protein, 368 aa, unidentified
MGNERKRFVGIDLSKRTYEAVAITADPQTITRWNGKLDPRGRKCLLGKLNAGDIVALEAGTASFTIAKEIQGKPEIMVLVLNAANLAIIYASLKKTDKEDALKLARLVQKYTPEELPVVPIPTDQEMERRALVTHETRFRQDRVRLINRLHAVFLRAGFPDHTKSQLGITASREELIVSELDGFNLAEAMNLHHMIVEYEKILEDLDNQINDTVVACGEDAKILLSIPGFGIKTTMAVLAYAGDMRRFENPSQLVNYIGFSPRLYASGDIERVGSITKRGNPQVRWLLIQSAWCMVKSKAANPLKDRFEAMLKRGKAKSVAIVALARKLLELVFILLTRREKYRFIDPSLYTIKLRRAGFNLVGAESC

SEQ ID NO: 328863 - protein, 341 aa, unidentified
MQHVAIDLGGRESQICVRGSDGQVLEERKVATSHLRTFLKRQPASRVVLETCAEAFGVADLALSFEHEVRVVPATLVRSLGVGARRIKTDRRDAQVLSEVSCRIDLPSVHVPTQLARQRRSMCGMREELVSSRTSLINCVRGWTRTQLLKVRSGDPVTFSQRVRDAALQHPDGLPSCVERLLSMISALNEQIAAADKELQQLTADDPLCQRLMSVPGVGPVTSLRFIAALDEVTRFPSAHAVQSYLGLTPGENSSSERKQRTGITKAGPAAVRRTLTQAAWNLRRSRPQDPISLWATQIEQRRGKFVATIAVARKLAGVLYALWRDGSRYEPQHALREMNR

SEQ ID NO: 328864 - protein, 374 aa, unidentified
MSVSACYEGQQFVGIDLHRRRTVLVRMTAAGERLGAMVRFPSTPEALRREMVAALSPAGPAPQVVVEATYGWYWAVETLQQLGARVHLAHPLGIKGFTNRRVKNGERDAADLADLLRMGRLPEAHTAPEPVRALRELVRHRAKLARWRSAVKNSIHAVLAKRGVSVPMSDLFGAEGTALLDALCRPARGPAGGSRLEPEYAARVGSLRGLLATLEGEIAEFDRRIAAALAGHPGYRTLQQISGIGPVFAAVFIAEIGDVSRFATADKLTCWAGLTPRHRESDTTVHRGRVTKQGSKLVRWAAVEAVQRSSEPAVAAIRTRIAERRGRPGQRTGRNIAKVAAARVLLKLVYYGLRDGQIRTLDRGPASPGVMNAA

SEQ ID NO: 328865 - protein, 361 aa, unidentified
MKKVSKQMRKMEAAIKTPEMTVGLDMGDRYSHYCLLNAEGDVVEEGRIQSTEAALRRHFEGEPCLRIALECGTHSPWVGRLLTTLGHQVIVANPRKIPAITGSESKNDKNDAEKLARFAAFDPRLLSPLEHRSAGRQMDLNLIHARATLVRARTMIVNALRGLVKSGGGRLPVCSTAALPARASAAIPPALAVVATPLIEQIALLNQQIDGMDKQIEKLATKYPEISLLRTVPGVGPIVAAAYVLTLDRPDAASNRSAGAFLGLRPAQSQSGDADPQRRISKAGDSCLRSLLVQSAQYILGRFGPDSELRRWGLKLAATGGKRGKKRAVVAVARKLAVILHSMWRNGQCFQAFPQAVAAAA

SEQ ID NO: 328866 - protein, 343 aa, unidentified
MEHYVGLDVSLKQTSICVVNQVGSVVREGVVDSEPEAIAAFVRSKAPGAVRIGLETGPTATWLWTELKQLGLPVICIDARHAKAVLKMQINKSDRNDAGGIARIMQTGWFKEVRVKGPDSHSVRALLASRALLVKIKRDVENQNRGLLKNVGLVIGRAKFNVFAVRAEELIADRPQLIAVVGPLLKARQAIEQQTNDLNRKVLKLARYDAQVRRFMTVPGVGPITALCFKATIDDPARFKRSRSVGAYVGLTARRHASGEVDWTGRISKCGDAMLRSYLFEAASVLLTRVPKWSALKAWGMRLAKRNGLRKATVAVARKLAVILHRMWISQTEFNWSKKEVAA

SEQ ID NO: 328867 - protein, 342 aa, unidentified
MQSNKKHAWVGLDVGKTTFFAAADLPLENNDKQPLLKLPAREFKRTEVGCGSFLKWLSESFPDYNFSVVMETTGCYSLQLRKWLHAVQPDLPVAIQNARLVSDFIKSLNLLHKTDLLDARAIARFGTERMPPPMQIKSKNAEMLQELSRERNALIKVRTALMNRRESINSPSIRKINGRVLATLTAQIAEIEKEIEKIIREDEDLSRQAMRMISVPGVNMISACAILAEFGSLSQYSSRQLSALSGLVPKISSSGSSLNQSCLSKRGAGRTRQLLYMNSLTAVNKIPELQALYQRIIAKGKTKMTARCACMRKLLLILRVTAVENREYRDFSQKNNQTALDF

SEQ ID NO: 328868 - protein, 357 aa, unidentified
MKIIRQCVGIDCSKDTLDVAINFLDENFQTKIHSTEIFKNNNKGFKNLMKWMRKLCLKDLPYQVVVEATGVYHELLAYTLVNNGFTISIVLPNKIRNYCRSTDIRTITDKISAKQISEFGLMKKLDNWVMPDKIYLQLRELSRERIQLLEEKTAVLNQLHAHKHSAFKSNNTIKRFEERIKFIEKQIKHIEKNMKEQVNENPELKNKINNICKVKGLGFITVVTIIAETNGFNLIKNSRQLVCYAGYDVVVKESGTSVKSKARISHKGNKYIRRAMHFPAITAVKYNNHLQNMFIRIYNKSNIKMKGYVAAQRKMLILIYTLWKKNELYNPNHIHKSLIKLEQPEKTALTELELVRS

SEQ ID NO: 328869 - protein, 343 aa, unidentified
MHITTIGLDLAKHWFQIHGVNAAGKVVVKRRLRRTEVGAFFRAQEPCLVGLEACATAHHWARELIALGHDVRLMPSAYVKAYVKRNKNDAADAEAICEAVTRPSMRFVPVKDTDQQSVLMLHRARNLLVRQRTMLVNALRAHLGEFGVIAPQGLRHVEQPVAAIEENHAGLPELARSILRLIVAQLNDTQAKVREIEVKLAQWHRNSRLSKLLATVPGVGIMGASAIAATIADPGLFRSGRAFAAWLGMTPRQNSSGGKERLGRTSKRGDKYIRCLLAAGAVAILRHARNRAKDAAWVRALLARRPAKVVAVALANRTARIVWAVMKRGAAYRATGMTGMQTA

SEQ ID NO: 328870 - protein, 359 aa, unidentified
MPATFPIPQTNELERAMTAVMIGVDPHKATHTAVVIGPAEEPLGELRVRASAGQAEKLVAWAADWPERIWAVEGAAGLGRLLAQQLVAAGERVLDVQPKLASRVRLLQSGDTNKNDPNDARSVAVAALRSKTARPVIAEDYPAVLKVWSKRHRDLARLRNQAACRLHAVLCDLVPGGHPKEISAAQAARILEQASPSGAVGQARAELAAEFLEDVRRLDAQLRDTRKKLAAAVKSSGTTLTEVFGVGPVIAGTIIGDIADVSRFPSRDHFASYNGTAPVEVSSGNRKTHRLSLRGNRRINHAIHMAAITQIRHKHSAGRAYYDKKIAEGKTHKEALRSLKRRVSDAIYARLLADARRAG

SEQ ID NO: 328871 - protein, 362 aa, unidentified
MRDYTGKTVFIGIDVHKKTYAVAAICDGVIVKRDTLKANPQVLIDYLIKRFGSGNILTAYESGFCGFHLHRALEAANIKNIVVHAAAIEISNDRVKTDKRDCLKIAAHLSQNRLEGIHVPSLEREDRRTLTRLRDAFSREKTRIACQIKSLLFLHGFIQANDNKTVSLKWIKNLSTYDTTPGVKYALEQYADMWISFNLKIKEIDEKLKEQAKEEKEIDGIYQSVPGIGPTSARILANELGDMQQFKNERQLFSYLGFTPSEHSSGEHTRQGHITKQGKPILRKILVQAAWVAIRNDKELEFIFKRIASKAGKKRAIVGVARRLAGRMRSCFRIGALYEARKIELPKTEPSKDVKQRVEQVA

SEQ ID NO: 328872 - protein, 476 aa, unidentified
MKPKKTASRPTRINWQQMNRKQRREMTRTLQSGDLSLEVVHPDAAGIDIGNESHYVAVPPTRESEPVRRFGCTTGELKSMADWLKQCRIRTVAMQSTGVYWIAVFDILEEAGFEVYLVNARETKNLPGRKSDVQESQWLMKLHTYGLLRNSFRPSQEIRTMRTYWRQRNDLVRAAARHIQRMQKAMTQMNIQLANVLSDVSGVTGQAIIKAILAGERDPQKLARFRDWRVKASQEEIARSLEGNWQEDLLFVLKQEQDNYDFCQKQMAECDQQLQQYLQQRQDRSVGINLREEKRKARLKKQRGNAPQFDLRAELFRMTGTDLTQIDGIDIMTAMTILSEAGSDMSKWKTEHHFVSWLRLCPDNKISADKVIGKGRLPTKNRITSALRMAASTLRLSNTYLGAQFRRLRTRLGPPIATKAMAAKLARLVYRMLRYGMQFVDKGTEFYEAQHRKQQVNYLKWKAANLGLQIIEVPAA

SEQ ID NO: 328873 - protein, 375 aa, unidentified
MTMMDAKRPDTKAEVILGVDTHLDVHVAVAVDHLGRRLGESSVPTTANGYERLLRWAERFGRVGCAGVEGTSSYGAGLARHLRAKGIEVLEVERPKRQRRSSRRKVKSDLSDAESAARAVLASETSGVPKSGDGCVEMIRALRAARRSATKARTQAANQLQSLRVTAPEEMRHRLRGLSTKELVSVASRFRLGDDPRDVPTATKFALRSVARRYEALSEEIAELDAQLERLVAQAAPGLLSLPGIGTDNAATLLVVAGDNPQRLRSEASFASLCGVAPIEASSGKVVRHRLNRGGNREANRALYMTCLARMRRDLRTQEYVARRTAEGKSKREIIRCLKRYVAREVYRVLISCGARSSPPRPKEEAQIAAGSNAA

SEQ ID NO: 328874 - protein, 389 aa, unidentified
MNRIIKIGMDVHSKNYTLCAMEPTIGAEDRIFGEVQVAPDYKEVICFIESLKMKLGFYDEYSIECGYEAGCLGYTLYHQLTGAGVKCVILAPTTMLTQQGKRIKTDKRDARLIAQCLCYGGYHPVYIPTGEDDAVKEYLRMRDDHKLALKKLKQQINAFVLRHGHQYSGTKWTIRHVTWLKKLELAPMYRETLDEYLASCEEQEAKIERYDKRIEEIASEARYQENAKKLGCFLGIRTHTALSLIVETGDFKRFAKGNTYAAFLGLAPGERSSSDNVNRLGISKAGNTHLRCLLIEAAKGICKGAIGHKSKELRARQSGQPAEVIAYADKANTRLRSKYYKMIRHGKKTNVAVAAVARELACFVWGMMTGNISIRPTTAGTSMPAVRQE

SEQ ID NO: 328875 - protein, 337 aa, unidentified
MSRFIGVDLHKTAFTVCFMEGEEKRLATYKMGEIDRFRSELHLDDEVALETTTNTRSFMKQIQDRVARIHVINTMQFKVVSHSVKKTDANDAETMAFFLSKGMLPEVRMKDERYAELESLANTRHKLVQLKTALKNKIHNILNAQGIVTKKECLSSTKGLAKVLEYRVSAVARIELEVIIDQIKGLNAGIAKIDEELAAQGKDLDGHEGLTSIKGIGDKSGAILLSVIGDVNDFEDEKKLAAYFGIVPRVSNSNETNRQGRITKQGSKLGRTTLVQCTLVAIRYSNYLRAFYEKLKAKKGSGKAIIATAKKLLGIIYLTLKNKWVFEDFPNFVLKTA

SEQ ID NO: 328876 - protein, 330 aa, unidentified
MQYLGIDISKNKFDCCIFLNNQKKKTKVFDNNHSGFIKLNEWLQKLEIEILELVAVMEATSIYHENLAYFLYSNNIKVCVANPARVRKFAAGISVLTKTDEVDAEVLVKYGELAPYNIWQPDSDQLRLLKQLLLRRDAYTSELNRERNRLDQAYSNNTDSKLIEIIQLDIENINNRIQYLDKLIDETIDDDISLKQDLCLLESIPAIGKRTALTLLTLFKGKSFTNAGQAAAFCGLIPLQRQSGSSIRGVSKISRSGSSKIRSKLYMAAVVAIRHNPHIKIVYDRLLRNGKAKMAALCAAMRKLIHIAFGVLKHQKPYNENLIGFAKIPC

SEQ ID NO: 328877 - protein, 386 aa, unidentified
MQAGTVSTPTADRTSTIFVAIELSQKSWLITMHSPDRDRISRHKVAAGDHAGLLRLIAGVRERAARVLGAVPAVVSCYEAGYDGFWLHRLLTAAGITNHVFDPASIAVEQRARRSKSDRIDGAQLLRTVMAYCRGEPRVVRIVRVPSVEQEDARRGSRERDRLVEEQTAHTNRIKALLRLLGVAVGNPRRRDWLSWLARQRDWQGEAVPPRIMSELEREHARLILVRQQLAALTQPSAREEPTAAAAQMAQRADHLRRLKGLGPVLATTLVNEAFYKDFRNRREVAGYFGLAPSPWQSGGTDREQGISKAGNPRARHKSIELAWLWVLHQPDSALSQWFRQRTANASKRIKRIAIVALARKLMVALWRFLTTGLVPDGVVLKAIEA

SEQ ID NO: 328878 - protein, 339 aa, unidentified
MNITRMGIDLAKNVFQLHGVDEHEKVVFRKQLKRAEILELFANKPPMLIGMEACGGAHYWARMLAKLGHTVKAMAPQHVKAYVKSQKNDKRDAEAICEAVSRPTMRFVSIKSEEQQDMQTIHRVRDRLVKSRTALANEVRGLLAEYGIVIAHSGVPATRRGLLLALEDADNGLTAKMRGILFDLHEELNAIEIRIQRYLQKINQHCAQDERVQRIMKIEGLGPISASAIVTAVGDAKQFNSGRDMAAWIGLVPKQHSSGGKEKLGSISKRGDKYLRTLLIHGARSAMRCSDTKTDKRSTWVNALIARRNKNVATVAMANKNARIIWSILTRGEDYRVAM

SEQ ID NO: 328879 - protein, 326 aa, unidentified
MNLPAVVLGVDIAKLKFDVCLVKENQKVKHKVFVNTKHGFDQLVAWLASHQVGSLHICLEAIGSYGEAFALHLHEAGYHVSVVNPAAVKAFAASRLTRTKTDKVDAELIARFCLAQQPQAWTPPASEVRGLQALVRRLESLVEMRVAEENRLSSGIIVDVVRHSLEEHIAYLVEEIKQTEKMIREHIDNHPDLKEQSDLLNSIPGIGQTTAALLLAEIVNIKQYKSARQVAAYAGLVPRERRSGSSVRGRVQLSKIGNARLRKALYFPAMTALRCSSFFQQWASGMRERGKCKMAVIGAAMRKLIHLAFGVLKTGKPFDPNWAKTA

SEQ ID NO: 328880 - protein, 347 aa, unidentified
MNTQILTNRDLATYVGIDVHPGTHTAYAMSRFEDEKGTIRFPNTHNGIQQFLTWLTSLEPDAHRLIIGVEGRGGNGYGLVGRLLAKHTNIYEVNALFTKHRRSFGTNHGKTDERDAKLIAEVLTRKLSELPAITQQEYQPQRILLKKTVEFYRETTQQSTRLQNQLHRLKRELRLATDMQEKHILAFTIKEKQAELQRIVKRKKQFVNQFSELLEGDGKNLTSFPGIDFVTAAKITAETNGVERFHSLDSYISYAGIGLIEKSSGKITKFKQNHGGNRQLNSAFYMVALSHLRWNERGKAYYQKKLKEGKTKKHAMRCLMQRVASIVYGMLKSREPYRQPEGSPSPA

SEQ ID NO: 328881 - protein, 355 aa, unidentified
MCGLKHQKEKRSMDYFAGLDVSVKETSVCIVDDAGKIVREAKVASELEALLQVLRNTIYRFKRVGLEAGPLSQWLYSVLAEAGLPVICVETRHMRAMLKAQINKTDRNDARGLAQMMRVGLYRPVHVKTLRSQKLRMLLTHRKLLQSKAIAIENDLRATLRNFGLKVGMVGTVKFEGRIKELVENVPDVAVLVEPLLVVRRVLREQLGILHRRLLATVRDDDVCRRLMTVPGVGAVVALTYRATVDVPARFRNSKAVGAVLGLTPSRYQSGESDRVGRISRCGDEMARMMLYEAAQSMLVRSAKWSWLKAWAMKIARHRGIKKAIVALARRLAVIMHRIWVDGTDFRWTREVAAA

SEQ ID NO: 328882 - protein, 338 aa, unidentified
MPLYAACDLHSNNTVLAVLDEAGSLKLRQRVPNDLDLIGAALAPFRNQLQGVAVESTYNAYWLLDGLDRAGYPTRMVNTLAVPQYAGLKQADDNTDARHLANLMRLGLLPTAYIYPRPQRGLRDLLRRRMLLVQQSVRLLQSVRGYWARATGQRLSANAFRHLTRQQLDTTFVDPSELFAVATLMQSWLYLQHRIDAIEHWLDDTVRRRPDLAALRTVPGIGPILGLTIVLESGQIQRFEHVGQYTSYCRLVPAHRVSNGKKKGTGNRKCGNRYLAWAWIEAANFAIRFAPPIKTWYQRNAARKPRVVALKAVAHKLARAGFHLLRDGGRFDVQRAFC

SEQ ID NO: 328883 - protein, 340 aa, unidentified
MQTKTLFVGIDVSKLTLDIAITPDGKTIEANLKTPNNQAGFKALTSWMKRHARLQECDEIHCCIESTGIYSDAIVDYLQELGGLKVSFINPVQAKAYGRTVLLRTKTDKVDAGLLARYVAAVKPAVTLPIPMEIKELRSLIRHLDYLITRRAQEKGHLESTTDKVVINSVKDTLKHYDKQIKKLEKLIKGYLDKRPDLKEKVELLKTIPGIGETTARILLCELHVENNDEKITAKVQIAHAGLAPAQKQSGQSVRGKSMICRTGNARLRRCLYFPAIVASKFNPVITGFYQRLIKRGKHKKVAIVAAMRKLLSIAIGVLNNKVAFDPEWVVKTVKQVKCA

SEQ ID NO: 328884 - protein, 358 aa, unidentified
MEQFIGCDAHKKFSLFVMMNEKGEYGRAIRVGHDRERFREFLKDLPAGSQIALETSGSYYWLVDEMERAGPRPQLAHALTAKRRMEGRHKTDERDARGLAMLLRNGTLPRVWIPPVELRDQREMLRLRMSLVRMKTQLKNRIHGVLLRYNMTVQATDLYGDRGREELLSRLEELPAYSRQSVVEQLRLVDSLESRIEDCEKQLEQILYPSAERDLLKTLPCVGKILSAVIGLEIGDVRRFSSADHLVSYAGVVPSARESAERKRQGQCPRDCNVYLKWAFVEAANLIASKQQHWPECHAMQLYLSTCQAKHQNAWQGNRGSGSALGRSIVLDSEQAGDLPRAEANAASSFVDARVSAD

SEQ ID NO: 328885 - protein, 408 aa, unidentified
MDRVNPRCAGLDVHKDTVWAAARADGRQEIERFGTTSRELLRLGDWLAEQGVTIVAMESTGVFWKPVWNLLEDRFELMLVNAQHIKQVPGRKTDVKDCAWVAQLLEHGLLKASFVPDRPQRDLRDLTRSRTQMLGDRARVINRVQKTLEDANVKLASVATKIMGKSGRAILDALAEGKLTAEQMAELVHWRMEAKKPALREALAGRMGDHHRFMLKQLLGQIDELDRRIEAFDARIEEVMSPLDREAVKRLDAVPGLDVRTTQNVIAEIGTDMTRFPTPHHLASWAGICPGNHQSAGKSKGGRVRKANHWLKAALTQAAWGAGRTRRSYFSAQHARLTVRRGVKRATIAVAHSLLVTVHCLLSRSTEYSDLGADYFTRRKESTEVQARRLVEKLKRLGYQVDARPAAA

SEQ ID NO: 328886 - protein, 345 aa, unidentified
MNTTQVSVDLAKSVFQVSVSHAPGRVDEQHRLSRRRFRTFFLHHPPTHVLMEACGSAHHWGRELQGLGHQVSLLPPAHVARYRQGNKTDRADAKALLEAARNEDIVPVPVKSLDQQSITALHRLRSGYLDTRTSRINTVRGLLREFGLPVPQGPRAFLAKAPIALDDDKLPTYLKTALTQALLEIKELQAKADDLKSQLERLAPLIPSVSFLMTVPGIGILSATALVATVGDVQRFPSGRSFANYLGLTARESSSGASRRLGPISKRGNRYLRMLLIHGARSALLAAHRTHEPDSLQTWALRTAQARGHNIATVALANRIARIAWRVWRDQRPFQRRPAEKENAV

SEQ ID NO: 328887 - protein, 351 aa, unidentified
MMIIGVDYHPSFQTIAFLMEETGECGEQELNHSDGQAERFYRDLKQRGICARVGMEATGYSRWFERLLAELGFEVWMGDPAEIKAKRVKKQKFDREDARLLRRLMLENNFPQIWVPGPENRDLRQLLWHRHRLVQMRTRIMNQLQALAMNEGYRWKKKLFSAPGRALLEKLSLAPWASRRRQELLELLDRMNPTIEELTAAVEREARKRPEAMRLMTHPGVGPLTALAYVLIIGTPTRFQRGKQIGTYVGMIPCEDSSAGKQRLGHISKQGSSLLRFLLVEAAQAAARIQPDWRRRYLHLAMRRHKSIAKVAMGRRLAVRLYWMWRNGCEYSPSLECGSYVGQLGTGHGVQ

SEQ ID NO: 328888 - protein, 419 aa, unidentified
MQRTKRQKSAFVNEKTLIVAIDIGRTANWCYMRAPGNREKAPFSFSNTRNGFKIFWDRLQTFKQMHRPERVVVGFESTGSYAEPLIHFLHKKPVNLTQVNPMHTKRLKELTGNSPNKTDQKDPRVIADVISLNHGLTVIIPQGAAADLRRLIHARERVTCDLTAKSNQLQQLVYIVFPEFYTLMKKALSKSALYVLKHSPLPEDIMHIGEKRLAGVLRKISRGRLGLDRSRELIEAARHSVGIDQGVRSIALEIKYLVETIESTQRFIDFLETDIENHLHSIPYSRNILSIKGVGLITAAGLIGETGDIRAYTTTKELEKLAGLDLYEISSGKHKGMRRITKRGRSLMRKILYCAALNMVKTNGIMYHPYHRMLNRGMPNVKALVAISRKLLRLIFALVRDNTMFEISHVCVTSIKKVA

SEQ ID NO: 328889 - protein, 428 aa, unidentified
MHQLKVNRMKNWKELTHYAGFDWAKDHHAVLIVNTEGQIVADFEFDHSLEGWKSFADKTAAWPNLAVAIETSQGAAVDQLLQGGYTVYPVHPVSAQRYRERKAPSGTKTDHLDAWGLADALRVDGQGWKPLQPLDPMTQQLRLLCRDEVALIEQRTALVNQLQQALAEYYPAALEAFDDWTHAFTWEFVLAFPTPKDLVIAGKRRWEKFLHSHRLWRPETAQKRLEIFARADQFKASAPIVRAKSQLAVSLCKLLCTLAQQLKLYRKQIEALFEEHPDHELFGSLPGARKVLAPRLLGAVGNDPNRYGSHEVLQCIGGTAPVSFQSGKIKKVHVRWACDKFIRHTVYLWADCFRKASAWGRAYYQKKRDEGMSHACALRCLGQRLLKILFRMLESKTPYDAEFHARNQMKHGSWVLKLANKPALATGE

SEQ ID NO: 328890 - protein, 382 aa, unidentified
MNRILKIGMDVHSTSYTLCAMEPVLGGEDRIFANIQVTSDYRNVIQFIDKLKEKLGSSDSYSIECGYEAGCLGYSLYHQLTKSGVKCTILAPTTMLTQQGKRVKTDKRDAVMIAQCLSYGGYHAVHVPADKDVSVKEYLRMRDDHKVALKKIKQQINAFCLRQGYFYAGNKWTIKHLNWLKKLVLSDLYRETLNEYLTSYEEQIAKIERFDKRIEELAEDSDYQENVKKLGCLLGIKTHTALSLIVETGDFKRFRKGNTYAAFLGLAPGESSSGEKINRTGITKAGNSHLRTLLIEAARGMCRGRIGYKSKELRSRQDGNPTEVIAYADRGNTRMRSKYYRMIRHGKKDNVAVAAVARELACFIWGLMTNNITPKEEGTKAA

SEQ ID NO: 328891 - protein, 446 aa, unidentified
MKQKKPSRKRSTKFPKHLQHLNQHAAGIDVGSRSHFVAVPEGADEQPVREFSTFTDDLERLAEWLISCGVTTVAMESTGIYWIPVFEILEHHGLEVRLVNARHVKNVPGRKSDVLDCQWLQQLHTYGLLRGAFRPADQVCTLRAYVRQRATLVRSASSHIQRMQKALAQMNLQLHNVVTDITGVTGMGIIKAILAGERNPRTLAAMRDKRCKNNEETIARSLHGNYRPEHLFSLQQAVELHEFYQQKIADCDQQILAQLNSFDSDGGNSDSKPPRSMEEALQRMSGADLSSINGISTNTALKIIAEIGIDMSRWKTAKQFASWLGLCPGAKISGGKVLSSATKPVANRAAAALRMAALTLFNSKSALGAYLRRQRSRLGAPKAITATAHKLARLVYSMLKHGTAFVDAGQEQYEERYRSRVIQNLKRKAQEMGFKLISLQEEPQTA

SEQ ID NO: 328892 - protein, 357 aa, unidentified
MSIAMIGLDTAKSVFQVHAVDEAGTTEVRRKLRRSDLIMFFEKQEACTVVMEACGAAHHWARVLIGLGHEVKLVAPEAIKPFVKKGKKNDAADAAAICQAACRPDIRFVPVKSLEQQGILAVHSARSLLVKQKTMLANAMRGLATEFGVTVPRGIGRLEELVALADVGNTLPGRARRVIRELLEHCRILAASIEVLEAEIVAHARQDEAARRLATIPGVGPITASLMAATVADIGLFKSARQFAAWLGLVPRQYSTGGKTRLGRITKAGNRELRKSLVLGATSMVYRAAAWNSAAGVWTRAILERRPVRRVTVALANKMARIAWALMTRKEIYHPNAPVTVEAQAVAFVHQVFGIAA

SEQ ID NO: 328893 - protein, 389 aa, unidentified
MIYVGIDVAKDKHDCCILGSEADKLYPVFTIPNNKAGFDELYEKMFSVTDDKTKIKVGLEATGHYSLNLLGSLIDKGLPTCVINPLHTNLYRKGLSLRKTKTDKVDAHSIAMMLMTDKTLKPYSDTSYHSEELKSLTRYRFDKVQERAKLKSSVARLVNILFPELEKLVPSLHMASVYSLLSKLPGASYITECHLTHLKNLLETASKGHYGRDMAITLRNTARGSIGSVIPAKSMELKHTIHLIEVMTEEIDEIEDSIKSIMDTCNSPIMTIPGISYRMGAMILAEIGDFTRFNYADQILAFAGLSPSTYQSGQLDSSYSHMEKRGSRYLRYALFNAAKFVCKWDENFGAYLSKKIGEGKHYNVAIGHATKKLVRTIYRMELTGEAYRR

SEQ ID NO: 328894 - protein, 349 aa, unidentified
MLADEVDYVIGVDTHRDQHTLAVVVAPTGAVVAQTVVRASGAGYARALRFAGSHAGGVRAWAIEGAGHYGAGLTRYLSDRGETVLEIGRHARTERRLRGKDDPLDAIRAARAGLAAETLTLPRAGQRQEALRVLLLARRSAVDVRRVALVQLRSVIVTAPEQLRDELRRLPPTQLIRRCSRFRRSQSRTANELAVVLALRSLARRIEAATSEADELEREIRQHVRALAPELLAEPGVGPIVAAQLIVSWSHKDRVRSEAAFARLAGVAPLPASSGQTIRHRLSRGGDRQLNRAIHTVILHRRQHDPATRDYIARRVADGKTTREATRVLKRYLARHLYRVMQNATPLTT

SEQ ID NO: 328895 - protein, 351 aa, unidentified
MDATTVAVDLAKSVFQLAEADDQWRIVRTHRLTRRQFERFFANRQVKLVIMEACGSAHYWARSLQAQEIPVRLLPPRHVRPYVLGNKTDAADCAALLEAARNVQIRPVRVKSVEQQALQALHRLRSQWMATRTQRINGLRGFCREFGLAVPRGARTGLHLMAQLVGDAASALPAMLRCEMAAMLDEVRSLESRIAQLERELARMVRSMPACQLLMTIPGIGLLTATALVAAVGCDVSHFKDARHFSSWFGITPKEHSSGNTRRLGRISKAGPKYLRTLLTHGARSVLQAASRVRSSGRECHGLQRWALELRQRTHHNKATCALANKLARICFATLRAQQPFDALRACATPD

SEQ ID NO: 328896 - protein, 402 aa, unidentified
MNCVGIDVSKGKSTIAVMRPFGEVVVSPFEVCHTASELSELARLLKSLDGETRVVMESTGNYHAPVAWLLHGAGLYVSVVNAMLVHDYGNNSLRRGKTDKKDAVKLANYGLDHWLTLPRYVPEEDTRLMLKTCYRQYQQYSKVQTMLKNNLISLLDTAFPDANRLFTSPPRADGSEKWVDFVATFWHCECVCGLSKKAFTAKYQKWCRKHGYNFSQDKALDIYASACGRFGVMPKTNTAKLLVEQAISQLQTTSAALAALKQEMQSLAASLPEYPVVMGMFGVGPTLGPQLIAEIGDVRRFHSKKALVAFAGIDAPPYQSGQIDVRSRSISKRGSASLRRTLFLVMGVLLQCAPMDEPVYQFMNKKRSEGKPYRVYMMASANKFLRIYYASVKAYLDSLEHN

SEQ ID NO: 328897 - protein, 350 aa, unidentified
MQTKHPVIIGVDTHKAIHVAVAIDTQGARLAALSIPANPKGYLELERWSRSHGKVLAFGIEGTGSYGAGLSRSVLSQGHTVVEVTRPNRRLRYTQGKTDSLDAEGAARSVLSGQATARPKTQTGSSEMIRHLKIARDTTVKSRSQAMVTLKTLIINAPAELRDGLDQIRGKVTLIRHVAAFRPGAIDNTIASAKTAMRALARRWLWLHEEIISHDAELQRLVGERAPALMASHGIATLTVAEMLILVGDDPTRIRSEAAFAKLCGVCHIPASSGKTQRFRLNRGGNRQANAALYRVAIVRMRSHEPTLAYVKKRTTDGKSKSEIIRCLKRYIVREIYGQLCVPKTAEIVA

SEQ ID NO: 328898 - protein, 331 aa, unidentified
MEQAVVIGVDVSKAELVVAVHPSGETWTSETTSLAIETLVARMRALQPGLIVMEATAGYELPFAAACAVAGLPVAIVNPRQVRAFAQALGRTAKTDRIDAGVLALFGVRVQPPPRAVPDGETQALSDLVTRRRQLLEMLGAERRRLEHAPPTGPVTRNLRTHIRWLERRLTDVDEEIGTAIQHSAVWRVHDDLLRTVPGIGPTTARTLLAELPELGRLDRRAIAALVGVAPFNCDSGQFRGRRRIWGGRRSVRASLYMAALVASRHNPVLAAFYRRLRDLGKPPKVALVAVMRKLLTILNAMIKHQCRWNPKAASTPASTSRPARGVAVLA

SEQ ID NO: 328899 - protein, 337 aa, unidentified
MGLYCGIDLHSNNHFVTVIDEEDRRLYERRLPNDLAITKAALEPFRRQLVAVAAESTFNWYWSVDGLMEAGYQVRLVHTGAVVQYDGLKHTDDEHDAFWLAHLMRLGILPTGYIYPKSGRGLRDLARQRMRLVQHRTSHITSVQSQVWRSTAVRLRSETIKGKGKQPWPELLDPDVALSVETGRAAIDALSAQIERLEELLLKRVGLLPQFQLLKTVTGIGPILALTIALEVGDIKRFPGVGEFASYCRCVDSRRLSNTKKKGEANRKNGNSYLAWAFMEAAHFAIRNLPAAKRFYERKRRQRNALLAVKALAHKLARACFYILRDQVPFAPDRLFA

SEQ ID NO: 328900 - protein, 330 aa, unidentified
MNSNTNFFIGLDVHSRNTSYAVRTWQGDIILEGECSSMYRDLKAALQSYFHSCVVGIEACTSFYPLRKGFIEDNVQVKVANVLRMRQLIVKNDRLDALRLSDMLRLGTFPESYIPDKEIQTLRNLVSLRHSSLEELNKVQCRIWALLQREGIKLPSRSIFSKKGLSHLKEITEMESCPPDLKHLYSHYEYLAVKLQQTTDGMILYASNTFPKEFLALQAIDGIAKIIASYVIAEVCPVSRFINKKKLRRYAGVVPCFQESGGKSYGSMLPKFSSRRLLRWVLTQAAHCATRKKESKLRLYYERKKTKGKQKAKMAIARAICDLVYYKLNS

SEQ ID NO: 328901 - protein, 338 aa, unidentified
MEEVSTIGLDLAKSVFQVHGIDAAGRVVVRRQLRRGEVLGFFARLRPCLVGMEACATAHHWGRELTRLGHTVKLMPPAYVKPYVKRGKTDAADAEAIAEAVTRPTMRFVAVKSMDQQAVLMLHKVRDLLVRQRTMLINALRGHLAEFGVVTARGPAGVKAAIAELHGMQDSLPPLARMALHGLLDRLGAVGLEIRKVEREIVAWCRHDDASRRLMTIPGIGPITASAIAATVSNASLFRSGRQFAAWLGLTPRARSSGGKERLGHISKQGDGYIRRLLVTGATAVIRLARQGNPSKVWATRLLERKPARVVSVALANKTARIAWAVLARNQSYVAPAM

SEQ ID NO: 328902 - protein, 327 aa, unidentified
MSTQNYAGIDIAKRHFVIGIHGRDKTKTETNNPKGFTHTIDYLHKHNVGLVVMESTGGLEIPLAKTLHRAGFQVVIANPRCTKNYANGFSLAKTDHLDAKMLADYAQALEIKGLVANMLYIPPSEAEEKLEALVKRRSQLVDIRAAEKNRLEQIHESQQQSVKDLIAHLDKLIAELDKDIDSNADAFGGKGQVLTAIKGIGSTTSATLLSMLPELGTVPHKRIAMLAGVVPPPNQSGDTDKKTGCIGGRMAVRNILYMAALTASRFEPTIKAFYERLRAKGKPFKVAINACMHKLLRILNARMRDYLVSLQTKSERQSEQQPAPQCA

SEQ ID NO: 328903 - protein, 412 aa, unidentified
MGRYIGLDVHRDFAQVAIVEDGIVFDAGRVDCRPAALREWMTGLRSDDEVALEATGNSDAIATLLTSHVARVVVSNPLKTRAIAEANIKTDKVDARILAQLLAADFLPAVWLPDERTRRLRRQTMRRAHLVRQRTRLKNQVHAILHRNLLPRPPVADLFGAAGRRWLARQDLPNDEHHTIEALMRQLDFLGEELALADRELAAEALADPVVRRLMTIPGVDAVVALSVVAAVGDFGRFSSSDKLVAYLGLHPRVRQSGNQPASHGRITKAGRAQTRGMLVEAAWVAARAPGPLRAFYKRVKARRGFQVAVVATARKLAVLCWHLTVDGQDYAFARPSLVAFKQRKLALTAGAPRAHAHRGPGYDYNNKQLRRHEREVIEVAERAYETLIAGWQPRRPAHTGTADFGVRPRRA

SEQ ID NO: 328904 - protein, 371 aa, unidentified
MAHYREAFVGIDVAKLKNAIAVAEFGRDGEIRYFGEVEASDVSMRRVIQRIAAKFDRVHFCYEAGPTGYGLYRLIKALGHECMVVAPSLIPRKPGDRVKTNRRDAVALARLLRAGELTAVWIPDEGHEAMRDLVRARTAAVETLRVHRQQISAFMLKHGRIYPRKRGWTMRYLIWLQEQHFDHPAHQIALQEMVDAARVSRERVDRLEKVIEEFVPNWSLAPIVQALQALRGVDLVVAVTFATEIGDVSRFESPRQLMGYLGLVPGERSTGETTKRGGITKAGNSRVRSQLVESAWTYRFPPRIGSKKLYKLEKVSSSVREIAWKAQTRLSARYRLLTSRGKKSTVVCTAIARELAGFMWAVSKEALQPRL

SEQ ID NO: 328905 - protein, 286 aa, unidentified
MTDDTIGIDISKATLDIHRLSDGKTMSFSNCPAGFKALSRFCAKTAVARVVYEATGAYHSGLERALGAHLPLVKVNPLQARRFAQAQGLRAKTDAVDAKMLADMGNAFALEPDEPAAEIQHDLKELRSFRSGLIKDRTGIMSRMKTQTLSITRRQSKARLAQVDKQIAEINAEIERLINSSDTLAHSMKILRSIPGVGAICAATILIEMPEIGSMDRKQVASLTGLAPMTRQSGQWRGKSFIQGGRKVVRDALYMPALVAMRHNPDFKAKYQALIKADRNWVTKGA

SEQ ID NO: 328906 - protein, 420 aa, unidentified
MAAVMIGIDPHKATHTAVAISAAEEPLGELQVRACAAQAERLLAWAAAWPQRTWAIEGAGGLGHLLAQQLLAAGERVLDVPPKLGARVRLLAAGDVNKNDPNDARSVAVAALRSAGVREVRPDDHAAVLKIWSKRYRDLGRTRTQVVCRLHAVLCELIPGGLSKAITAGQAARILGSIAPPDAVAAARCELAAAFLEDLRGIDARIRETRKRLALAVQAAGTSLTGLFGVGPVVAAAVIGDVRDVSRFPGRDHFAGYNGTAPIEVSSGPRKTYRLSRRGNRRLNHAIHMAAVTQIRHSHSEGRACYDTKLAEGKTPKEALRSLKRQVSNAIFACLQADARRAAAHAEGPGDIRWGLVVKLLCGFSWPGWGRRCARRSADRLRGSGGGSRGGGRTGCAGRRRAGLRRLSAGRSGRGRRVMR

SEQ ID NO: 328907 - protein, 328 aa, unidentified
MQGKVSSERAAMATVYVGIDVCKEWLDIHLHPLGRSFRVTNDTAGLRRLKRELDALDQMPRSALRIVMEATGKWHRAVQRSLHADGFYVSVVDPLRARLFAKACGFLAKTDRLDARFLAIMGEALKPAQTPPPDQALETLQELVNARSAANGERTALSNRMKTAVTAFLRKELTRRLAALDTHIARLDAEIERSICADPEMRRRLDILISIPGIGAVTAASLIAGLCELGACSGKQAAMLTGLAPIACESGERAGHRSIRGGRPAPRNAIYMAALAASRHNPDLARFAARLKKVGKPNKVVLVAVMRKLIVLANTLITKNRIWTPNPP

SEQ ID NO: 328908 - protein, 355 aa, unidentified
MISTKYIGMDVHKESISIAVSNSAGKVVMESVIETKASMILQFIEGLRGDLQVTFEEGTSAAWLYDLLKPRVTKLVVCDPRKNKSMREGNQSDKIDARRLAELLRLHHLTPVYHGEHGLRTLKELVRSYLTITKDLARVMTRVKAIYRSWAIPCTGKQVYARCHRAEWLAKITEPGVHRRAEFYYQQLDALRLLRQEARRDLLAESKKHKAWKRLCQIPSIGPIRAAVLLGILQTPHRFRTKRQLWNYGGLAIEMHSSADHRSVDGQLQRSRKNVLVRGLNRNCNHDLKNLFKGAAAVASSKPGPFEQFYAALAAKGMRPEMARLTLARKIATIVLIVWKRGVCFDAQHLKPQTA

SEQ ID NO: 328909 - protein, 397 aa, unidentified
MSLFCGIEWATEHHDVAVIDDEVHVVARGRVSNDAPGFAALLTLLAEAGDSAAEPIPVGIETDRGLWVAALRETGRTIYSINPLAASRYRARYALSGAKSDAPDAVLLANIVRTDPGAHRPLPADTEAAQAIRVLARAQQDAVWARQQIGNQIRDLLKDFYPAALVAFADLADGGLARRDARTILTAAPTPAQAATLTPARLRRLLIKAGRKRYLDRDVARLRQVFADTYLHQPPVVENAMGIHLAALLGQFEAACTAADELAEAAISHFEQHPDAEIITSFPGLGMLAGARVLAEIGDDRSRFAEARGLQAFAGSAPITRASGKKAVVLHRHIKNRRLAAVGPIWALGSLRASPGARRHYDARRAAGDWNQQAQRHLFNKFLGQLHHCLHTGLLYD

SEQ ID NO: 328910 - protein, 341 aa, unidentified
MEDYIGLDVSMKETAVSIRRDGKRVWRGKCSSDPATIANILGKRAPRAARVVFETGPLSVWFYHALRAEGLPAICIDARHAKAALDMAPNKTDANDADGLAHLAEVGFFREVRVKGFDSMLTRTLVAARTRLVRVAVDLSNTIRGLMKTFGLIVPSGKGRTFERNVRTLVADQPKLSAIVLPMLEAWSAARVQAVRLETQIVAQARRSEACQLLMSVPGVGAITASSFVTAIESPDNFRKSRSVGAWLGLTTRRYQSGEVDYDGHISLRGDRHLRGLLYEAATVILTRSSAESDLRTWGLKLKERVGFKRAAVAVARKLAVTMHAMLKSSTIFERTAKASG

SEQ ID NO: 328911 - protein, 390 aa, unidentified
MQRFVGIDVARRTHLVAIVGETMTVLVKPTPVTEDAAGYEKLITLVGSPADTLIVMEATGHYWRNLFVYLCARDFRCAVVNPLRIRRFAQEDLRRAKTDRTDALTIARFGAQKRPEPTPPPDPVLDELRELVRLHERLGQDFGDRLRQLHRLLVLVFPEFPNVVRTLESQRATALLRQYPSAEAFRQADEGDIARLRCDGRRRLGRAIASSLIAAANSSVGQHHSAAYDVSVRAFCADIDLLRQSLHDLELEIQKSVRGHTLASVLTSIEGLGTLTVARLLARLGDPTRFRNAAALASYVGVVPATNQSGLHRPGRAPVSQLGNAELRASLWMPTLTATKRNAWLRAYYERLVARGKPRKLAMVAAMRKLLSAVYSVAKTRRPFVTRLDA

SEQ ID NO: 328912 - protein, 347 aa, unidentified
MNEQGPAWVFTRTVDKGAKLAALHDKPGNTLIMTDFTHFVGIDISKNRLDVHSAPDNRTFSVPNTEVGIADLLAQAAQGNVAYGCEATGGHEATLLVGLSEAGRSVWCLHPADVAAHKRLIGRRAKTDPLDARAIADATAAVCTQKPPTQLTRSRRAIKELSRVRRGLSQQCTTLASLAAAADDAVALDTVERLLASLKTEINALSREIERRIQSDTETARTAELVRSVPGAGAVLAAELIASMPEIGAVSSRVAASLSGVAPHPRQSGNTARTGRCTGGRAVIRRILYMGVMSLIAADSSSFSAKYRALRAAGKPHKVAAIAIARKLIVAINTVLKRGTPWEPSVA

SEQ ID NO: 328913 - protein, 338 aa, unidentified
MNNCIGLDVSKSTINVHIPKGSLDLEIENSKKDIKSLFSKLKKIYKKESENLVFIYEPTGSYSYWLTRFCALKGIKVFMVNPKQSHNFAKAIGQRGKCDKVDAKMLSLCKSIAREGEIRVPVVNKVEQEIKELIGYYKFTSKQRVQANNHLESIKIKDGSSYAIKDLEKEIKNFAFKEKAIIVKIKEMIQDDAILNSKFINIKSIVGVGDVAAIALIHLFIKYPNANQREIISLSGLDPVERTSGSSIRGKSRISKAGSKLYRGSLFMSAMVAIRYNSEIKQFYDRLKENGKHTTVAQVAVMKKMIVVAHSLYKNNCAYNATFYQKQCGRNEQTALSA

SEQ ID NO: 328914 - protein, 343 aa, unidentified
MTKLNVIGVDLAKSVIQVSVLSPSNRELRNSAFSRRKFAEFLGRQRPSLVAFEACATSHYWARVAQRHGHQTKIIPAKAVTPFRQGHKTDENDALAVAEAASRPNVKLAPLKTIEQQGMQAVQRSRELLVHERVSLSNHLRGLLMEFGIVIPQGFSALYRQLPEILEDGDNELPDLYRPTLQLLYGRLCDLREDLERLNDELKMLVQQHPVCQRLTALEGIGPVCSVLLYATLGTGEAFANGRQFSAYLGLTPKQFSSGGKVHLVGISKRVANRRLRAVLIQGARAYVYHMKEPKTAKDRWLWAIVERSGKCKAAVALANKNVRTAWAMLTQNTEYQRYPLAA

SEQ ID NO: 328915 - protein, 443 aa, unidentified
MPIIRGNIAGIDLGSERHWVCAPTLDGKEREITSFGATTSELLGMAEWLKARKVESVAMESTGIYWIAPHEVLEGQGLQVLLVDTRQLARVPGRDKKTDPTDCEWIQRLHSCGLLRGSFRPEEAVCMLRTLVRDKANLVAESGDWLRRMQKSLDQMNVRVHRAVSDIDGATGMAILRAIAGGERDAQKLAKFRDARCSKTEQEIAEQLSGHWREDHVFSLQQALKMYDAVQERIAAYEQEILRKLDEMEREEPPEPTAPPLQNANKARMIKKRGQEAKRQALYRMSGVDMTQIDAIGVETVEVVLSEYGSDLSRFPTEKEFVSHVTLAPRVPKSGGKPVRKKKRNSASTRVAAALRMAALSLRHSQTALGAYYRRIAQRRGGDIAVFATARKLATLVYRLLRWGQPYLDEGAAAYENRYRQHRIGCLAATAKELGYQLTPVSA

SEQ ID NO: 328916 - protein, 354 aa, unidentified
MKYFAGLDVSLEETAICVVDEVGHMIKEARAASEPDALHVTLASFNLSFERVGLEACSLTAWLHGELRSAGWPAICIESRHAKAAMGAMPNKTDRNDAHAIAQIMRTGWFKAVHVKTPICRSWRSLLVARRAVLNEMRTIENVVRAILRETGLKLGTPARKDFIVRARELIAGEQTLASMIEPLLEILGTMLREFARLTKQVLTIVRDEPICRRLMSAPGVGPLTALAFRATIDRPERFRKSRDVGAHLGLTPRRYQSGETDIQGHVSRCGDELVRTALYEAAHSLLIRSKKWSSLRAWGMKIAKHRGMARARVAVARKLATILHRMWIDNAEFRFGQEHNIAPTVKAIAGAAA

SEQ ID NO: 328917 - protein, 315 aa, unidentified
MSDVPCFVGIDVAKAQLDIALRPSGERWAVPNDASGVATLVDRVQTLHPTLIVLEATGGLERAATSALAAAGLPVVVVNPRQARDFARATGQLAKTDALDARALAHFADVIRPTPRPLPDAQTQELRALLGRRQQLIVMRTAEQNRLAGTSERLTKAIAAHITWLNADIATLDDDLETLLRASPLWRANDDLLQSAKGIGPVCAHTLRLELPELGTRTRQQIAALVGVAPLNCDSGTLRGRRTIWGGRAHVRTVLYMGTLVATRFNPQIKVFYERLLAAGKVKKVALTACMHMFFTILNAMLKHRTPWKPQEVQN

SEQ ID NO: 328918 - protein, 357 aa, unidentified
METAYDGRQVVGMDLHRRRSVLVRMTEDGRRLGTARITNSPQELRREIARAGKSPKVVLEATFGWYWAADTLAAAGAEVHLAHPLGVKAFTYRRVKNDERDAADLADLLRMARLPEAWIAPAEVRELRELTRYRHKLVHLRTSCKDQVHGVLAKLGVPVTCTDIFGTAGSAWLDGLGLPQPYAGKVTSLRHLTGELTAEVTMLSAVIADLLAHHRGYQVIQQLPGIGPVLAAVIIAEIGDVTRFKNPAQLCSWAGLTPRHRESDTKVARGHITKQGSRMLRWALIEAIQRAGADTVTGAVKDAIIARRGKEAKNIAKVAAARRLLTLVFYGLRDGQIRCLSQTSEDLPPVTPAQRAA

SEQ ID NO: 328919 - protein, 317 aa, unidentified
MNTQINQNEINVGVDTGKTQLDIYIRPLDIYFTVTNNDKGIKKAINEIKKYKPTRIVIEATGRLEQAFIVACAEAKLPFVVANPVRIKKFAGSIGQLAKTDKLDAKLIAYYSEAIKPELSTLKPDTLRKMSDLLSRRCQLMVMRTMEKNRLQMMPKALESTITPMLTVINNQLTKIDNKMAKLIEQCDEYRIKNDIIQSVPGVGNVVAFSLLSNMPELGYITNKEAAALVGVAPVNRESGAFKGKRMIRGGRHQIRTAMFMSMMSAMQCNSVFKATYQRLVAAGKPKKVAIIACVRKMVVILNSMVRDGVYWDPKMN

SEQ ID NO: 328920 - protein, 407 aa, unidentified
MLWGGGVDIASIVRCEPMELPMQTLNNLSRSLIDLEPASTLIAIIEMSLSSWLVAGIVPGIERQPLKKLAVDESALLRLLHRWREEAEKAGCRIKRIVVAFEAGRDGFWLARWLKARSIEAHVIHAASVAVSREHRRAKTDRLDAELLKRAFLGWLRGERNHCKVVAIPTLKDEDAKRPSRERESLVGEQSRIVNRMKAALIRLGIRGFNPKLKRAAGRLDSLRTPEGEPIPPNTLAELRRDMERRRLISNQIRQIEEARLKHFEQAPNDGPHAMVRLLARVIGVGIETADMLVHEVLSRNMHDRRAIARYAGLTGSPDESGRKRREKGLARSGNGRVRRGMVQLAWRFLTYQKESALAQWYRARTENARGARKPMIVALARKLLIALWRFVWQGVVPDGVVLRPAQ

SEQ ID NO: 328921 - protein, 483 aa, unidentified
MKRKSIPSSRGPKTSRPSKSKKQAWKVVHPHAAGIDIGATEHYVAVPPDAVAAGESTVRSFGCFTQDLDALVEWLKACGVDTVAMESTGVYWIVPFQKLEAAGLEVVLVNAHTLKHVPGRKTDVQDCQWIQQLHTYGLLRASFRPDELTCRLRTLVRHRANTVSRGAEYILQMQKALTQMNVQLHHVVSHLTGETGLRILRAILNGERDPLILVELRDPQITRSTKEEMRKALVGDWRPELLFVLKQSLRGWEFCQEQMRECDGQIEQLLKEMPSAVAVKTPAARPQPDPLASTNPRPKGKQSRKRNDPEKDLGPELARICGVDLTAAHGLRLLTVLTLVSEIGVDVSKWRSAKAFVSWLGLCPNNKISGGRILSSRTRKVINRAANAMRMAAVGVGDTDTWLGSFHRRMRAKLGPAAATTATARKIGTVVYHLLKHQEPFIDRDLMAYEAKVYRHKLARIKKQAAALGYALVKTDEEKQLTE

SEQ ID NO: 328922 - protein, 425 aa, unidentified
MNYKQNEKINQVKESTLVVGIDIGSTTQYARAFDWRGIELGKVFTFSNSREGFEAFKAWMRHLQDKYRKSDVIVGIEPTGHYWFDLGAYLEDEGILLVMVNPYAVKQTKELDDNSQSKNDRKDPKVIAKLVTEGRYSAPYTPDGVYADLRIMVTNRKRLIREMTQIKNRFARWFAIYFPEYTDVFGDYEAQSSMLLLKKVCTPEAIVELGAEKINQIWRDAKLRAVGMKRATTLCETAKRSIGLKKGSSAARYEMKLLLEDYEYKKAQLDAVMEEIEKLCRKIPESEQMLAIKGIGVITVAGFLAEVGDVRRFESPRQIQKLAGLSLRENSSGKHKGQTTISKRGRSNLRAVLFNAAIPLIATNPEFKSLHEYYTTRANNPLKKKQSVIAISCKLIRVFYAILANGVTYDAQKMLSDIHRQPQAA

SEQ ID NO: 328923 - protein, 420 aa, unidentified
MGRLKIVYPICCGMDVHRDFVIACVASTNAKGVTDYASKRFSTYSGGLRDLRDWLSERNCHDVCMESTGKYWFPVHNVLESTCNVVVSHPKFVKAIKGKKTDKKDAQWIADLFKHDLVRGSFIPPEDIRQLRDLCRYHQKLTWCATGEKNRAQNCLTVSNFKLDSVFSNVFGKSASAIIEQLLEHPGEQFDVAPFVDGRCKTPIPQIQEAVDGAFSPWQAEKLKVIQGHLDDLDKCNALMEDLILRLAEPYMHQVELLLTVPGVSDPMTAIRIIAEIGIDMTQFESSKHLCSWAGLTPQNNESAGKKKTTRIGKAGQYIKPLLIQCAMAASNPRSKLHPEILHKYQQLKKRRGTKKARVAIARRLLTAIYHILLKDESYTPFVAPAKESIPEDRILTPEQALAMLRAKGYIISEPEMQGD

SEQ ID NO: 328924 - protein, 345 aa, unidentified
MELQTIGIDLGKTVFHLVGLNQRGEVVVRKKFSRKQLLRFTANLQVELIGMEACGGAHFLGRALQEQGHEVRLMPAQYVKPYVKTNKSDYIDAEAIAEAVTRPNMRFVPIKSDDQLDLQSLHRVRERWVMRRTAVVNQIRGLLVERGIIIRKGRCHVDAALPGILEDASTKLSGALRLLLAQLRLELDHLQTRIDEADAVIQQTAGENEACRRLVAIPGVGPVTATAIIAAIGNGAAFRKGREFSAWLGMVPGEYTTGGKQKLLGISKRGNTYLRRLFVQGARAVLQQSAKQSSGLSAWLTQLTARTHPNVAAVALANKLARMAWAVLAKNEPYRPPVLADAATD

SEQ ID NO: 328925 - protein, 341 aa, unidentified
MSYLGVDLHTNSFTVCRRTKQDKESIRTFQIARIADFRKTLRKRDLLAVEATGNTAWFVSQIRDRIRKVTVVNPFQFEVIRRSVKKTDKNDAKTLAFYLSKGMLPEARMKTKENAQLHSLATTRDKLVKQRTALINKIHNVLNSYGIKFKKESLGSEKGLKSVWAYEWDVIVKIELEVLIEQIRGFNKSIKILDKEMVEHGQKLKGHESLTSIKGIAGRSATVLLTVIGNVNDFADENKLAAYFGIVPRVSDSNETVRHGKITKHGSKLGRTTLVQCTLVAKRYSPYLRQYYERIKSHRGSGKAIIATARKFLGIIYNTLKNGWVFEDFPNFVLASSCVKK

SEQ ID NO: 328926 - protein, 344 aa, unidentified
MSVFVSLDVALNSVSICIVDEAGAPVWQGKSLSEPAPLIAALLLHRDNIAQVGIEACPSSEWLYGSLRDAGFPVVCIETRHTQRFLSSRPNKTDRSDARGLAEMMRLGHYRAVQVKSLASQRIRTVLAARSRLVEQIIKIENTIRGLLKVYGLKVGSVHRCTFAARIEALLQRAPELRLGIDPLLEVRNVMRRQKVLLDRKLSLAARGDETCRRLMTIPGVGPIVSLAFKATIDDPSRFKNAKSVAAHLGLTPRIYQSGEIERGGNISKCGDMLMRHLLYEAANSHLRIAKKSSALKAWAMTLLPRIGAKKTCVAVARRLAIIMHRMWVDRTDFNAAPTESIAA

SEQ ID NO: 328927 - protein, 362 aa, unidentified
MEKVITHVGLDVHSKDIVYAVLVGSAREAELHEIPNEPKVIRRTFHRLAVQAFELKCCYEAGPCGYEVYRQLTEMGIACEVVAPALIPVKAADRVKTDRRDARKLARLYRAGELTMVTVPTTEQEAVRDLVRAREDVRKDLTAARHRLSKFLIRHGRIFSEGHKWTQRHWQWLRRQEFERSAERLTFDHYVLEVEHLVERRALLEKDLTRFAATEPYAEAVGKLTCLRGISTLSAMVLLAEIHDFRRFQSPRQLMAFVGLVPSEYSSGGKERRGGITKTGNSHARRILIEAGWSYRHRPAFGPRAREALRHQPARVAEYARKSQIRLHRRYGRLVGQGKRSQVAVTAVARELCGFVWGLMAA

SEQ ID NO: 328928 - protein, 346 aa, unidentified
MLIVGCDFHPRWQQVAWLDNETGETGEAKLVNGNGEAERWYRQLPVPSRIGLEATGNSQWFVDLLQKLGHEVWIGDAAAIRASYVRKQKNDKRDARHVLKLLLEGRFPRLWVPDRAIRDLRQLLIHRHKLVQIRSRVKNGLQHLAMNQGMQKQARLWSAAGQQALRELPLAGWAARRRQDLLQLLANLDEQIAPLDQAAEQAAQQHPQAQLLLTQPGVGPITALAFVLTIGEVGRFPRSKQVTSYLGLIPREHSSGGKQRLGAISKQGNSFVRMLLVEAAHSVTRYDEGFRKQYQHRCHKMAKAVAKVAAARRLAVRLYWMLRTNTPYPEIVRIESSPRVPLGGAS

SEQ ID NO: 328929 - protein, 315 aa, unidentified
MKTSVEKSVVYYVGIDVAKAGVCVATTQLNAVFARDPSGLDKLVAWLRELGPGVHVVLEASGGYEREVVAWLQAGDFAVSVVNAGWVRNFARSQGRLAKTDRIDARVLVDFAAANAPRLRAPVCPEQQKLTDLVRARQQLVAVRTLLQNQLEHTRERLARRSQQELVELTDTRIRRLEKALAQLIAGTPALAAKVQKLTAVRGIGLTTAALLLAELPELGTLNKAEAAALAGLAPRNHDSGAFRGQRHIAGGRPAVRTGLWMPTLVATQHNPILKAFYQRLRAKGKPAKVALTATARKMIVYLNGLLKSTSLSSC

SEQ ID NO: 328930 - protein, 324 aa, unidentified
MKSKSSELCIGIDICKARLDVADNAQSLPWSVANNDAGIASLVERLQTLHPALIVMEATGGLETLLYAALTTAGLPAVVMNPRQVRDFAKALGTLAKTDALDARILARFGAAIQPTVRPMKDATTQELTALVTRRRQLLAMLTAEKTRLQQAAKWIRKDINAHIASLETRLKTIEGHIAAIIKTTPGWKEKDSLIRSVPGVGNVLSMNLLSSLTELGTLNRREIAMLVGVAPLNRDSGNCRGNRRVWGGRAQVRAALYMAALSAARFNPVITPFYQRLIAQGKKPKVALTACMRKLLVILNTMVKTQTVWNPNHFSTLDFNHGC

SEQ ID NO: 328931 - protein, 407 aa, unidentified
MNDSGKRYIGLDVHKHYLIALGVDADLNVVLPARRVELSRLEGWMKKTLTKQDEVVLEMTTNTWQLYDELVEYAGSVMVVHPPHVALITRSQVMNDKIAASLLARLLAKGLLVGIWVPPQEIRDLRGLVAQRRKMTTLATQAKNRLHAVIQRHHLVPPAGNPFGASNQDWWQVLALGKLEKLNLQSDLETLQFAEKQVKRMTEMMEGMAAEQEEIGRLLHLAGFGVVTAVTVWAAIGDIRRFAEPRYLVGYAGLGTRVHDSGMTRHTGKITKAGRRDLRTVLIEAANVAANHHPHWKAELARLEPRLGRNKAVVAIARKLLIAVWYVLQGKTDKFAEPQAVAQKMLKFAYAVGKANRPKGQTAAQFARIRMDALGVGSELTSIPWGSKKPIPLPPSKLKKESAVPNK

SEQ ID NO: 328932 - protein, 367 aa, unidentified
MKKVSTVVAKASRNISQQKLTIGLDLGDRTSCYCVLDEGGRIVQEQRLSTTAKALREAFGKMPRSRIALEIGTHSPWISRLLSELGHEVIVANARKVRLIGESRKKDDRLDAQTLARLARIDPQLLSPVKHRSARAQADLTVIRARASLVRARTALANTARGLAKSYGERLRGCNVRNLDREKAQKLSPELQKALEPLLLASAALSEQIAEYNGRIEEMAKASYPQTALLKQVKGVGTLIALTFLLTLEDPHRFQKSRDVGCYLGLQPGRRNSGQSEPQMHISKEGDPYLRTLLVQGAQHILGPFGVDCDLRRWGLRLAECGGRSGKKRAIIAVARKLAVLLHHLWVSGEAYDPLHNSSRMTVMAAA

SEQ ID NO: 328933 - protein, 405 aa, unidentified
MWPEMLDNMSRQQAALAAKLPALMKNKQIEIRRENGSDQARVEQDGKRVLKLGLDLHYRQVTVALQEDGGQIKVAGKMSHEVFAGWIGKKLSQGWSISSCYEAGASGYWLHRELAALGIDNLVVAPQPMGRGAKKQKTDKRDSVQLVDCLDRYLRGQKKALSPVTVPSLEGEQQRALIRYHRQIMADRGRYQARGKSLLCAQGIQVSGKWWQVRGWITLNSDGRCQDWMREQLKAWREKILSTEAQQQGLRQQVQALAPTTSRPKGMGSYSAAVLEYEMKGWHRFHNRRQVSSYTGLCPGVHLSDGRGKEGAINRCGNRMVRWTLVEMIWRLAKWQPDYQPVRLLAQGLIKSSRAKKRLAVKAARCFAIDLWRLQTGQTTAQKLGLVLQQDLENKTPPAAPAASV

SEQ ID NO: 328934 - protein, 337 aa, unidentified
MKRYLGVDLHRTQFVVCTRWENGEQDIRQWRIGELPKFVEQLCTEDQIAVEAMGTTARFYDAVAGRVARVAVVNPHQFKVISESVKKTDRNDAQALALYLEKDLLPEVRMKPKQNRELMHLAETRDLLVKQRSALKGKINNLLAMQGIELKREALSSKIALERVLALPVSGMVQLELRVLVEQVRALSESIAELDERLEEEGQQLPGYENLTSIKGIGSLSATVLLTVIGKISDFADENKLASYLGLVPRIANSNESERSGRITKQGNKLARTALVQCGLVAKRYSPYLQRFYERIKQRRGGGKAKIALARKLVKIVYDTLKNQWVFEDFPSFTLAA

SEQ ID NO: 328935 - protein, 315 aa, unidentified
MNILGVDVSKDTLDCCLLIQNEPYYHKFSNNDNGFIELLKLYEAFKVTCVGFEATGNYHKKLEKYLYDNGVNPYILQPLKVSNYIKSLNIHGKTDKTDSYGIAMFLLKNDLREYLSFPTRDYFKPILTSLNLLDKQIQQNKNLLHSIDLYPETSDLLDELKDVNKYLTITKDRLEKKAIKLLYSKCPEAKEIKNEIAGVGDKLLLYLIPYLYDNFDKFTLKEINAFFGLNPVSFSSGSSVHKRDKLSHKGDKSVLKMLYMSSVSAVRNNAILKEKYNRLKSNGKHSKVALMAIMSHLLRAIVIKLSQKTKREIKK

SEQ ID NO: 328936 - protein, 388 aa, unidentified
MSTIDRPAALAATTLDNGIVAVSLELSRSKWLVTSLVPGSEKMSKHMVAAGNVAALLALLVRRRRQAEERVGGPVRVVTIEEAGLDGFWLHRLLEANGIESHVVDAASVAVPRRRRRGKSDGIDGETLLRTLLAWRRGEPRVCSMVRPPRPQEEDRRRVVRERAVLIGERIAITNRIRGLLMSQGVSDYQPLRRDRRQRLETLVTGDGRALPPQMKRELLRALDRLDLLVQQIKAVEAERDAAQEATASEAATDDATRLLLGLRAIGPQTAAVLMLEAFYRHFDNRRQVAAFAGLSPSPWQSGAVVHDQGISKAGQPQLRKTMVELAWLWRRHQPGSALSRWYAQRARGQDARRRRTLIVALARKLLVALWRYVSAGVVPEGAAFKPA

SEQ ID NO: 328937 - protein, 341 aa, unidentified
MEKYVGLDVSMEETSVCVLDGSGNIVFEGKTFSQPDALSKLLRAKASDAARIVLETGSLASWLWHKLRGRNFPVICLDARHVRAALSMRVNKTDRNDARGLAELARMGWYREANVKSTESRYTHSLLAARAKLVDLRRDVENQMRGLLKGLGLPPGKGGIKALLEKIVVIMREAPHLRTLFNPMMLAHSALVTQVEFYDVQILKLAKGDETTRRLMTVPGVGPATALAFRSTIDDPNRFKSSSDVGAYLGLTPRRYQSGELDRTGRISKRGDRLTRLYLFEAASVLLSVVKRWSVLKAWSVRLAKRVGIKKAKTAVARKLAVVLHCIWVDGTEFQWGKEKA

SEQ ID NO: 328938 - protein, 412 aa, unidentified
MSQHDGPLYFVGIDWAAAEHAVCVLDSDGRKAAAFTIDHTAAGFQRLAARLGKLGPAEQVPVAIERPDGRLVDALLEAGHPVLPVKPNAIKTWREAEVLSGAKSDPGDAHVIADYLRVRIHRLRPAAPLSSPTKALRAVVRARGDLVETRVAATNQLAALLDSHWPGAKAIFANIESAIALAFLTQYPTAASAARLTEKRLAAFCAQQGYSGKRPAAVLLARLRATPTGTLDPVVSEGIRDAVLAQVGVLTELNTAIKNLDRSIAKKIDTHPDGEIFRSFPRAGTINAAQILAEWGDAREAFDHPDAIAALAGITPVTKTSGKQRGVSFRWACNKRLRVAITTFAANSRFASPWAADIYDRARASGKDHPHATRILARAWVRVMWRCWQNNTTYDPAQHGGAQHLVQQHIAA

SEQ ID NO: 328939 - protein, 346 aa, unidentified
MKKGYAAQRQFVGVDLARRRSVIARMDRDGVLVDCVQIDNSVEALVAEVAKAGAGAPVAVEATFGWYWAVDALEAAGHEVHLAHPKGNASMHNRRVKTDARDAAELARLLRMEDLAESWIAPPRIRALRELVRHRHKLVKTRSGLKASVHAVLGKCGVVLPLGDIFGPVGLRQLAGVELPEPYAWRVASQCRLIEVITAEVDLVEAAIAVAFKDDPGYQALLTIQGIGPVFASVFVAEIGDVRRFATPHALASWAGLTPRHYESDNKARRGHVTKQGSRLLRWAATEACQRIREPSLAHKRALILDRRGRSAANISKVAAARRLMHVVYYTLRDGHARCLDTAAAS

SEQ ID NO: 328940 - protein, 391 aa, unidentified
MIYIGIDVAKDKHDCFITNSEGEVLFNAFTIPNNADGFHDLFQKISSLTNDFSNVKVGLEATGHYNYNLLGFLIDKGLPTFVINPLHTNLFRKSLSLRQTKTDKVDAHTIALMMMSGVNLQSYSDTSYHNEELKSLTRYRFDKVQERAKLKTSISRLVNILFPELEKLVPTLHMVSIYALLAEFPSSAQIASCHLTRLTNLLANASKGHYNKEKAIEIRNAAKHSIGSNMPAKSLELKHTIRLIQELTSEIDEIECSIKSIMDDIRSPILSIPGINYRMGAMIIAEIGDFNRFSSPDKILAYAGLSPSTYQSGQLDGCYSHMEKRGSRYLRYALFNATKFVCIWDNQFSAYLAKKRSEGKHYNVAISHAAKKLVRVIYQLEKSGQLYHRAA

SEQ ID NO: 328941 - protein, 408 aa, unidentified
MNAVGIDVSKGKSMVAALRPMGEVALLPQEFLHTEVGLEQMAYAIIALGEDTRVVMEATGRYHEPVAAALHEYGIYVSVLNPLFIKQSGGGSIRKVKTDKADAMKIAKYGLDNWVDLREYTPMDTVRQQLKLCSRQYNLYMKTVVSLQNNLISLTDKTFPGVNELFSSPERADGHQKWVDFVMTFWHCDCICRVSEKAFTERYQKWCKRKGYHFSTEKALDLYAGSCGHFTTLPKNDNIKLLITTAAQQLLAGKMTLAALRAEMTRLAMQLPEYDTVRAMYGVGQTTAAQLMAEIGDVRRFPRRSSIVGFAGVDPGVDDSGKHSAKSVPTTKRGSPHLRKTLYQIVCTYLRKAPADEPVYQFLDKKCAEGKPYFVYMTAAQNKFLRIYYARVKECLEAFDAQQDIAQS

SEQ ID NO: 328942 - protein, 483 aa, unidentified
MKTKSAKASGSNRKSNRQGGPIRPAANMPVINHHAGGVDLGAVEHHVCVPPDAVPEGQSNVRFFRAFTRDLDKLVEWLQNCGVTTVAAESTGVYWIALAQKLEAAGIEFVLVNAKHLKHVPGRKTDIKDCQWLQQLHSYGLLNGSFRPTQDICSVRSLMRHRENLSQSCGQEVQHMQKALQQMNIHLHHAVSDLIGETGLRILDAILAGERDAQKLVELRDAQCRKTTPEELVAALQGDWREEHLFVLRQALENYRHLIGQLSRCDEQVEKALAQVVIPEPKEPAPEAPKNPAATQQTRKPKFYYIRKAGSGLKRDLKAELERICGVDLTQVIGLNVLSVLIVISEIGLDMSRWRSAKAFCSWLGLCPGNKISGGKVLSSKTAHVINRVGILLRNLAPAVGRTDTWLGTFHRRMRARLGPAGANTATARKLACLIYHLLKYKEHYIEVDQQVFTEKLRKTRISRLRKQAQELGLQVIEQQVAA

SEQ ID NO: 328943 - protein, 340 aa, unidentified
MLYVGLDIHTKHIALCVLSEAGQVVQRARVRGIDQMLRLLKGLPDRFEVCYEASCGYGHYHDLLRPLAARVVVAHPGRLRLIFRSRDKNDRKDAERLAKLLYLGETPAVHVPSLGVRTWRELINCRAQVIAKRTRAKNALRALLRGAGVVPPKGPGLWTKKGLAWLRQLDPPTASQRLRRDLLLDEVEALNGQVRRIEQELSRRAQQTPAVARLRAIPGVGLRTAEAVAAFLDDPHRFRHAKAVGRYFGLVPCQDQSGDRNRLGHITRAGPAVVRRLVAEAAWQAVRRSPTVCAFFERTRRGDPQREKIAVVATAHYLVRVMWALLKRGTGWQENEARAK

SEQ ID NO: 328944 - protein, 339 aa, unidentified
MDKITTIGLDLAKNVFHVMCCDARGKVVRKKMLRRGEVIRFFSDMTPCLVGMEACASAHYWARELQAMGYQVKLIPPQFVKPYVQGNKNDYNDALAIAEAVVRPKMRVVAPKTTAQQDVQALHRLRERRLQERTALCNQLRGLLAEYGCILPKGVNVMRHRIPELLEDGENGLSGLFRKLLAQGYQQLQELDEHIDCYTRELQAQCQQDEACGRLQTIPGYGPIIASAFRSVVGNGSAYRRGRDVSASLGLVPRQHSSGGKETLLGISKRGDRYLRSLLIHGARSVVLHARNKDDRMSRWINRIKAERGYNKAAVALANKLARIGWGVLHNQTTYHAAR

SEQ ID NO: 328945 - protein, 323 aa, unidentified
MSPVVGIDVAKRSFDLAIDLANGKYRTKAKLPNDPKGFQILQTWLQTHAQADSWIVMEATGTYHEALAEFVYGLGYRVCVLNPAQMALYARSQLTRVKTDRSDAKLIASYGQRHAAQLRPWQPDPPALKRLKALVRRRDDLLQMLQMERNRLDVAALVVRDSLLENIGQLQARIAQIERAIDDQIDQDPTLRGQRELLVSIDGIASTSAALMLAELGNVERFAHASAVTAFAGLNPRLQESGKRQGQVCISRTGSPRLRAGLFLPALVAMTHNPVVRALKLRMRERGKANKQIICAAMRKLLHIAYGVLKSRTPFDPQKTLAC

SEQ ID NO: 328946 - protein, 320 aa, unidentified
MLSFCGIDVSKDRLDVIVLPEEQCCSVSNDRTGWADLVERLRGRSIAGIGIEASGGYERGVTRALLAAGMPVRQINPFKLRQFARASGVLAKSDPLDARMIASFVAIMPTRPAQRTPAGAAQVAEMLAVRRQLSAEKVAAENASRLLEDAMLRRLSRRRIGRLAGDIDLLDKRMVEIVANDPVLAHRYRLLTSMPGVGSLLACTLIALLPELGCISRKQVAALVGVAPYAFESGTLKGRRCIWGGRANVRQVLYMAAMSASNWNPALKPFHDRLNAAGKKPKVTIVAVMRKMITTLNAIVRDDVLWADRHSGRHSVTTTR

SEQ ID NO: 328947 - protein, 398 aa, unidentified
MSLDPHEERAAIQTHIGAIFISLELSRSKWLITSLAPGGGQRMSRHSVDAGDLAGLLARFSAIREKASARTGVSYPIIVIQEAGLDGFWIHRALEQEGIESHVVDAASIAVSRRRRRAKTDRIDGEALLRVLLAFKRGEPRVCSMARAPTPQAEDRRRICRERKTLLAERIRHVNRIKGLLFSQGIGDYEPLRRDRRGALEAVRTGDGRALGANMKAQIGRELDRLELLLGQIAAVEAERDAMLAREAAAESAQDAKRTPAAVEMLMDVRGLGPDTVAMLWTEAFYRSFDNRRQLAAFVGLAGTPWQSGSIDHEQGVSKGGNHRLRTAMIQLAWLWPRHQPGSALARWFVERTRGASKLQKKKMAVALARKLLVALWKWVEAGVVIEGAVLKSAAKAR

SEQ ID NO: 328948 - protein, 342 aa, unidentified
MYYVGLDVHKKTISYCVKDASGRIYQEGKIGATRLELDAWMKTLPQPWTGAMEATIFTGWIYDYLLPYAAAVKVAHPVMLRAIAAAKKKNDRIDAGKIADCLRCDFLPECHMATTEIRDRRRTLRYRHLLVRQMVQMKNRISGLLLETGVTHNKQRLHKVKYFRELLSSNDEITESIRPLLQLSRDTVVRLQKTEYALVSSLQRDPLLVERVKRLMTVPGVGPITALTWALEMGDVSRFRSVKQAISYCGLCGDEKSSADKVMRMPLSKQRNKHIQHVLVEAAKLAPRQSHELAQVREKEIEKGNANRATLAVARKMVAYLLAIDRGGRDFVPAEEHKSTAA

SEQ ID NO: 328949 - protein, 363 aa, unidentified
MEYIAFDAHKHYTLASVAQPDGRLVREQRLAHERGAFQQFLARCEPGSPVALETVGNWYWIVDEIEGAGCIPKLVHARKAKLMMGQINKTDKLDARGLNTLQRNGTLPTVWIPPGELRDQRELPRTRMTLVRQRTQLKNRLHATLAKYALHDLAVTDLFGVRGRQLLRQRCELLPPHTAYATRELLEQVESLDRQVTGFEHRIKSVFKPTLPIQLLTTVPGVGLTLAVVIALEIGDVTRFPTAEKLASYAGCTCRVHASGDKLRYGRLRPDVNRDLKWAFIEAANAICLMRRRHPHRHTSRLYERIARRKGHPKAIGAVARHLAEATFWLLSKQEAYREPQASTVSSTGDKRDFAMSSRKLEF

SEQ ID NO: 328950 - protein, 352 aa, unidentified
MSEESTKRSPKSPKENFLKYSIGVDISMDCFDVCIGMINEQQEVKIIGTRSFLNQTKGFTQFLTWVKAKCKWDLEVCYSMEATGVYYESLAWFLHRQDFYISVVLPNKARKFMQGLGLKSKNDKIDSIGLAKMGAVQRLKRWQAPDEMFLQLRSLSRHRQSLQETRTVFNNQLHSVQCREFVEPFLVKQLKSMMDQLDLFIKEAEEEMRSIVALKPEMMARIEKITAIKGVGFISVITVLAETEGFNLFKNQRQLVSFAGYDVVESSSGKHVGRTRISKKGNAHIRRILHMPAFCVVQYQEPAFIALYERVYERTRMKMKAYVAVQRKLLVLIYTLWKNGQDYIPVLPASLS

SEQ ID NO: 328951 - protein, 360 aa, unidentified
MAHFAGLDVSIEETAVCVVDDQGMVLLQCSVATEPEAIAEALAPFAATLRRAGHEAGSLSPWLHPQLKALGVPVVCLETRQVRAAMSAQRNKTDATDALGLAHLMRTGWFRQAYVKTDGAYRLKLLLTHRRNLKRKFLDLENAIRHSLKSFGVRLNKVGRGGFEQAVREACAGDAFTAELMECMLTARAALWRQYLKLHKLAVGLVARDELCRRFMAIPGVGPVTALTFSAAIDDPSRFRRSRDVAAYFGLTSKRWQSGASIDVHGRISKAGDPDVRRALYEAASAMLTRYKGKTALKSWGQKIAKRCHKKAVVAVARKLAVIMHAMWRDGTAYADRPHAAGRPDDAPTAKERKLLGVLA

SEQ ID NO: 328952 - protein, 375 aa, unidentified
MIYVGIDVAKDKHDCFITNSDGKVLFPVFTIQNNRDGFDVLFSRIQSSSSDVSNIKVGLEATGHYSYNLLGYLIDKGLHTFVINPLHTNLYRKSLSLRKTKTDKVDARTIALMLMSDVNLKSYSDTSYHNEELKSLTRYRFRKVQERAQLRQSVSRLVTILFPELEKLVPSLHIASIYALLSEFPSAGTIASCHLTHLTKRLENASKGRYSREKAIEIRNAARASIGSNMPAKSLELKHTLRLIGELDSEISEIESEIKRIMDEIHSPILTIPGIGYRMGAMILAYAGASPSTYQSGQMESSYSHMEKRGSRYLRFALINATKYVCQWDETFGAYLQKKISEGKHYNVAITHAAKKLVRLIYAMEKSGKPYIKTA

SEQ ID NO: 328953 - protein, 409 aa, unidentified
MGLLEVALDPATVVVAVDPGKVMNRVWLSDGTGLLQEPVSLPVARSGIAALENMLAAHAGERVIAIEATGSLHRAWATELERLHPGALRLFAPSETKAARQQLGSGRFKTDDRDCAALTYLARQGAGRRQTEEAAVEELRAAVRHRRGLVADRKKAQQRLHDQLNSLCPGLSAPAGHGRALPIESPTGQAVLACVVAFDGRPPSRRSLIARAPGRLTKASAAYWADRWRECLPPPPDAAARAARLGRDLDRYRRLLRDIAAVESETEVLLARTEGQVLTSLPGVATNRAAAFAAHSLPIARFPDAEHLYSATGLAPAMYESATIRRRGRISRQGLAEHREALMGIAWGLAQRSPSFAERDAELRARGMAPIQARVALARNACRLAYRMLVTQQPFDEEAYRRRRLSRGR

SEQ ID NO: 328954 - protein, 448 aa, unidentified
MKQKKPIKRKSIKLPKHLLNLNPYAAGIDIGSKSHFVAVPEGTDEQSVREFSSFTDDLEQLAQWLTACGVTTVAMESTGIYWIPVFEILESYGLEVRLVNARHVKNVPGRKSDVLDCQWLQQLHTYGLLRGAFRPADQVCALRAYVRQRSTLVRSSSSHIQRMQKALAQMNLQLHNVVSDITGVTGMRIIKAILAGERDTKVLSGMRDPRCKNSEETIARSLQGNYRQEHLFSLRQAVELYDFYLAKINDCDQQILEQLKIFDASDDNDKPDYKPPKNIGEALQRMSGVNLADINGIDTNTALKIIAEIGIDMSRWKTAKHFASWLGLCPGTKVSGGKILSSATKQVANKAAAALRMAAFALINSKSALGAYIRRQRARLGASKAITATAHKLARLVYSMLKNGTTFTDAGQDYYEERYRTRVIQNLKRKAQEMGYKLVSIQDEPQTA

SEQ ID NO: 328955 - protein, 371 aa, unidentified
MKETITSYVGLDIRKASVAIAIADRGRAAPRFVGTIKPSPAQLCKALRRQRCRPENTLLVYEAGPCGYGWVRYLRKQHWRCEVIAPSRLTRSPAEQRIKTDRRDALLLARELRAGNLTNIVVPDEHDEAMRDLVRAREDACAARLRVRLQMRAMLLRHGRDYVRFGSWSQAHERYLATIRFDLPAQTLAFNEYRLACKEAHERVERITASLRQLCESWRMNPLVKALMCLKGLDFVGAVTFVAEIGDLTRFDHPKALMSYLGLVPSEYSSGASRRQGAITKCGNKHARRILVESAWSNRYKAQITRPLELRQEGQPKIVRDISWKAQLRLTKRWRSLSMRRQLNPNKICVAIARELSGFIWDIGQHITLKP

SEQ ID NO: 328956 - protein, 353 aa, unidentified
MLAELVDHVIGIDPDRDWITAAVVDANTTGVIATAKFAANNDGYDEAVEWADIHTAAGDRGWVVEGSGSYGRGLTAALSRAGEWVIEFDRPHQRPTKDGAKTDELDAVRAAREALGRRQLHTPRTHDGHREALRVHTVTRAGVVRARTAAINELKALVLTAPDELRSDLRGLTTPALIRHCAAFRTTPKRPIAEQCVRNTMRVVARRVQHFNDEIEVHDAAMKQLVDEAAPQLVAEPGVGYVTAAMFIIAWSHPGRCRSEAAYARLAGVAPLPANSGQSQDRHRLNRYGDRKLNRACHMVALVRMHHHEPTKAYIARRRTEGKTDREIRRCLKRYIARNVWRLLEHQSPRITA

SEQ ID NO: 328957 - protein, 338 aa, unidentified
MKLYGGMDLHSTNVVTKLIDEDDKVVYRKKQGCDLKLILNGLEPFQDGIEGIAVESTYNWYWLVDGLMEAGYQVHLVNTAAVKQYEGLKHTDDDTDAFWLAHLLRLGILPTGYIYPKQFRALRDLLRKRGQLVQQRTTHIISIENLYARNCGNRINCNTVKRLTKEQIQKQFENPNLSLAIESNLSIMNALGIQIKVLEHAVLKQAKLDSRYQYLLSIGGIGQILALTIMLETGNIERFEKVGNYTSYCRCVGSEKLSNGKKKGKGNTKNGNKYLSWAFVEAANFAIRYNERAKRFYQRKAEKRNRIVALKAIAHKLARASYYVMRDQVPFDSAKLFV

SEQ ID NO: 328958 - protein, 344 aa, unidentified
MTLITTIGLDTAKQVFQLHGVDNEGTTILRRQLRRSEVLKFFRKIPSCVVGLEACGGAHYWAREIKALGHEVRLIPPAYVKPYVKRGKNDAADAEAICEAVGRPSMRFVPLKTVGQQATAMLLKARDLLVRQRTQTINALRGHLTELGITTSRGVGKVDDLAAIVRDEDDARLPPLARIALLPLTHQIEAYTSEIVKLEKHMIRESRQDATLSRLTSIPGVGPITASSIAAFVPDPKAFKSGRHFAAWIGLTPKSNSTGGKTRLGRISKMGNPVLRSLLVVGASAVIQHARRGAKVSAWLTELLRRRPYKVAAIALANKMARIVWALLVRGGQFHSTANETMAA

SEQ ID NO: 328959 - protein, 533 aa, unidentified
MATKRNSRKSRKISPAVLGKPKGVIQARVQKVGPERFGIVAVDCAKARSKWMLCDFYGKVLIPPTVVEHQRAALELATVQLREAIEQHGLQDHIVAVEMTGTYHRPVQRAFRKAGSETRLVHPFASRHYRLPAHADSKTDDHDLEGIFRATVNGFGLVEPEWDEIYRHLQILARHRRDLVQKRAKLQSQIRQALERCLPGYADLFPEDDLWKRPVPMAVARHAVRPEVIRAAGVSGVERWLAAEKLRAQTRTVERLVAWAGNAAAADPLCEHLTRVWQTLYEDWQAKTRQIDRLEQDLAAILVKTPYLLLLSHPGINVVSASDLAGEMGPIEHYAHAKAISGRAGLFPSRYQSDEVDRADGPLARFRNARLRAAWMRVADCLIKSNAHYRGKSALWKQRGVDPRDVRSRVANRVTRTVFQMVSGRRLYHHPSRLDRSYVLAKLLEFHKEHATAPAEILRDLREAAAQIPKAEQAAEAQPLQETCRKAQRSRRSGPQAIGEILLVVLAKLGVGIVQSESEAPSLDANVSDTGTR

SEQ ID NO: 328960 - protein, 482 aa, unidentified
MKRTNIYQNQSQALLHLFEEAGSNDKVMCVPMDYAKNDHLVMFLNGHGDILRKPFSVKNTPEGIAYIDDQVTRFCRRQGIKKKHVFFGGEDANSFAKNFVSTLRCKGFVVANVNAHDAKKQRSNVQASTDRIDLMGIATMLLSCRANCCAAQSGIYRNLRTLVRHRRRLVQMLTEVKNRVHGIVDELFPGFLNEKNSGIVPFTQSSLYLMQDRFSPKQIRRRRRQKLIEILKRSSTSKAEHTAAKLQQYAGKVLHAPVEHVDTMQLSLAQHIKHIRCLKESVAQMDKEIALNLAQTQGAFLTSVRGIGLVLAAGVTAEIGDPNEQKPLNNLASYSGIIPRVKQTGGLDGKTYTGPVAKRCNRILKDYVVKSAYHIGLHGPPDLMADYKRRDASGQHADFGIGRRYLRMAKSLMRTSQVYLPPNLRKADSTRQDRPGYYLMSWPYLREKWKKVGALEAAFANNRPLGRWRQIVQELYDIKLKL

SEQ ID NO: 328961 - protein, 320 aa, unidentified
MTQDLFIGVDVSKATLEVVVLPGEHAFSVDNSEDGIHELVTKVSQIGIPKIILMEATGGLERRALALLGAAGFPVTAINPRNARDFAKSIGLLAKTDRVDAKALALFAQRNLPPCRPLPDQQTRALQDLIHRRRQMLDMLSAEQTRLPVVENPKVRREIQSHITWLKKRIHIVDYDIDQTIKNSPAWQPKSDLLRTARGIGPVMASTLIGQLPELGKLSNKQIAALVGVAPFNRDSGTIRGRRCIWGGRADVRNVLYMATLAAIRFNPTIRAFYQRLCLAGKLRKVALVASMRKLLTILNAMVRDKQPWRASPPEISLES

SEQ ID NO: 328962 - protein, 428 aa, unidentified
MNCNTQNAKIASITEKTLIVGIDVGSETHFARAFDWRNYEYTKKPLEFSNTEAGFMMFKAWVEDIAEKQGKTAVIPGMEPTGHYWFALGKFLQDSGMKPVHVNPHHVKKSKELDDNNPNKNDRKDPKTIAALVNEGRFSYPYIPTSMYAETRSLSNLRFQTQEELTRIKNRIARWFAIYFPEYKDVYGDLMAVSGRMILKEAPLPEDIRILGVNGVNQIWRNAKLRGTGMKRAKILVSAAEHSVGSKEAPEAARIELKNLLNDMDVYVSRMEELLQTIEEKLKTIPYVDKLMEIKGIGLITVSGFIAEVGDIGRFDNPKQLQKLAGYAIVANDSGKHNGESRISYRGRKRLRYVLYEAAISLVGKNAEFKEIHEYYRTRKENPLKKMQSVVAVACKIIRVFYTILTKGVDYDPMKLMSDIRRPQLQAA

SEQ ID NO: 328963 - protein, 373 aa, unidentified
MPRYSTAFGMDVHLRSTTVCALDAETGEAVTRRFRGNPWGEVAEWMSGFPGPSLAAYESGYLGFAPQRELSGLGVDCVVAAVSKVPRSAADLSSKNDRNDAARMAKAILSHDISPVWVPSPEIEGLRDLAGAHDAATARLAAAKQRLLAFLARRGYAYGGTTPAGNPRKYWTYGFLRWLDGIHPADDGGIRALAALRNEVEAADETREAVLAEYRAAVAAGPLSAEVEALQSIKGCGFALAAAFAAEVGDFSRFRSGRQVTAYFGLAPKQRSSADSVRLGGISGAGNALVRKLAVEGSWCYAQAGHQPKLMPKGSGVPLEIRMHGRKGSERLLRRREEMLERGMPQAKANAATAAELVRWLWALGAMCREAGE

SEQ ID NO: 328964 - protein, 355 aa, unidentified
MNMNAVGIDVSKGKSMVAILRSYGEIISKPFEVKHTVSGIRSLIEQIQSIDGESRIVMEHTGRYYEPLVRELSKADLFVSAINPKLIKDFGDNSLRKVKSDKADAVKIARYTLDSWTELRQYSLMDEIRNQLKTMNRQFDFYMKHKTAMKNNLISILDQTYPGANTYFDSPAREDGSQKWVDFSATYWHVDCVRKLSLNAFIDHYQKWCKRRKYNFSRSKAVEIYEASKELVSILPKDDLTKLIIKQAVEQLNTASQTVEQLRTMMNEAASKLPEYPVVMAMKGVGKSLGPQLMAEIGDVSRFTHKGAITAFAGVDPGVNESGSYEQKSVPASKRGSSTLRKTCLLYTSPSPRDA

SEQ ID NO: 328965 - protein, 312 aa, unidentified
MEQYNLGIDIAKTCFDVADTDGNLLGRFPNNADGIRKYIRSTASLKPALIAMEATGGYERKLALILHEHGFRVVIVNPRRIRDFARASGQMAKTDKIDAVMIARYAALLSPEQQTPISRKSFQLKDLVSRKRQLVSMRSMKKNRLEHATAHDIKTSINQTIKYLNKQITKTELAIDNMLAADEALSACAFRLATVPGIGHATAAFLVVELPELGSCNKRQIAALAGVAPVNRDSGMFRGKRMTGGGRSQIRTLLYMPTLVAIQHNPAIRTFYQRLVDQGKPKMTAVVAAMRKLLIILNTMLKNNQAWNPDLA

SEQ ID NO: 328966 - protein, 345 aa, unidentified
MRLYAALDVSLNKTAVCVMDHEGHLLREVEVATCPDALAEFLRGYADGLERVGLEAGPMSEWLVRGLAGHGIEAVLMETRQAHKALSAMTVKTDRNDARGLAHLLRMGWFRPVHVKTVSAREQRARISARETLIRQLRDLENSVRGLLRGFGLRMPPLLRAGWADAVRALIEGHPSLPVIFAPLLQAREALREQLASLDRQVRNAAREDPVCRRLMTVPGVGAIVALTYRSTIDDPGRFRSSRSVGAFLGLTPRRYQSGETDRVGAISKAGDPAARVALFEAAHVLLTRVARWSALKAWGMRLAQRRGTKRAKVALARKLAGILHRMWVSESDFRSGAPAAAMEG

SEQ ID NO: 328967 - protein, 334 aa, unidentified
MDTHADMHVAAALDPVGGLLGVREFPASPAGYARLLGWLSGFGTVALVGIEGTGSYGAGLARHITAAGVRVVEVDRSDRQDRRRQGKSDPLDAVSAARAAQSGRAHGAPKGRDGAVEAIRALMVAKRSAAGERTRTINQARALILTGPDDLRARFATHTAAALVAGIASLRPRPGDVPGYATRVALRELGRRAVFLGSQLERLNELIVPLVTARAPRLLALYGIGPNTAALLLIAAGDHPGRLRSEAAWAHLCAAAPIPASSGKVTRHRLNPGGDRQANHALWRIAFTRMGSHPATRAYVERRTKEGKSKAEIIRCLKRYVAREVYPHLRPAAD

SEQ ID NO: 328968 - protein, 370 aa, unidentified
MKAKVRFLGLDVHAETITVAVAEPEGEVRSLGTIPNRAESIRKLVRKLGPAEQLRACYEAGPTGYVLYWQLTQLGVACAVIAPTLVPVKAGDRVKTDRRDALKLARCHRAGDLTAVWVPDQGSEALRDLVRAREAAKQDQLRARHRLGKFLLRTGRRPALGVKAWTEKYMAWVRQLGYVQPAQTAALLDYVHEVEHMGERVRRLEQAIAEAVKQAPPVMQKVIQGLQALRGIAAISAVTIVSELGRISRFEGARQLMGYSGAVPGEDSSGKRTRRGPIAKTGNAHLRRIAVEAAWSYRFPARISREQLLRQEGLAKPIRDTAWKAQERLCRRYRKLARAGKSPTVVTTAIARELAAFAWAIAKHVQAAAA

SEQ ID NO: 328969 - protein, 348 aa, unidentified
MEKIVKQVAAIDVDQKLLVTTLGRMYDDWSPELYAQKTFSNTSKGIGSLLEWVKENTVSEVAVRFVMEATGVYHEQLACFLDDNKEELTVVLPNKISNYMRTLEVKTITDKTSSEAIAKFGLERKLELWKRPKPIYKQLRQLTRERDQLIAERTTVKNQLHAEQVEAEPNKSSLARIKARIKMLDKQAQEIKVELSALIASNEEIKKIVVLLCSLSGVGILTSAAVLGETNGFELVRNRRQLASYAGFDVKEKQSGTSVRSKPKISKKGNKYLRKCMHLPALSAIRHDERFKAVFIRIVSRHGIKMKAVVAVQRKLLEMMFTLYKTNTKYDKEYSNIKTIQKEVTLST

SEQ ID NO: 328970 - protein, 335 aa, unidentified
MQVYGIDLSKEKFDVNFIDAKGKEKNREVKNAVVSISRFLSSVSEDSILCAEHTGVYGDILVYLCNQMNISIALVPGYTIKHSLGLLKGKSDPLDSKRIREYAERFSDKLEYAEYAEENIAELKQLYTLRNQLVKQRRALRTVDTGRGHLPMQSISVHNHIHAVFSSLDNEITSIEDEIEALIKANQDLNENYELAKSVFGIGPVIATDLLIKTGNFKTIDTHRKAASYAGVCPFPNTSGKMVGKSKTSPHADKKLKSLLYMGAKAVVKNNKEFRLYYQKKQLEGKPHYLIMNNVSNKLLRIVFSVVRNKTPYTSDHVCLDPREKNNNSSTKKVA

SEQ ID NO: 328971 - protein, 350 aa, unidentified
MIIIGCDFHTRYQQIAMMDTETGELVERRLEHENGEARAFYASLPKPVVVGMEATGYAQWFERILAEFGHELWIGHASEIRAGVVRKQKTDARDALHLLHLLLEKRFPRIWIPSPAERDTRQLLRHRHKLVCFRVSVKNQLHALAMSQGVCRKKKLFTARGREVLEKLSLGPWARRRCQELLGMLDQLNTVIDELDRAVQQQAESHAEAARLMRHPGVGPVTALAFVLTLGPVTRFRRSKHVVSYLGLNPKERSSGGKQRTSTISKQGNTMMRWLLVEAAQTAARYDPELLRLYQRLKFRRGANVAKVAIARKLAVKLYWMLRATASCAQLAPMQGSSRGTLVPQAGSSF

SEQ ID NO: 328972 - protein, 356 aa, unidentified
MSSNVKYIGLDVHKEAISIAVLNGAGKLVMESILETKAVTLVQFLQGLRGELHVTLEEGTWAAWLYDVLKPRVHEVIVCNPRRNALLKEGSKSDRVDARKLAELLRAGMLRAVYHGEHGLRTLRELARTYQTISKDLKRVMNRLKALYRSWGIPCMGTQVYAPRYREPWLNKIAQAGVRRRAELFYQHLDALQVLRRRVRAELLVESRKHKAVKLLRQIPCIGPIRAARLLALMQTPHRFRSKRQLWTYSGLGVETHDSAQHRYVDGRLQRCKRPQQVRGLNQNHNHEMKEIFKSTATSASRCAGPFGDVYAGLLAKGMKPEMARLTLARKIAAITLTLWKKGASFDAEYVKPQAA

SEQ ID NO: 328973 - protein, 416 aa, unidentified
MSDENKVASIDVHKKVLMVVVGSREGDAVGSKCELERRRFGTTTIDLHGLSLWLRERGVKEAVMESTAEYWKPVWAELEPYMRLHLAQAFSNRAPKGRKHDFRDAERLLRRHVAGELILSFVPEPEQRSWRTMTRMKTRLARHRVRLHSQVECLLEEMRIKLSCVLSDLFGASGLRILHALALGETDPKKLAALGDDRLKCTKEQLLDALTGDVQATHLELLTLYLQQLHLVDEQMEKLHRLIAQALKPHQEAVARLAEVPGFGPDSAQQVIAEVGVQASTFPSPGHLASWVGTCPGQEESAEENYSSRSAKGNKYMRRVLTEAAQAAVKAKGSHFQVVFRRLLPRLGYKQALWAIAHRLCRMVWKILHDGVRYVEQGANRDPKVRKQRARALAQALRRLGYNVQITPKEPATVQA

SEQ ID NO: 328974 - protein, 384 aa, unidentified
MDVHTSNYTLCSLDPGYGVEKDNYFAEVQFTNDFIKNVVNYVTNLKKKLKDCEFVCGYEAGCLGYSTYKDLTKVGIKCVLMAPSTMAVQKGGKKVKNDRRDARVIAQCLAYQTYKEVYVLSEHDEAVRGYLRMRDSHNKALKRIKQQIIAFCTGHGLFSPTKSNWTVAHLKWLKDLKFNDPVEQEILNEYLSSLTFLSDKIKAMDVRIEELASEKQYCENVKKLRCIKGIETNVALTLLAEIGDFNRFSKPTDFASYLGLIPGEQSSGDKVRGTGITKAGNSTLRRKLTESAKGYWRGRIGIKSATFKKLEKELPKEVTEYALKANTRLQRKFFNMTHVKGKNMNVAASACAREMACFVWGLITNHYDKAPAVPKTDEELLDLN

SEQ ID NO: 328975 - protein, 320 aa, unidentified
MTQTIEAYIIGVDVSKNRLDIYVSATDQSCSIANDSESIEHWLARQVGPIRLAIEPTNTYHLAIATAAHVRGHQVYLIDPYRLAHYREGVGQRVKADHQDAQLLARYLQREIGELRVWTPPKQGPQRFWHLLKRRASLVQTVVRMKQSLTDLGALQADVDALIKQAQQTIRKIDQALRAQAKALGWATQVRRCQSIPGVGPLTALAMVATYHRGQFRNDDAFIAFMGMDVRVRESGLYRGRRKLSKKGDPELRRLLFNAAMQGRRNAHWEPYYLALRERGLSSTAAFVALGRKLARLCFVLLRKEADFDPNFCSGGCMAS

SEQ ID NO: 328976 - protein, 349 aa, unidentified
MKVTFQTCCGVDVHKSFLVATIIKTSSGIEPSYQKRRFSTFNNSILEFKKWLLENECLYVCMESTGKYWIPVFNILEDEINVTIANPKWVKAVKGNKDDTKDSKWIGDLFRLGLVRGSYIPCKKIRILREFTRYRYKLVSCRSSEKNRYQNALTVCNVALDSVVSDIFGKSSTSIIDYLLEQSGTSIDHEVIASKLLKRLKAKEDAVIESIEGYQMTDSQKYRMHLVRAHMDYITAAINDVDSEIESLIASDPDYENAVELLCTIPGVKYDSAITIISEIGIDMSQFCSSKRLCCWAGLTPGSNESAGKKKSVRITRAGVYLKPALVQCAHAAVKSDKSPYYKRNTNLL

SEQ ID NO: 328977 - protein, 426 aa, unidentified
MADKTNATAPCHWVAIDVARYWNAVLIETASGQRHRFRMANAAEDFDRLIEFLNGLGGRVRAALEPTGDYHRAIAHRLAISGAEVVSISSVAQSRFREAMFNSWDKNDPKDATVILEMLKQGRVQRYVDPMLAGHHDLQELSKTDYQVSRARTKVQHAIINHHVPLYFPEMLKYWHCTRSEWWIRFLLQFPTPGHVRRLRQEDFVAAAWDTVGRKVDKQAKLNEIWAMAARSAALPHDPDSLAVETFQITLRHFQHLTELRAQIEQRAQAYLCDNPDYSHLKSLPGIGPIIALTILAEAGDLRRFNHHRQFLKYCGFDLAKSQSGVHRGHEKLSKRGNARLRLAFWMAGQVAIRQRENSFRSKYDRYISSDPGNADLRRKALTAVAAKMARVAYSVIKKNEPYRQFFEQSLPSGSIPLSRAAGASA

SEQ ID NO: 328978 - protein, 321 aa, unidentified
METVSFEQVVSRGCGIDVHKEVLVATIGGTGLRTQTREFDTFTRSLTELKEWLLENQITHVVMESTGVYWKPVYNVLETSDMTVWIVNARHVKNIPGHKTDKKDSRWLCKLLLAGLLKPSFIPPKTQRELRDLTRYRKKLVQQIASNKNRIIRILEDCNIKLSSVLSDTSGVTAVKLINKLCEGKKVSMADIEEVYHKKIEASKEQLWEACNGNITDHHIFLLQSIRSNTTQAESQIKKLNQKIKEMLSSYDNVLEQLKQIPGLSRKTAEDLVAEIGLDMSVFPSESHLGNWVGIAPGNNESAGKKKVDAPPMATNRPNQL

SEQ ID NO: 328979 - protein, 350 aa, unidentified
MTTLPLQITGGVDTHLDTHVAAALDERGALLGVESFDTTPAGYRQLLDWLRHFGDVELVGVEGTGSYGAGLTRHLHTEQVKVVEVDRPNRQRRRRRGKSDPQDAITAARAAQSGDSCGLAKTRTGNVEAMRVLRIARASARKGRTQNLNQMRSLISTGPESLRGELRHLNIYRLLETASAFRPGTNRDLVSLTKLALRMMARRAIALQTEIDELDAILAGLVAETAPELIAQVGVGVDTASALLVAAGDNPQRLRSEATFAHLCGVAPIEASTGQHRRHRLNRGGDRQANSALWRIVVTRMVCDPNTRDYIDRRMKDGKTKKEAFRCLKRYIAREVYNCLPHQQLALDSP

SEQ ID NO: 328980 - protein, 412 aa, unidentified
MQSMTDVIETVHAGEPAWTVGIDLGRRAAHEAVLRAPDGSERRTRFAHSRDGIDGFVGELSDLRGRVLVIIEPTATRWQALVEELSGQGIEVRQVNAATVAKLRGARDITGAKSDRVDARTLAGALDYSHLVRPGSPALSCAHALCLERLRLRRERRRLRGAVKVCLDTIWPEFLQTFRGGERGVTARAVIAVTGGDPARARRLGAQELERRVRAAAPGRKIGHTKLKQLTEKTSRPAGYRAARAAYAARLQRLMRRRALVEGQLDALEEELLRLYPQLPGAQRLRSLPGLTPLHRVLLLAAAGDVRRLRSPRALGKLGGCAPIARDSGKSTPQRKISERCRYQLRDAAFHAARHIIKACPAFRALYHALRGRLTATQAVIACANRLLRVIWRMVNSDIDYNPAKVAPALSR

SEQ ID NO: 328981 - protein, 304 aa, unidentified
MNGIGIDVSKRQLDVGTTDGETLQVWNNRSGFSELDVWLKKRPVSQIVLEATGGYERPVLDFLHAAGHPVVRANALRARRLAQGMGQMAKTDRLDAYALAQMAALVKLPAYQPLEPWQQKMREFVRARRQAMHALTIARQQQEMVGDRELRRLLRANITRLQTLVERLGKQIAEQVAQQPQLAVLKSMKGVGPGLQAVLASYLPELGRISGKAIASLVGVAPMSHDSGTMRGKRSIHGGRAEIRQVLYMASMSAMRHEPRLRDFYQSLRARGKEGKVAIVAVMRKMLVILNARVRDAENGLVPA

SEQ ID NO: 328982 - protein, 412 aa, unidentified
MRRVIGIDVHRTFGEVVIWEDGVLRHAGRVDMTRTALEGLGKSLRSTDEVVIEATGNSMAVSRVLTPFVARVIIANPLQVKAIAQAHIKTDKIDAGTLASLQAAGYLPQIWTPDAVTERKRRLTARRYQVVRHRTRIKNEVHSILHAHLIPKCPHADLFGARGRAWLARQPLPDDESAAVERHVRELDRLAEDLAVLDREIAQVAIDDPAVKRLITITGVNLTVATGIVAAIGDISRFKSPQKLVSYFGLNPRVRQSGLGAAHHGRISKVGRSHARAMLVEAAWAAAKAPGPLHAFFVRIRAKRGHQIAAVAVARKLTVLCWHLLTRGEDYLWARPALVATKTRAMELQAGHPQQKGSRRGPAYAYNVKALRDQEMLIAAQAERSYERFVAQWKPRRPKEPARGRLKSAGHK

SEQ ID NO: 328983 - protein, 362 aa, unidentified
MAGYRLSLQPTKGGPAMLHAGLDLSRKRLDFDLRDEGGVLVEAGATGPDAAGLAALVQRVARYGQPVRAAIESMTGARFVHDQLENLGWEVEIADALKAKGLAPLACKTDRIDARVLAELSRRALVPAIWLPDPTVRAERERARFRLHLVKQRSRLKHRVHAALLAHGVPCVVTDLFGVRGRTVLATHPVPAPWRAHIETAVSLIDELTRHIGALERELRDQGANHRYVPLLMTIPGIAWVLGYTLAAEIGDIGRFPSPQQLTGYTGLCPRVYQSGGHDRRGRLSKLGPRYLRWALLEAAIHACRHPVYRDRYQRMKRRLGKQRGPKVAQIDIARRLAAAIWHVLTRGQPFAPAGATTPLTA

SEQ ID NO: 328984 - protein, 316 aa, unidentified
MVVVGFNVGKDNLYGARIDRSSKVKQHYVLDNTVAAVEPLLRTLRKKYKHLLVASEATAEYHRPLAQTCLRVGIPFRLLNPITTKQYVKTTVRKRKTDKTDAEVIARVALQGEGTLVTPETFGAAKSILRTSIKLTRLSQMLLLMQQHQEDILPEEKSLTGQLTLCRQQLESSITVYRKRAAELTDKELEQLLRSIPGIGRITAPTVIAEIGDIHRFKGPKALIAYAGLDPKVRQSGRTLQRNTRLTKRGSPYLRRSLYIAASIAQRNNPNMQATFDRKRAEGKRYKEATIVVARRLLGCIYAVWTTNTPYHQPKT

SEQ ID NO: 328985 - protein, 404 aa, unidentified
MNNVAGIDVSKGKSMVSVLRPFGEVVAKPFSIGHTGSELKELADYLKSLDGETRVVMEHTGRYYEPVARFLHQEGIFVSAVNPKLIKDYGNNTLRKVKTDKADARKIARYGLDNWVELRQHTPMDTIRMQLKTLNRQQGLYSKTKTMMKNNLIALLDQTYPGVNALFDSPVREDGSQKWVDFATAFWHVECVRNMSLTAFTERYRKWCKRHGYNFRQSRAIEIHTEAQDLIAMLPKDALTKTMVRQAIDALNAVSASLERLKAEMRTLAAQLPEYPVVMAMHGVGDSLGPQLMAELGDVTRFTHRNAITAFAGVDPGADQSGTHEAKSTRTSKSGPPELRKALFLVMDCLLKTRPEDDPVYRFMDKKRAEGKPYLVYMTAGANKFLRIYYGRVKEYLASLENVD

SEQ ID NO: 328986 - protein, 422 aa, unidentified
MVKDNRKETTMKEKVYLGIDLAKANSRVAAFDKNGEATCRPFTITNSREGVKKLLSKLSSYKPGQIVCGMEISSNYWENMCSYLKGMNVEVILLNPYQVKKYRQATGAKIKTDSIDAEAIAGLISGKKYESLYISDDTAVELRELVRIKYGFQRRVKDLKKSVLSLLYLVFPEYTRMVSHPFSKVSMEILSKYPTSCHMAETSPSRLVKIFRRYQGCNFDLGKAKELISAAKDSFYSGRASKSRGLSITMQLDEIRSLSEKIADIEEEIKSILCPDDPSGGSSPYNILNSIKGVGMGTISTFIGCVGDVSRFSSADKLISFIGFYPRIFESGKYRKKNPSIQKAGPKELRYMLYLASVACIKHNSELKKYYYDRVSSGMHAKKAIIKVAVKLARMMYSMLKYGRQYDSSRVFTQPLSLKNAA

SEQ ID NO: 328987 - protein, 445 aa, unidentified
MFIQSQDDSHCCYSLFIKVVILMMKLKYSICCGLDVHKNVIVATIVTTNKDGISEYLQKSFSTINSDIQRFHNWLIENNCYHVCMESTGKYWIPIFNYLENDIDICLTHPKYVKAIKGKKTDKKDSKWIADLYKFDLVRCSFIPPKDFRQLRELSRYRFKLVCMKSSEKNRIQNCMTISNVGIASVLSDPFGKTATEIMSYLLEHTADSMDEKAVRKLIKKGAKAKSDEIIEAIKGYNIETDQAKKLELAQGHLEYLDDMITQTEVELYVRIKPYYEFVEFVSTMPGMTELSSTIVLAETGVDMDIFDDAKHLCSWCGLSPANNESAGKKKSVRIAKAGDYLKPMMVQCALAAIKSKKQPYFAIKYGRIKKRRGHKKAIIAIARMMMVCIYHMVSEKKPFTPTDYEELMNPQNHVERVVLNENNVFAYLESLGYDSSKLVKRNDN

SEQ ID NO: 328988 - protein, 348 aa, unidentified
MALTIVEDTRAVTGGVDTHADMHVAAALDPIGGLLGVGEFPATAAGYTRLLAWMGGFGTVALVGIEGTGSYGAGLARHMAACGVRVVEVDRPDRQDRRRQGKSDPLDAVSAARAAQSGRAAGAPKGRDGAVEAIRALMVARRSARAGRTQAINQARALIVTGPGELRARFAGHTAAALAADLASLRPRPGDVPGYATRVALRELGRRAQFLDGQAGRLDELIVPLAAARAPGLLGLHGVGPATAALLLIAAGDHPGRLRSEAAWAHLCGVAPIPASSGKVTRRRLNRGGDRQANHALWRIVITRMSSHPPTRAYVTRRTAEGLSGKEIIRCLKRYVAREVYPHLRAGA

SEQ ID NO: 328989 - protein, 336 aa, unidentified
MSQSSTLYVGLDVHKESITVAYVAQEHHAEVVSLGTIGTRQCDIDQLIRQMQSKSNQLVFVYEAGPCGYWLYRYLTKKGHVCCVVAPSLIPKKPGDRVKTNRRDAIQLARLMRSGDLTSVYVPKVEDEAIRDLCRAREDTLRALKAAKFQRKAFLLRHDIRSTGRATWSPAHLRWLSEVVCPTPAQQIVFQESVRAVTDHTERLVRLEQALTDQVQTWRLAPVVDALQALRGVQCTVAVTTVAELGDLTRFDNPRQLMHSLGLTPSEYSTGERRQQGGITKTGNSHARRALVEGAWASRYPAKVSRHLPLRLEKVPKPIHDISWKAQIRLCKRSRQ

SEQ ID NO: 328990 - protein, 368 aa, unidentified
MNEVIRFFVGLDVHKESIAIGVAEAGREEPRFLGSVGPDPAELRKALKRIGPPAALHLVYEAGPSGYGLVRDLLARGYRCEVIAPSKIARRPGERIKTDRRDALLLARLARSGELVQVVVPDERDEALRDLSRTRSDAVRARLKARQQLKALLLRHGHRYGGKSSWTLAHQRYLATVAFEHRAQDIAFTEYRSAVNEAHERVERLTESLRTQLESWRMRPVVEALMSLRGIDVVAAVTLVAEIGDIRRFTHPRELMSFLGLVPSEHSSGHTRRLGAITKCGNGHARRVLVEAAWNYRFPARISRVLQVRHENQPKPIRDIAWRAQLRLSERYRRLLARQLPKNKVCVAIARELTGFIWDLARQVKPIA

SEQ ID NO: 328991 - protein, 341 aa, unidentified
MKQFIRIGVDLAKNYFQIHALSSEGAPAIKRKVTRRKMREFFSQIAPCCVGMEACASAHYWARELKAIGHEVRLMPPAYTKPYVKRGKNDAVDAEAICAAVSRPGMRFVPIKTAEQQAALMLHKTRELLVKQRTMSVNAVRSHLAEFGIVAAKGIGRVDELLELAKEDATLPSATMMAVKVLGRQIEELEKGIEDLEKEIAKAHARSETSQSLSEIPGIGKLVASVIAASIPDPSVFRSGRDFAAWLGLTPRQNSTGGKRSLGAITKAGNRYIRKLLVLGATSLLNVVSKRKGGLRDWIVGLLAKKPARLVTVALANKLARIIWAMMKNGECFRTEMFAKA

SEQ ID NO: 328992 - protein, 350 aa, unidentified
MLIIGCDYHPSFQQIAFVETDTGEVGERRLVHREEAEHFYSELREQGVQVRVGMEASGHGRWFERLLRGLGFELWIGDAAKIRAKRVRKQKTDRQDAQLLLQLMLEDRFPRVWVPDAENRDLRQLLWHRHRLVQMRTRVMNQLHVVALNEGLRRKKALWRAAGRQELESLALARWANRRRQDLLDLLDQLTAKILELTQALEEEVEKRPVARRLMTHPGVGPLTALAFELVIGTAERFHCGKQIASYVGLVPAEESSGDRRRLGHISKQGNVLLRFLLVEAGQVTVRSQPEWRSRFFHLAMRRGRKIAKVAMARKLAVQLYWMWRQGWDYGQMQKFGSHAGQPGHPDGGQ

SEQ ID NO: 328993 - protein, 321 aa, unidentified
MTSATRGSVGIDVSKDTLDVQVRPSDAQWREANDEAGIRSLVVRLQAAAPAQIVIEATGGYELAVVSALAAAGLPVIVVNPRAVRDFARATGQLAKTDQLDAGILARFAEQVRPEIRPLADAEQQELDALLTRRRQLIEMLTAEKNRLQQVFVARGTRVKKSLTAHIAYLTRELGRAETDLGDLVRQSPIWRERDDLLQSAPGVGPVLSFTILAALPELGRLDRKAIAALVGVAPLNRDSGMFRGKRMIHGGRAPVRTALYMGALVATRHNPVIRAFYQRLLAAGKPKKVALTACMRKLLIILNAMVRQQSPWSAAVAGIA

SEQ ID NO: 328994 - protein, 336 aa, unidentified
MTKYIGLDAHSSTCTFNVTDERGMEVDNTTIESNGRLLVKYLRGIEGVKKLTFEECELSNWLYEILRPEVDELIVCNPVANKDYKKVKTDKMDARNLSKLLRGGFLMSVYHDGSKRERFRSLMSGYQDLIEEGVRLKNRYKSLFRKSGKKVKGEALYNDESFLEGLERPDFKFIGTQIYQLLEKMEGSRQEYVKEILRCSKGFKEIKYLKSIPGIGSIQAAKIVSQVIDPERFSSKYKYYSYCGLVRHKRISDGRGYGSEKIWGNRILKCVYKMAGHSVLKGKSGLRNYYDSLRLKGISHDNAYNAVCRKIAAISLSVWRKSEKYDDRLITGNLIK

SEQ ID NO: 328995 - protein, 357 aa, unidentified
MKEYISFDSHKRYTIMERENRQTGVARQRRIDHAPGAICEALGDCEAGTPVAVEATGNWYWIIHEIEQAGLQPLLVHPRKAKLMMGQINKTDRLDVHGLNRLQRTGTLPTVWIPSAELRDLRELTRVRMVLAAQRTRLKNRLSSTLAKYGLAVTDAADPYCQKGRRQLTALLQQLPSHTQWAARMLLAQLDFIEGQIREQEQRLKELIAVSAEMQLLMSLPGVGVILAAVLWLEIGTTERFASAERLASYAGTTPRVHASGGVVHYGRLRPDVNRYLRWGFVEAANSVAVNHARCPQRHVSELYRRLRTRKGHAKAIGAVARHLAEATYWVLSHNEPYRDRGVPTGSIQGGVSAALS

SEQ ID NO: 328996 - protein, 323 aa, unidentified
MPSVIGIDIAKRTFDIATQQPNGKYRTKAKLPNEVAGFEALQQWLLKHANAQAWIVMEATGAYHEALATWLHDKGYQVCVLNPAQVAYYARSQLQRVKTDKVDAKLIAEYGERHQSDLRAWQPEPPAVRRLKALVRRLEDLQEIQQMERNRLDLADASVQASIYSVLHHVERQIGETLRAIRDHIDDDPDLRNKRDLLTSIDGIGERSAALLLAELGDPLRFASSRAITAYAGLNPRLQESGSYKGQTRISRTGSSRLRAGLYMPAVCSLTHNPAISALRERLSAKGKSGKQIVCAAMRKLLHIAYGVLKSGQRFDPQLALAR

SEQ ID NO: 328997 - protein, 367 aa, unidentified
MKDSITVVGLDVHKNSIQIVTADTDGAMEVRHFGRIGGTMDALDRAVRKLVSRGSTLRFVYEAGPCGYEIYRHLTGKGFSCKVIAPSKTPKKSGDRIKNDRRDAETIARLERAGELTAIYVLREEDEAMRDLTRAREDAVKAQKTARHQLNAFLLRYGKRYPGKASWTPVHMRWLSDIALPHPSQQIVLQEYITTVTVCTERTARLTDQIAKLLPEWRMFPVVKALQALRGVAPIVAATTIAEIGDMSRFERPRQLMAYLGLVPSEDSSGESTHRGGITKTGNGHVRRALIEAAHAYGFPARVSRHLLKRQEGLPQPVLAIAWKAQVRLCGRFRRLMARGKLKTKVVTAIARELSGFMWAIAREVEV

SEQ ID NO: 328998 - protein, 343 aa, unidentified
MERYVGLDVSLKQTSICVVNQTGSIVQEGVVDSDPEAIAAFVRSKAPGTVRIGLETGPTTTWLWTELKRLGLPVICIDARHAKAVLKMQINKSDRNDAAGIARIMQTGWFKEVRVKDLDSHSVKALLASRALLVKIKRDLENQVRGLLKNLGLVIGRAKFNVFAVRTEALIEDHPELVAAVRPLLEARKAMEQQIDDLDCKVLKLARHDVEVRRFMTVPGVGPITALCFKATIDDPTRFRRSRSVGAYIGLTSRRHASGEIDWSGRISKCGDAMLRMYLFEAAGVLLTRVPKWSALKAWGTRLAKRNGLRKAKVAVARKLAVILHRMWVDRTDFNWSTKKAAA

SEQ ID NO: 328999 - protein, 406 aa, unidentified
MQYTRYTGLDVHKQFVQAATMSPDGDVLREWRFATTPEEIRAYAETLTENDAVALESTTNAAAIARLLGERAGRVVVSNPLKTRAIAEGKIKTDKVDALVLAQLLRADYLPEVWIPDDATLRLREITSYRTGLVQERTQVKNRVHSILHRNLIPRPEVRDLFGKTGRTYLETICLPHGESFQLAQALKHLDFLEERIADADREIAEQVVDSEDTRLLLSLPGVSLQVAAGIIAAIGDITRFAAPKKLVSYIGLDPLSKSSADEVFGSRRISKKGRSHTRWLLVEAATAAVRVPGPLQAFYVRLRAKKCHNKAIVATARKMLHFVWHMLMRGEPYRYAAPLRTHEKVRELEIMAGGKRRPSGKRAGVPSKGGKAAYRELRRHEHDRAMIAQAQYEELVRLRAGTGVN

SEQ ID NO: 329000 - protein, 346 aa, unidentified
MGMDIAVLGVDLGKNVCSVVGLDTSGAVVMRRKVRRETLIALAEKLPPCVVGMEACCGAHHVGRVFTAHGHDVRLMSPEYVRPYVKAQKNDDRDAEGIAEAATRPTMRFVELKSQDQLDMQTLHRSRDRLVGERTALINQLRAILLERGYVAPQGKRKLEQFLSVLMDEQGGADLSPRIALLVADARAQWAELDRRISAFDTEFVHWVKENEEARRLTTIPGIGAIVASALVAAVGRAESFDRGRDLAAWLGLVPRQFTTGGKPKLLGISKRGNKYLRRQLIHGARAALPYVAERDTPLGRWAKGLLSRAHHNVAVVAYANKLARIAWAVLRRGERFAATGTPMAA

SEQ ID NO: 329001 - protein, 347 aa, unidentified
MRTHFNLVGIDIAKNSFAVCITDKEGNILQRKTLSRKKVLPYLRQMPKARIGLEACGGAHYWAREIKQQGHEVFIIPPRYVKKFVVGNKNDSIDAHAITRVLREPKIPHIPIGSCAKQDLQALHRRRASFLKGRTALVNQIRGFLLEYGLSIPKGVSQVRKRLKEILSQKPESLSLDFMEILEEQYVDLLRKDQQIEIYFKKIEKQVQEDPSIVRVLEIPGVGILSAAALSIKLDSRDFYQNGRHFSASLGLVPHHEGTGGVTKMKGMSKRGDRYLRTLLIHGARSVISRSHARQDTLGLWVRKLVRRRGVHKAYVALANKNARIAWKVICKQENYRMNQAFGTSCK

SEQ ID NO: 329002 - protein, 371 aa, unidentified
MKDKSKVVFVGLDVAKDTLAVSVADEGRDGEIRDWGTVSSAPQSVERLLKKLAARFYRVEMCYEAGPTGYGLYRQITAFGFSCCVVAPSLVPMRAGERIKTDRRDAMRLARLLRAGELTPVWVPDETHEAMRDLVRARESAAEDQRHKRQLISAFLLRHGRIYHRTKTWTMRYRRWLQRQSFDHPAQQIALQEMVLAERHAVERVARLTTGIEELVPDWQLGPVVEALQALRGVALISAVTFMAEIGDVRRFENPRKLMAYLGLVPSEYSTGQTVKRGGITKAGNSRVRRTLVEGAWTYRFPARIGEKKLYVLQKLPPEIQDIAWKAQSRLTARYRRLSQRGKKKTVITTAIARELSAFMWDIARRTMPVS

SEQ ID NO: 329003 - protein, 323 aa, unidentified
MYSIGLDISKSTINVFIPINNLDIVIDNNIKSIKSLYSKLKKLYKKEFPKLVFVYEPTGTYSFTLTKFCASKNLHCFIVNPKKSANFAKAIGNRNKNDIEDARLLSQMLVTARKEEIKIPIINDNVEAIKEAISCYKLIIKQQTQNKNHVSSLKVKGDSSYVIKELEIQYKFLKKQEERIIKKILTYLSKDKKLYQSFLNLQTMPGIGQISAIILIYHFIQYPDANQRQIVSLSGLDPIEKSSGTSVKGKTKISKAGSKICRGTLFMPVMVAVQKNERLKEFYNRLKDKGKHTTVAQIAVMRKMIVIAHSLYKNNERFNVNKR

SEQ ID NO: 329004 - protein, 418 aa, unidentified
MENRPPFSYQATVGIDWADRKHDVFVRFANGSSYRRKIGSRPEAIQEWLFELRSACAEGKIAIALEQRRGALFYQLCTHLNWIDLYPINPHSLSSFRLTFFSSRAKDDPKDGQLLEELLRTHFDRLRPYQPAVTTERQLDLYCRQRRSLLGLATKTELKLISTLKQYFPVAVDLFEAVGMKSDIALNFLSRWQTMHELRRAKTHTVRSFFYAHNSRSQSLIEKRLQQIGAAHEVTDDPALIEPMVLMTKCLVGQLRQFNQTINEFDRKIKGVFKSHPDHFLFEALPGAGEKLAPRLLSLFGSDRSRWPDAADIQKYSGIAPVIERSGKSLWVHRRLSRPIFICQSFHEFAQQSTRFSSWANEFYKRQREKGKSHHSAIRSLAFKWIRIIFACWKANKPYDESSYLNALAKRNASSSST

SEQ ID NO: 329005 - protein, 412 aa, unidentified
MVYVGVDWSDKFHQVYITDDAAGCLDAFSISHSPEGVVELFSHLEKFAISTKEALFAIEKPSGLLVGAILDKGFILYPINPKAVDRYRDRYKVSGKKDDFFDAKVLANILRTDRHNHRPLLPDSPLTRHLKILTHQHESLSRLKRRIINQIISTLKDYYPVALEIFGKIDQQVTVNFLKKFPTPETFSKLTRGKIKRFLHAHHYPGIEKETEEIYQLVQGPHFQVEEFVVESRSLYLSTLLVQLENLLVSLKTFEEKIEGLLFQHPDKDIFLSLPGSGKITAAKFISEFGDHRERYEKASSIQAIAGTCPVTEQSGRYKNVYFRRSCRKFFRNTVTQFAFSSLRESDWAKERYRKHAHSGKKKSHALRCLGNAWLEVIFPMWKNRSTYDERKHLKIVKEQFLEDFLPVSLSC

SEQ ID NO: 329006 - protein, 311 aa, unidentified
MESTKYVGLDVHKEATTIAVMNSAGKLIMESIIETKAITIRQFIQGLRGDLHVTFEEGTWAAWLYDLLKPYVTKVVVCDPRKNTLLKVGNKSDRIDPKKLAELLRNGSLSEVYHGENGVRTLKELARSYLTISKDLGRVMNRVKALYRSWAIPCAGTQVYAPCHRSEWLSKITEAGVRRRAEHYYQQLDALQTLRHEVRKDLLLESRKHNATKLLRQVPCIGPIRAAQLVALMQTPHRFRTKRQLWTYSGLGLETRDSAQYRYVEGQLQRSKKPQQLRGLNSNHNHDLKNIFKECGAPHSLKNVKLPEMWS

SEQ ID NO: 329007 - protein, 346 aa, unidentified
MQPMAQYVGLDVSLEETKACVVDEAGQTLWRGCCASTPDEIEQLVCKRAPNAMRVGLETGMLSVWLFHELKKRRVPIICIDARHAKAALSLQINKTDANDAQGIAQVVRVGWYRQVLVKSMDTYAIRAMISARAQLVSTALKIKNTVRGLLKTFGFILKIGSQRRYIQIARSAIQDNPVLLTIVEPMLIALGTLQEQIAVFDRALCRRASADPIAKRLMTAPGVGVIVALSYISTVEDPHRFKRSRTVAAYLGLTPRRFQSGETDRAGAISRAGDPAMRTLLYEAACVVLRRCSRPSPLQEWGRALIERLGSKRAMVAVARKLAVILHHMWRDGTPFQWSARAAIA

SEQ ID NO: 329008 - protein, 437 aa, unidentified
MNFNAAGVDVSPKELQVCVPSDRDEKCNRTFGVYTKDLHEISSWLTKCGIDTVVMESTGVYWLPLFRVLKDDGFEVMLVNPKDAKNYAGKKTDEADAHWLMVLHTYGLLKPCFQPANITRQIRTLSRHRDNLIKSSSREVLHLQKEMEQMNLKIDNAFSDILGKSGQAIIKAILEGERAPEKLAALADRRCKKSKEEIMHSLEATWDEDHLFVMKQCQDLYEYYKKQIAEVEAEINRLVSEYTAQVDTEKAKKMERSKKQKQLHNEVSFDIEQHAFGLWGVNVMRMPAMSKNSLLRLVAELGADFTEKFPDARHFQSWANLVPDNKISGGQLLSSRVPKRKNPVGQVFRQCANALCRSKEPLGDRFRQIKSRSGHKQAMVAVGKTLAGIFYTMVKEKKEYDATIYSKHRKQVLDRSIERLQAKILRLQNESAMCANL

SEQ ID NO: 329009 - protein, 344 aa, unidentified
MDKFDVAGVEVSAKILVVALKVNGQLRTPEFANTAAGHQQLIGFLLKHSRCVRVCLESTGLYGLDVALALHAEPEIEVRVANPRSVRHFAQAMMQRSKNDPLDALLLAEYAQRMPFQAWQPPSLPGRQLCALTRSIHQLTEMCTMQKNRLHAAAATATTPKFLIRELQRSLAQLQKSVQRLIQKALQLVRSHAQLRQQLELLDSLPGVGELSALYLLGELVLLSPDFSVREWVAYAGLDPRQYKSGDSVEKKIRISKVGNTHLRRALYMPVLVAARHDPHFRAHYRHLLAKGKLGMVALVALMRKLLHGIFGVLKSLQPYDGSKLFTLPLILDSKPTMKEKIAC

SEQ ID NO: 329010 - protein, 348 aa, unidentified
MKRYIGVDLHKNTFTVCYLSKKSQELKSFKVSKGSMEVFKATLGKSDEVAVESTGNTGYFVREIKRAVKAVRIINPTQFKVISHSVKKTDEKDAEIIAKYLNKGLVPEVRMKSKEDAQLSSLIGTRDKFVKLRTMLKNKIHNILNANGIVTKKELFSSDKALERVLDNDLDKASLFELRIVITEIRNLNKAIDEISNELKDRGSKLKGHKNLTSIKGIGDISSTILLNTIGDINDFDGDHKLAAYIGIVPRVYVSNETSNYGRITKMGNKLARTALVQSTLIAIRYNPYLKEFYMKLKAKKGSGKAVIATARKLLTIIYRTLKNNWVFEDFSNFKLKPVKKVYHLSPA

SEQ ID NO: 329011 - protein, 375 aa, unidentified
MEGAPMLDTTTFIGLDVHARSIKAVSLDVMTGEVRCATFGYDAGAVAEWVRSVDPEARCVYESGVTGFDLQKRLSGLGVDCVVGAVSKMIKPSADRRRKNDRNDAEFLARMLSVGNVVEVWVPDDECEAARDLTRALEDARDDLSRSKQRLSKFLLRHGLVFDERTPTGRRKGNWTRAHWSWIESIRFAERADNDVLAYYVDAVRRAAEEKARLEGLVEAEARKPRWRKRVDSLRCLKGVDTASAADLVFEAGEFSRFRNARSFAAWVGLTPSEHSSGESDRRGAITKAGNKHLRKTLVEAAWHYLTCSGRPKDLAKGQAPDRGARRHAAKGVRRLVERREALLARGVHGNKANVATARELACWVWAVGLMAEEA

SEQ ID NO: 329012 - protein, 310 aa, unidentified
MSTEHFVGVDVSKDKLDVAVYPTNELFVVDNNQAGADELIQILEKLHPALIVFESTGGYEMLAVTTLYTAGLPVVVINARQVRDFAKSIGKLAKTDAIDAKVIAHFASAVKPKQRALKDKVTQELTALVTRRRQIVEMIVAESNRLSSATKSSRRDIKTHIRWLKKRLAQIDTQIKGQIGKSPIFCQKDKILQSTPGVGPTTSATLICNVPELGTLDRKKIASLIGLAPMNRDSGRLRGRRMIWGGRAHVRAALYMSTLSAVQFNPVIHQFYCRLRNAGKCHKVAMTACMRKLLTILNAMIRDQHCWNNP

SEQ ID NO: 329013 - protein, 368 aa, unidentified
MHESITAYVRLDVHKDSIAVAVAGNDREVPHFVGTVRPDVKQVRKALSRYGSPSSLQVVYEAGPCGYTLARQLLADGFGCQVIAASRITRSPTERIKTDRRDALTLARLARSGDLIAVRIPDERDEAVRDLSRARQDAVRACLKARQQLKAFLLRHGRPLRGSKPWSATGELYLSKISFAHPAQNIAFADYRQAVLDTHARVERLTEALRAQCENWRMQPLVSALACLRGVDFLTALILVAEIGDFTRFAHPKELMGYLGLVPSEYSTGERHHRGDITKTGNAHARRVLVEAAWNYRFPARLSHKITRRQEGQSKPVRDIAWKAQLRLGHRYRRLQSRKLHQNKIIIAIARELSGFLWDIARQVPLAA

SEQ ID NO: 329014 - protein, 315 aa, unidentified
MNQFSSSVYIGIDVSGSTLDVAIHDTTEHFSVDNEAVAIDQLVQRLIALRPALIVMEATGKLELAVLKALCQAGLPAVAVNPRQVRDFARATGRRAKTDRIDAFAIAHFAAVIKPVVRPLNDVQTEQLQALLLRRAQLIDMLVAEKARLERAHAAAKESLNDHIKWLKQQLTVADKDIDSFMRSSPAWQQKEDLLRSVPGIGPGAAATLIAFMPQLGSLNRRQIAALTGVAPFNCDSGKHVGKRRIQGGRAIVRRALYMACIPALRFNPTIRAFYDRLRKAGKPFKVAITACIRKLIVTLNAMVHDSTPWRPSAD

SEQ ID NO: 329015 - protein, 339 aa, unidentified
MATVPVFVGLDYHDQSVQVCVLDPQGVVLANRSVSNDVKEIVQVVASKDRRVFAAIEACNGSADLADKLIEIGWSVDLAHPGYVARIKQNPDKSDFADARLVGDLERVGYLPKVWLAPQALRELRRVVRYRQQLVNERRSRKQRISALLREQRVRSPEWMPWTIRWLDWLQKEAELSEQSRWLVQEHLDWLRQLSVKIAEVERRLRRMTAEDPLVDTLMKLKGIGLITAVTIRAEIGRFDRFRTGKQLARFCGLSPRNASSGQRQADAGLIKAGNPQLRMTLIEAAHRLKRFDPRWRQLAERMRQGGKAGSVIAAAVANRWVRWLHHPMQPLGAGGGQN

SEQ ID NO: 329016 - protein, 346 aa, unidentified
MMIIGCDFHPSWQQVSWLDTETGETGEQKLVQASGDAERFYRRVAAPALIGMEATGNCHWLVDLLSELGHELWVGDAAQIRASYVRQQKTDKRDAAHILKLLVEGRFPRIWMPSSEVRDLRQLLLHCYKLVIMRARVKNELQHLCLNKGVQRKHKLWSAAGQQILRELPLQPWAGRRRDDLLKLMAMLDQQIEPLDQAVKAEAQRDKMALLLQTQPGVGPITALAYVLTLGDVSRFPRGKQVASYLGLIPREHSSGGRQKLGAITKQGNRMLRMLLVEAAQIAVRYDPEFRREYLHRCHQKPKAVAKVAAARKLAVRLYWMLRTQRPYSEIVHIESSPRVALVGAS

SEQ ID NO: 329017 - protein, 327 aa, unidentified
MEPAYIGIDLHKAFFQVCAITARGDRQWEQRWPTTDLGIQGFLTRCDGASRVAVEASSPTWAFVDRIVDRVGTVTVVDTRKTRIKAGYAAKTDRLDARRLADALRRDSVVGIYYPPAAIRDLRELCRYRCHLARLQASLKQRIHALLLRQGVTPPGALFTQRGTQWLDALTLTGWADSELRGLRQVLADVRRQLVTVLLAVRGVAGSDPIAQALDARPGFGPVLSVTVRAELGVINRFPDGPHIASYAGLVPRVSQSATRRWHGPITKAGSPWLRWALIEAALHQLRRPDDFGRWARRLAVKIGILKARVAVARALCNEIFTTWPRA

SEQ ID NO: 329018 - protein, 333 aa, unidentified
METIYFLGIDLAKETFQAALTLDGVNISETKVENNSKSIRSYFQDLRDKFSPSQLMVCIEHTGIYSNPLLDYLTEKGIKVCVESALQIKKSQGIKRGKSDKVDARRIAQYLHKNHQQVKFWHPSRTVIQKIKALLVVRERLVKTRVQLATPIKESENYIEESLRKNIIKCCQNTLRSLTKDILKVEREIDILIKQDNKLEQEVQLATSIPGVGNITALHIIVASNEFETISEVKKFACYAGVAPFEYTSGTTIRGKTRVSKLANMTVKKLLNLSAMSAVQHCYDLKIYYTRKVAQGKNKMSVLNAVRNKLISRIYACVKNKRMYQKEYQHELA

SEQ ID NO: 329019 - protein, 407 aa, unidentified
MNAVGIDVSKGKSMVAAMRPAGEVSLAPFEVPHTYAKLENLGYQIIGLGEDTRVIMEATGRYHEPVAAALHELGIYVCVLNPIVIKQSGAGSVRKVKSDKKDALKIAKYGLDNWTKLREHTPMDAVRQQLKLFSRQYNLHMKTSVALQNNLISLLDKTWPGINKSFDSPTRADGHQKWVDFVATFWHSDCVCRISEKAFVERYQKWCKRKGYHFSEVKAADLYVESLGHIITLPKNDNTKLLITSAAAELTSVRKTLMTIKSEVISLANQLPEYDFVQSLYGVGEITGAQLMAELGDVRRFDNRGSIVAFAGIDPGVNQSGSYQRESNPASKRGSPHLRKTLFLVVEKYLLRSPADEPVYQFLDKKRAEGKPYYVYMTAAANKFLRIYYARVKAYLNEHFPQQEPLE

SEQ ID NO: 329020 - protein, 350 aa, unidentified
MLYIGLDVHKEFCQACVIDESGRALSNERFSSTNEELNRFLDRFQDAKFVLESTGIWEFIYEGIEKRGFEVQLAHPMKVRAIAEARVKTDKVDAETLAQLLRADLIPRSWIPNKDMRDLRQLVRQRAYLVQQSTSLKNRIHAELLRRGVRRPENLRTPFSKRSIRWMRSLEIPTVFSCLSCLEYVLAEIEEINAQLLVEFERRGDAQLISTIPGIGFYGALLILAEIDDVHRFRHSENLCAYAGLVPTVSQSASSVKYGAISKDGSAYLRWILTESVHVHTRYNPGSQLSSFHARVARRRGKRIATVATARKLLRIIYFMLMRHEPYSSHGSNPGKRVHSECDLWIGANP

SEQ ID NO: 329021 - protein, 338 aa, unidentified
MKFKRIAIDTSKHVFTVHGVDEDERVVLRRDLRRQQVEGFFATLPPTEVVLEACGGSHHWGRRLSVLGHRVKLIAPQYVKPFVKRGKNDRIDAEAISEAAARPTMRFVPVKSAQRQAQASVLSARELLVKQRTQLINALRGQAAEFGIIAAKGAGNAAALAARIASNGELPIVVKAVLALLGREIARLNETIAALDKKLAALHQASPMSRLLCEIPGFGRITALTALLRIEPGQFKSGRHLAAWIGLTPKERSTGGKRRLGAISKQGNERLRQLLVLGAMAVIKVAKPGHRSATPWLLRLLERRPRRVAAVALANKMARILWAMMTSGESYRHPPVAA

SEQ ID NO: 329022 - protein, 454 aa, unidentified
MVPVMGVPEQIEDEEHEQRLERVAAIDVAKASGKVCTRLPHASKAGKRVTLVWDVAATTNAICELAAHLVEQRIERVVLESTSDYWRPFFYVLEAAGLCVWLVNANDVKQVSGRPKTDKLDAVWLAKLNERGMLRPSFVPPADIRRLRDYTRLRLDLTRERTRHKQRMEKLLEDALIKLSTVATDIFGKSGRDMIEALIAGKNDPKQLAELARGRMRVKHAALVQALDGRFDAHHADLARILLEQVDGLDSQIQRLTATIDELIAAMPAASDQHRAHTDTDTGGGGSEQRTTLSAIARLDEVPGIAEHTAQVIIAELGLDMAQFPTAGHLVSWAKLSPRTIQSGPRTRGGKTGKGNPYLKGILGEAATAAAKTNTFLGERYRRLVKRRGKLKALVAVARSILVIVWYLLSDPTVRFRDLGPDFHTRRVNTDRKIRNLVHQLEVLGHTVTLQPAT

SEQ ID NO: 329023 - protein, 410 aa, unidentified
MLTTDRDPSAAIRVDLGAIFVSLELSRRTWLVTSLSPGAGEKMSRRSVAGGDVSELLGLLARLRGRARDRTGRDFGIVCVQEAGLDGFWLHRVLESEGVESWVVDPASVAVDRRRRRAKTDKIDGAALLRTLMAFKRGEPRVCAMAHPPSPRVEDRRRPCRERQTLLRERISHTNRIKGLLLSQGITDYEPMLKKRRRERVEALKTGDGRPLPALIKAQILRELDRLELVLDQLAAVEAERDALLAPSPRTQLGAEPVAEPGARPPASSGLADAAPPGARLTRLKGIAEERAAVLGGECLWRDFRNRRQVGAYSGLVGSPFKSGKVDHEQGLSKAGNARLRRTMIELAWSWLQHQPTSQLSLWFKSRLGPNPQPGLKKRLIAALARKLLVALWRFETQGVVPEGALLKTS

SEQ ID NO: 329024 - protein, 416 aa, unidentified
MTEPQISSPFERYLALDAHKRYVVVGGLNARLEIVLPAHRMDMERYPQWVKENLNQQDCLVIEASTNTWDLYDITATVAGKVVVAHPLAVKLIANARVKTDKQDVFRLARLLAGGLIPEVWVPPVPVRELRGLIAHRRRLIRMRTMTRNRLHSLAHRHNLILPEGGAFTDKNQDWWKSLSLSPVEKLRLHQDLALLEFLAPEVKAVDAELARLSCCDPWKEAVPYLIQLPGFGLIITLTILSAIGDIQRFPTSKQLVGYSGLGASLHQSGETNYSGHMTKQGRRELRFALVEAAWTAISSSPYWREQYQKLSHRMPANKAIVTIARRLLVAAWHVLTERATDRRADPDNVAAKLMVWSWKLNDLQRGGLTSRQFVRYGLMRLKIGQEIAHIKHKGNRPIASVEEVLERLPELNLNI

SEQ ID NO: 329025 - protein, 367 aa, unidentified
MSKAEMSRLCVGVDLHKTQFTVCALNEDGEYLLEKQYPTKEEGYTDFAEEMHNREEEGYAIELAVETTGNARYFKNRMESEFFVVKVVNTNRFKVITMSTKKTDANDAATLAYYLMKEMLPEAHLCSQTSEEIRRLLKTRSVLVQSMVKIKNQIHGMMLGYGIETKASQLQSKRKRQELINDLEDHNFSAYTAPSLKVMLKILDDLSSEIKGVEKLLEEMVASNEDVALLMTVPGIGINTATTIAAYTEELERFEGNYKRFAAYVGIVPSVHNSNETRHHGRITKHGPQELRTAFVQAAMGMIRLTNVTSQWRIIKDYQRRKGDKGSGKAIIALARKITRIVFVMLSRREGFNSKLMHYEETIQQTA

SEQ ID NO: 329026 - protein, 420 aa, unidentified
MAFKILRKNCCGLDVHKTWIFACIGITDSNGRTEYKQSRFSSFTKGLQDLADWLAKYSCTDVCMESTGKYWIPVFNILEKTCWVTLAHPKYTKPQKGNKTDRKDAKWICDLYMCGMVKPSFIPPPDIRQLRDLMRYRVKLTNMLTGEKNRAQNCLTVFNLKLDDVFSDVFGKSSRSIIQHILDHPGERFDVAPFIDRRCKHPVEEIQTAVDGMVSREQAAKLKECLFHIDQLIEHREHIEAEILRLAEPYPHQLELIRTVPGFSAAPLTAVALISEISVDMSVFPSSKHLVSWAGCCPRNDQSSKKVKSTRISRAGCYLKPLLVQVANAVIKSDKYPECKERYRRIKARRGHKKAIIAVCRMLLTAIWNVLSKLEPYSAKGYLADKLTEHSIVISKAQGLELLRKRGYIFSDEVNIPTTP

SEQ ID NO: 329027 - protein, 414 aa, unidentified
MLKIVYPICCGMDVHKSFVVACIASTNEQGVTTYKSKRFSTFTGDLHQCADWLSENNCKDVRMESTRKYWIPVYNILESTCNIVLAHPKYVKAIRGKKTDKRDAKWIADIFKHDLVAGSFIPPADIRQLRDLVRYRWKLTNFTTGEKNRAQNCLTVSNFKLDDVFSDVFGKAASAITDRILENPAEKITDVSCFRTKGMKATNEQVLAAVDGEMCEEQAEKLRIIRSHMDNLELCKANLESLILTTAEKYLPQLGLVMTVPGIQSFAAIGIISEIGVDMSVFPTSKHLCSWAGLMPQNNESAGKKKTTRISRAGAYIKPLLVQCALSAIRAKQFPEIRNRYLALRKRRGHKKAIIAIARMLLTAIYNMLKKNEPYNPELYRKDDRPPAHREVSVEEAIFILQRQGYLVAAPSTT

SEQ ID NO: 329028 - protein, 331 aa, unidentified
MNYSHFVGLDVGKKTFDASLMSADEKELSHKSFDNTPTGIQSLLDWIAGYHLSLSKLLFCAENMGSYVTELSVSSVSMGFSLALVYPLTIKKSIGLQRGKNDRIDAKRIANYAVLNYRKLELYKLPDKDLVRLRGWIIIRDNLVKQKVSSIKLLETFSRMAKLADVTESISFLEEQLKSIKERILEVEEDMEQLIAASTSLYTNYLLLRSIKGIGIINAIVLLCVTDNFQRFDNPRKFACYCGVAPFEHTSGISIRGKTQTSSLANKEVKVYLTRAAITAISWDPQMKAYYKRKIAEGKHKAAVINAVRAKIIARSFAVIRRQTPFVTLAV

SEQ ID NO: 329029 - protein, 357 aa, unidentified
MEAGTARRVIGGVDTHKDLHVAAVVDERDCILGTRCFATTRQGYRQMLAWMRSFGELLRIGIESSGSYGAGLLRFVQKAGVEVLEVTTPDKLDRRRRGKNDDLDAQNAAHAAFAGTRAVTPRSRDGMVEALRVLTACRKTAVAARRVALQMIQNTIVCAPDDLRDILRSMTRMQLVRTLAAWRPDLTAYRDVEAAYRISLKSLARRYLELHDEVAELDIMIRAIVDELAPDLTARNSIGHTGAAQLLLTAGDNPERLRSEASFAALCGVRPIPASSGKTIRHRLNRGGDRHANSALHIIAIGRLRTDPKTKAYVAKRVAEGHSKLDAIRALKRYIAREVFGVIVRRQKEINQTRIAA

SEQ ID NO: 329030 - protein, 420 aa, unidentified
MVQMIGTLKETPAMRSVALDLAVRKISYCEIEADQVVARRTVTSLSSLKELLGPECLPARVAIEACREAWHVHAELTRWGNEVLLVDTTRVRQLGIGEHGRKTDRIDAEILARAVEKGSLPRAHLLSKARQQLRLELSVRRALVETRSQYITTIRGLARAHGVRLPSCNTNSFVSNLRKTKLEQSLQDLIKPIAEVLEKIDVELARAEIRLQSIVEQDPKIQLLMTVPNVNVLIAAVFVSVIDDAHRFKDAHQVGAYLGLVPSEKSSGERRRLGSITKEGNSYARATLIQASWGLIRLGRSDDPLQQWANAIARRRGKFIAAVALARRLAGILWAMWRDDTAYDAAYIGSRSATGLQRQAQDITFRATAMQSVAEKVRQRTRPHERKLEQLEEMSTRGRTSALRRGKLIRTRRASASSNG

SEQ ID NO: 329031 - protein, 356 aa, unidentified
MSREVKYIGMDVHKEAIVIAVENARGHVVMESIVETKASSILQFIHGLQGELHITWEEGTWAAWLYDLLQPHVHQVLVCNPRRNALLKEGSKNDKVDAGKLADLLRTGMLRPVYHGEHGLRTLRELGRSYQTISQDLNRVMNRVKALYRGWSIPCAGTQVYAPRYREEWLGKIEHAGVRRRAELLYQQLDGLQALRRTVRPELLAESRKHKASKLLRQIPCIGPIRAARLIALMQTPHRFRSKRQLWTYSGLGIETHDSAQYRYVNGQLQRAKKPQQIRGLNRNHNHEMKDIFKGAATRASCGVGPLRDFYVALLDKGMKPEMARLTLARKIAAIALTLWKKEERFDAQQLKAQAA

SEQ ID NO: 329032 - protein, 371 aa, unidentified
MEESSKTLYVGLDVHKESIAVAYAPEERGTEVVSLGAIGTRQCDIDKLIRKLQSKGAPLVFVYEAGPCGYWLYRYLTRQGLSCHVVAPSLIPRKPGDRVKTDRRDAVMLARLMRSGDLTAIYVPTVEDEAIRDLSRGREDAMRDLKATKYRLKAFLLRQDIRYEGRANWNAAHLRWLSEVVCPTPAQQIVFQEYVRAVTEQHARVQRLETELHEHVQTWRLYPVVEAILALRGVELTGAVILIAELGDLTRFDTPRQLMSYLGLTPSEYSSGERRRQGGITKAGNTHARRALVEGAWAYRYPAKVSRHLQLRLEKLPAEVQAIGWKAQMRLCKRYRQLIARGKHANQVVVAIAREMAAFAWAIARTVPLAP

SEQ ID NO: 329033 - protein, 344 aa, unidentified
MEITTIGLDLAKSIFQVHGVDASGNVVVRKALRRSQVLPFFTRTPRCLVGIEACGTSHHWARELIALGHEVRLMPPAYVKPYVKRGKTDAADAEAICEAVTRPTMRFVSVKSRDQQAALSMHRTRNLLVKQRTQVVNMMRGLLAEFGIDIPKGLERALMMAREIVDGAAPDVPPEAVKIIGTLSQQALDLHARLREIDRDLLVWQRSSDVARRLMTIPGIGPVGATAFAATVGDANQFRSGRQFAAWLGLTPLQMSSGGKERLGRITKMGDKYLRKLLIIGMTSLVRRAKYKPESVDPRLADLLARKPVRVATVAMANKAARVIWAIMTRGETYRSGHMPVLAA

SEQ ID NO: 329034 - protein, 311 aa, unidentified
MTAYAGIDVSKATLQIALLPHADELQVPNTAEGLAQLADWLGRKQVERVLVEATGGYEKLSVKLLVKAGFKVQRINPVRARQFAQALGKRAKTDPIDARMLATFASALEEKDLVVSDDAREKLAELVKQRDVFIQQRDDNRRRIQQAQETEVLDAYKELNAKLKEMITAVEKRIAAQSAQVDAELMERLRSIKGLGPVTISSLFCYLPELGDLSRGQVAALAGVAPYNNDSGAKQGIRRIYGGRSRLRRAVYMTVLVMIRYNEDFKARYARLRANGKCAKVALVACMRVLLVRLNAMVRTGEPWKEQPAGR

SEQ ID NO: 329035 - protein, 360 aa, unidentified
MPYSTSIGLDVHARSISAAAYIFETGELVEATFGYDAEAVAKWAEGLPEPKAALYESGPTGFDLKRKLDALGLPCHVGAVSKMRKAPGDRVKTDRRDAAYLARLLMVGDYVECVPPTPRMEAARDLSRIREDAREDLMDARHQLSKMLLRHGYVWPAGRASWTKAHRDWLKGIHLAEPTAQYVLEEYMERVRECEARKARLDEAIADRAKEEDVAGIVQRLCLLRGISTLTAFGIAAEIGDFARFRTAQGFMSYVGLVPSEYSSGSSVARGPITKTGNSHVRRLLVEAAWQHSRPLSPASDSMQPPQGVPPEAAGIAAKANMRLHSRALHLRRRGKKACVANIAVARELAGFVWALALCG

SEQ ID NO: 329036 - protein, 401 aa, unidentified
MNKQTQNSATLLRYCVGIDVSKDSLQVCISVIDTNGKITIKGSGKVVNKTPVFDSFLTWVDKHCKDKSLPIRYVMESTGVYHEQLAWYLFQKDLSVIVVLPNKAKHYLKSIGNKSKNDSIDARGLAQMGLEQSLKLWEPLSKNIYQLRMLTRHYQTLQELKNQSENQRHAILHSRVVDKFTLKHLEKLIKVYEKQIDETKQEIAKLIEKDSNLKVKIAQLCQIKGLAQLSVATIVAETNGFTGFESIRQLVSFAGYDVVENQSGQRVGKTRISKKGNSRIRRILHLPAFNAVRFGEPTCQALFERVFERTKIKMKGYVAVQKKLLTLCYAIWKNGTEYNRTGGPAKLFQQCQRTPKYRQKNSPDQRDYTGYSCLKQLFRLSPKNIKKILFQNLYFKTVPAI

SEQ ID NO: 329037 - protein, 434 aa, unidentified
MAAVKAKRQKNLDLITSSTLIAGVDGHSKSNTVAFALARGGEPLSPKKFENNRRGFLWLLSKVEWITAKHGLDKVIFVLEPNGPYWMLLARFLAERGYTVKVVNAYQVKMNRATEDPSPEKNDPRDARSIADLGRQGKFNDTTPPGPVYEDLRSLARTREGLIEHRSAQKHRLRAMLVRTFPELPSVVSDILGKSVSALLRVAPTAGTVASFGVKEVEEIIKAASKGRFGEKKAKEIVYAAEESVGYGVASSAVHVEMAAILNTVEALSREIEAIESEMSRLLAETDEGALVLSIPGIGQVTAAIVLGETGGLRQYQNPNQIKKLCGLDLCGSQSGDRQSEKRISKRGRTLLRKSLYQAAVACITSNDVLARFYRGLTDQGRNRTLAKKKALIAVMGKLVEIMFSLVRRGTSFDAKYKWAPPGQCEPPVQAVAA

SEQ ID NO: 329038 - protein, 343 aa, unidentified
MGEISMIGLDIAKNVFHVHGVDASGAPVLRRPLRRGQVEAFFAKLAPALVGLEACGSAHHWARVISRCGHQVRLMPPGYVKAYVKRNKNDGRDAEAICEAVGRPSMRFVAVKSVEQQATLSLHNTRRLLVQQRTAAGNALRGMLSEVGIVAAQGEKGLRTLMEQLEQPSEAIPELMRNALLLLARQWQALDAAERVLEQQITKAANADRQARRLMAVPGVGPMIASSVLAKVPDPHMFRRGRDFAAWVGLTGRDHGTGGKHRVGRISKQGDRMLRTLLINGASAYLLHQKRRGLTDPWLRDLLARRPYKVAMVALAARTARILWALLAKGGEYRVRASVPAAA

SEQ ID NO: 329039 - protein, 352 aa, unidentified
MAVYIGVDLHVRTQTVCWVDTADGEEHEITLDHERDDVRAFYSQFPAPALVGVEASGYSLWFHRLLEELGHRLLVGDALAIRQFARRRQKNDRRDARLLLDLLTHDDFPAIHIPAPASREVLALLRYRHRLVRIRTMLRNGLQAVALSHRLRLGPKLFTARGQQQFAVLPLTGAFAVQRQHSLLLLASVADQIQAVEAQLDQRAQQDPRVLRLRTHPGVGLLTALAVVHALDPVTRFDRARRVAAYCGLDPREHSSGDTQHFGHISKQGNRLLRFLLIEAAHNAIRGDEDLRRFYYQLAARKNAAIAIVAVARKLVLRLYRMLRDAIDYDQFRRRGRDARRAREDASQVLPG

SEQ ID NO: 329040 - protein, 419 aa, unidentified
MSFKILKFNCCGLDVHKTWIYACIGITDSNNRTEYKQARFSSFTKGLHELCDWLAKYNCKDVCMESTGKYWIPVFNILEQHEIWVTLSHPKYTKPMKGNKTDRKDAKWICDLYMCGMVKPSFIPPADIRELRDLVRYRFKLTCMITGEKNRAQNCLTVSNLKLDDVFSDVFGKSSRSITEHILQHPGETFDVAPFIHGHCKTPVEEIQAAVDGAISKEQAVKLRQCLDHIDELQKHISEVEQEILRLSDKYEAALNLIRTVPGFDKNPMTAIQVLSEIGGDMSVFPTAKHLVSWAGCCPRNDKSDRKIKSTRISRAGSYFKPVLVQVANALIKSKKHPEFTTRYKRIKARRGHKKAIIAICRMILTAIWHILTDLKPYTPEGFLESRPVNNSKILTTSQALNLLRQRGYTIKDDTVSVI

SEQ ID NO: 329041 - protein, 369 aa, unidentified
MADRITYVGLDVHKESIVVAVASGGLRGEVREYGRIANTATALDRLLRKLGGEGMTLRFCYEAGPCGYGIQRRLSTQGHECIVVAPSLIPKRAGDRVKTDRRDAASLAKLHRAGELTAVWVPDARHEAMRDLVRARLDAVHSLRRARQQLSGFLLRQGCHYGRPAWTKLHRRWLAGLTFDQAVHHLVLEDYIAAVEAAMARRDRLTVQIEAMLPDWTLAPVVAALQTMRGMALVNAATLIAELGDLSRFTNPRQLMAYLGLVPSEHSSGASVKRGGITKAGNGAARRLLIEAAWSYRFPARLSRELLLRQESQPKPIRDIAWKGQVRLCARYRRLARTGKPANVVTTAIARELTGFVWAIARQVTVTPG

SEQ ID NO: 329042 - protein, 458 aa, unidentified
MKGKRTSAENHSGMVTVHPNAAAIDVGATMHMAAVGADCTSDPVRSFGTFTGDLHRLADWFAECGVKTVVMESTGVYWIPIFELLDERGVEVFLVNARDAKHVPGRKTDVSDAQWLQRLHSHGLLRASFRPKGEIAELRAYLRQRERLLDYAASHIQHMQKALTEMNLQLHHVVSDITGATGMRIIRAIIAGERDPTVLALMRDTRCHAGVDIIEKALTGYYRAEHLFGLEQALALYDEYQQKVSACDLRIEAVLMTLASLRGNRGEPLGSPRRRMPRQANGPAFDVREALYALLGKDLTQIHGLGPYLALKLVAECGDDLSAWPSAKHFTSWLCLAPSNKISGGKVLSSRTRRSGSRVAALLRLAAVTVGRTETALGAFYRRLSARIGKAKAVTATARKIAVLFYNALRHGMNYVDPGASYYETRYRERVIGNLHRRAKAFGFILQPDTVASEVAVS

SEQ ID NO: 329043 - protein, 482 aa, unidentified
MVVPNEEPKKPTKPKKPTKPKKPTKPKKLRERSLPVPVPASAAALQVINPDAAGIDVHSDMHMVCVPADRDANPVRQFGANTADLQEIVAWLKKCRIKTVALESTGVYWIPLFELLESEGFEVNLVEPGQLSRCGARPKTDVLDAQWIQRLHSYGLLRASFRPPDSVLALRAYWRQRQMQVRYAASHVQHMQKAMEQSNVKLAEVVSNITGVTGMLIITAILEGERDPVKLAQLRDERCQHSEEQIALALQGTWRPEHLFELRQAYELYQFHHRQITECDQQIEAELANFPNRAGEKTHTVKPRKRGRKSNDVRFEATGPLFKALGVDLTLIEGIDVGTALVILAEIGVDVSRFPTEKHFASWLRLCPPQDESNKTKKRRGHRKATNRVTIALRMCAQSIGQTMTPMGLFYRRIRSRIGALGAVKATAHKFACLVYRMLKYGQEYVTQSMEEYEAKVKANILKSLKRKAAALGFELSPLPTQ

SEQ ID NO: 329044 - protein, 346 aa, unidentified
MKEISIIGLDLAKHVFQVHAADAQGRCVLRKQLKRHEVLSFFAKLAPCVVAMEACGTAHHWAREIAKIGHETRLVPPAYVKAYVKRGKNDAIDAEAICEAAGRPSMRFAPVKTMEQQGLSMLHRSRDLSIKNRTMLVNALRSHLAEFGFVAAKGIGKLPDLIKIVSEAPAHGLPDIARAALSGLLEAIAVIDVQLAAAAKRLMAWCKTDAQSQRLATVPGIGLIGATAFSARVPDPSLFKNGRHLAAWIGLTPRQDSTGGKTKLKRISKAGDGYLRRLPVLGATSLIRSLQNKTTRLALWVQELLARRPRRLVTVALANKLARIAWSVMAKAEAYKPLAIPAGASA

SEQ ID NO: 329045 - protein, 436 aa, unidentified
MEDKTLNVGIDFSKKRADVGLFGPKGEYIKKHIAFKNSRTGYEYFKEHVLEAMEAYGLDEINVSGEATSYYWLPFFMAITNDLELNEYKVHPYLLNPRWVSWYKKCFAPEHKTDADDPFFIAERTRTLPKVHEWTYDESWFKLRLLTRFRFHLVQGLAREKNFYQAYLFVLNSAYTQQKPFNNMFGKTSTKILRNLRQIDLLTEREDHELAKHLQQTSRTNLSVSLENAQRLKKVAAERFPVDPELSDILQRILNYTLDHIQFIEAMVEEVNKCISEEARHHPEVAILSSIPGIGPVFANGIAAEIGSIDRFLAGQKYDRRKKQMRNKNLRDADASVAKYAGLWWPRNASGDFESDERILSKTGNRYLRYYLIEAADRLRQWSPVYAEYYQKKYAEVKKFSHKRALVLTARKSIRLYVGLLHRMKPYRSQEVRIRN

SEQ ID NO: 329046 - protein, 320 aa, unidentified
MSKKKLKSFIGIDVSKEQLEVAAHESDCQFRCANKASAFGKLIAELINLRPALIVLEATGGLEIPVVGALHAAGLPVVVVNPRQVRDFAKALGQLAKTDRLDARVLAHFAAAIKPPLRPIKSKEEQELDALTGRRDQLVEMLTDEKNRRTSAASDTVRGQIKEHIDWLEECIAELDEQLKALVQSSVRWQAKDEILQSVPGIGPVASCSMIADLPELGTLNRQQISKLVGVAPLNRDSGQQRGTRHIYGGRARLRRVLYMAALTASRHNAAIKEFYQRLRTNHKPFKVAITACMRKLLTILNIMVRDNTRWKNKHVPVSA

SEQ ID NO: 329047 - protein, 315 aa, unidentified
MFVGIDVAKDRLDVHVRPAGESFVISRDDEGIEELAKRLCAMVPTLVVLEATGGFETVVAAGLAAADLPVAVVNPRQIRDFARATARLAKTDALDAAVIAHFAEAVNPPVRRLADPQQRLLGELMARRRQLIEMMVAEGNRRRLLTARRTLKTVDRVLATLKAQLEEIDHDIDIAVRGTPAWREAEDLLISVPGIGHKIARTLLAEMPELGRLDRRQIAALTGVAPFNRDSGTRRGRRAISGGRIVVRSALYMSVLVAIRRKLPLAQTYHRLRASGKPAKVAIVACMRKLVTILNAILRDKSHGQPLEQHDGRSG

SEQ ID NO: 329048 - protein, 394 aa, unidentified
MKLVGIDVGKNSHHFCVMDKETGELNVTPSSFSNNKEGFDFLINSLKPYSKKSILIGMEDTGHYHVALLKFLLSNGYTVALINPKTTDLTRKMEGGITKNDKLDTITICDVLDTPERKKQYRITKVDRFDLYEQRQLTRHHHNLKEELNVYCNRLQKSIDLVFPEFNTLFSSKYSIVYMNLLKTFGSAEAIASTDIRTIRKCFEIKGRGGRISLTPEKLKECAKNSIGISSEVETIQIKHLVSQISLIKEQIAEIDKKIEEFSIKNNSPILSIPGISHFSGTSILAELGDIGNYSKPSQIIKFAGVAPYHYESSQYNAQHTAITKKGSKYLRKTLYQIILPVINNNPVLKKYYLLKISQGKGHRCAQGHCIRKLLRIIYHLLETGQSFDPALLR

SEQ ID NO: 329049 - protein, 317 aa, unidentified
MDELRSVSIWVGIDVSKDRLDVHLRPSDEAFAVARDGKGLETLVERLRALDVALIVLEATGGFETTVAAALAGAGLPLAVVNPRQIMDFARALGKLAKTDAIDAKVIAIFAEKISPQARPIASRQAQRLGELVARRRQIIEMIGMEQNRRRRAGEKRLIKQIDRHIAFLEKELAEVDSDIDAGVRASPVWRETEELLTSVPGVGPVTARTLIAELPELGQLDRRKLAALVGVAPFNRDSGTWRGHRMISGGRTSVRTVLYMASLAAIRFNPVIRANYQRLVARGRPKKVAIIACLRQLLTILNAIVRDATPWAVQSA

SEQ ID NO: 329050 - protein, 408 aa, unidentified
MKTLHQRCAGLDVHKTEVVAFVRVVTNRKVGQQVRRFPTTTQGLLALAEWLENAGCTHVAMEATGVYWKPVWHILEGHFALILANAAHVKNVPGRKSDVNDATWLADLLAHGLIRSSFVPPPAIQELRDLTRTRRQLTREIVQHVQRIQAVLEEANIKLCSVITDIMGASGRRMLKAMIAGETDAEKLAALGHERLGCTRAELVEVLTGCVREHHRFLLGQHLRTIEQLEDSVAAFDARIEAALSPFHDIVERLKEVPGLGATATETVIAEIGTDMSPFPTAGHLLSWAGFVPRLDESAGKRRSTRIRKGAPWLKPVLVQAAWGAARKKNSYLQAQFLRLKARHGAKKAAIAVAASILTTVYHMLRDGTCYQDLGPEHFTRRNPAKAAARLANRIRNLGYHVEIRAAA

SEQ ID NO: 329051 - protein, 336 aa, unidentified
MRYIGVDLHTTQLTVCYLKTVDDYEFKQYRLDEIETFAASLEAADELAVETTGNSRWLVGVVERRISRVVVVNPSEFEVIKRSVKKTDKRDALNLARFLAVDMLPAVRQRSELAEAVARMNETRNKMVGLKTSLLNKIHGLAVSRGWKLRRESLSSKKGLTKVTEFEWTAIERIELEIIIEQIGSLKESIKRLDEAIAEISPQMAGFENLITVTGIGTRSAAVLISVIGEVADFATESKLASYFGIVPRVSNSNEQVHHGRITKRGSKMGRTTLVQCALVAIRYNPYLKKYYEQVKARRGHGKAKIAVARKYLGIIYNTLKNNWMFEDFNNFVLAE

SEQ ID NO: 329052 - protein, 415 aa, unidentified
MKVHRNCCGLDVHKKIIAACLIKEDGEGNSIQEKRLFGSMTRELQELAQWLCAAQVTAVAMEATGVYWMPVWNVLERYGMQLLLINPEHYKAVRGKKTDLKDGRRIAELLQDGRLEGSYVPAVAIRVLRDLTRYRTKLVQYQSSLSNRIQRLLEQCNIKLAAVASDVLGVSAMAMLRALAEGETDAVRMADMAKKQLRKKIPQLQLALEGCVLPHHRWLLRELIEDLDHVGTKITRIEETIEQQMRPFQSAVDRWVTIPGIKHRLAWTLVAEVGPTVEAFSSAADIVSWAGVCPGNNQTGGKRKSGTTRAGNPWLRRALCEAAWAASKTKGTYLQAQFRRLAALRGPKRALIAVANSILTAGYYMLQRATTYQDLGPDYFDKRNTVRATHRLVKRLEALGHRVILEPRFIADPNT

SEQ ID NO: 329053 - protein, 345 aa, unidentified
MCSLPVFVGLDYHDASVRVCVLDTDGRELANADRCNDWKAIAEFADRFGRPVRAAIESCCGAADLAEELVSCAGWSVDLAHPGYVQRMKQNPDKTDYQDAQLVADLERIGYLPRVWLAPQHIRELRQVVRYRLQLTEQRRATKLRVRALLREQRCRAPQGVNAWTKAWDHWLRHSAELSAEARWVANQHLQELACLVTRIRQVEKRLERLTANDVEVQRLQQQVGIGPVTAWTIRAEIGHFDRFRTGKQLARFCGLSPRHASSGQRQADAGLIRAANPALRAVLIEAAHRLVNYDRYWQKFAQRLRAAGKPGSVVAAAVANRWIRRLYHEMKTPSGELAVAVRSA

SEQ ID NO: 329054 - protein, 316 aa, unidentified
MTSKISILAIDLAKGSFQVCAVGPYGVVVFNRAVSRTRLATLLADQPACIVAMEACATSHHWGRIAQSHGHEVRLVPAAYVKPFVKRQKNDRADAEAIAEAAMRPTMRFVAVKNVATQGRAVAFRTYQCMVRQRTQLINALRGHLAEFGLVVPKGPASLKLLENALAEESTDLPEPVRHMGSIYVEQIARLTEVIDRLSDELETSSKTDEQLRRLCTIPGIGPVTAGAVAAFTPDLDTSDSGRNFAAWLGLVPRQRSTRGKARLGSVSKIGQTDIRRLLIVGAMSVIRRVVRKGGSANRWLAALVALKPKRLLPLP

SEQ ID NO: 329055 - protein, 338 aa, unidentified
MEITTVGLDLAKNIFQVHAVDGQGKRVLSKRLKRKSLLPFFANLGSCLVAMEATGSAHHWARELKKLGHEVRLISPQFVKPYRKGSKNDQNDAAAICEAAGRPDMHFVPVKTKEQQDIQAVHRIRQRLVGHRTAKANQTRGLLSEYGIIVPQGIRTLRNQLPFILEDADNGLSPLARELFSDLYHQILELDEKVASYDRKIKQIFRSSPVCQRLAQVEGVGPTIATAMIAAVGDGKCFKNGRQMAAWLGLVPGQNSSGDKRRLLSITKRGDRYLRTLLIHGARAVISNAAEKSDPRSVWLNGIKERRHRNVAAVALANKNARILWALLTSGEEYRFGT

SEQ ID NO: 329056 - protein, 416 aa, unidentified
MKLFVGIDVSSEKLDTCYLTDEMVVLLNHTYGNDTQGAWELKEQILSFHETYSFDQIVIGMESTSMYSYHPAVNFHQDEQLQAIHAITTIENPHRIKQYMKMFDADKTDPIDAFMIADYLRIQRYTNFPIKGEKYMALQRLTRTRYQIVRQLVEVKQHFIENLSYKCNTLKKELREAEGSTTVFSAAIMDLFTQDLSLDDLANLPLKDLAEWLQSKGRGRFKDPEGLAKTIQRAVRSSYRLDQVMSESIDMILGILVREIRSLEKAVKDCDQGIEDLVQTVPEYQCLTSIPGVGPVYAAGLLAEIGQIERFPDQTSLAKYAGLTWPKHQSGRHEAENTPLTKKGNRYFRYYLIEAANSVSRHLPEYQAFYRKKYQETPKHQHKRALVLTARKFVRLVDTLLRNHQLYTPPRSVIEK

SEQ ID NO: 329057 - protein, 347 aa, unidentified
MTLVADGLVVGVDTHKDVHVAVVLDRLGRRLAVRDFPATDAGNAELVRWLAGLGPVTDAGVEGTGSYGYRLARLLADAGLRVWEINCPDRSRRRRKGKSDPVDAENAARTVLAGEATAVPKDRRGLVGELRLLVATRRSAVKARTQASNQIKAFLIDAGDQLRARLHGLRKRRFGRACAALEPDDGLRRALAALGRRWLALDTEARELEAQIAALLTAHARQLLARHGAGAVTAAQLLITAGANPERLRGDAALAALCGASPVEASSGKTSRHRLNRGGDRAANNALWVIAHVRTISDPRTRAFVAKRTAAGNSRKEIMRMLQRYLARELYPLIIDTLRTAAVVGLT

SEQ ID NO: 329058 - protein, 365 aa, unidentified
MEQVTRDQIVRVGVDLAKHVIQVHAVDGAGRVVVAKALARDRFMAWCAQLPPGCVVAMESCGGAHHWARKLATMGLQPRLIAGHFVGPYRMQGKRGKNDANDAAAVCEAASRPSMRFVPVKTAEQQGQLAVHRLRQGYKQERTACINRIRGLLTEFGVAIAQSPEALRRALPEVLEDASNELPSLARMALQRAQLQWVELECHIAWCDERILAHVRSDEQAKAATQLCGIGPITASALVATVGDFKQFKTGAQFGSWLGVVPSQNSSGGRTSLGGITKRGDDYLRTLLIQGAKSAVMTAHKRRDRISQWLVQLVARVGWQKAVVALANKNARILWAVLAKGRRFDANHISVKPEGPAMVVPTMAG

SEQ ID NO: 329059 - protein, 352 aa, unidentified
MRYLGMDVHAKSTVWCLLDAQGEVVSEGHTPTTAALLAALVRELAQEDTVLAGQEVGTLTYLVHDAVTAAGTTLLSFNAQSLRMIAASRKKTDRRDAYWLAKALQSGMYPHPVYVPTGEIRELRARLSQRRVLHTDYNRWRYRARTYLRAGGYPVAPGGTALRAALAPGNAGTRGAPTSLTDALGLCQRQEAALRAELAQVDATLRGRTQAVAAIQRLMTVPGIGPLTATTIYAWVGDVRRFPHAKQLAAYAGLVPAVRQSGGTVHVGGITKQGAPALRATLVQAAHVLLSRCRGADARPLQAIGLRIRGTRGRRKIAVVAVARHLLRIAYYILRDGTTYDAHRLGTMTDAA

SEQ ID NO: 329060 - protein, 371 aa, unidentified
MYIVGIDIGKNHHEASIVSPEGKQIGPSLRFATTHKGADSLMSFIFKNIGNSPCVFGMEATGHYWYPIYSFLKAKGYTIYVINPIQSDSLRKMYIRQTKNESIESFLIAEVIRFGQFGTTSMADENILAMRQLCRYRDSVISSRTEIKLRIGTIMEQIFPEYEKQFSSLWVSTSMGILEKYLTPENIENAPIDELFEIKKDKSHNRLTKAKAISIKEAAADTFGIKIAQDAFSFQLKQLIDRMNFLDKQIEALDCQILEYYKNFDCYLHTIPGTGMIAAATILAEIGDINRFKSSSALVAFAGIDPTVRQSGEFSSTHNHMSKRGSPYLRHAIFLAATARSFHNSPLNAYYKKKRDQGKHHLTATGAVARL

SEQ ID NO: 329061 - protein, 388 aa, unidentified
MRPISQTTTQKLSHCRPDDATLYASLELSRATWLVTALSPGSEKMSKYSTLGGDGAALLGLLRRLQARAERLAGGPVDIVVIQEAGLDGFWVHRLLNAHGIQSHVVDPASIAVPRRRRRAKTDAIDGETLLRTLLAWQRGEPRVCAMVVPPTPEQEDRRRTSRERAVLLQERVRHVNRIKGLLASQGITDYEPLHKDRRARLAALHTGDGQPLPLRLKAELLREIELIELLIRQIAEVEVERDIAAELDVEGNQSPVALLARLKAIGPQIAAVLYLEGLYRSFANRREVAAYAGLVPTPWRSGTIDREQGISKAGNRRLRHIMIELAWLWVRHQPDSALSRWFRARVGTERGRIRRIAIVALARKLLIALWRYVKHGEVPEGAVFKAA

SEQ ID NO: 329062 - protein, 348 aa, unidentified
MAYFVGLDVSVKETSVCVVDDSGKVISEQKVLTEPDNIITLLTSIGETYARIGIEAGPLSQWLVNALIAADLPVICVETRHMKALLTAQQINKTDRNDARGIAQMMRVGLFKPVHVKTLVAQEKRMLLTSRKLLQRKLLDVESDLRGTLRNFGLKVGAVSGGRYDARVRELVEGFPGLAAIVEPLLAVRRVMRQQFAVLHKMLLDTVRDDPVCRRLMTAPGVGAVVALTYRATIDQPQRFVHSRAVGAHVGLTPKRYQSGEIDYDGGVSKCGDALLRTMLYEAAQTMLTRAKKWSWLKAWGMRVAQRRGIRRAIVAVARRLAVVLHRIWVDGTEFRWSKDSATVLNAA

SEQ ID NO: 329063 - protein, 365 aa, unidentified
MRESTNWIGFDEDASKVVVARVVGYESKARESFTVEFNDRGLRQLVRRLKELEGEVRCVYEAGGSGYELYRTLRRHGLACEVAAPSLTPRKPGDRVKTNRRDAEKLATLYRGGDLTMISVPDQARESLRDLVRCREDAQQDLLRQRNRLTKLLYRRGLRHGDGRRWTQSYWRWLRALRVAEPHLQTVIDESILAIEHAVERLRRVDLAVRQAAVEPPYKAMVGRLMTFRGVGALTAISIIAELGDLRRFAQAKKLMAAVGVTPSEFSTGDHQRRLGITKTGNAHLRYLLVEAAWQARHRPSARGAILKRRAEQPPEVVEIARRCEQRLHRKYSRMIHRGKPSSKAAVAVARELLGFIWSVGQLPL

SEQ ID NO: 329064 - protein, 317 aa, unidentified
MQQIAWVDTETGECGEQRLMHRTEAEQFYRKLKGRPVHVGMEATGHSRWFERLLADLTYELWVGDAAQIRAKQVRKQKNDRRDAQHILKLMREGNFPRIWAPTPENRDLRQLVLHRHRLVGMRTRIMNQLQAVAMNEGIRRKKQLWSAKGRQQLESLSLMPWTARRRQELLELLDQFDPSIDQLSQAIEQEAERIPEVKRLMTHPGVGPITALAFVLVIGTPDRFGCGKQVASYLGLIPCEDSSADRWRLGHITKQGNAVLRYLLGQAAQSAARCEEQWQRQYVHLTMRRKKAIAKTAMARKLAVRLFWMWRNFHGI

SEQ ID NO: 329065 - protein, 362 aa, unidentified
MYIGVDTHKKQHVLVALDGRGQACGTHSVANTPSGWAAALQWAHDRDATCVWGIENSGSLGKGFAQFLVSSGESAVHEIVPHRTAQYRRRGRTQDKTDHTDALAMARLLQAESEHLPRVERDDVSTELRLLSDHRDNLVAERTRLINQVHAQMLQIDPCYGEHSGALTSRTGIRYCHALDLPHADSVVQTRLLIVHQLTEQLLRLWEEIETVESALAARVRETETPLLGLCGIGVVAAARLIGELGCTPRIRSAAALAALAGIAPVAVSSGGRNGHRLNRGGNRRLNRTFHMIAVCQLRCEPLAQAYYAKKRAEGKTGRSALRCLKRRLVDVVYRLLRGQERATAPDARAGNVLGSFLQPAA

SEQ ID NO: 329066 - protein, 363 aa, unidentified
MSVQYVGMDVDKQKIVLSRLGSGRDTRTVDHVIANTPSAVKKYFASLLGAAQVHATYEAGCFGFGLYRQLSAMGVTMVLAAPGLIPRKPADRIKTDRRDARSLALALRAGQLTAIYIPTEQDESVRDYLRMYESLRGDLRICKQRVLQFLLRRGISYDGGGPWTVKHRHWLSALQFTQLRDRQTLDMYLSQMQELEAKCDEAAAEVESIAAQDCYRQQTKKLTAFKGIKTLIALSFVTDIGDFRRFSTARQFMAYLGLVPSERSSGNKRRQGSITKAGNSHLRRLLVEAAWHYRSYHPSSRDLTERRRGVDPTILSYANRAGRRLNRKYLHLLLRGKRSQVAVTAISRELAGFLWGAMTDQVA

SEQ ID NO: 329067 - protein, 366 aa, unidentified
MIVIGTDTHKQSHTAAALDGATGGVIAEQTARAKRRSFEDLLLWARQLGPERVWAIEDCRHVSGALERFLLAHGEQVVRVPPKLTAGARSSARERGKSDSIDAVSIARAAIREGLDTLPVAQLAGPELDVRLLVDHRERLIAQRTQLSNDLRWSMHDMWPEFDVPARALTASGWQERVASRLARAEQSARVRIARDELRRIRELTRTINALEGELATLIATLAPRLLAEPGCGVLTAAKLIGEIAGISRFATEAQFARITGTAPIAASSGRSERHRLDRGGNRQLNCALHRLAVTRGRMDPDTSGYLARKQAEGKSRREALRSLKRHLARRIWLVLQPPGRDTPPTRHRPAVTIHCNTPYGSFSLT

SEQ ID NO: 329068 - protein, 372 aa, unidentified
MNYNTVYVGMDVHKESFSLCAYTIEAEKASHYQRTEADYKKVLNYLEFLRTIYGDDANFVCGYEAGCLGYTLYHQLTANNVKCIILAPTTMLERRSKKRIKTDKRDAEIIAKCLAQHNYSPVHIPTAKDEETKEFLRMRDDHKLALKKVKQQILAFCLRHNYRYDGNSHWTAAHLKWLKALTPEALYKEILDEYLLTYQTLSDKLERLDKRIEELATQDEYKEAVKKLCCFIGVKTHTALSVLVEVGDFKRFASAQHFASYLGLVPGEDSSGDDQNRLGITKAGNRHVRLLLTEASQCYARGQVGFKSKELKARQSGNTPAVIAYADKTNERLRRRYYKMVLNKCKKHNVAKTAIARELACFMWGMMTDNIA

SEQ ID NO: 329069 - protein, 378 aa, unidentified
MLATGRFGTDKAGYAAMRKRVAAWPERTWAVEGSNGAGRPLAQRLLADGERVVDVPAKLSARARLFDTGHNRKTDAHDAHAVAVVAVWTSGLRVLSYDLELEALRMLVDRRAELTRTRIQTVNRLQRLLAELTPGKAKKDITTLQAKAILASVRPRDLAGKTRRRLAAEQLAELTVVDKKIKDLTKELKVMVVGSGSRLMDLPGVGPVVAARTLADVGDVARFADRNRFASWTGTAPIEASSGEIVRHRLSRAGNRRMNHMIHIAAATQIRLDTEGRAYYRRKLATGKTRAEAMRCLKRRISDAIYRRLLADARTLSNAGMHAGPGGHRGASLKSSAAGSHPHTSTSDQPLPGPAPTTLPAPTPTRKSTTSRPLQPAS

SEQ ID NO: 329070 - protein, 376 aa, unidentified
MEWSASLYKRLQMSHDVSNKQNIKIKERQTVDNNSSKGRITVLGIDLAKNSFQLHGVDEKGNRVLKKKLTRNQLVAFIAQLPPCLIGLEACGGAHHWVRVFSELGHTVKMIAPQFVKPYVKSNKNDAVDAEAICEAVQRPSMRFVPSKSIEQQDIQSVHRIRSLLVSRRTAQANQIRGLLMEYGIVIPQGINPLRKAIPDILEDAENTLSPYFRELLRELYDEIVHFDERIATIELKLKVISEQNEDCKRLLTIPGVGLLTATALIAAISDISVFKNGRELAAWIGLVPRQHSTGGKPTLLGISKRGDSYLRTLLIHGGRSVVRVAHKHEDKRNQWIREIKQRRGENISNVAVANKNARIAWALLTKKQDYCVIGG

SEQ ID NO: 329071 - protein, 339 aa, unidentified
MEKVSTIGLDLAKQVFQVHGVDGRGAVVVRRTLRRAQVLAWFGKLPPCLIGVEACASAHYWGRELHKLGHDVRLIPPAYAKAYVRRNKNDPADAAAICEAVSRPSMRFVAIKSERQQAAAGIHKVRDLLMKQRTMLRNQLRGLMAEFGIVAAKGTARLGALLAILADPEDRRIASPLREGLLAVAETLGTIERKLEAIDRQIVEAGRGDATYRHLITAPGYGPILSSAMAAIVINPGAFRRSSDFAASLGLVPRQEGTGGKVRLGPISKRGNGYLRRLLVNGAMSVLNSKRAKDDPWLTKLLAAKPRKVAAVALANKLARIGWALMMRQEDFRTMPAAA

SEQ ID NO: 329072 - protein, 343 aa, unidentified
MNEVTTIGLDLAKSVFQVHGVDASGATMFRRQLRRRQVLPFFRKQPPCLIGMEACATAHHWAREIAALGHEVRLMPPHYVKPYVKRNKNDAADAEAICEAVGRPTMRFVAVKSAERQSVLMLHRTRELLVRQRTMLVNAIRAHMAEFGVVARVGLPQLKELLQVIADADDARIPTLARACLDGLARQLQSLEREIVGAERRIQAWHRTNEDSRRLDTIRGVGPITASALAASVTDPSIFKSGRGMAAWIGLVPRQNSSGGKERMGRISKQGDQYLRWLLVAGAMTVIRHAKRRGTTDPWLAQLIARKPTKVAAVALANKNARIAWVLLRHGGTFRNPTSVSVA

SEQ ID NO: 329073 - protein, 350 aa, unidentified
MVVVGADVHKRTHTFVAVDEAGRKLAEKTVKAITAGHAEAVMWAREQFGVDVVWAIEDCRHLSARLERDLLALGQKVVRVPPKLMAQTRASARTRGKSDPIDALAVARGFVREPDLPVASHDEVSRELKLLVDRREVLVAQRTATINRLLWRVHELDPEHAPKPCSLDLAKHRNILGRWLDTQSGIVAELARDELADITRLTQTINALAKRIGERVREVAPVLLAMPGCGELTAAKLVGETAGVARFKSEAAFARHAGVAPVPVWSGNTRGRVRLTRSGNRQLNAALHRIAVTQIRLDGLGQTYYRHRLAEGDSTPEALRCLKRRLARVVFNHLHTDHNNRQKPCQLAAA

SEQ ID NO: 329074 - protein, 412 aa, unidentified
MEVVYLCCCGLDVHKKSITACVLWAEAKGKSRKEKKRFGTFTHDLLQLADWLQECGVTHVAMESTGVYWKPVWNILAEQFEVLLVNAQHIKAVPGRKTDQKDSEWIADLLQHGLLRGSFVPPRPTRELRDLTRYRVSLAQEINRIANRVQKVLEDANIKLASVATDPLGASGRAMLEAMLSGEQDAAQLAELSKGLLRNKIPELKLALEGRVTEHHRFLLQQLYDHLLFTESKRKQIEEEIERRMRPFQDEAVRLCTIPGVDRVTAWGLLAEIGLNMNQFPSAAHLASWACLCPGSFESAGKRLSGKMRKGNVSLRRCLSQAAWAISMMKNNYLSALYRRIAARRGAKRAVMAVAHALLVIAFHMLKRKENYRELGADHFDRIDVNRIRRSLVRRLEHLGHRVTLEPLAQTA

SEQ ID NO: 329075 - protein, 376 aa, unidentified
MKKIRFVGLDVHAETITVAVAEPDGEVRSLGTIPNREESVRKLVNKLGPPQQLRICYEAGPTGYVLYWLLTSLGVQCDVVAPTLVPVKAGDRVKTDRRDALKLARNHRAGDLTAVWVPDEAHEALRDLVRARESAKQDQLRARHRLSKFLLRHGRRFAEGGKAWTLKYMVWVKQVRFTQPAQEYAMLDYLHEVEHMNERVLRLEQAIEEAVKLSPSWMQEVVQALQSLRGVAKISAATLVSELGEISRFENPRKLMAYSGAVPGEDSSGERVRRGAITKTGNAHLRRVVIEAAWSYRLRPGVGPGLRQRQKGVSEEVKEIAWKAQLRLHKKYQRLMAAGKDQRKIVTAVGRELLGFIWAIGRATESRCRPRSVMTA

SEQ ID NO: 329076 - protein, 387 aa, unidentified
MPSTPLKTSARPHAAIHGDCAMLCVSIELSSKTWLVTSLAPGSNKMSKHKIVGGDHCALLDLLQRLQSKAAKRLGAPVRIVTIQEAGFDGFWLDRLLQAEGIESHVVDPASVAVPRRHRRAKTDKIDGELLLRTLLAWLRGEPRVCSMVVPPSPEEEDRRWLARERNILVDERTAHTNRIAGLLSTQGIHGYRPLRRDCRARLEELETGDGRPLPPGLKAEIGRELDRLELVKQQIAEIEAARDALLASQDKAPGKLLLQLRSIGPEIASVLWLEGFYRHFDNRRQLAAFSGLAPSPWRSGNIDHEQGIAKSGNAKLRTTMIELSWLWLRYQPDSALSQWFRTRVRGNGTRRYRKITIVAMARKLLIALWRYITQGVLPEGAVLKVS

SEQ ID NO: 329077 - protein, 390 aa, unidentified
MLFIGIDVASKKHDVIIISEYGEILSESFTIENSSVGFKKLHTEISSHTELFDNVHIGLEETGIYSSNIRDFLHSAGFNVYMINPVLTHHSRMAYSLRNTKTDKLDCLAICRYIMHNFTHLKPYISTLYTTSELKSLSRLRLDKLHTLAKAKMEFTRLLQITFPEFIKHFKQHSQWAMNLFSSYPAPAKIARMHLDTLVSIIKIKGDRVSAAQLIKNLAKKTIGDTSITNSLLIESIIDDINHYNKQIAIIDKHLDALMADFDFITTIPGVGNVIGASIIGEIGDISRFNSPSQLLAFAGLDPSIYESGEFKGKRCRISKRGSKYLRTSIFTATRVACVGKGKNNQFRQKYHKKKLQGKHHNSALCNVSKNMINTIFAMLNSKEDFIYIT

SEQ ID NO: 329078 - protein, 370 aa, unidentified
MGKSVLYVGLDVHKMSIDVAIAEAGPGAEVRFYGQIGGDLDSLDRVIRKLRATGAQLQFAYEAGPCGYVVYRHLTAQGWPCLVAAPSLIPRRPGDRIKCDRRDALSLARLFRAGELTPIRVPDADDEAMRDLTRAREDAISVERRAKQRTGALLLRHGRVYPGKTTWGRGHWRWLLQQVMDHPAQQIVLQEYLDAVREASARVQRLTGQIQELLPQWRRAPFVAAYQALRGVSLIVAATMVAELGDLSRFKNPKELMAYLGLVPSEHSSGASVRRGRITKTGNGHARRVLVEAAWAYRLRARVTRPLLQRQEGLPEGIRQLAWKAQLRLCARYRRFLARGKAKQTIVTAIARELAAYIWAIGQAVEPVTT

SEQ ID NO: 329079 - protein, 338 aa, unidentified
MEWTVAIGVDTHKEAHVAVALDALGGKLDSREIATTPAGYRSLLAWAQELGVPAFAVEGTGSYGAGLVRFLEHAGVSVYECERPRRQERRRGKSDLIDAALAARRLLGGERLSLPRGAGRREDLRLLLLERRSAVQARTAALNQVSALLVTAPDHLRSRLGALSGERLAKAAARLRRRPDVLNGVLRRLGQRVERLSKEVAEAEGALAALLAEVAPALLEECGVGPVCGAQLLVSSGDPSRMTSEASFAALAGTSPVEASSGKQRRHRLNRGGDRQLNWALHVVALQRIRHHAETTAYYQRLLAAGKTTREARRCVKRALARHFYRRLREMPTVLLTT

SEQ ID NO: 329080 - protein, 330 aa, unidentified
MQKPQFTIGIDVSRNTLDIYCSEIKQHRRITNDTAGFKAFSNFCRSVGIDLQQAFIVLEYTGGYEYKLLQFCESKNIAYLRIPGLAIKRSLGIVRGKNDKVDAARIAQYADEKYKQLDPQKPLNKSILRLKELLGFRKRLVRENAGYKSSIKERLHMYEVNARDYFIKTFNKKLNANLKEIEYTEKLISELIHNDEALLRNYSLLKSIKGIGNVNAWMTIAFTENFTSFTNPRSYAVYVGVIPFDHSSGTSIKGRKRVSHIANKELKQELNQAAKSAIQWDKELRAYADKKLLNKHYCLVLNNVKFKLILRMFAVVKRGEKYVDSYTIAA

SEQ ID NO: 329081 - protein, 338 aa, unidentified
MEVYAGLDLHSTNTYVAMIDGENKVLYKQRHKNEVPAILSALDPFKRDIKGVVVESTYNWYWLVDGLMDAGYRVHLANVSAIKQYEGLKQIDDKRSSLWLANLLRLNILPTGYIYPKEERPTRDLLRKRLHLVRHRTSHILSVKNILARNLGVRMKSDEVKKLTAPEVKRLFPDKEMRVAVMASVGLIGHLEEEIDGIEKLITKKLRIREEFIKLLTLPGIGQILGLTIMLEVGHIDRFPTVGDYSSYCRCVKSTRTSNGKVTGYGNRKNGNKYLSWAYVEAAQFARRFHEAVRTYYEKKMGRTNRIVAIKAVSHKLARASYYIMRDGVEYDQARLFG

SEQ ID NO: 329082 - protein, 351 aa, unidentified
MLIIGCDYHPSVQQIAFVDLETGETGERQLLHKDGEAERFYRDLKLRGISVRVGIEATGHARWFERLLAELGFELWIGDPAQIKAARVRKQKTDRQDAQLLLKLLVEERFPRIWIPSPENRDVRQLLWHRHRLVQMRTRVMNQLQAVAMNEGVRRKKALWSKSGRAQLESFVLSPWASRRRQDLLEVLDRLNPTIDELSTAVEQEAKKRPEVLRLMTHPGVGALTGLAFVLIIGSAKRFACGKQIGSYLGLIPCEDSSANRQRLGHISKQGNTLLRFLLVEAAQAAVRGDAEWRRKFVHLAMRRDPRIAKVAMARKLAVSLFWMWRKEWNYEQVIKFGSHAGLSDYVHGVK

SEQ ID NO: 329083 - protein, 345 aa, unidentified
MELHTIGIDLGKTVFHLVGLDLHGEVVVRKKFSRTQLLRFTANVHVGLIGMEACGGSHFLGRALREQRHEVRLIPAQYVKPYVKTNKSDYIDAEAIAEAVSRPTMRFVPVKTDEQLDMQSLHRVRERWVMRRTAVINQIRGLLLERGITLRKGRHHVHAALPLILEDADANLSGAVRLLLTQLKLDLDQLSVRIDEADAVIQKTAHENEACRRLVAIPGIGPVTATALIAAIGNGGAFHKGREFAAWMGVVPREHSTGGQQKLLGISKRGNSYLRRLFVQGARAVLQQRTKLSSGLSAWLAQLTSRTHRNVAAVALANKLARIAWAVLAKNEQYRPSVVPDVAAA

SEQ ID NO: 329084 - protein, 342 aa, unidentified
MDHFAGLDVSVKETSVCIVDDTGKIVREVKVASEPNALLAVLKNPAYHFKRIGLEAGPLSQWLCSALAEAELPVVCVETRHMQAVLKAQINKTDRNDARGIAQMMRVGLYRPVHVKTLRSQKLRMLLTHRKLLQSKAIAIENDLRGTLRNFGLKVGMVGKAKFEARIKELVENLPDLAILIEPLLIVRRALREQVVILHRRLLAIVRDDAVCRRLMTTPGVGPVVALTYRATVDVPARFRKSKSVGAVFGLTCAKYQSGEIDRSGRISRCGDEMMRVMLYEAAQSMLRSKKWSWLKAWAMQIARRRGMKKAIVALARRLAVIMHRIWVDGTEFRWTREAAAA

SEQ ID NO: 329085 - protein, 521 aa, unidentified
MSVYSPSDGRTSRNPFSQWCSCEPALQHGTRHCVEISDDVVPRLGSGGDDLVWETASIFAAWPSLPSEKGSMHRKKYRNRRPSNKVFVRPVTNPDTAGIDVSPYCMYVAVPPDRDPEPIRKFNAFTTDLRAIGQWLKACRVRSVAMESTGVYWIPLYQILTDEGFDVCLVNARHYKNVPGRKTDVCDAAWLQYLHSVGLLLASFRPTQEICAIRSIARYRETLIRQAAEQVQRMQKALDEMNLHLHHVIDDLTGKTGLAIVNAILQGERDPHVLARLREKNVKAKAQTIEKALEGDYRTEHVFVLGQAFETWKHFGDQIAKCDHQMERMTQALGAIVDTAGYTPLKRPSKNQPQGDWGRLLYGSFGVDLTAVPSINVATVLVLFTEIGTDWSRFPTASQFASWLTACPDNDTSGEKVLRRKTRRSSQRVKRALRLAAQSLRHNKTALGEKYRRLRAHLGTPKALTAMAHALARILWYMVTHKTPYDESIFAENERKYQERRRKRLLKEARSLGLQLTEVNI

SEQ ID NO: 329086 - protein, 345 aa, unidentified
MKITTVGIDLAKNLFQVHAVDERGRAVLRKQLRRDQMARFFANLLPCLIGMEACASAHHWARTLQKFGHTVRLMAPQFVKPYVKTNKNDVADAEAICEAVSRPNMRFVPIKSVEQQAVLSLHRVRQGFVRARTAQGNQIRGLLGEAGLIIPKGIVNVAKRVPALLEDAGDEVPASFRQLIQRLTEHLKELDRQVDELETQIKAWHRGSKLSCKLEKIPGIGPLGASALVASIADAKSFDNGRQLSAWLGLVPRQDSSGGKPKLLGISKRGDVYLRTLLIHGARSAILAAQRKAVNTNVWLAGLLNRRHPNIAAVALANKNARTVWALLAHGREFRADYAPEASAA

SEQ ID NO: 329087 - protein, 424 aa, unidentified
MKVTYPTCCGVDVHKSFLVATIIKTTGGIEPSYQKKRFSTFNNSILDFKSWLLENECHDVCMESTGKYWVPVFNLLEDQINVTIANPKWVKAVKGNKDDTKDSKWIGDLFRLGLVKGSYIPCKSIRILREYTRYRYKLVSCRSSEKNRYQNALTVCNIALDSVVSDIFGKSSSSIIDYLLEQSGTTINHEEIASKLLKRLKSKEDAVIESIEGYQMTDAQKYRMRLVRAHMDYITAEINDVDKQIESLISSVPDYVKAIQFLTTIPGVKHDSAITIISEIGIDMSQFCNSKRLCCWAGLTPGNNESAGKKKSVRITRAGVYLKPALVQCAHAAVKSDKSPYYKKKYESLVKRRGKKRAVIAIARMILTAIYQMLSTGEVWNPSDLYKIDMPAPLVEKQKAKAIKQAKKLLQKEGLLPPDEPLAS

SEQ ID NO: 329088 - protein, 402 aa, unidentified
MKTMKKLIKYVIGIDIAKDKFDACLMSVDIELNYKVKSTHQFSNNPKGFKELQLWQKKHCIEIVPVQILMEASGVYHEKLAIWLTDQKFQVFVVLPNKARKFMQAIGLKSKNDKIDAQGLALMCAQQKFDLWKPIAKFYYELRLLTRHYQSTQEAKTMFNNQQHALKYSGYSSKTVSKQLNLTIALFDKQIKESKKSIVEFINTNDEVKRKVYQICKIKGVDVLTVATVIAETSGFELFKNIRQLASYAGYDVIENQSGKHVGKTKISKRGNSRIRRILHMSSLNVVRFKETTFVNLYGRVFNNTKIKMKAYVAVQKKILVIMYTLWKKDQEYQRDYYQKMTSGNDELRVLFPVSIKGETSTSLKAVVLPISKITPEEHQHKKSKIPCGKKTRNIKEIIIEG

SEQ ID NO: 329089 - protein, 405 aa, unidentified
MNAVGIDVSKGKSTVTIRKSGDVVLMSPCDIPHTQSAINDLIKQIKSLEGETKVCMEHTGRYYEPVATWLSDAGIFVSAVNPILIRDFGDDSLRTPKTDKADSKKIARYTLDRWAKLKQYGIMDKTRNQLKTMNRQFGFYMAQKTAMKNNLIALIDQTYPGANDFFDSPARNDGSQKWVDFIHTYWHVDCVRSKSLNAFTEHYQNWCKRKNYNFSAEKAAKIYQISSDLIAVFPKDDITKMLIWQAVALLNTASKTVESLRSKMNELASTLPEYPVVMDMNGVGATLGPQLIAEIGDVSRFTHREALTAFAGVDPGKNDSGKHIQNSVQTSKKGSPYLRKALFQIMDSLIKRSPVDDPVYAFMDKKRSEGKPYYVYMTAGANKFLRIYYGRVREYLSNLSNNETI

SEQ ID NO: 329090 - protein, 314 aa, unidentified
MNTAVFVGIDISQARLDVALRPGVPFSVSHDEPGIAAVVVQLRELAPTLIVLEATGALETALTSALVEAAFPVVVANPRQIRDFAKAGGHLAKTDRLDAQILAHFAEVMRPTPRPLPDAEVRALAALWARRRQLVEMLTAEKNRWLTAPTTIRKSVRAHITWLEREVARTDADLAEAIQRSPVWREKNQLLRSVPGVGPVLISTLLAHLPELGTLTQKQIAALVGVAPFNRDSGTLRGKRTVWGGRAHVRAVLYMNAIVAARFNPVIRTFYQRLCRAGKAKKVALTACMRKLVIILNAMLKHRTPWQQAEMTLA

SEQ ID NO: 329091 - protein, 411 aa, unidentified
MNPVIGLDVSKGESQVQAFLDKGKPYRKSFKVSHTIEGLNLLVEFLEVVKRETGKKPPIVLEATGHYHSSVVQYLEERGYLLIIINPLISYKVKSSSLRKVKTDAVDAYHLCELFYKEDLEPYKKRGVQLLNLRNLTRQHENITGVLIQTKLQFQAILDQVFPEYRGVFGDLYSVVSLLTLSEFSSSEDILEASIETIADKIAQLCKSRSYRWANEKAIQLKAAADRNPFEKTLYQSHILSLGMYINIILQYKEHLSKLESEIDALAKEVEEYNIIKSIPGIGEKIAATIISEIGEIDRFTDPKKLVAFAGVDPSVFESGKFTATKNRITKRGSSRLRHALYMAVRCAIRDCRKSKTSDEIIPRNKKLREFYDKKREEGKPFKVAVIACVNKLLHWIFALLKNKTTFQDIA

SEQ ID NO: 329092 - protein, 313 aa, unidentified
MIITLRCIGIDVSKRHLDIFDEGIGVSERVANAPHAITELVARWRCDALVVFEATGVYDLGLREALRAAGIRFARINPARARDFARASGQLAKTDPIDARMLAAFARAMRPAPEQVSTPARNALARLAKRRDQLVHMRAQEKNRRSEAGDRAMVERIGRLIEVLDREIAEIEADISALIKAEPEISHDAQLIRSLPGVGPVACMQLIAQMPEIGHVGPKQAAALAGLAPFNVDSGAYRGKRKIGGGRKRVRNALYMAALNAVRRADRFKAFYARLRQAGKPAKLALIAVARKLLIILNAIMRDRKAYVPAQQT

SEQ ID NO: 329093 - protein, 346 aa, unidentified
MTIIRIGLDTSKHVFQLHGVDEQEQPVLRRQIRRSELEKFFAKLPPTRVGLEACGASHHWARVLRGMGHEAVLMPPQYIKPYVKRGKNDAIDAEAICEAMGRPGMRFVPVKSTDEQAALMLLKVRDLLIKQRTMVANAIRGHAAEFGVIGAKGPVKLGVLLQKIAEDAHLPALTREMLATLGGQLAAIEMRLGVIEAKLMARHKADPRSRLLATIPGVGPIGAMSFALKVPDATVFRSGRHFAAWLGITPREHSTAGRQRLGKISREGDEGLRRLLVIGATAVIQQANRRAKSAGKGPAAHTSPWLLQLLARKPKKLAAVALANKMARIIRAMLVSGEVYRRPQAA

SEQ ID NO: 329094 - protein, 349 aa, unidentified
MWIIGCDYHPRMQEVALVETETGEYDERQLSHDHGEAEKFYCDQRGVNVRVGMEATGHARWFERLMAELGFALWIGDPAEINATRVRKQKRDREDARLLLKLLRENRFPRVWVPPPENRDLRQLLWHRHRLVQMRTRIMNQLQAIAMGEGVRLRKSLWSRSGRAKLESLQLAPWAAKRRKDLLELLDHLTPKIEELNVAFEQEAWNRPEVRHLMTQTGVGPVTALAFVLIIGTPGRFACGEQIGSYLGLIPCEDSSGGRQRLGHISKQGSSLLRFLLVEAAQQAVRFDADWKRQYLHLAMRREKRIAKVAMARRLGVRLYWMWRTGWDGKQALQVGSHAGQLVRSHGLT

SEQ ID NO: 329095 - protein, 339 aa, unidentified
MSKLLKNFIGIDISKSYFDVALIILMQPGQRIHHQFSQCKNGFKEMLQWLAQQGVIINEETIFCMEYTGIYNTGLVNFLVEQKALVWVEMPLRIKRSCGFERGSDDKTSAVKIAAYAFRHQDQIQLWRPLDSSIEKIKNLIAQRDRIVNAITGLTVPVKEMLECGCVAEARQLEKLQKSPLKALQKSKDAIEQLILKIVEQDEHIYKKTKQVQSIKGIGKVTAVSLLAYTKGFTTFSTAKQLACYCGVVPFSKTSGSSVRFKPTVSHMANKKLKKLLHLCALSAIKNDPEIKLYFERKVGEGKNKMCVINAVRNKLIHRVFAVIRDDRFFEENYVRKCV

SEQ ID NO: 329096 - protein, 342 aa, unidentified
MHKEICYATTLDKEGEIVDRREFKNEREEWEKFVEGIPRDSKVAIEACSYWYPVCDFLEERGIEMVLSHPSKTRIIAEAKIKTDKIDSKNLAKLLRADFLPQSYIPSKEIRENRELLRLRVQLGKDRTVVKNRIHALMAKNGVKHEFSDLFGVEGMNFLKEIELAESQRIALDVLLRQLESVDKEVEYVQKRIAIVAKGDEVVIILMTIPGIDYYSAMIIKNEIGEIERFPGYKELCSFAGLVPRVHQSGNTRWEGHITKEGNALLRWILIQAVHQVVRYPGELRKFYLRLKKQKGTKIAVVATARKLLRVIYCMLTRKENYRYERKALTESKLKRLEKTAC

SEQ ID NO: 329097 - protein, 295 aa, unidentified
MKHYAGIDVSLEASSVCVVDADGTVVREAKVLSDPEALIGWFAGLGLEVELIGLEAGPLSQWLHAAMTLAGLQVKLLETRHVRAAFKTMPVKTDRSDARGIAQLMRLGWFRPVWCKSLLAQRTRAVLQARRLMKDKQHDVELSLRGLLRNFGLKLGKVTPKTYEQRVRELSAGEPVLEGLVEAMLRARAALMAQYAVLHRQVLALARSSDQARLLMTMPGVGPVIALDYASAIDDPKRFSSSRRAGAYFGLSQRKYQSGKTDITGRISKIGDERVRSSLYEAAHVVRVSTTWAAS

SEQ ID NO: 329098 - protein, 347 aa, unidentified
MAVTIVETRAITGGVDTHADMHVAAALDPIGGLLGVQEFPVTPAGYAQLLAWLGGFGNVCLVGIEGTGSYGAGLSRHVTAAGVRVVEVDRSDRQDRRRAGKSDPLDAVSAARAAQSGRARGAPKGRDGAVEAIRALMVAKRSARSERIQTINQARSLIFTGPDDLRTRFTGHTADALVAGLAALRPRPGSTVGYATRLALRELGRRTEFPGAQMERLDELIVPLVTTHAPGLLTLYGVGPDTAALLLIAAGDHPERLRSEATWAHLCAAAPIPASSGKVTRHRLNPGGDRQANHALWRIVITRMSSHPPTRAYVERRSHEGLSKKEIIRCLKRYVAREVYPHLRRAD

SEQ ID NO: 329099 - protein, 346 aa, unidentified
MMIIGCDFHPSWQQIAWLESETGETGDAKLVHAAGEAKQFYAGLTKPALVGMEATGNSQWFVELLEDLGHGIWIGDAAQIRASYVRKQKTDKRDAAHLLKLLLEGRFPKLWTPDPEQRDLRQLVLHRHKLVEMRCRVKNELQHLSLNKGMQRKRTLWSQAGLQLLRELPLKPWASCRRADLLRLLALFDDQIGKLDEAVQQAAEQHPQAKLLMTQPGVGPNTALAFVLTIGDVARFPRGKQVASYLGLIPRERSSGGRQRLGAISKQGNRWLRCLLVEATHNVVRLDPGFGKQYLHHCHQKPKGVAKVAVARKLAVRLYWMLRTQVGYPEIVRIESSPRVPLASAS

SEQ ID NO: 329100 - protein, 341 aa, unidentified
MSIVGAFDVHRRQLTFDYSDTVTGEVKRGRIAPADREHLREWLARFAGCDDVHFALEGCTGWRYVTEELAAARVTPHLAGPADTAALRGRKRHAKTDKTDSRHIRSHLAAGDLPECWIPPAQVLEARAIVRLYKDLLDERGGWHQRIAATLFHQGVPVTASMSTAPGRAAVAGMALSPAGLQAVETGLRQVGRLTAELEPLRRQLDMISRRQSGCRALRATQFGVGAVTSVAIWAELGDVRRFGNSDDVIRHTGLDITVYSSDGKRSAGHLSRQGPQLLRWALYEAAKCAARPGAPDHGYYAATRDRRTGGLATLPVARKLARRCYHTLRELGEEAMRPAA

SEQ ID NO: 329101 - protein, 370 aa, unidentified
MPKTTPVFVGLDVHKETISVAYAAGGTAEPPQFVGQIGTRLCDVDKLVRRLQSRSSRLVFAYEAGPSGYVLHRYLTGKGLDCRVVAPSLIPKKPGDRVKTDRRDALELARLLRSGDLTGVYVPSVEDEAIRDVCRARDATRVTLKSAKLRLKSFLLRHGLNYVGRADWNAAHRRYLAKVVCPTPAQQIVFQEAVRAVDEQVERLARLEHELLDLAPSWRMFPVVEALQALRGVQWVVALTVVAELGDLTRFDNPRQLAAFVGLTPSEHTSGEKRRQGGITKTGNPRARRVLVEGAWAYRYPAKISVHIQRRIDKLPKIAQDIGWKAQVRLCKRYRRLIARGKHANVVTTAIARELLAFMWAIAKEVKITA

SEQ ID NO: 329102 - protein, 431 aa, unidentified
MQMTIGVRRRIAKQTQRRAELTPETLIVALDLGKRQHAVWVTDSTRIPLDTWMMRAAPEGFAALFARTADLQERFGRPRVLFAMEPTSYFWKLAAQQITDRGARYRLVQPLSVRRAREEQRYTWAKGDRIDAELIATLIANGTWLDKQLETGPWGTWEQLARTRLRLVQQRADILRELLALIEVCFPNYPYLPHGVTQPGSVAVLRSCPTPAAIRRLSGEAFVARVRANYIGERVSARRILQVYHAAKHSWGLRTDRLTSGLRIRMAVHRYALLTEQIATTDRHLARFYRASGARVLLETIPGLGASTASTLVALMGPVNRYDRSRCVVRLAGGEPTQNASGMFQGHTPTSHRGRGLLRLAAYQAVLGLIRCNPEFRARYEWLTTRPKRPLHSIAARVALGDKLLRTIYTMLITRCPYNASVARGEGRNLQ

SEQ ID NO: 329103 - protein, 376 aa, unidentified
MTKISRIGIDTSKSVFVLHGVDAADRPVLRKKLRRKQMVEFFAKLEPTRIGLEACGASHHWARTLQGLGHEVVLLPPQYVKPYVQRNKNDSRDAEAICEAMSRPRIRSVPVKTAEQQAALMLAGTRDGLIRRRTQLTNTIRGYAAEFGLTAARGLDKIEALLARIAAADDVPELAKEMFAAYAQEYAQLKEQVHTIEKRLMTWHKGDEASRRLAEIPAVGPIGGALTVMKVTDPKAFRCGRDFSAWIGLTPKDHSTAGVTRLGGITRAGDEALRSVLVAGAMAVIQQARKGRGRHSRWLLDLIARKPPKLAAVALANKNARIIWKLLVSGERYNPERARRDAAAREARGAALCGAARRTPRSPASQVAATGETIGM

SEQ ID NO: 329104 - protein, 388 aa, unidentified
MHIVTDRPHAPTAIRTDLGAIFISLELSRSTWLITSLSPGGGEKMSKHTVRSGDVAGLWARFSQLKDKVQVRTGQTVPIIVIQEAGLDGFWIHRLLQDKRVESYVVDPASIATSRRRRRAKTDKIDGEALVRALLAYKRGEPRVCAMVRAPTPQEEDRRRICRERKTLTAERVEHVNRIKGLLFAQGITDYEPLSRKRRERLEELRTGDGRPLPEHLKAQIGRELDRLELTLQQIKSVETERDAMLSPSDEGTRAPGAMLQNLKGIGAEFAGVLWSEGLFRSFSNRRQVAAYAGLAPTPWRSGSVAHEQGVSKAGNPRLRTTMIQLAWLWVRHQPRSILTLWFHQRVQLNGGRVRKVLIVALARKLLIAFWKYVTAGVVLEGAETTVA

SEQ ID NO: 329105 - protein, 449 aa, unidentified
MSKQAKQGEPLALVHPNAAGLDIGAREIWVCVPSERDDSSVRVFGTFTPDLHHLSDWLVACGIDTVAMESTGIYWIPVFEVLEALGLKVYLVNARHIKNVPGRKSDIADCQWIQKLHALGLLSGSFRPDAEMCSVRAYLRHRADLLQHRSPHVLHMQKALQQMNIQLPQVLNDITGETGMAILRAIVAGERDAVRLARFRDPHCKSSQETIAKALSGNWKDEHLFALKQSLELYDFYTQQIAACDAQIQQQFSVMKPRWKASSDDMPIAPTPKRRRKHKNSPTIIGLTGVDLAAVGGIGDALALTILSEIGTDMTKWPTAKHFASWLGLAPHNDISGGKVLRSRTLPTNNRAGQAFRQAATAVSRSPSAFGAYYRRKRAQNGPKFAQVATAHKIARTVYYLLKHHAQYIDIGADGFEQKQRERELATLRKKAARLGFTLTSPLSAQPAT

SEQ ID NO: 329106 - protein, 420 aa, unidentified
MKTIRTKKMKFVNEKTLIVAVDIGKVSNQGYGRCPNGEEVKPFEFFNNGEGFKKFWGRIWQVKETYHLEAVVVGFESTGPYGEPLVHFLSKRPVRLVQVNPMHTKRLKELEGNSPEKTDRKDPKVIADIMGLGHALTVIIPEGAAAELRRLTQARERAVQRKTALWNQLQSLIALLFPEFLQVMKDLKTHSARYLLEHYPTPQEICRLGLEGLTALLKRVSRGKLKLERARAVYEAASESVGIQEGERSLCLEIRELLGAIAATEGFVAVVEQEMAQGLGQIPYSPFLLSVRGVGKVTVAGLIGEVGDFRKFHTLAEIMKLAGLNLFEISSGQHKGRRHISKRGRPLLRKLLFFAALNMVRQNGLMRPFYQRLVGRGMRRIKALVAVARKLLGILFALVRDQRFYIPDYGKKGAVELEAA

SEQ ID NO: 329107 - protein, 342 aa, unidentified
MRFYCGIDLHAKDCVLCVIDNKEKIHLREKVPNRLERIIGMLRGFSPKPAVAIEATLNWYWLVDGLEEAGFKVKLAHTHGLHMITGAKVKTDPRDAFSLGKLLRLDAIPEAYIYPKARRPVRDLLRRRHGLVSLRSAAYGSMRRTLLQQGIWDYSFAALKQVDALRICELFSDPALQASMLLALERVMLYSQEIQKVEKMILDSVADEPTFELLRTIPGVGKILALTIFYEVGQIERFGSAKQFCSYARVVPGLAQSSSVTRRGRGSKQGNPHLKWAFMQAAGLAVRYNPAVRKFRQTHMSRRRSKAKRLISLSIVAHKLAIGAYYVLKGQVPFRQELMFAK

SEQ ID NO: 329108 - protein, 353 aa, unidentified
MAHPQPPRITVGVDTHKDLHVAAARDQLGRRLGTTMAPATSAGYATLLVWAQALGDVQAWGVEGTGSYGAGLARFLTARGQRVLEVNRPDRAARRRRGKSDPVDADAAARTVQAGEATGVPKAQDGVVEMLRALRVARQTAVKARTQAINAIKALLVTAPAELREPLDGLANPKLVAAAAALEPGTLTTPTAATMLALRGLAQRYQHLDAEISLLTSRLDQLTTRTASALRQLLGVGPDSAAALLIAAGDNPGRLRSEAAFAALCGASPVEASSGKTVRHRLNRGGDRQANAALHRVVIVRLRWHQPTRDYVARRTAEGKTKKEILRCLKRYVAREVFAVLPQLGEQLLVAAA

SEQ ID NO: 329109 - protein, 420 aa, unidentified
MFETIEAILKCCCGLDVHQAVVWACLVIEQPDGKVAKTIRSFSTMTKGLLQLKDWLEEHHCKHVAMESTGVYWKPIFNILEDSATITLANARHLKQVPGRKTDVKDCEWIAMLHRYGFIKASFVPPRPIRDLRDLTRYRRSLIGDAASEKNRIQKFLEDANIKLSAVVSKIWGVSCREMIEALIAGSYTPKQMAKFARGRMRSKIPALQEALEGKISDHHRFLLTKCMEHIQYLERQIAEIDERIDECLEPYREVHTCLQSMPGVDKDAAAGLIAEMGADMSVFPTAAHAASWAGMCPGNHESAGKRKSGKTRPGDKYLESLLCEVAWAASRTKDTYLSAKYNRIAYRRGPKKANVAVGHSIIKIAYHIIKERVLYLEPEKEQITAQQKNRLLKKHLQAIERLGYKIELAQQPQPLKQAV

SEQ ID NO: 329110 - protein, 409 aa, unidentified
MDVIIERACGMDVHKDNITACVMTTKGKEIKTFSTKTVFLLQLIDWIKEHKCKCTHVAMESTSVYWKPIVNLLEAEGIEFLVVNAQHMKALPGRKTDVKDAEWIAQLLRHGLLKPSYIPNRDQRELRELVRYRRSIIEERARQINRIQKVLEGANIKLGSVVSDIMGVSSKDMLNAIADGEDDPEKLANLARRTLKKKKEELELALNGYINLHQRLMLKTILKHIDFLTEQIEMLDQEVAQRLSSYQEDIERLDSIPGIATRMAEQMMAELGNNIKEQFPTASHMCSWAGLVPGHNESAGKRKSSKTKKGNKYLKSALIEAAHSVKGSKNYLGALYRRTASRKGTKKAGIVVAHAILRIAYYLLTRKEMYVDLGEDYFDKKRQQSIVRHSLRRLESFGYIVSIKEPEAS

SEQ ID NO: 329111 - protein, 351 aa, unidentified
MQYIAFDSHKHYTLASVESVNGPGVIHEQRIPHMRGAIQQFLSQYHPGSPVAVETIGNWYWIVDEIEAAGMVPQLAHARKAKVMLGSINKTDQLDVRGLNRLQRNGTLPVVWIPPAPLRDARDLPRTRMALVRQKTQLKNRIQATLAKYALPVTGVSDVFGKRGLGLLWRQIPHLPEQTRFATERVLEQLEHLEHQIQAFEARIQQVIEPTPEVEWLRSLPGVGRTLATLIALEVGDVSRFAEAARLASYAGTTPRVKASGDKLRYGQLRPDVNRYLKWAFIEAANICGMLHRRYPARHVSRVYARLVHKKGHQKAIGAVARHLAEATYWMLTKRTSYREPQHHPVASTKA

SEQ ID NO: 329112 - protein, 408 aa, unidentified
MGPVTVGIDWAEGHHDVAVMDQAGAVVGKARIDTGVTGFTELLALIAEHGGTPEATPVGIETDKNLIVVALVAAGFTVYPLNPRAVARYRERHSQSGCKSDARDAALLADVMRTDRHQHRPMPAITEHGLALKALARQHQEAIWAWHDVLNRLRSLLMEFYPQAVQAFPNLKHKAAIEVLALAPTPTKARMLTRRGLVAALHRCGRRNDPALVEHLLAVLRADGLAQPPAVEAALGVAATQLIAVAKTMSAGVDELQAALRASFAEHPQAPIVASVPGLGPVLAARVLAEIGDDPARFPTAASLRCYAGTAPVTRSSGRSHYVKARKVRNKRLNDACHWWAFAALTRSPAARAHYDARRAAGDHHNAALRNLANKLLGKLWWCLTHGQEWDDATAWPAHPRAALPAAA

SEQ ID NO: 329113 - protein, 338 aa, unidentified
MNIVFLGIDLAKNVFQLCGLNQAGKPVYTKRTGRKELLQTLANIPACLIGIEASTGAFYWQREFEKLGHKVKVISPQYIKPFVRGQKNDGNDAQAIAVALMQPTMQFVPPKSPEQQDIQALHRTRQRIVNHRTATVCQIRGLLLDRGIPIGSAVSRARRAIPLILEDAENGLSSRMRRTIAELYDLFSDLERRIHFFDKEIETVFRQSEACQRIAKVKGIGPKTATAVVAAIGKGTEFKNGRHFAAWLGLVPRQHSSGDRQVLMNMTKKGDKHLRTLFIHGARAVVRVATNNNDGHMNQWVNQLKERRGFNKTTVAVANKNARIIWSMLRNETEYQVV

SEQ ID NO: 329114 - protein, 347 aa, unidentified
MRFYTNPHPFYCGIDLHARSMYVCLMSHDGDILLHRNMKAAPEPFLKAIAPYRDGLVVAVECIFTWYWLADLCAEEGIAFVLGHALSMKAIHGGKAKNDTIDSQKIAALLRGGMLPQAYVYPAEMRATRDLLRRRPHLMRKRAELLAHVQNTNSQYNLPDIGKKIAYKANRSGVAERFDDAAVQKNVEVDLALITYYDDLLTDLELSIVKTAKQHDAPTFYRLRSIPGVGKILALVMLYEIHDIRRFPRVQDFVSYCRLVKCARESAGKRYGSSGTKIGNAHLKWAFSEAAVLFLRNNPPGQKYLARLEHKHGKGKALTILAHKLARAVYDMLKRDTVFDMDKFLHG

SEQ ID NO: 329115 - protein, 334 aa, unidentified
MEKVTTMGIDLAKSVFSLHGVDGAGQVVLRRTVRRDQLVEVVASLPPCLIGMEACSGAHEWGRRFQEFGHTVRLMAPKFVAPYRKSGKNDGNDAEAICEAVTRPSMRFVPVKSLEQQALLAMHRVRQGFVVERTATINRLRGLLTEFGVVLPLRSVTVRRQAAAAAENLPDLARRAIGDLLDQLRSLDERIGGYDREIEVQAKLCEPAQRLMQIRGIGPTTALAIVATVGNAREFKNGRQFAAWIGLTPSQYSTGGKARLGHISKRGDAYLRNLLVQGARSVLNSAGRHQDRMSRWVIELQPRRGYYRTLVAIANKNARIAWALLAKGESMRSA

SEQ ID NO: 329116 - protein, 328 aa, unidentified
MTMNPAPNTFKHVVAFDVGKESLAVHILPGDERQSIANKPKEIRKLLRAQMRRNTNLNLGPLLVVCEATGGYERQLLEICVELEIAAHKAHGSRVRHFAKYLGLIAKNDPIDARVLALFGSKTDNLRLYASPTPELEALTDLRARRDQIQAMLLAETNRLEHVRHETVTKSLKEHIDVLRQALAVLETTIAAHIQASKELARKADLMRTLKAIGPGTATVLLAYMPELGTFSRAGAAAMAGVAPFDDESGKKSLPRHIEAGRAAVRRALYMAALTAIRYNSVMKSFAEKLRLKGKPAKVIITAVMRKLIVTLNAMLRTGEPWKHAETA

SEQ ID NO: 329117 - protein, 398 aa, unidentified
MLSIGIDVSKGKSTVCGMKPGGEIVYTPFEVQHTREGMSELVSLLRGSGEEVRVVLESTGSYHCPVVAALLENGIFVSVVNSLRMKRFCSQSIRRVKTDQIDAMQIALYGLAYWQELQPTRLPENTYRELQLLARQYYQMTSLLIKAKVDFNALCDQVLPGMQELMSDHAGRHKLSDFVLRYHHTAHILKMGETRFRKDYCKWAEKKGYRNHERMAALIFATAQNGIPVLPDAPSTQIVITEAIRVLHTVEASRDAILTQMQALAKTLPEYSLVREMPCIGDTLAPRLIAEIGDVRRFHSKRALIAYAGIDAPPYQSGKFCANNRHISKRGNRYLRKTGYEVMQSYVMHKPANDPIFTFIEKKRSEGKSGKLAMVAGLNKFLRVYYGKVTELYRSLPQ

SEQ ID NO: 329118 - protein, 401 aa, unidentified
MKNVAGIDVHKDFLEIAYREEGKIVTKRIPYDANGLNKVIRLLRKLGIEAVFIESTGNYYYPLYYALRGANIKVNVMNAYKIKRPEPNKTDEKDAIWLLKIGESQLFSSSYIPDDDMLALRMLVRARFKLVDRIADYKRMVRSQLWNLGMIVSNIASVLKSREKRRRLKAIIDGKEVRGYESLSLAIKAIMRRRDVRANLILIKAYLEIIDDLEDSLSKIDREIKAIAGKYEREIRILMSVPGISFTLAVAILSEIGDISRFPSPRHLASYAGLAPVVRESGGKRKTIKPTQKSNKYLRRYMFIAALGAARSKSPKVREFVDRLSSRGKHFKVVMIALARKLLTIIWYLLSRRVFWSEDGFSKKVPRVPRVRGHKISLSEAIKLLREAGYEVRRGRRDKEK

SEQ ID NO: 329119 - protein, 340 aa, unidentified
MKRYLGVDLHRNCFTVCTLKEDGQSELRKWSIHSLCDFAQEVQATDAVAVEATGNARYFCQALKERGCRLVVVNPHQFQVVSRSVKKTDAHDAKTLAEFLAKDMLPEVRMKEALPAEIASVLQTRDKLVKLRTVLKNKINNLLAGRGILIRRESLSSDKGLEQVLQAPVSDLERVELEVLVGQIRHLNDSIRRLEAAIKEQGPKLPGYESLKSIKGIGDIGASTMLSTIGDINDFASEGKLAAYFGIVPRVQNSNATERSGRITKRGSKLGRTALVQCALIAMRYSPYLANYYARIKAARGSGKAIIALARKFLGIIYKTLKNGWVFEDFPAFVLAPATG

SEQ ID NO: 329120 - protein, 345 aa, unidentified
MEHVAIDLGGRESQICVRSAEGKIVEERRCETTKLGDYLKERAKSRVVMETCAESFAIAAAAQLAGHEVRVVPATLVRTLGVGARRLKTDRRDAQVLSEVSCRIDLPSVHIRSPQARDTKTLCSMRDGLVQARTQLTNTVRGWLRMHLLRVKSGGVETLAQRVREKLLAQPEGIPGFVERQLQAVEALTTQIDAASKEIAQYAKQDEVCQRLMSVPGVGPITAARFVATLDVPTRFADAHHVGSYLGLTPSENSSSERVRRGSITKAGDAAMRWLLVQAAWSLWRTQPHDPMVQWARAVADRRGRRVAIVALARKLGGILFALWRDQTTYNPLRSSVPRTPVSEV

SEQ ID NO: 329121 - protein, 326 aa, unidentified
MQITTVGLDLAKSVFQAHGVDETGATVLVKRLHRKQMLPFFSKLPPCLIGMEACGTAHHWARTLAAMGHEVRLIPPSYVKAYVKRGKSDALDAEAICEAVQRPTMRFVPVKTVAQQSILMTHRARSLLVRQRTMVANALRAHLAELGFVANPGIANLAKLAQQALSGESSLPSYARTTLDILIRQILVFTDEIAALDQQLLAWHADSEASRRLSAIPGLGIVTATAVAATVTDPEQFRSGRQFAAWLGLTPQQCSTGGKTQLGGISKQGDRYCGGCSSSAPPPLSVIRRTRQRPWRTGSESSWRKSRSGWSPLPSPINSRGSHGSC

SEQ ID NO: 329122 - protein, 397 aa, unidentified
MYIVGIDIAKRKHEAAVIDGEGAVIIKPFSFTNNCSGYNRLLAMLTKAKLPLDEVSFAMEATGHYWLALFTRLQKEGFRVQVINPVQTNSIRSFYIRQAKTDPRDALLIAEVIRFGHFSESTLHPENIYELRELCRGRHAIVSMQADVKRKVIALLDQVFPEYETAFTNLFGDTSMAILQTCPTPKELSEMPLEELCHLIEVSSHKRFRMAKAQELQELARNSFGFAMAGDVFSTMIRLYAKHLDFLKQQVREMDRKIAEIMETLDTPITTITGIGPTLGAYILSEIGDISRFSSAAKLAAYAGIDPTMRQSGEYNGVRNRMSKRGSPYLRHAIWLAASSAVLHDPALKLYFQKKRDEGKPYMASVGHACRKMVSIIYAVMRDNKAYTPYIPNEISA

SEQ ID NO: 329123 - protein, 379 aa, unidentified
MSKIRFVGLDVHADTIAVAVAEPDGEVRPLGVIPNRLESVRKLVAKLGPAKQLKVCYEAGPTGYVLYWQLTALGVACEVVAPSLVPVKAGDRVKTDRRDAAKLARSYRAGDLTPVWVPDADHEALRDLVRAREDARQDQHRARHRLSKFLLRHGRRPPEDVKKHWTLKYMTWIQEHVHFDQPALEATLLDYVPEVEHMAERIQRLENAITEAIQKAPPEIRAVIEALQALRGVAQLTAVTVVAELGSLSRFHNPRQLMGYSGLVSSEHSSGNRILRGSITKTGNAHLRRVIIESAWAYQHRPWIGGFLLKRQKGLNLSREVKEIAWKAQWRLPTRYKKLAAAGKKKPQIVTAVGRELLGFVWAIAVQTEVEFRDQPKAA

SEQ ID NO: 329124 - protein, 344 aa, unidentified
MHYIGIDYHKQYFVATKMDRKGKIISTQRVSTDRDSIRNYFNNTASKEKVKVAMEACYGWQYFYDEVSDLVDEIIMAHPLKTRLIAEARIKTDSIDSETLAHLLRADLIPEAYAPSAETRDHKNLLRYRSSLTAMKVRIKNVIHSVLARNNIENKFFDELTDKFCKKGIERMREMVLKGNDTAILNNYLDLLNETQKKINQAESLIRKVCREDKICRLLDTIPGIGDILAVTIRYEIDDIERFPTAGKLCSYAGLVPSTYSSGNKRYQGKITKQGNKWLRWAIVEAAQRGFRGDEYLRDFYEKINKKKGSKIARVAVARRLLEIIYWIWIEKRPYYKKPITVAL

SEQ ID NO: 329125 - protein, 376 aa, unidentified
MGTPSAQTLDDVGVRKMFQELEEVPMTMVGGLDVHRQQITFDYVDDDGLVHWGQIRPATRKTLRGWLAEHCPDGNGEFALEGCTGWRYVSEELAAAGLGVHLGDPAEIAVLRGPKKRAKTDRADAKLLRTLLLEGRFPESWIPPAHVAEIRSLGRLYYTLMDERRAWQQRIHAQLFHQGCPPIKALLSASGRDALARAPLSAAGRQYVDTALRRIDELSAEIEPLRTQLANFARRQQGCQALQRHHGIGWLCAAIIWAEIGDTRRFTSSDQLVRFAGLDITVYSSDSKRSPGHLSRQGSPELRWAAFEAAKCAARRGSPDYAYYHRQAAKHDGHNGKNPTLAVERKILRRCYHTLRDLGDAALALPDTRPQQEVAA

SEQ ID NO: 329126 - protein, 406 aa, unidentified
MKKYSEAFVGFDTAKKKHAVAVADVGRDGEIRYLGEIDSSPATVEKVICKLADRYETLHVCYEAGPTGYGLYRQVRALGHDCAVVAPSLIPKKASERVKTNRRDAVTLARLLRSGELTSIWVPDAIHEAVRDLVRAREAAAEDHRKKSQQLLSFLLRHGRIYMGREHWTQAHRRWLAGQKFESPAQQIVFQDAIDAIEVAVTRRRRLEEQLIAMVPSWSMAPLVAAYQAMRGVSFVVAVTFVAEIGDLRRFEKARQLMAFIGLVPSEHSTGDTVRRGGLTLSGNRRARRVLIEAAWSYRYPARVSVALQKRLDGVPKPAREIAWKAQIRLCARYRRLIALGKKKPVAVAAIAREMAAFLWAIARQVEPTAAESATVAPAPPAITIARRRVALKDASRRSAVACRHP

SEQ ID NO: 329127 - protein, 350 aa, unidentified
MFYLGMDVHGKWSTVRGFNPETGEMVEIDKLANTREAMYAALGGLEGPLHGVMEAGTNAFAMHWMLGPLFERLLVADPSELWDRRRDRGAKTDRRDAQRMAEKLYRGEIKGIYVPPASIQDMRTLGRCHVRATQWVNRLVSELGSMLRSWGYVLPTSLLSKAGRELIERAQTELPADSAQVVRLWQEMLEKAQQVSKQLQNQVTTRAAADPQCRLLQTIPQVGPVTALVVRAEIGDIGRFAAGKGKALVSFAGLCARTWQSSERCSHGHLVAWGNRWMRYVLGLLGARLHRSKQDSCLRRLYWRTLLRHDRKSAQMGAARKAAHLIYHLLTHNEPYVEPEVKHRRAKVAA

SEQ ID NO: 329128 - protein, 424 aa, unidentified
MTIDNAIGIDVSMRESTFVGLARPEEVILTSRTVPHTAQTLGKVAAEILALPGRTVAFCECTSVYHEPVVKALREAGVPIAALNPLLVHEFGGDTLRKVSTDKSAAYKIALYGLTWGYKFAPSTPEEPTRVMLKAVSREYAFFTKQKTAQRNHLHALSTRVFPGVQELFTSQDRDDGSVKWVDFLNKFPHAECVSKLSFDKFVAQYKKWCKKHGYYAVKADELHSHAKSCIPSLPQNADATLLVRTAIAQVNEVSKTAAVYKKRMVELASTLPEYDVVMSIFGCGDCTGPQLMAEIGDVRRFTARKGYKSLVAFAGVSPGDKQSGTYDPKSSPIEKRGSPYLRRALFSAVKAYSLKSPGGEPVYITLERKRFEGKKYLVYMTAAMNKFLKVYYARVMEHFANLASNETTSAAATANDSDLAAAG

SEQ ID NO: 329129 - protein, 481 aa, unidentified
MAATKKNVSKDAAPGSPAAASAPGDDGAEVAEERVEVVTYAAAIDVAKGSGMVCTRVPGSRPDRKRQKIWCAEASYDSVVALMYHLRCEGIQRLVLESTSDYWRIWYYLAEAAGLEVWLVNARDVRHLPGRGKSDREDCVWLCKLNERGMLRRSFVPPEAVRDLRSLTRTRSRLAQDQVRHQNRVEKILEDALLKISVVISDLFGASGRRFLDALVAGERSPAALAALGHPQLKATPQQLAGALTGRFRDIHAFEIATHLRLIDAINDEIARLDAAIEQQLASIPGVAPACGTCGLIGGGHAPGCASKDTAVLGLVERLDEITGVGARNAQVIIAELGTDMSVFPTPGHAAAWARLTPRTLQSGNSARPGRTGKGNPYLRGALGQRVMAASRTDTRLGEQYRRTARRRGKQKGIVAVSRVICEIACVLIGDRAVRFTDLGAGYYSAQDPRRQTRSRIREIERLNPGMKVTLTPIETAGAAA

SEQ ID NO: 329130 - protein, 341 aa, unidentified
MLYTGVDYHRSFSYLTTMNEKGKIITQKKLPSNGEIVDFLKEFGEEMEVAIEATPSWYWLYDSLEDEGFKVKLSHPLKTKAIASAKVKTDKIDSATLAHLLRSNLLPLSYVPEKTIRLNRELLRYRASLVKVQTRVKNKIHTILAKNNVTHSYTDLFGKQGIAFLQSLTLTENYKIALEGYLTVLDAVRKEIRLASSKVKQLAEEDRDSLLLMTIPGMGYYSALLTKSEIGDIKRFRSAKQLCSYAGLVPSTHASGNTCFHGHITKQGSRWLRWILVEAAIHAVKRPGILRRFYFKIERKKGGQIAKVATARKLLEWIYHILRDGRTYQEMEKIADLLGRG

SEQ ID NO: 329131 - protein, 375 aa, unidentified
MNYNTVYVGMDVHKKSFSLCCYTNEKEQAEYHQKTEPHYSKVLNYLEAMRFHYGDDAMFICGYEAGCLGYTLYHELMDHNVKCIILAPTTIPQPTGKKKIKTDKRDAALIARCLAHHDYSPVHIPSEKDEQVKEYIRMRNDHKVALKKIKQQISAFCLRHGYRYDATVNHWTQAHLKWLRALKPEGLYQDILTEYLSTYDQLTDKIERMDQRIEELAGEAEYREGVKKLSCFLGIKTQTALSAMVEVGDFKRFSSAQRFCAYLGLVPGEHSSSESQNRLGITKAGNSHIRTLLIEAAQSYTRGRVGFKSKALKERQYGNPGDVIAYADKANERLRRKYYTMVLTKGKKVNVVKTAIARELACFMWGMMTGNLTER

SEQ ID NO: 329132 - protein, 391 aa, unidentified
MYSDGSKHSSFSVPNNRNGAKIIVDRVTSVLLLQDIPQVVIGMEATSVYGDNLMRFLRESGSLGRFERNLHMLNPKQVKKFRDAYSDLPKNDHVDSYVIADHLRFGRINKEVYMDDYKYLALKMYTRARHQLVQELTREKQRLLNTVFISFSGLTQEKIFSDKFGATSMALIEEFSSLDELAYMSTDELVDFIRKKGKNHFDDPEEIAEAVQRAAKNSYRPPQVIADAAKQMLAISMNTIRLLQKQIKEYDKAIEKMLEAFPQTLTSIKGIGNIYAAGIIAEIGDINRFPSQAGLAKYAGLVWTQHQSSDFEAEDKRMIQGGNHHLKYYLCEAANALRRCDPEFKRFYALKYKEANKHNHKRALALTARKLVRLVYTLLKTNRLYIPPEEY

SEQ ID NO: 329133 - protein, 348 aa, unidentified
MTQFSRIGLDTSKAVFTLHCVDETGQPKLQVNLRRAQLLPFFKRHAPTIVAMEACASSHHWARKLTALGHDVRLIPPQYVKPYLKRSKNDRNDAEAICEAAGRPGITFVLAKPADRQAEGMVLKVRETLVGQRTQLINALRGHAAEFGVIAAKGTGHIPLLLATIEADPEVPPIAKEMAALLGQQIDHLELQIKALEVKVTAMHKANVISQLLATMPGIGPIIAMTLALEVDPAAFESGRHLAAWLGLTPKEHSTGGKQRMGGISRAGHERLRALLVSGATSVIRVARQPGNKLATPWLLNLIGKKPEKVAAVALANKMARMAWAMMTRGETYRRPSAAGAAARTVVS

SEQ ID NO: 329134 - protein, 487 aa, unidentified
MAKRKKSTFERLSRGGLNRKQRRDLGRRLAGNDPGLTIIHPNAGGIDVGNESHFVAVPPDRDANPVQEFGCWTADLKRMAEWLKSCRIDTVAMQATGVYSIPLYDILTGHGIQVVLVNAQHSKNVPGRKSDVQECQWLMKLHTYGLLRDSFRLEESMEGVRTIWRLRDRHVKDASRAVQHMQKALTKMNIQLANVISDITGVSGQAIIAAILEGERDPWKLADLKHEMVKASREEVARSLEGNWRDDLLFELQQAVDSYHFVHQQMRACDRQIESFLASLPTKILERPPQPDGAPAATAKKAKKPRKPKKARHNQPTVDLTTQLKRICGVDLTSIDGIDVITAQTIVSEIGTDISKFKTEDHFASWLGLTPAKDITGGKIIGPGRRKVQNRIAIALRMAATTLLESKTYLGARYRHLRQRLPSHAAAVKAMARYLAVLVYRMLTHGEAWVDRGAAKFEQGRTEWELKSLTSKALAKGFKLVPITTAS

SEQ ID NO: 329135 - protein, 423 aa, unidentified
MEVVHQCAAGLDVHKDTVVACVRTMANGKAQRECRTFGTTTEELEALRDWLTSCGCAVAAMEATGVYWMPIWKILSEGKFRLIVANAAHIKAVPGRKTDLNDAMWLADLAAFGLIKASFVPDEEFQELRTLMRARKQLVREQTSHVQRIQKTLTEANIRLDSVLSDIMGGAGRRMIEAMIAGVRSPSKLAALGDRRLKATPKELYDALHGRLTEHHRFLLKLHLGQVDALDAAIRAVDAEAEARAAQMDKEAKADEAPFSGLIDLLVTIPGVSKVSATTILSEIGRDMDRFATSAHLVAWAGLCPGQNESAGKRKRCRLRKGAPWLKTMLVQCAWAARRAKQSYYKAQFLRLKARRGPQKAICAVAASILTAIYHMIKNEVPHNDLGADYFDRRKPADKVRRLVGQFKKLGFAVTLQPIATAA

SEQ ID NO: 329136 - protein, 341 aa, unidentified
MAAIGIDTHKATLAACAVDERGAAIAEREFSNDPAGHRALATWAASVSPGALIGVEGSATYGAVLARSLLTSGLAVREVPPHLSRRERIHTRRAGKSDPGDALAIARVTLRETNLPPVRVDDASRELQLLVEARDDLVSEATRVRNRLHADLLVLTPGYQQHAARLVGVRQLAWARRALAGRPELQARLARERLARVLALGRQIRALEAEIAVRVAGHPLLVLPGVGPLVAAKLLGEVGDPSRFRSPDAFAAFAGAAPIPASSGQVQRMRLNRGGNRQLNRALFTIALVQAGHHPPAKALLARKRAEGKSWREALRCLKRHLARRVYRLMQPPAAAVEVAA

SEQ ID NO: 329137 - protein, 328 aa, unidentified
MSNILYVGLDVHKETLSISVAEEGRDGEVRYIGIIPNTHEDIVKLASRLGKNGKSLHFCYEAGCCGYVIYRQLVDLGHDCVVAAPSKIPQKPGDRIKTDKRDSQNLAILHRAGDLTPVWVPDETHEAMRDLVRARLAAVSNLMSARQQLLAFLLRHGRIYETGKHWTRAHRLWLASQTFDQAAHQIVFQDYLETVWGATDRRDALTERIDSMVDQWSLGGFVQALRALRGIDMVSAATFVAAIGDISRFENPQNLMSYLGLTPSEHSSGSKICRGGITKTGNSEARRMLIEAAWSYRYPARIATNKTDVIVQQPKKVRDIAWKAQTRL

SEQ ID NO: 329138 - protein, 348 aa, unidentified
MTIVGGFDVHRAQITFDYVETDSGQVTAGQIRPATRSALRNWLQRFDGREDVAFAVEGCTGWRFVVEEFVRAKVEPHLAEPADTANLRGRKKRAKTDRADARLLRELLAQQRLPESWAPPSHVLEVRTLGRLYVTLMDERRAWQQRMHAQLFHQGVPSVRALLTSDGRVALAKAELSPAGVQMLQTALAAVESLTLQILPLRAQLQTIGCNQPAVVALTQQYGLGLLSGTIIWAELGDCRRFSNSDQAVRFAGLDVTVWSSDTKRSAGRLARQGSPELRWALFEAAKCAARQTSPDHDYYEAVRDRLGGKRPALSVARKLVRRCYHILRELGDQAWQAPLTHPSQAAA

SEQ ID NO: 329139 - protein, 313 aa, unidentified
MAKEVFVGIDISKNQVDVHVLPDNQAFSCSRNQKGLRSLVKSMKEISPVLIVLEATGGYQNFVAAELGKAPLPFSVVNPARIRNFARAIGKLAKTDAIDAYVIARYAEAIKPQPQVLPSQEQTAMKELLARRRQLVRMSTAEKNHLLTVSTVRLRARIERFLQTIEGEIHEIDKDLDDIIKNDPDRSDKDRLLQSVPGIGPNTSRTLLADLPELGNLNRQQIASLVGIAPMNRDSGLMRGKRKITGGRPSVRNMLYMATVASLRFNPKIAPFYRRLRETGKPAKVAIVAAMRKLLVMLNAILKSKTTFHGGLT

SEQ ID NO: 329140 - protein, 406 aa, unidentified
MESTLTAVYRCVAALDVHQAKLTVCLLYETETGDIVTEIREFGGFKRDRREMAAWVAAFHPELVVMESTGIYWKSPYAALEWYGLNLAVVNARHVKQVPGRKTDIADAQWLAILARSGLLRGGFVPPQHFRDYRLIARQLQKLTGITSGEKNRLHKLLTDAGIRLSVVVSDLYGKSAKAMIRGLLDGETPAQLLIHADPRLKATPDELREALDGDLSDSHRFVIRELMAHIDELEARSLRFRQTLLSSLSAYQAILQTLQTLPGIDELSAALLLVEIGDDMNAFGSPAKLASWAGVCPGQNESAGKRKSARTRKGNPYLRRILCEAANAASRTRCGLQDKFKSLMIRRGRKRAIFAIAHKLLKMVFLLIQRGDYYRDAATDYEALTVQRNAPRWIKKLIQYGYITV

SEQ ID NO: 329141 - protein, 459 aa, unidentified
MRWSPTNTQWRTATISRSHYKPFAGTGQRVFPKPMNNQNQDEYEQFAAFVAIDWADEKHAFRLQAAGQKKEAGTLEQKPELIGAWLGTLRERFGGRPIAVALEQSRGALIHALLSYDFLVIFPIHPTTVAKFREAFKFSGAKSDPLDTDQILEILTKHLEQLKPLKPDTEQTRLLSRLVADRRKTVDLRTRQIQALKASLKEYFPQALQILSNNVSSRLAGDFLKKWPNFAAFQQARPSTIKRFFYGHNVRSPQVIEQVLKVAEKSQPLTTDAAIVESGQRLSQMHAELIQKLNPFIEQYDQQIEKVFHNHHEAKLFTGLPGAGSVLAPRLLVAFGSDRSRLQSAQNMQMFSGIAPVTKSSGKSRVVYARCACPKFLRQTFHEFARLSVEKSQWARNYLDYYTDKGKKYHTIIRSLAFKWIRILFRCWKDRTPYDEEKHMETLRKRGSIFATLHLKEHA

SEQ ID NO: 329142 - protein, 456 aa, unidentified
MTTSTLFLPPLSGLGDFVSVVQGLRPDFIGTSPLATFCRTFGARSMFPLSSQAHPTLPRCGTDVMKRQAPPSVSAKLTGQFPDMRLKGGAMEPIYIGVDFHSRQQTICYLKIETGELVIKELLHKDKEQVSAFYQQFQGHVIIGIEASGYSPWFETMLERLGSEVWLGDATEIRRRARWRQKSDRRDAELIWDLLVHNEFPKLHRPTAASQEVLRMLRYRQKLIKVRTMSKNSLQAIALQAGLAKGRSLFTTAGQQELCSAEMSAALQWQRDHWFELLQPLNQQLLETMKWFKEQGKDDVQIKRLRTHPGIGLLTSLCLLHTLQPVSRFRNQRKVVAYAGFDPMIRSSAERAIYLGISKAGSRMLRYLLVEAVHTAVRYDEDLKRFYKRVAERRGRPKAKVATARKLLIRAYIMMRDEIDYAEFRRRAVAVRLARGGQGPTNVPEVLIGRSASPGA

SEQ ID NO: 329143 - protein, 367 aa, unidentified
MKNHSSIDQSVSSSDLSACTTLAVDLAKQVFQVAGEDVLGQVLYEQRIKSREAFYDFLRQLPPHVVVLMETGPGAQAWARQLQDQGNPVRILPAGLVATHRSGPKNDRNDALAILRANRDEKICAVPVKSVAALAMQALHRARQGYVRRRTALSNQMRGLLLEHGVALAQGDVAISQKIPRVLEDATQPVPGLLRELIDELLAEWRHLGERISVLTGRLEVAANADMTAKRLMTVRGIGPVTATALVAKETKPERFPNARKFAAYFGMVPDQYSSGETVRLGDMTKRGDAYLRSLMIQGAHAVLQQLRADSQQPDDRRLLHWMSRLGRKEAAIRLANRNLRIVWVLLQNDQTYRRHAGDGQPATMGH

SEQ ID NO: 329144 - protein, 327 aa, unidentified
MRYLGMDVAKAKLDCLLLNENGDKGKSKSVANSHAGIADFLVWIGKQHISPDELHVVMEGTGVYHEQAALALADAGVTVSIVNPAQVKDFGRGLAVRTKTDGVDSYVLARYGALLKPAVWTPPAPEARMLQALIARREAIAQDLQRERNRQEKADATDTPALIRKSLSDSIEFLSKQLVQLQQDIDQHIDRHPGLKNDLALLQSIPAVGPQVGNNMLAVMHVHNFGSAEQLAAYLGLVPVERQSGSSVLGRAKLSKAGPAKVRAVLYMAAVVATRCNPHIKVVYERLLARGKSKMSALGAAMRKLVHLCFGVLKTRQPYQRDYAKIG

SEQ ID NO: 329145 - protein, 347 aa, unidentified
MKRSPKFAQENILKYSVGIDMSKDKFDAGIGVINEQQVVKIIGTRSFTNEPKGFAQFSSWVKAKCKWDVDVFFTMEATGVYYESLAWFLYRQDLYVSVVLPNKARRFMESLGLKSKNDKIDAKGLAWMGAVQRLQQWQAPDETFVQLRSLTRHRQSLQESRTVFNNQLDSIQCREFVDPVLVNQLNSLIDQLDKFIKEAEKETKALVARQPEMMEKVEKITRIKGVGFISAITVLAETGGFSLFKNQRQLVSFAGYDIVENSSGKHVGKTRISKKGNAHIRRILHMPAFCVVKYKEPAFKALYDRVYETTHMKMKAYVAVQRKLLVLIYTLWKNDQDYIPNLPASLS

SEQ ID NO: 329146 - protein, 377 aa, unidentified
MRVDHTPEGLAKLNTFLETITGPDQKEQMACIIETNHGLLIAFLLEAGWLVYAVNPRTVDRRRSASGAKTDLIDAYLLAKTGRADLADLRRLTPDSEVVQELKVLTGDQDALIQMQTRLVNQLTATRVTSYPVALQLKASVQHHSTLIFLQTSPTPQAAMGASVQQITEVLKHAGHTTAEKVAPKIFEMLHQPQLTANAMTTRTKSRLMLALVAQLLPLVEQIAQYEKEIPPLFLKHEDNEVWSSLPRAGKRLAPRLLAEIGDERTRSADAGSLQALAGTSPVLFQSGNDAKAHRRLGCIKPRLFALHQFAWQSTQQEGWARDSYQRKRAEGKSHTVAVRALANVGARIIFAMLKSHEPYDPATFEAAQRLHARHVA

SEQ ID NO: 329147 - protein, 391 aa, unidentified
MTYYIGLDIAKHKHDCFIMNEYGEVIRDSFSFTNDAIGFNTLLDVLKTLDPAQEKRIGLEATGHYGNSLKIFLEENEYSFMEINPILIARFAKATTLRRTKTDKVDARLIALFLSACDYKPYPLKSYHVRNLKSLCRMRESLVKERSLHLVKITNVLDLTFPEFKPFFKGSLKSSTAMYLLENYGVPSKIARMNIDSYNKMSSALRKTISYAKFLELKKLARETVGKEDAILTFELESYLELFKELDSKINKVESLILKEYGETNSHIHTIPGIGMISAAGIFSEAGNFDKFNNADQLLAFAGLDPSRCQSGESDYIGHMVKHGSSYLRQYLMNCAEMQLVHNPKMYEYYLKKRNEGKAHRVALSHVARRLVRIIFSLEKNDTDFDMNKMR

SEQ ID NO: 329148 - protein, 340 aa, unidentified
MNTLYVGIDVSSKSNVVYLMLPNGDKHSNFSVANSHEGSTLLVKKIYSALTSHSLDTVLIGLEATSVYGDNLVYFLREDATLAPFNRKIHVLNPKQVKKFHDTYNDLPKNDYVDSFVIADCLRFGRINKEVYMGDYRYKALQNLTRARFFAVQNLVKEKQRFMNVLFKKYSTMTQEKVFSDAFSTTALAVYDEFESAEALANMDLHELTDFIIEKGKNRFPDPDAVAKAIQKAARSSYRLPKTVNDSVNQVLSISITSMKALESQIKEFDKAIKALMELLPNVLISIPGIGPVYSAGIMAEIGDINRFDNQASLAKYAGLAWKQHQSGGFEAEVTRLMSL

SEQ ID NO: 329149 - protein, 455 aa, unidentified
MGRRKMKMDIVNPNAAGIDIGSRSHFVAIGQSESEVKAFGVFSQDHNLLADWLEQNAISTVAMESTGTYWQNLYLVLQQRGFEVILANGKFTKNIKGRKTDVQDCQWIQKLHSLGLLTGSFLPDDETEQLRTYCRQRTSWLDQGAAVIQKMQKFLRLLNLRLDVAVSDISGLTGLKIIKAVCQGITDANELSKLVHRNCKKTPKEIALALNCNHRQDLLFGLKQEYEMYLVIRAKIEECDQHIKIFIDQHFHNNPQKKKLTAPRKAYKKKNKNAPRNMDMNQIAYQYFDGVDLMSIEGVSDRTVMALMSELGPEGFKKFPTHKHFTSWLRLAPNNKISGGKHLSRRVGRGSNKLKTALRRAANVLGNLKDSHLGQFFRRIAFRKGRVAAITATARKLAVIIWKMVVEKVVYNPPNPYEFRNQKRSRLLKEMKNKINKLNVSPRELGLNISNLPGR

SEQ ID NO: 329150 - protein, 422 aa, unidentified
MRSVGLDVHLDFCEVAIVEDGEVRSAGRVETTPERLELFAASLAPDDRVALEVTGNAWEIARILEPHVAQVVVVSPSDATIRQARAKTDRLDARTLARLLAAGSLDGVWMPDEQTWVMRRRLSRRSQLVWARSRAKNQVHAVLMRQLVGRPPFSDVFGIKGRQWLAELELAFEERETVDSAIRQIAFLDSEIATVERLIAKAAVGSAQVKRLMSVPGVNVIVAATFLAAVGDIQRFKNPRKLVGYLGLDPRVRQSGPGPATHGHISKQGSTRARHALVEACWTTVRQPGPLHAFYQRVRGRRGHSVAIVAAARKLACLFWCLLTRDEDYAYQQPSLTKKKLRRLEIAAGAPKFSPEATGIWSANNAMREAELELARQAEIAYQRTVRDYHATQAGKVGASVTQGHASKRPSKGNAARQTTSP

SEQ ID NO: 329151 - protein, 385 aa, unidentified
MAPIRMPEAVIGLDVGKSSHWACVATRDGEVLLSTPVANREDDLDSLFGRFPDALVVVDQSRNIGALALARARAAGMSAAYLPGLAAHGAARLFAGDAKTDERDAMVIAKTALGIPDALLPVGDPGPTIAAARALAAQRNFLTCENTRNKNRLRSILLESCPAFETLVDLSDGPQLRLMASLGGAWSVADAGPRRAAALTRGAARGKIEALVRSTTSSTRPDASVVAAEDRAVKLLACRISENSAEIEAITAEISALLEGDDTYRCLLTVPGIGPKTASELAISIDIEDFPSHDRLASYCGLAPRNRQSGTSISSVTASRQGNKRLKNLLIFSCNCLTRTEGRWGDYYTRCRERGMSHGKALKALARKRLKVIYAVMRDRVPYAA

SEQ ID NO: 329152 - protein, 385 aa, unidentified
MQKLNDLSRSPIPLDPDGTLIAVIELSLSSWLVAGIVPGVERQPLKKLEADESALLKLLDRWGEEAKKAGHWIERIAVAFEAGRDGFWLARWLRARDIEAHVIHASSVAVSREHRRAKTDRLDTELLKRSFLGWLRGERDHCKMVPIPTIKDEDAKRPNREHESLVGEQSRIVNRMKAALIRLGVRGFNPKLKKAAERLDGLRTPEGEPIPPNTLAEMRRDMVRRRLISDQIRQIEDARLELLKQAPNDGPHAMVHLLARIIGVGVETADMLVQEVLSRSMRDRRAVARYAGLTGSPDESGRRRREKGLTRSGNARVRRGMIQLAWRFLMFQKDSTLAQWFRARTESARGTRKTMIVALARKLLIALWRLVREGVVPDGVVLRPA

SEQ ID NO: 329153 - protein, 381 aa, unidentified
MAIYRAYFGIDSHLRTTTICALTPEDGELRTRTFRGNDYGEMAEWMADFPQPSHGVYESGCTGFVPARMLTRGDTLVEPVASSKLPSSADSRSRKNDRRDAERLARLALAGEVSPVWVPPEQAGGLRELAQAMDDLACVREAARQRVNAILCRHGISWDERTPTGRLKKRWGQHFWNWLRSIDLGDAGSQAAYLAALSAAESAEVAYDELRARAEGIARASDLGPVIDALMCVKGVGFSSALAFAAEVGDFSRFASGRKVTSYFGLAPSESSSAESRRLGRISRNGCALVRKLLIEGAWVLARGNPACRKRGGTPVPLAIREHARACSGRLLGRRRELVSRGLMPCKANTATAAEMARMLLHVGRDAQEAAALAAEVALVA

SEQ ID NO: 329154 - protein, 405 aa, unidentified
MEIFVGIDWAEAHHDISVLDEAGTVLAKRRIAEGLEGVGQLHTLLAEHAAEPNEVVMGIETDRGLLVGTLLAAGYQVYAINPLAASRYRERHVTSGAKSDSGDAKVLADLVRTDRHNHRPVAGDSELAASLQVLARAHQNLIWSRQRLVNQLRNNLREYYPAALAAFGTELAHPVALGVLGAAPVPSMGRTLSESKLAAILRRAGRERGVEEKAAAIQAQLRAPQLAAPALVSEAYGKSVAATVRILRDINTELASLEAELAPSFEKHPDAEIYRSLPGLGIVLGARVLSEFGDDRTRFAHPKARKNYAGSSPITKTSGKSRVVLARLARNRRLADACHQWAFCALTGSAGARDYYHRLRQRGNTHHQALRALANRLVGILHGCLDHRQPYREDIAWPSRLPVAA

SEQ ID NO: 329155 - protein, 366 aa, unidentified
MKKTSTVRVNGSMIFKGHKLTIGLDLGDRWSNYCVLDEAGEVLLEQKLATTPEAMKQIFEKIPRSLIALETGTHSPWLSRLLRELGHEVLVAHAQKVELISKSNRKDDRHDARTLARLARIDPELLGPVRHRSAKAQIHLTVIRARAELVSARTALVNAARGLTKSYGERLPKCGTEQVSRELAAELSAELREVLEPLLKEIESLNERIKEYDARMEKIARESYPHVALLKQVKGVGTQIALTYVLTLDDPHRFAKSREVGCFLGLKPGRRDSGQSQPQMHISKEGDRYLRTMLVQGAHYILGPFGEDSDLRRWGLRLAERGGKNAKKRAVVAVARKLAVLLHRLWVSGEVYEPLRNNRKAMRAVA

SEQ ID NO: 329156 - protein, 388 aa, unidentified
MQVAADRTDASTAIQTDLPAIFASLELSRSTWLITSLSPGAGEKMSKHSIRAGDVAGLLVRLAQLKEKARGRTGRDFPIIAIQEAGLDGFWIHRVLQSEGIESHVVDAASILTSRRRRRAKTDGIDGETLVRTLLAYKRGEPRVCAMVKAPTPEEEDRRRICRERKTLVGERVEHVNRIKGLLFAQGVSDYEPLKRNRRARLEELKTGDGRPLPAHLKAQISRELDRLELVLPQLKAVEAERDALLKPVSEGCPAPAAMLAQLKGMGPEFTAILWSEGLFRSFSNRRQLAAYAGLAPTPWQSGSVAHEQGVSKAGNRRLRTTMIQLAWLWLRHQPTSALSVWFQERVQSNGGKMRKTTIVALARKLLVALWKYSTSGVVIEGAAMKAI

SEQ ID NO: 329157 - protein, 342 aa, unidentified
MESAVTIGLDLGKSVFQVHGVDAGGAVVVQRRLTRGKLLGFFAKQPHCLVGMEACAAAHHWGRELQKLGHAVRLMPPNYVKPYVKRQKNDAADAEAICEAVTRPNMRFVEIKTCEQQGTLVLHRVRLMLMRQRVQLSNAIRGHMAEYGLVAPVGRNGLQRLIAILGNPDDERVPEVARTSLAPLVYQFGLVNGQVRENDRRVRASARSTELGCRLMEVPGVGPVLASAMVATVPDPTVFKSGRNLAAWIGLVPRQNSSGGKEKLGGITKQGDRYLRQLLVAGALAVIRYAQRHGTKRPWLVRLLARRSPKIAAVALANKMARMIWAMMMTGERYREPVVAAA

SEQ ID NO: 329158 - protein, 406 aa, unidentified
MKKDSKAAARKEKPALTVGVDIGDTFSRYCILNREGEVMEEGRIKTEASAFRGHFNSEERMRIAMECGTHSPWISRLLEELGHEVWVANARKIQLITASESKNDRRDAEQLARLAHFAPRLLFAVRHRSAERQRDLTLIQARATLVRARTMIINTARGLVKSTGRRLPNCSSESFASKVKPMLPEELAELVGPLLEQAAALSAQIERMDQQVEGLGKNYPEMARLRTVPAVGPLVAATYVLTLDGPQAVAHSRSAGAFLGLRPRQAQSGDYDPQCRITKTGNTYLRSLLIQWAHYILGRFGPDSALRRWGLNLAATAGKRGKKRALVAVARKLAVLLHHLWAHRPALSTLSPVCCGRGCCPGLDIERSRLFGKFCNRRKTVSRRSLPTSCCGDCVQALGPKRPRFR

SEQ ID NO: 329159 - protein, 323 aa, unidentified
MIVTSPFVGIDVSKHHLDLAAIAAGNADNALLKGFKNTPDGIDKMTTQIEEMNPQLVVVEATGGYEQAVASKLSSRGLPIAVVNPRQVRDFARASGTLAKTDVLDARVLARFALRMRPEPRPLMTKVQEALKALVSRRKQLSDMISAEKNRLEQANAHVREDIQAHIDYLNERKEATEKAIEEALDESSHWRAKDRLLQSVPGVGMVTSSTFLAKLPELGQLSREKIAALVGVAPFNCDSGTMRGQRHCYGGRADVRQALYMAARACVLHNRRLRAYYQRLRDRGKKDKVAIVATMRKLLVILNTMIKNGSHWETDHTPAHAG

SEQ ID NO: 329160 - protein, 350 aa, unidentified
MILIGCDFHTRFQQIAMLEVTTGELVERRLEHENGDAERFYATLPGPARVGMEATINAQWFERMLQRHQHELWIGDAAEIRAARVRKQKTDARDALHILDLLLTHRFPRIWIPSPVERDVRQLVRHRHKLVRVRTSVMNQLHALAIGQGLCRKQKLWSSAGRKELEALTLDRWAHRRRQDLLQMLDQLNPRIAELDRAVIQEAQSRPPAVRLMNEPGVGPVTALAFVLTIGPVGRFPRSKQVVSYLGLNPTEASSGGRQRLGSISKQGNAMLRHLLVEAAQTASKLNPELRRDYQRLKFRRGSGVAKVAMARKLAVRLYWKLREAAQPSTAARMQGSPVNPVVDESLSPK

SEQ ID NO: 329161 - protein, 358 aa, unidentified
MYKFMKKFFIGVDVSKDTVDVSFFDDDRMKSPEYLAQYSNSPKGFREMVKDLRMCCHGVSSGQWLFCCETTGRYDHPLCHWLVDHGMVVWRESALQIKWSSGIQRGKNDRVDSLRIAEYAWRHQDKMQKFVKPSESLSNLKAAFTHRRRLVEKRTATRCQLKSMSSEKGLSASVARMIVRDLSREIERLSASITTMDESIQKIIRSDSELDRNYRHIISVKGVGPITAVALIVCSGNFKAITSAKKMACYCGVASFRSQSGTSINRKASVSNLSNRQIKSLLSMAARSASRSNPVFAEYFNRTLSRGKPVALVYNNLRNKIITVVYKLIERDCDFDVDYMRMHSTGQRANESAIREAV

SEQ ID NO: 329162 - protein, 463 aa, unidentified
MLPQMNAYYARLQSVPEIRIALNYSSIFSRKGGVFSMKKADLQSTLFVGIDISSRENVVCFLDFFSTTVLKSFAVPNNQPGAEQLANTILEFVAAKHDFTKVCVALESTSYYGIHIANYLSGSSELMALGIEVYCLNPKIIANYKKSFLGKSKNDYVDAMVIADFARVGRITSKPWRGSQFLALQRLTRHRLHLSKCLAREKTYMCSNIFLKFSEFSILDNENKPFSNNYGATATAVLTELLSTDDIATMSMENLVDFICSKGKNRFTDPERTAQLLQKAARDSYRLDKCLYEPLTIAIASSFNVIRSYAAELKTVNTAIEHTVRGLHPEAYTVLRSIPGVGPVYAAGLLAELGAIENFSSDDALAKYAGLTWRETQSGNFRADDTTMTKAGNSYFRYYLLEAVGSLIRHDAVYAEFYQKKYAEVKLHQHKRALVLTARKFVRLIFGLLAKNQLYSQSGVSRT

SEQ ID NO: 329163 - protein, 341 aa, unidentified
MLYSGIDLHKRSLVIHTLDADGTTTREAQLKSDRAAVLAYVGTLAGPHRAVVECVQSWYWLRDLLGPTGVDLRLAHAKYVKAISYAKVKTDRVDARMLAQLLRTGLVPEAHMIGAEHRETRDLLQSRLQLVTRAVRCRHAVGSLLEKYNVPAPEELPELARMQAALQEEQRTLIRTHVRRIEAVLKKRLLPTPDVQRLVWVPGIGKLSAYALVLEIDTIQRFPTVRHFHSYCRLVPGADNSAGKVRHKRSRDGNRYLKQVFHTAAIRAAQYHPAIRQEYRRLARRKGKVVARALIAKELASIVYWVLRKQEAFNGKFRGHVLTPKPAQWPRLASPESLTDA

SEQ ID NO: 329164 - protein, 414 aa, unidentified
MQQIYERVAGLDVHRDNVVACVRRLGPRGGLVFEKDRFTTTTAGLRELEAWLGDRQVELVAMEATGVYWKPVLYALESRFAVWLCNARNVRRVPGRKTDLSDAEWLADVAAHGMIRPSFVPPPPIRELRELTRYRRTQIDARAAEIQRLEKVLQDAGIKLTSVASRVLTQSGRAMIEALIAGERDGTRLAELAKGKLRPKIPALTEALTGRFGSHHAVACRRILGHLDFLNESVAALTEQVDARTAAFAPIYALLSPVPGLDRLTIDVIIAETGADMSRFPTPGDLASWVGLCPGSHESAGKHRRVGTTNGNPWLRRALIESARAAARTKGSYFGAQYRQIARRRGPNKAAVAVAHSLIELVWHLLSTGELFKDLGDDYFTRRQDPQRRARRLVAQLEELGFKVTLEAAAALPA

SEQ ID NO: 329165 - protein, 344 aa, unidentified
MKFIQFIGIDVSKKTLDASIFVAGEVINKFPHIQVRNDKQGFKNLFRWAKEQGVKTKDTLFGLEFTGYYSDALEQFLTKKQISYAMLPTTVVKHYQRGTHDKNDKIDSAKIADYLFRFNGTECIKLRVLPSKALQKLKELKSERKFLVQNRVGCECRLQVAKSKSEEKHMQKLIDLYKEEIEQVEKEMLDVVAQDPDIYTTYRLLNSIPGIGFVNAINTIANTQNFTAFETARQYAKYVGVAPSEHSSGTSVQWRRRPSPHADLQAKADLSMAALHAIELSREMKQLYERKLGNKPKDKDMQKKALNAVKFKLIREMFSVAKQARNFELRGLDKAQAEAHSTEE

SEQ ID NO: 329166 - protein, 422 aa, unidentified
MLEETHDNDQIIQRVAAVDVGKAELTCCVRVPGPGKSGKRLQEVRAYQTMTRSLLVLADRLAELGVTRVVMEATSDYWKGIFYLLEAHGFQTWLVNARDVKHLPGRPKTDTLDAVWLCKLAERQMLRPSFVPPQPIRQLRDVTRYRTDLVAARTAEKQRVEKLLEDAQIKLSVVASDIFGVSGRAMLAALVAGERDPKVLAQLARARLRAKLGPLVEAFTGFFTDQHAFLLGKMLARVDALDADLAELDAKLAELIAPFAGAVERLDEIPGLGQTAVQLLIAELGTDMTRFPTAGHLVSWAKFAPGVSESAGKRKGSGSTGHGNPYLARVLGEAAVAASKTNSFLGERYRRIARRRGKRRAIVAVGRSILVIVWHLLSDPTARFQDLGADFYDTRSNAERAKRNHIRQLEALGYRVTLEPAA

SEQ ID NO: 329167 - protein, 446 aa, unidentified
MDVLYTHCAGLDVHKKQLTACRWVPDPTGQCAEGLTEIETFGTMTIELLGLVDWLTEAGITHVAMESTGEYWHPVYNLLEGHFTVLLVNAAHVKNVPGRKTDKADARWLAKLLRHGLLQASFIPPRGQRDVRDLTRYRTKLVQERAREVNRVQGVLERANIKLASVVSDVMGVSSRAILAALVDGRADPATMAELARGRLRSKLPLLEQALSGLVRDHHQQLLAMQLAHIDFLDDQIATLNTTIAERLSALTPPETVAVPVAADELAGGRAPHVEAAAPLTFDQAITLLDTIPGVDRRGAEMIVAEIGTDMSRFGTAARLAAWAGVAPGNDESAGKRRSGKTRKGNRALRTGLVQLAHSATHTKGTYLATLFRRLAARRGKQRAIIAVAHSILVSVFHILARHEPYRELGASYFDRLRHSQSVERLTRRLEQLGYAVHLEPRPAAA

SEQ ID NO: 329168 - protein, 387 aa, unidentified
MISVGIDIGKRSHEVCLMDAEGHQIGKFFRFQHSRQGMNTLIELLRQQPEPCIIALEATGHYWLALYHHLLQEGFKLVTLNPLQSHAYRRSTIRKVKNDRRDAWVIADLLRIGRVRPGYVPGPDVQPLRDLARFRMELVDQVGDTKRRILGVLDKVFPEYESFFSNVFIATSKELLKRAATAEEFAALDLKEITRVVTKASRGRLGLERAELIHQAARTSLGLPYLRDAATLELRCLLAQMEFLESQVKATEDAINKLFSQVSQHLTSIKGIGTISAAAIYAEIGDIHRFTTPESLVAYAGIDPTIFSSGEFEGTKRHMSKRGSPYLRKAMWMAATGARRWNPDLDAFFTKKLQEGKPYGVAMGALCHKLLGRIYVILKENRPYEMR

SEQ ID NO: 329169 - protein, 403 aa, unidentified
MSSNGAPVMAASVVAVDVGKNTAALSITSADRQRLFGPAGFVMTAPALAAVLQRVRAVLPAGPVKVGVEAAGHYHRPLLGSGVWPVGWEVLEVSPARVAEQRRVQGRRRVKTDAIDLEAITELVLAGHGVPVTARAAAVTELIGWAMHRGRRVQTRTATKNQLLAQLDRCFPGLTVVLPDVLGTKVGRLVAAEFADPHRLAALGVTRFVRFAANRGLQVRRSTADRVVAAAGAALPCSEAQVARQVLADDLVLLACLDAQIVAAEARLAQLLPDTPFAPLITVPGWGTIRAANYGAAVGDPRRWLGARQLYRASGLSPAQYESAGKRHDGSISREGSVALRRALIDLGIGLWHADPAARRYGQQLRARGKKGGVIGCAMAHRANKIAYAMVRDQSSYDPDRWA

SEQ ID NO: 329170 - protein, 346 aa, unidentified
MIIVGCDFHPGWQQVAVFDPATGEIREEKLENGNGEAERFYRRLPSPARVGFEASGNTQWFEDLLDSLGHEVWIGDAAEIRASYVRKQKTDRRDAAHILKLLIEDRFPRLWRPSQAERNLRQLLIHRHRLVGIRTRVKNGLQHLMLNRGVQLKQKLWNEAGQRVLRELPLEGWAAQRRQDLLKLLSELNPQIAKLDQAVERAAYQHPRARLLMTQPGVGPITALAYVITMGDVTRFQRGKQVASYLGLIPSERSSSHRRRLGSISKQGNPFLRMLLVESVQTVCRLDEGFRKQYKHRCHRMKKGVAKVAAARKLAVRLFWMLRTNTAYPEIARIEGSPRHGVVGGS

SEQ ID NO: 329171 - protein, 367 aa, unidentified
MPTMAQPSTGEQTCTLVTGGVDTHQDTHTAVALDQTGRLLGHRQFPATAPGYASLLAWLRGFGLLVAAGIEGTGAYGAGLAAVLQAAGIELVEVDRPDRRTRRRQGKSDPVDAEAAARAAQARRATTGTPKTRGRRVDALRALRVARRSAVAARAQAQTQMKSLIVTAPEPLRATVRALGDRELIAHCTTRRPDRTRVEDPTVAAMLALRSLARRHQELCAEITELDTLITPLVAALNPALLALTGVGPDVAGQLLVTAGDNPERLRSEAAFAMLCGAAPLPASSGRTVRHRLNRGGDRQANAALYRIVLCRLRWDPRTRAYAARRTAEGMTRKEIIRCLKRYVAREVYTALLNPHPSSVPDSPCAA

SEQ ID NO: 329172 - protein, 350 aa, unidentified
MQVITIGFDLAKNVFQVHGVDANDKVMFNKQLRRSQVLPFFAKFAPCLIGMEACASAHYWARELKKLGHDVRLMPAKDVKAYVKRNKNDAVDAAACCEAVRRPTVRTVPVKTPEQQAQLMQHRVRDLLVRQRTQTINALRSHLAELGIVAAQGYDGLKVLLSIIADENDARIPEDARASLSALVAQIASCQAEIGAIEKRLLAQHRKNDDSKRLATIPSIGVLGASAIIATVPDASIFKTGRDFAAWIGIVSREDSTGGKRRLGPISKQGDRYLRRILVVGAFAVLKQARAHPEKYPWVTQLLARKPAKVAAVALANKTARIAWAVLTKKEVYRVRPITATPASPPAMCG

SEQ ID NO: 329173 - protein, 536 aa, unidentified
MSAVKELAPHVGQSAACRALSVPRASWYRGLQPVAPPAARPTPARALSPAERQTVLDHLHSERFRDKSPAEAFATLLDEGVYLCSVSSMYRILAESGEVRERRDQLHHPEYKKPELLATAPNQVWSWDITKLLGPAKWTYFYLYVILDIFRWDETAGLAETVKLFRSALQGAKGDQPMKKDSRKAKCMDKPAITVGLDVGDRFSRYCVLNEDGEVVEEGKIQTTEVALQRHFDKEPRQRIALECGTHSPWISRLLERLGHQVIVANARKIRAITASESKNDRNDAEKLAHFAYCDPFLLSPIRHRSPERQQDLNLIQVRSTLVRARTMVINSVRGLVKSAGGRLPKCSTADFAKQALPLISAKLALVVAPLVEQVGTLTDQIRRLDKQIENLSQRYVEIKLLRTAPGVGPVIAAAYVLTLDSPDTVANSRQAGAFLGLRPRQSQSGDSNPQHSISKTGNIYLRSLLVQSAHYILGRFGQDCELRRWGLKLAASGGKRGKKRAIVAVARKLAVILHAMWRSGHPFEPFLLPATTAVA

SEQ ID NO: 329174 - protein, 345 aa, unidentified
MTIVHAGLDLSRTRLDVCVLDETGRRLVEHAFPPDADGLRHLVDEVGRFGQPVQAVIESMTGARFVHDTLELLGWDVQIADALKAKGIAPLAAKTDKIDAHVLAELSRRDLVPSIWLPPPGVRAERERARFRLHLVHHRAMLKNRIHATLLTFGKPCPVSDLFGLGGREILARLDIPDPWKENLDTALGLIDDLEVQIDSIERELKLAGADHPYVSLLTSAPWILGYTIASEIGDISRFSSPKKLVGYTGLAPRVIQSGNNDYRGPLAKNGPRYLRWAYIEAAVHAARHPYYKDHYERTAKRLGRQRGRKVARVEVARKLVEATWHMCQTGATFAPGRSQSVPGR

SEQ ID NO: 329175 - protein, 343 aa, unidentified
MTLVGCDLHTRKQQVAALDTKTGEMCERELVHDGSVVEEFYAALPRPVTVGIESTGYAIWFHALMHRLGHTVLVGDAAKIRAMVVRKTKTDRRDARHLLDLLRHDRFPTVWVPDPATRDLRALLTHRRRLVRIRTMLKNGLHAIALNERLVCGSKLLRHAGVVQLQALPLPPYTAQRRDHSLELLEHLHTQIQQLDGAIATAALAHPDAPRLLTHPGVGPLTALATVVVLGPVTRFADAKHVVSYVGLAPSLNASADKYRLGHITKQGSSLLRWVLGQAAPHAARLDADLNRTYGTLRRRRGRAKARVAVTRKLLVRLFIMLRDHIDYAEFRRRGRPPVSVAG

SEQ ID NO: 329176 - protein, 339 aa, unidentified
MTQVIRIGLDLAKTVFEVHGVDGQETVVLRRSLRRRKVLAFFAQLPPCLVGMEACATGHYWARELAKLGHDARLIAPHYAKAYVRRHSNDAADAAAICEAVGRPSMRFVDVKTEAQQSAACLHKLREMLVKQQTMWINHLRGLMAEFGIVVAAGPQHVGELLAVLADPEDQRLPAAAREVLIQAAEALRDTQRRVEAIEKRIVAWGRDNETCRHLITAPGYGPILASAMAVFVVNPAAFTSGRHFAASLGLTPRLEGTGGKVWPGPISKRGNGYLRRLLVNGAMSVLCSRRAKEDPWLAQLLATKPRKVAAVALANKMARIGWALMMRQEDFRARPAAA

SEQ ID NO: 329177 - protein, 450 aa, unidentified
MIPTVIPQCAGIDVGKDFITVCVLVGAAEAEPQVTLRSFDTFNANLEQCRQWLRQLGCTHVVMESTGSYWKPLYSVLEQDFVIVLANPEQVKARKGHKTDWQDCQWLAHLLRHGMIRGSYIPPAPVRQLRDLTRRRKQLVSDAVSERNRIHKVLEEANVKLGSVLSDLFGVSGQQILEALLAGQATVAQMAQLAQRRAKQKVAQIEAALEGHRMSEHHRALIEYSLAHLRFLEQQIADIDQRVLTSIHGAGYERALALLRSVPGLQHINAATVLAEIGPDVHAFPSAKHLSSWTGVAPGNRKSAGKQRSGATTAGNRWLRTCLVEAAWAAAHANNCPLRDKFWSLSARLGRKKALMAVAHAMVGIIYEVLASGRPYAPPPESAAQLRKRRRLIKHHIRCLGRLGIVVRSRAAKAIREGFTPSSGPQQVPPEQTIRVGQPSKHLSLPSRPN

SEQ ID NO: 329178 - protein, 363 aa, unidentified
MDRTGFEKLILHLNQRSTASLLLGLESTACYHITLFSYLTAKGYKVVIINPLLIANFTKLQLRKTKTDKKDAFTIAQFLMLRREALSRQVFSSDLMELRDLARRRERLADQMTKLKTNMKRILSVTFPELEHITGVFAKSILRLLIQFPSATAIRKAGSSKVASVIISGSKGRKPASSVETLMTAAASSVGLSSPAKELILKQEASLLLHVQEQAQETTKFLMSLCSERTKKDAEILTSLKGIGEMSAVNFLIEMGGEAGLFENNKKLIAAAGLDPSTHQSGKYAGKSRISKRGNRHLRRLAWLMTKRVITYSPTFRTYFFKRRIEGLPYKMAVLATAHKLLRVMFAMLVHQKHFEEGGIKCS

SEQ ID NO: 329179 - protein, 311 aa, unidentified
MGMTMRMRISVLGVDLGKNVCSLVGFDASGAVVLRRRAKREPLIALAAKLPPCVVAMEACCGAHHLGRVFAAHGHDVRLMSPEYVRPYVKAQKNDDRDAEGVAEAATRPTMRFVELKSQEQLDMQTLHRSRERLVGERTALINQLRAILLERGIVAPQGKRKLEQFLVNLMDVQGGAGLSTRMIMLVTDTRVQWAELDRRIAAFDAEFVRWTKENEDARRLATIPGVGATIASALIAAVGKAETFERGRDLAAWLGLVPRQFTTGGKTKLLGISKRGNKYLRKLMIHGAACGAALCGRAGTLRLAGGPKLC

SEQ ID NO: 329180 - protein, 354 aa, unidentified
MSNLTRRRNSTERRLAMKLYAGIDLHSTNCVIVVVNAVGEVVRRTRLKNRLALIAAWLEPFRDSLVGVVVESTYNWYWLVDGLADQGFTMHLANTVAIQQYAGMKHRDDASDARWLADLLRLGLLPEGYIYPKKERAIRDLLRKRTQLVRQCTSNLLSIQNLYSRSTGTSIRANEVKQLAPESVDDVFEDPNVALAVRSNLTVMNCLQEQIALVEDSVHGQVRLRQPYRRLISVPGIGKILALTIMLETGDIRRFDDVGNYVSYARLVGSSYLSNGKRKGSGNTKNGNAFMCWAYIEAANFAIRFNASIRRYYDRKKARTKRIVALKTVAHKLARACYHMIKNDTAFDVQRAFV

SEQ ID NO: 329181 - protein, 425 aa, unidentified
MTPRGDAITSMAADDYAVFIAIDWADKKHVWALQKAGSRDRQQGEIEARPEAVETWVSGLLARFPGQRIAVALEQKQGALLCQLSKYESLALYPVHPATVSRMRAALYPSASKDDPKDAHLLLDILVQHRQHLRRLDADTVETRKLQMLVEDRRKLVDDQTAYSNQLRAKLKLYFPQAVRWLPELHSRLAGEFLQRWPTLPLLQQARLETIRRFFHQHHCRSEELMRQRLQEIPQAVAATQDAAVVDAGTAMVQALLHLIAVLRAQIAEFDRQIAATAAIHPELSLVASLPGAGEVMTPRLVAALGTQRERFSSASELQTASGIAPVRRRSGQSEWIHFRWACPKFVRQTFHEWAGHSIAQSRWAKAYYDAQIANHKGHHAAVRALAFKWQRILFRCWKDHQPYDEQKYIEALRRRGSPLAAALL

SEQ ID NO: 329182 - protein, 409 aa, unidentified
MSNHHPPGWPAFTGIDWGGSEHQLCVLDTTGTQLTQQRVTHNVAGLTELDTALTAHGTVLPIAVERAEGVLVEHLQSRDHTVFPVSPRIAARARERYRVAAVKDDRLDAFVLADTLRPEHHRWRALSVPSPLLAEIRALTRDRDRLQQTQQATESQLRAILEAYHPAPARLFSSVDRQITLHFVLDYPTPAAASRIKATRMSGFLTRHHYTGRVSAQVLAERLRENLLTASTGTVAGKSYSARSFAQLLQLLNTQLAEYDDAIAAAVAEHPDTPIFAGFPGVGPVLTGTLLAEIGEDRTRFPTPATLLAESGLAPVTCASGRSRKVRFRYAANTILREAAMWWAYNSVKEAPWAKAAFREARDQRGQHYHRALRGLAARWMRVLWTCWSTHTSYDPQRHTTAQAALTAG

SEQ ID NO: 329183 - protein, 334 aa, unidentified
MNPPILGIDVSKDSLDVQLIIADKGVSAVFGNNPTGHKRLVCWLKKRCGQEQVHACMEATGMYAFPVAEVLYAAAQQVSVINPARISAYAKSLLARNKTDRLDAAIIADFCRTQSPPAWHPPREELRELQALVRLLEGLNTTHQAEVNRLKSGVRSAHVARILQDHIAYLDDQIQQVEQLINAHIAQDDDLRRKKQLLCSIPGIGEKTAHTLLGELLYLDSFQNAKQVAAYAGLNPRQRLSGKMKGRSLISKTGNAHLRKALYFPAIVAKGCNPIIHQFCIRLEENGLVPMQVIIAGMRKLLHIAFGVLKNDCPFDPNSEHSFPQSQQIPAYSS

SEQ ID NO: 329184 - protein, 468 aa, unidentified
MESYYMGIDVSKGYADFVILDAQKQPVDKSFQLDDTWKGQERLREKLKTFFEHRPDATLYAGVESTGGYENNWFHYLRDLEMEMPLHVTSLNPYAVKANSEGAMKRNKTDKISAYNVAEYILNHPEKGIYGTENRYFSLRKKWTFINMLTKQKNQMGNQLESLIYNANPEVLVYCKFGFPKWVYELLLHYPTARCLSRARSKGLERIPYIPKENISNLIENAKKSVASEMDKEMEELIIANVKQILQLDKDTDKQVKKLIKTIQWPEVKLLKTFTGIGDYSAVGLMLEILSIDLFPSAKHLSSFFGLHPVYKMSGDGSYGFHMSKQGRSEPRRILFMVAFNAIQNNPVIKDFYKRLLHRGMNRMAAIGACMHKILRIIYGMLKHNKPFDPEVDRKYQEKGYIVRKNPKGNKMNRYRDYDPQAPISRRQTKKRKEQMTSQSDLVAVNGIESPVPNQIEINGEIFLLTKV

SEQ ID NO: 329185 - protein, 396 aa, unidentified
MNAVGIDVSKGKSMVAALRPMGEVALLPQEFLHTEVGLEQMAYAIVALGEDTRVIMEATGRYHEPIAAALHEYGIYVCVLNPLFIKQSGGGSIRKVKTDKADAMKIAKYGLDNWVELREYTPMDTVRQQLKLCSRQYNLYMKTVVSLQNNLISLTDKTFPGVNELFSSPERADGHQKWVDLVMTFWHCDCICRVSEKAFTDRYQKWCKRKGYHFSTEKALDLYAGSCGHFTTLPKNDNTKLLITTAAQQLLAGKTTLAALRTEMTRLAKQLPEYDTVRAMYGVGETTAAQLMAEIGDVRRFPRRSSIVGFAGVDPAVDQSGKHSAKSVPTTKRGSPHLRKTLYQIVCTYLKRSPADEPVYQFLDKKRAEGKPYFVYMTAAQNKFLRIYYARVKRVS

SEQ ID NO: 329186 - protein, 339 aa, unidentified
MNEIIRTGLDIAKNVFEVHAVNAQEQVVVRRSLRRNQVLAWFAKLPPCLIGMEACGTANHWARELTALGHTVRLMPPAYVKAYVRRNKNDGIDAAANCEAVSRPSMRFVPVKTAEQQSEALTHKVRETLIKQRTMNQNSLRSLMAEFGIVVPQGPQHISKLLDILSDPEDGRVPDAARAALNGMAEMLAALERQIGVLDKTIKAQVRANPVARRLITIPGFGPVLSGAFAAIVTHPGHFNSSRDFAASLGVVPRQDGTGGKVKLGPISKRGNGYLRRLLVNGATAVLNGKNARTDPWLAKLLDSKPKKLAAVALANKMARIAWAVMTRQEDFRPRAVAA

SEQ ID NO: 329187 - protein, 317 aa, unidentified
MLCAGIDVSKPHLDLALVSTTAKPTRLRFPNTPEGRQALLAALAHHRPTWVALEPTGAYHLPLLQLLAEKGLQVALVNPYHLAAFRRATGERHKTDRQDALLLARYAQVYGESLRAYTLPPKALQELKALVGYREDLAQRARAILNQLEAARWAGSEEILVLLQRELACVEGLLGEVEARIQALLAALPEAEVLMGLPGVGPQVAAVVLALLPPHLWGRAKAAASYAGLIPEREESGKSVERSRLSRKGPPLLRRKLFMGALVVVRHDPEMGAFYHRLLSRGKRKKQALVAVAHKLLRRMMGRLREYYAGQSLQGVA

SEQ ID NO: 329188 - protein, 342 aa, unidentified
MNATTIGLDIAKTVFQVHGVDRTGKTVLRKQLKRGQVLAFFANLPPALIGIEACAGAHYWARELIKLGHDARLIAPQFVKPYVKGNKNDANDAEAICEAVGRPSMRFVPLKSPEQQDIQMLHRIRQNLVKQRTAAANQTRGLLGEYGLVVAEGLHHLRRRLPEILEDAENGLSPLARRLFADRYDRLVDLDRQIEAYQQQIEAVCQQSPVCRQLLAIPGIGPITATAMVAGLGDGQAFDNGRQVAAWLGIVPRQDSSGGKPRLLGISKRGDTYLRTLLIHGARAVVRAAMRKEDAHSRWIQALVQRRNANIAAVAVANKTARTIWAMLTRGENYRAPLAQVA

SEQ ID NO: 329189 - protein, 402 aa, unidentified
MNAVGIDVSKGKSMVAIMRPFGEIVSTPFEIKHTASDIRSLVELINSVEGESRIVMEHTGRYYEVLAHQLSEANLFVSAINPKLIKDFDNDSLRKVKSDKADAVKIARYALDKWQNLKQYNVMDELRNQLKTMNRQFGFYMKHKTAMKNNLIGILDQTYPGVNTYFDSPARSDGSQKWVDFASTYWHVDCVRKMSLNAFIDHYQNWCKRKKYNFSQSKAEEIYGKAKELVPVLPKDALTKLIIKQAVDQLNSASTTVESLRTLMNETASKLPEYPVVMAMKGVGTSLGPQLMAEIGDVSRFTHKSAITAFAGVDPGVNESGSYEQKSVPTSKRGSSDLRKTLFQVMDVLIKTHPQDDPVYQFLDKKRAQGKPYYVYMTAGANKFLRIYYGRVKEYLSSLPES

SEQ ID NO: 329190 - protein, 379 aa, unidentified
MPDVSSNQPADVRLWVALDVHKLSIVAAVLPPLGGRAEVQQIETTRAAIGRFIDRLGGPGGLAVCYEAGPGGFDLLRVLTALGVACDVVAPSLIPVRAGDRIKTDRRDAKKLVRLYRGGQLSFVQPPSPETEGLRDLMRCRDDLRCARTSARHRVSKQLLRHGRIYREGKSQWTKMHRAWIARQRLDDTLAHKALTEMLVHLDGLDRQLDQLDRDLETIARGERWATIVKVLTRFRGISTRTALGLISEIGDFARFSHPRELCAWLGIVPSEYSSGQQRHRGHITKTGNHHARRLLVEAAWSYQHRPRRPDRGPEPDPRAWQAQVRLHARYRHLTTERGKRSTVATVAVARELACFLWAAVTDQPFITEKPVVGQATAA

SEQ ID NO: 329191 - protein, 342 aa, unidentified
MDYYAGIDVSLEYSSICVVDGTGKIVREGKAASEPEALIAWFGSVGLGLTRIGLEAGPLSQWLYAAMKEAGLAVELLETRHVRDAFKAMPVKSDRNDARGIGQLMRLGWFRPVHCKSISAQEVRVVLTARKLVQTKLLDVENSLRGILRGFGLKVGKTTARSFAGRIQELVKGHPHLEAVSEALLSVRTVLLREFNAFEKRVRAMARSDERTRLLMSTPAVGPIVALTYASAIDDPARFKSSKQTGAHFGLTPKKYQSGETDYSGRISKIGDASVREALYQAAHVMLTKPVKGCSQLKSWAMRLAKRAGKSKAKVALARKLAVILHRMLVNGKPFNAAASAA

SEQ ID NO: 329192 - protein, 344 aa, unidentified
MGEVITIGLDIAKSVFQVHGVDGLGVVVIRKRVSRAKMLEFFAGLPRCLIGIEACPAAHHWARELQAIGHTVRLMPPSYVKAYLKRSKNDANDAAAICEAVTRPSMRFVAVKTKEQQAALMLHRARQLLVRQRTMLSNAIRGHLSELGIVSAKGRNGTDELLEIIGKDADSRIPLAARSVLKVLASQYVAIGVEIASISKSILAWHRACEPSRRLEEIPGIGPIVATALVAEISDWMAFSSGRGLAAWIGLVPKQHTTGGKDKLGSITKQGNRYLRWLLVNGAMAVIRYAQKHGTKKHPWLGQLMARRPTKVAAVALANKIARITWAIMVRGDRYREPALMPAA

SEQ ID NO: 329193 - protein, 333 aa, unidentified
METIYFLGNDLAKETFQAALTLDGVNISETKVENNSKSIRSYFQDLRKKFSPSQLMVCIEHTGIYSNPLLDYLTEKGIKVCVESALQIKKSQGIKRGKSDKVDARRIAQYLHKNHQQVRFWHPSRTVIQKIKALLVVRERLVKTRVQLATPIKESENYIEESLRKNIIKCCQNTLHSLTKDILKVEREIDILIKQDNKLEQEVQLATSIPGVGNITALHIIVASNEFESISEVKKFACYAGVAPFEYTSGTTIRGKTRVSKLANMTVKKLLNLSAMSAVQHCYDLKIYYTRKVAQGKNKMSVLNAVRNKLISRIYACVKNKRMYQKEYQHELA

SEQ ID NO: 329194 - protein, 356 aa, unidentified
MKNTIKYVGLDVHPSTVSVAVLDAEGKLILQSILATHAAAILDFVHGVRGSLQVTFEEGTQSAWLYDLLVRHVAKVVVCNPRKNALLKAGNKSDQIDARKLAELLRAGLLSPVYHGENSYRILQELVRSYTTLTEDTTRIMARLKALYRSHAVVCGGKKPYGKRHRQEWLQQVRQPGLASRAQRLYDQLDAVQTLRRAAKHEMLAESQKSGAYRLLASIPYLGPVRASILMARAQVPNRFRSKRQFWAYCGLALETRSSAEYHVVQGQVQRSRKPVFIRGLNLNHNHDLKNVFQGAATAASIHDGPLREFYDRLLAKGMKPELARVTLARKIAAMALILWKKGESFDPKYLMLPAA

SEQ ID NO: 329195 - protein, 432 aa, unidentified
MEQSTRFIGMDVHKATIVVAITATGEVGKATAYGTFPNTTAALEKLVARLRQAGSGPMKFCYEAGPCGYGIHRTLTRLGEDCMVAAPSMIPRKSGERQKNDKRDAANLAVLHRGGLLTAVWVPDAAHEAMRDLIRARQAAVRTVRAARQQLSAFLLRHERIYGDGRTAWTKAHRGWLADQSFAHPAQQIVLEESIEAVRLGEQRQDRVEGHLRAQIPTWSLFPLVQNLCALRGLDIIGAAGVAAVIGDPSRFASAPDFMAYLGMVPSEHSTGPKRRVGAITKAGDVHARTLLIEAAHSYRFPARVARHKLAAIDAVPEAVRAIAWKAQTRLCQRYRHMMAKGKPRQVVVTAIARELAGFVWSIACITSDPPVKSSAVTTASGEICPTAAAGRAPHRRPLKGTVRRVGRPPTSQCRAGRGQPDGMIAHHHSAD

SEQ ID NO: 329196 - protein, 394 aa, unidentified
MRLWVGFDVGKAFHWVCVLDDEGEVLLSRRVEAEERDIETCCEEIAALGRSDERLVATDLLGGPATLLEAVLLGRGERLFHLPGIAVNRARDGYRGESKSDARDARVIADQIRMRWRSLQEVRPREDAAAELRTLVAHRRGLVEDQARVITRLRALLLEVFPGLEAALDLSTDRALLATTRVATPSAARRLGASRLARWLKDRGIRKSEELAGKVVEAAKVQRRELPAAETKAALVSEMAAEVLRTRGRVATVDTRLEELMAAKPEAAVVRSMPGMGPLFTAEFLSEVGDSSRFASADALAAAAGLVPATRQSGDGSFQRRARRGNRRLKNLLYRSAFSCTVHHAPSRIYYLRKRAEGKAHHRAVIALARRRVNVLWAMLRDGELYRDPVAEAA

SEQ ID NO: 329197 - protein, 369 aa, unidentified
MLALDQGLDVVIGVDTHKHTHTAAALGSTGAVLDHLTVPADPAGYRRLIAFGQRHQAALWAIEGTGSFGAGLTTALLAGRERVVEVDRPQRPVRRGGVKSDDIDAVRAARQALAGVGLSEPRCRGEREAIRVLLATRGQAVEFRTRAISALHALVTSAPDGVRERLRALPLGQLLRTCAGLRGSARQNAEEFATVVAMRSTARRALACEEEAAELETQLDGLVRQLAPELLGQLGIGPVVAGQLIASWSHHGRVRSEAAFAKLGGVAPIEASSGTVIRHRLNRSGDRQLNRALHTIVLVRMRQDPATKAYLQRRLAEGKTIREIKRCLKRYVARQLFRQLEALPPCLSGLRETRGVVPHPCRARADHVT

SEQ ID NO: 329198 - protein, 360 aa, unidentified
MKQVRSGMPSICPRDFDLFVGLDVDKHSLAVTVMNREALVKSMKMPYDPKAFGQYLAKHFAAQRIALVYEAGPTGFGLYDALGESGHTCLVAAPANIPREPGRRVKTNRLDSVQLATALRGGTLRGIRVPSQLYRDLRHLAHLRQAHVGEATATKFRIKALLLSEGLAFPPAPPGSQWTDRVLKVLAAMSCPLTVRFTLDSLLETLALHQQQAQKVLAQMLQFCQENPEVADSIRFLRSAPGIGPVVAVVLTAHVGDWRGLTRVREMGAFIGLVPCESSTGDQVDKGAITHAGDAYLRSILIEAAWTAIRQDPELRAFYRRVCRRHPRDRAARIAIVAVARKLASRLFCLLKERRCYIYN

SEQ ID NO: 329199 - protein, 344 aa, unidentified
MTSIDYIGFDIHKKTISFCAKAQDGEIRDEGVIPARREDLSAWVKRRPRPWIGAMEATLFTGWIYDHLKPVAQELKVAHPPMLKAIAASKKKNDKVDARKIADLLRCDLLPECYMAPSSIRELRRVLRYRNLVVRQATRMKNRISGLLMETGTPYNKERLHGKAYFNELLGSLRETPRSVVELLQLSRKQLEFFTTIQKRLLKGLNEHPQLKERVERLQSIRGVGEILALTWALEVGEVERISSISQGVSYCGLTSAQHNSAGQEKRGPISKQRNKHLQTMLIEAAKLAPRYNPQLAAVHERELKRGDCNQATLEVARKLVAYLMAVDKSGKPFQVRSGATEGV

SEQ ID NO: 329200 - protein, 389 aa, unidentified
MYFVGIDISKYKHDGFIITETGEIVCNPFTIKNDHHGFNELLSILNSLDPKEGIRIGFESTGHYALNLKLFLEKAHYSFMEFNPVLLAKFNKSQTLRRTKTDAIDSIAIARWLMTVEYKPHPIGFYHTYSLKSLTRLRDSLVKQRSFYLVKMTNVLDHIFPEFKPFFKNRFGKTALYLLEHYGSAEKMACMNSKSYDNLRRISRGKFSLQKFLKLKDLAKNTVGGDNELFVFQLNSLLSLYKQAAHEVDSLEKQIISLVKELSPRSLTIPGIGPLSSAVIYAEYGDISKFKSPAQMLSFAGLEPGYYQSGTSEHGGHMVKRGSSHLRYTLMNLSIPIIQYNMVFAEYYEKKRNEGKSHRVACSHLIKKLIRVIFILEKNNIDFDSSKLR

SEQ ID NO: 329201 - protein, 373 aa, unidentified
MPRYSTAFGMDVHLRSTTVCALDAETGEAVARRFRGNPWGEVAEWMSGFPGPSLAAYESGYLGFAPQRELSALGVDCVVAAVSKVPRSAADLSSKNDRNDAARMAKAILSHDVTPVWVPSPEIEGLRDLAAAHDAATARLAAARQRLLAFLARRGYAYGGTTPAGNPRRYWTYGFLRWLDKVRPADDGGIRALAALRNEVEAADETREALLAEYRAAVAAGPLSAEVEALQSIKGCGFALAAAFASEVGDFSRFRSGRQVTSHFGLAPKQRSSADSVRLGGISGAGNALVRKLAVEGSWCYAQAGHQPKLMPKGSGVPLEVRMHGRKGSERLLRRREEMLERGMPQAKANAATAAELVRWLWALGTMCREAGE

SEQ ID NO: 329202 - protein, 337 aa, unidentified
MKVVRIGLDIAKTVFQVHGVDVHGKTVLKKTLSRGEVLSFFANTPVSLIGIEACAGSHYWARELIKLGHDARLMAAQFVSPYRKSGKNDANDAEAICEAVGRPNMRFVPIKSEEAQAVLAVHRARTLTVSERTALVNQVRGLLGEFGIVVGQGIAQARRLLADIGAGGRQLPTLARETIGELHDRLRALDERILAYDRKIAALAKACEPARRLMAIEGVGPVTATALVASVGNASAFKSGRQFAAWLGLTPRQNSSGGKTKLGAISKRGDVTLRTLLIHGTRSVLRLTTGKTDRKSVWAEALKERSCANIAAVALAAKNARIIWAMLSRGTEYQVAS

SEQ ID NO: 329203 - protein, 326 aa, unidentified
MSAMQGTAWIGIDVGKTSLDVVRHPNGLPWQVANDAAGWQALVADCQTTPPAGIVLEATGGYETGVVVALDAAGFTPVVANPTSARRFAQSLGRRAKSDRLDAAMLGEYGARLQPVAQPVPSETARQLRALIDRREQLTKQLVEEQNRLQQAEPVVRDSIQAHLVWLRDARDEVTRTLDALVQSDPFWQHRVALLETVPGMGRWTATVYAVELPELADRTGKQLASLVGVAPHPRESGRCRGQRFISGGRAHLRRAGYQAVHAAQRSRDPVLRRHVAQLMARGKSRKQAIVASLRRLLGILHVMVRDDLTWDQTRVGKGGYLPATP

SEQ ID NO: 329204 - protein, 411 aa, unidentified
MQEATQHDAVDVFVGVDVDVDVDVGKGRHHAVALRRNGKRLYNKALPNDEVKLRALIAELKTHRRLLFVVDQPSTIGALPVAVARAKGVLVAYLPGLAMRRIADLHAGEAKTDARDAAIIAEAARSMPHTLRSLRLADEQLAELTMLRGFDDDLAAQVTQTSNRIRGLLTQIHPALERVLGPRLDHPAVLDLLERYPSPSALAAANEKTLANRLTKLAPRMGKNLAAEIVQVLNEQAVIVPGTQAATIVMPRLAQQLAALRKQRDEIAADVERLVLAHPFWPVLTSMPGVGVRTAARRLTEAAPKALATAAHLAAYAGLAPVTRRSGSSIRGEHPSRRGNKVLKRALFLSAFAALRDPVSRAYSSRKIQQGKRHNQALIALARRRCDVLFAMLRDGTIYPTIYPPKSAPTA

SEQ ID NO: 329205 - protein, 402 aa, unidentified
MNAVGIDVSKGKSMVAIMRPFGEIVSAPFEIKHTASDIHSLVELINSVEGESRIVMEHTGRYYEVLAHQLSKANLFVSAINPKLIKDFDNDSLRKVKSDKADAVKIARYALDKWQNLKQYNVMDELRNQLKTMNRQFGFYMKHKTAMKNNLIGILDQTYPGVNTYFDSPARSDGSQKWVDFASTYWHVDCVRKMSLNAFIDHYQNWCKRKKYNFSQSKAEEIYGKAKELVPVLPKDDITKLIIKQAVNQLNSASTTVESLRTLMNETASKLPEYPIVMAMKGVGASLGPQLMAEIGDVSRFTHKGAITAFAGVDPGVNESGSYEQKNVPTSKRGSSNLRKTLFQVMDALIKTHPQDDPVYQFIDKKRAQGKPYYVYMTAGANKFLRIYYGRVKEYLASLPES

SEQ ID NO: 329206 - protein, 344 aa, unidentified
MSIVGGLDIHRKQLTFDCLDTVTGQVARGQVSPADREHLRAWLARFAGRGDAEFAFEGCTGWRYVAEELAAAGTGVHLAEPADTAFARGRKRHAKTDRTDSRHLRQLLAEGRLPECWVPPAQVLEARALLETYHDLRREHTAWVQRIHAVFFHQGAPALGEIMRTAAGLGAVRAAAAAGLSPAGRQQVTVALAMMTCLEDQLDVLRHQLLDTARHLKGPRVLAGQLYGVGPVTALALTCWLGGAGRFSSARKAVRFAGLDITVYSSDGKRTPGRLSRQGPPVLRWAVYEAGKTHARTSAPDHAYYAAVKDRKNSKRAALSEARKIIRRACHILSDLGDDAFAAA

SEQ ID NO: 329207 - protein, 341 aa, unidentified
MEYCGIDLHAEYSQICILDEGGEVMETSRVRTSRKALERFFTRDRMRVVMEAGGSSPWVSRLLEALDHEVVVCSPRRVRLIAESKLKNDRVDAEVLARLVRLDPEFLRPIQHRSEEAQLLRANLKVRSAMVEARTKWINTVRGLLRSFGYKVSGKAPRTFVDRVDQMELPGELRAVIDPLLEQLDLLTGEIDRRNEHLEEMVKDLPEVEHLREIPGVGPVVATYFVLTIDDPLRFKNSRDVASFFGLRPSMRESALVSHFGRITKEGDPEMRRLLVQAAHACLLTKADSELKTWALALAERKGKGKAVVALARKLAVLMHHLWVTGEVYQAFPNKEATQAA

SEQ ID NO: 329208 - protein, 404 aa, unidentified
MDLAPLYRCVAALDVHQAKLTVCILREEADGELRVELREFGGFKRDRREMARWVASFAPESVVMESTGIYWKSPYEALERAGLRALVVNARHVSQVPGRKTDLADAQWLAILARSGLLRGGFVPPANFRHLRLVSRQMQKLTGILASEKNRIHKVLTDGGIRLGVVVSDLHGKSGRAMVKALVAGESAQSLLGYADPRLKASEEDLLDALDGDLSAEHRLVLRQLLDHIGYLEQHIAALRQALVAGLAPQQGLLQALQTIPGLDETGAALLVVEIGDDMQAFGSPEKLASWAGVCPGNHESAGKRKSGRQRKGNPYVRRLLCEAAHAASRTRCALAEKFKGLLVRRGRKRAIFALAHKLLKTVFVLIDRGDYYRDAGVDYEAMSVERNAPRWIKMLRKYRYIPA

SEQ ID NO: 329209 - protein, 351 aa, unidentified
MEYIAFDSHKRYTLASVEKPSGGQSCELRLAHQPGSIRQFLSRWTPGSPVAVETIGNWYWIVDEIEQAGMVPRLVHARKAKLMMAMVNKTDKLDARGLNRLQRCGTLPTVWIPSRELRDQRELPRTRMVFSRTRTRLKNRIHATLAKYGLSIPQVADLFGKKGRELLPQVLAQLPPHTLFSTEQLLAQLDTVEHQIQQFERRIKEVFAPSVELARVMSLPAVGFILGTVILLEVGKVDRFPSAAHLASYAGTTPRVHASGGKMHYGQLRPDVNRYLKWAFLEAANVICLNHRHLPQRHVHRLYQRVASRKGYQKAIGAVARHLAEATYWVLKKEEAYREPQASKKVSSTKG

SEQ ID NO: 329210 - protein, 391 aa, unidentified
MIYVGIDVAKDKHDCFITNFDGEVLFKAFTIANNLDGFNDLYQKIVSVTEDITKVKVGLEATGHYSYNLLGYLIDKGLPTYVINPLHTNLYRKSLSLRQTKTDKVDARTIASMLMSDVNLKSYSDTSYHNEELKSLTRYRFDKVKERAKLKTSVSRLVCILFPELEKLVPTLHIASVYAMLSEFPGAKQVANAHLTRFTNLLSEASKGRYGKETAIAFRDAARTSIGSNMPAKSLELKHTIKLIQELTSEIDEIEHEIKLIMDELNSPILSIPGINYRMGAMIIAEIGDFTRFDSPDKILAYAGFSPSTYQSGQLDGAYSHIEKRGSRYLRYALYNAAKYVCIWDPTFAEYLAKKRSEGKHYTVAISHAVKKLVRVIYHLEKTNQQYIKAA

SEQ ID NO: 329211 - protein, 406 aa, unidentified
MNMNAVGIDVSKRKSTVAILRPGGEIVKKPFDVPHLSSDFRSLTRLIQDLDGETRIVMECTGHYYEPIARRLSQAGFFVSAVNPHIIRNFQGHDNPLRKVKTDKADSVKIARYTLDSWENLKQYTLMDELRSQLKTMNRQFSFYTKHKTAMKNNLIGLIDQTYPGANTYFNSPVREDGCQKWVDFVDTYWHVDCVRKMSLTAFINHYQKWCHRRRYIFSKSKAEEIYGKAKELVPVLPKDNFTKRIIKQAIAQLNTTSKTVEELRNLMNETASKLPEYPVVMAMEGVGPSLGPQLMAEIGDVMRFTHKGAITAFAGVDPGVNASGEYFQKSVHASKHGSPVLRKTLFQIMEVLIKNKPDDAVYLFMDKKRAQGKPYYVYMTAGANKFLRIYYGRVKEYLLNLSELN

SEQ ID NO: 329212 - protein, 423 aa, unidentified
MDILYERVAGLDVHKDTVVACVRIMVDGKAQRECRTFAAATEQLGELRRWLEESRCTHVAMEATGVYWMPVFRILGEGAFELIVANAAHIKNVPGRKTDMNDAMWIADLLACGLIKGSFIPEEEVQELRALTRTRKQLVREQTRHVQRIEKTLAEANIKLGSVISDIMGASGRRIIQAMIEGVRQPNKLAELAGKQIKASPKELYDALHGRLTDHHRFLLALHLQQRDGLDETIRKLDVEIAQRIECMEAEVNGGKIPFRHLIGLLTTIPGVSAVAAPAILSEIGADMSRFQTAGHLVAWTGLCPGQNESAGKRKSSRLRKGAPWLKTMLIQCAWAAKRTKNSYYRAQFFRLQAKRGPQKAICAVAASILTAIYHILKDGTEHRDLGAAYFDRRPTEVQASRLVARLKKLGFTVQLQPIAEAA

SEQ ID NO: 329213 - protein, 347 aa, unidentified
MSEDYGGRQVVGLDLHRRRSVLVRMSGDGRRLGVARITNSPAALRQQIARAGENPGVVREAAYGWYWAADTLAAAGAEVHLAHPRGVKAFTDRRVKDDFRDAADLADLLRMGRLPEAWIASAEVREVRELTRYRQKLIGLRTSCKDQVHGVLAKLGVPLTCTGIFGMWGARWLDELRLPQPYAGKVTSLRQLIGELTTEITMLGEVIADLLAGHRGWRAIQELPGIGPVLAAVIVAEIGDVTRFKTAGQLACWAGLTPRHRESGIKVVRGHVTTQGSRPLRWAVTEAIQRSPTASRPGQVKAAIIARRGKQARNIAKVAAARQLLTLIFYRLRDGHIRCLAAPVPAA

SEQ ID NO: 329214 - protein, 348 aa, unidentified
MTTQPQIIGIDLGTHWFHLIGLDRDGAIVLRKKLSRAQLSTFAATMSRSCVAMEACCGSQYWGRLFAQAGHKVRIVPAQFVKPYVKTNKNDFNDAEAIAEAASRATMRFVPLKTTEQLELQASHRIRRRLVHERTAVINQLRALLLEYGIVTPKGRETFARRWSRIHDTASAQLSPRLVVLMQRLREHWRTLDTQIAEATQELTTWAEGSPLCQRVSTVPGVGPMIATALVSAVGDARMFARGRDMAAWLGLVPRQHSTGGKSTLGRISRRGNGYLRQLFLQGAVSAYLWMKRDRSALGAWVQQLDQRRHRPVVITALANKLVRICWKVLTSDSPFRLHPARPVEHTV

SEQ ID NO: 329215 - protein, 351 aa, unidentified
MMIIGVDYHPSFQTIAFLMEETGECGEQELNHSDGQAEKFYRDLKQRGISVRVGMEATGYSRWFERLLAELGFELWIGDPAEIKAKRVRKQKFDREDARLLLRLMRENNFPQIWVPSPENRDLRQLLWHRHRLVQMRTRIMNQLHALAMNEGYRWKKKLFSEQGRAQLEKLALAPWASRRRQELLELLDRMNPTIEELTAAVEREARKRPEVLRLMTHPGVGPLTALAYVLIIGTPTRFARGKQIGTYVGMIPSEDSSAGKQRLGHVSKQGSSLLRFLLVEAAQAAARIHPDWRRRYIHLAMRRHKSIAKVAMGRRLAIRLYWMWRNGCEYSQSLEFGSYAGQLVNPHGAK

SEQ ID NO: 329216 - protein, 331 aa, unidentified
METFVGVDVGAKSVVVVQRQVGRVISSAEFRQTCEGHQALIKQLKGRKVTCVVLEATGVYYLDLAVALQRAGLPVAVINPRSFHHFAQLKLSHSKTDAEDAALLAEYGECMKPALWQAPDDTLMGLRDIGRQINRLTATRTQAKNRLHALRSKSTTLTLLIDDEAEGIERLDQRIEKLTRAAVELISQQPQHKQYLANFQQAKGIGQASAIALLAELCVLPRELKAPQVSRYAGLDVRLCQSGTSVNKPGRLSKAGNAYLRSALYMPALSAVRHAPNAKAFYEALHKRGKKKIQALCAVMRKYLTGLWACLKLGVPFDSSKLFSQKHLKNA

SEQ ID NO: 329217 - protein, 399 aa, unidentified
MDRNRTVAGLDVHKDSIYLCIMSHDEAIIFEKTYGVLTPDLRQMCQDMVDRGVTEAAMESTAVYWVPVWNELCDSMELKLVNPYFIKQLPGRKSDVKDAQWIAECLLKNLIRGSFVPDPIVQDMRKLNRRIFDLQEDITYHTNKLDAALQRCGFRLSNYVCKITGKSYRKAVASIAEGETDPETILKCIHGRVVNRHGRDTLLAAVTASFSQTDITVIRQYWELIAIYIRQSEECQSQLTALCESNFPTEYKRLQTIPGVKERAATAIIAETGVDMKMFATAAALVGWCGLKPRNDVSNGRYKSRKITHGNKYLRKILIEISWTASRTRNCFFSNFSYIQVTQKHKSKMKIQVAIARKILVAVWHMLSKGEDFIDIYLKRLEEQRLMEDKLKSLELKMA

SEQ ID NO: 329218 - protein, 325 aa, unidentified
MDARGKIVLRRKIARGQLQSCLANVPVCLIGLEACTGAHHVGRQLAALGHDVRLLPARYVKPFLKGHKNDYRDAEAIAEAAQRPTMQPVPLKSAEQLDLQALHRVRSRRIGQRTAIINQIRGFLLERGIPVHQGPAGLREALPSLLAQRTDVLSPRMIHLLEDLAADWRQLDERIAAITRDIAALARQDAGCQRLMGIPGVGVITASAIVAAVGTGAAFAKGRDFAAWLGLVPKQISTGDRTILGGLSKRGNRYLRTLFVSGAQALLRYPGRWQNHCFGRWVMTAAARLHRNVLAAALANKLARMAWSVLFRRCGYEAEFATRTA

SEQ ID NO: 329219 - protein, 356 aa, unidentified
MSRGIQYIGMDVHKEAIVIAVLNDGGKLVMESIIETKASSILQFIHGLRGELHVTWEEGTWAAWLYDLLKPHVHQMLVCDPRRNALLKEGNKSDKVDAHKLANLLRTGMLRPVYHGEHGLRTLRELARSYQTISKDLARVMNRVKALYRGWSIPCAGTQVYAPRYRQEWLGKIEHAGVRRRAELLYQQLDGLHALRRTLRPELLAESRKHKAAKLLRQIPCIGPIRAARLLALMQTPHRFRSKRQLWTYSGLGIETHDSAQYCYVNGQLQRSKKPQQIRGLNRNHNHEMKEIFKGAATRASCGVGPLHDFYVALLDKGMKPEMARLTLARKIAAIALALWKKEERFDAEQLKTQAA

SEQ ID NO: 329220 - protein, 348 aa, unidentified
MTIVEKARPVVGGVDTHADVHVAAVVDHLGGVLGIETFDTTESGYQQLVRWFRSYGPVRLVGVEGTGSYGAGLARHLTRAEIELVEVDRPNRQARYRDGKSDTLDAVAAARAALSGVALGRPKSRDGNVEAIRVLTVVRRSAVSERIVTLNQLRHFCFTADPVIRRRFEGLSVAQLTKTAAALKPRPGDDQVRYATLFAIRALGRRVVYLRDEVEELTTLVKPLIDQRAPGLMGVYGVGYEVAAKLLIAAGDNPDRLTSEQAFAHMCGTAPLQASSGKTQRHRLNRGGNRQANNALYRVVITRMSSDQRTRDYVARRRAEGKSTGEIVRILKRYVAREVFKYLRPATV

SEQ ID NO: 329221 - protein, 321 aa, unidentified
MIKDKKTHGIDISKAVFDVYSEASGLLQYHNDEKGFKLLLKALPTGALVVMEATGYYHYRLSQFLYHNGVLVSVVNPLSVKRFIQMKLAKVKTDKSDAKAIYDYGQMNEVPLYNALTDVQSECLQLFSLLDSYVKKRTATKNKLKGEEVLGKPSKTVYTSLKRDLRHLDKEIAMLETRLLDLVKQEQQEQLTLLQTIPGIGMKTALFLIVVTDGFKKFETASQLCSYVGITPTIRISGSSVRGRSRISKVGNKKLRNLVFLAAFSAYRYNAACKALFDRLVAKGKSKKLALIAVANKLLKQAFAIAKSGLPYDENFVSKLA

SEQ ID NO: 329222 - protein, 398 aa, unidentified
MKGQDIMIYVGIDVASQKHDCFLLRDTGEVFSKKSFTIKNDFEGYKKLHNSIQSFVESTKDSNVRIGLESTGHYSKNILLYLIKQGYQTTLINPILTNMDRKASTVRKTKTDKIDAEAICKFLDKNRFEFKPYTLLSYHIDALKSLTRQRFSLVKQMTQQKLIFQRLVNVIFPEFLSHFSNDYGESVLNILYSYPTPKKLAKAHKESITKLLHGRCKITSSEILELAKNSIGQSEDYLGFELKHTIDMIRFYQSQVEIYNKQIEIELNETEYGKIITSIPGVGIITGAMIISEIGDINNFSNSDQLLAYAGLDPSVYESGQFESIHNKPSKRGSKYLRWAFHQASSIIWQHDNTFNEYYQKKIREGKHHYVAIGHIDKKLVRVIFSLLKNKSLFIPQN

SEQ ID NO: 329223 - protein, 332 aa, unidentified
MNFSNFVGVDVSKLTIDAHVRGSNACKTFANNIKGFTALLIWTKKLLPSVDHGGIIVCFEHTGMYSIGLAIHLQEANIPFAMISPLEIKKSLGMHRGKSDFIDAKRIANYAWLHRDDIKPSVLPAKSILKLQTLLTLRDRLVRDRGGFEATLKEQRLLLGIADNAEMFEVYKSMIGHLTTQIKSLDAQILSIIDSDVSLKKTYDLLTSMKGIGPVIAANMITSTHNFTRFTSWRKFACYIGTAPFEHTSGTSVRGKTQVSHLANKQLKKLLHLAAISAIIHNKELRAYYLRRVSEGKSKMSTINVLRNKILARMFALINRQSGYVELAKYAA

SEQ ID NO: 329224 - protein, 273 aa, unidentified
MAIKPSKAVNIGIVVGKHVLDVYIHERDIHLQANNDADGIRKLLGRLNRYQVARIVVEATGRYERELAVAAFEKELPVIVVNPLHIRRYAGAISQLAKTYKIDAQVIAQYAAIIKPEARAQFGPEQRKIKDLLVRRRQSIEAVDEWRDKRSILESMPGIGEQAVYALLAELPELGQLNNKQVAALTGVAPYNRDSGSMRGKRRIRGGRHGVRTTLFMAVMCAVQHNPVIKSFYRRLVAAGKHKKIALTTCIRKMVIMLNAMIRDGKMWSENMA

SEQ ID NO: 329225 - protein, 363 aa, unidentified
MQTIYIGVDFHARQQTICYLTTETGELVTCELKHQDKEAVRAFYAAFRGQVIVGLEASGYSPWFERLLEELGYEVWLGHATEIRRRARWRQKNDRRDAELILDLMLHNEFPRLHRPALQSREVMRMLRYRHKLIKIRTMSKNSLQALALQAGVAKRSGLFTRAGKQELDAALMSPAMQWQREHWLQLLQPLDQQVLEAMAWLKAQSKDDVCIARLRTHPGIGLLSSLCLVHTLQPVARFRNTRKVAAYAGFDPVERSSAEHKRFLGISKAGSRLLRHLMVEAANIAVRKDEDLKRFYQRVAARRGRPKAKVAVARKLLIRAYIMLRDEIDYAEFRRRAVAARLARLRHRPNVPAVVIGQPAST

SEQ ID NO: 329226 - protein, 347 aa, unidentified
MRFYTQQHQHYCGIDLHARSMYLCILNPAGEVLLHRNLRATPEAFLKAITPYRDELVVAVECMFTWYWLADLCQAEGIAFVLGHALYMKAIHGGKAKNDRIDAHKIAVLLRGGMLPEAYVYPAAMRATRDLLRRRLHFTRKRAELLTHIANTNSQYNLPAFGKKLTYRANRADVAQRFAEPSVQQTIAVDLELIAHYDELLRELEYFILRTATGHDANTLYRLRTVPGIGKILSLVLLYEIHDIRRFARPQELASYARLVKCAKESAGKVRGNGGRKIGNAHLKWAFSEAAVGFLRKNPEGKRYYERLVHKHGKGKALTVLAHKLARAVYHIWKHDQVFNQEKFLAT

SEQ ID NO: 329227 - protein, 418 aa, unidentified
MRNSWTPYKFTFGGTRMYNAVGIDVSKGKSTVAVLQPAGVIIRKPFNVNHTSSELDELAKYIGSLEGETRVVLECTGRYHEPVVKTLSEAGLFVSAVNPHLIKNFGNNSIRKVKSDPADAKKIARYTLDNWIELRQYSSMDNTRTKLKTLNSQFSFFMKQKVAAKANLIALLDNTYPGVNKLFDSPVRDDGSEKWVDYAYSFWHVDCVRKIGLKTFTERYQAFCKKHHYNFQPAKPAELFLASKDLIAVFPKEASYKLLIQQSIQQLNLASSHVEELRSKMNELASTLPEYATVMGMYGVGKTFGPQLIAEIGDISNFSHREALTAFAGVDPGVDQSGTHNSKSNKASKCGSNRLRKTLFQIMSTLLQTAPEDDKVYQFLVKKRAEGKPYYVYMTAGANKFLRIYYGKVKECIRNLEQ

SEQ ID NO: 329228 - protein, 409 aa, unidentified
MDQLLERVCGLDVHKSSVAACVRVPGERGRRVQQVETFGTTTGDLLALRDWLQAHQITHVAMESTGVYWKPVWYVLEEVFTCLLVNAAHVKQVPGRKTDVQDCVWLAQLLEHGLLRGSFVPPVPIRELRDLTRYRKSLIGERQREANRLHKVLEDAGIKLASVASDILGQSGRAMLAALVAGTTDADVLADLAKGRLRAKLPALRAALAGRFRGHHAFLVAQILAHLDYLDEAITTVSQEVEAHVAPFAEVIRRLDAIPGINQRAAEVVVAELGVDMTVFPSDRHLASWAGLCPGNNESAGKHKAGTTRKGNRWLRALLVESALAAIRTKDGPFGARYRRVMRHRGHPKAVIAVAHAVLRTIYHVLASGHEYHNLGPDYYERRDTDRVRQRAVRTLESLGFKVTIEAAA

SEQ ID NO: 329229 - protein, 340 aa, unidentified
MEKASMIGLDIAKNVFEVHGRSAAGEVVLRRSLKRSQMEKFFTKQPKAVIGLEACGSAHHWARLLGKLGHDVRLMPPAYVKPYVKRNKSDAIDAAACWEAVGRPDMRFVPVKTVEQQAGLSLHRSRDLLVSQRTQLGNALRALLSEFGIVAGTGKAGLAQLVDGLRAGTLDLPADAMVAATTLADQHTALDAAAAALKRRITAQAKADEKAVMLKTAPGVGPLTAHATRATMPDPSLFKSGRDFAAWLGLAPGLHGTGGKTRTGPITKQGNQPLRRLLVLGATAWLRQVRARPEKASPWLRGMLARRPPKVVAVAQAARTARILWAMLTHDQPYRAPAAG

SEQ ID NO: 329230 - protein, 495 aa, unidentified
MNNCAAGESFAGGRPAPARSQSQSPNPKRVIGRPLAEPEALAPTSYRKRPQEGHYISTMDGRAKRRKSQKQQQKTMNDSTQWPPHRAFGALDWASEKHSVIVVNPAGKVIEDFEIEHSALGWKKFRQKLQPYGSIPFAIETSQGVAVEQLVEAGMLVYPLNPKSAQAYRERKAPSGVKDDRLDAWSFADALRVDGQDWKALRPEEPLIKALRLLCRDEVTLIEQRTAFVNQLRHALAEYYPAALEAFAEWTSVSAWMFLQRFPTPELLAQAGKGQWQKFLHSRRLWGSDQGPRRMEIFAHATQFAGTAPTLKAKSLLALSLVQMLFTIEKQLALYRQQIEALFARHPDHDLFGSLPGAGPKIAPRLLSEIGDDRQRFGGDPQNLQCLAGSAPVTKRSGKQRKYWHVHQRWACDKHLRHAIHLFAEQSLSRCAWAEIYYQHHRQKNQSHANALRRLSHRWLKIIYQMWIDRTPYNAELHHRNQLQHGSWVFQLQQS

SEQ ID NO: 329231 - protein, 428 aa, unidentified
MTDAIEWFAGLDWASEMHRVHLHDRTGRNAGELDVPHGGEGLTRLCDWLVEKTGAEPAQIAVAIEMPRGPLVEILLERGFQAYAINPKQLDRFRDRFSPAGAKDDSRDADVLADSLRTDTRAFRRLAVDDPLVIELREWSHIAEELQQERIRLANRVRHQLWRYYPQALQLTEDHGADWFLALWQLAPTPAKAAKLHKETIARHLATHRIRRLDAAEVVRILRAPPLTVAPGTTEAASAHIRTLAPRLKVVNDQLKAAQHKLDELAALIVPPTPQPSVPAGEPHEPGQSYEQRDGAILRSMPGLGRIVLATLLGEASQLLQRRDYHSLRCLGGAAPVTRRSGKMRLVIRRYACNWRLANALYHWARGAMQREPRWRARYGALRARGCSHGRALRTIADQLLALLCALLSRQELYDPHHATRTPQPAGP

SEQ ID NO: 329232 - protein, 391 aa, unidentified
MICVGIDVAKDKHDCFILNSEGAVLADVFTIPNNLEGFHTLLNKLRSCSTPQDSIKVGLEATGHYSCNILGFLLDNGLATYVLNPLRTNLYRKSLSLRKTKTDRVDARTIAAMLLSDAGLKPYTDIAYHNEELKSPTRYRFDKVKERAKLKTSISRLVCILFPELEKLVPILHMASVYALLSEFPGAKQVAATHLTRLKALLADASKGRYGRDMAVVIRDAARCSIGSRMPAKSLELQHTIRLIRELDAEIEEIEAAIQAIMDELHSPITTVPGIGSRMGTMILAEVGDFSRFDSPDKLLAYAGMSPSTYQSGQLKNCCPHMEKRGSRYLRYALYNAAKYVCHWEPAFAAYLAKKRAEGKHYNVALSHAAKKLVRLIFALEKSRQPYCPIA

SEQ ID NO: 329233 - protein, 310 aa, unidentified
MKPIYIGVDISKERLDVHEPGKAHTAYANDKAGITRLVKALTNLGGQAYVICEPTGGYERMLANALWKAGIAVSLVNPRQIRDFARSRGLLAKTDKLDAKTLSDYGETNAPVATPKPDPSSEELTELVDRLGQLNTARTQERNRLEKNPQSKTVKKDEQGMLRDLEKRIAAIKAEIEALIDRNARLHAKAERMKEIKGVGEMTAASMLAYMPELGTLGRNQAAALAGLAPINCDSGKMHGQRHIHGGRAKARKALYMAAVNMSVFNRICHTKYQRLVDRGKSKKLALTAIMRHLIVLLNSALKNPDLCLN

SEQ ID NO: 329234 - protein, 334 aa, unidentified
MENIALIGIDLGKNSFHVHCQDRHGKAVYRKKFTRPKLIEFLATCPATTIAMEACGGSHFMARKLSELGHTPKLISPQFVRPFVKTNKNDFVDAEAICEAASRPSMRFVQPKTESQQAMRALHRVRESFVQDKVKTTNQMHAFLLEFGISIPRGPTIISRLSTILEDNNLPFYLSQLLQRLQQHYHYLLEQIKDLEAQLKQKLKEDEVGQRLLTIPCVGTLTASTISTELGDGRHYASSRDFAAATGLVPRQYSTGGRTTLLGISKRGNKKIRTLLVQCARVFIQKLEHQKGKLADWVRELLCRKSNFVVTCALANKLARIAWALTTRQQTFAS

SEQ ID NO: 329235 - protein, 354 aa, unidentified
MNIKYIGMDVHKETISIAVMNAEGRLVMESIIETKASTILQFVQGLRGDLHMTFEEGTWAAWLYDLLKPHVTKLVVCDPRKNALLKEGNKSDKIDARKLADLLRGGYLRSVYHGENGLRTLKELARSYLTISKDLTRVMNRIKALYRSWGILCGGLQVYAPRHRAEWLNKIEEAGVRKRAEFFYQQLDAVRALRQAVRRDLLAESRKHSATKLLRQIPYIGPIRAALLMALIQTPHRFRSKRQLWTYSGLAIETRDSAQYRYVAGQLQRSKKPQQLRGLNANHNHDMKAIFKSAATMASSREGPFRDFYQGLLSKGMKPAMARLTLARKMAAITLTIWKKGAHFDAKQLKSQAA

SEQ ID NO: 329236 - protein, 346 aa, unidentified
MLIIGCDYHPSWQQICWMDTETGETEERKLEHASGEAERFYRGHTAPALIGMESTGNCQWFVDLLTQLGHELWVGDAAKIRASEVRRQKHDRRDAALLLKLLLEGRFPRIWTPSGEEKDLRQLLIHRHKLVRIRAEVKNELQHLAMNQGVMRKSKLWSKAGERVLLGLPLRLWASRRREDLMKVKEMLNGQIDLLDQAVMEAADKSQKARLRMTQPGVGPITSMAFVLTMGDVSRFPRGKQVASYLGLIPREYSSGGKQRLGSISKQGNRFMRMLLVEAAQVAVRCDPEMRSEYLHRCHTKAKGVAKVAAARKLAIRLYWMLRTNTAYPEVVRVESSSRVPLVSAS

SEQ ID NO: 329237 - protein, 309 aa, unidentified
MKEELVYLGVDIAKAYLDTAIGNEKSRFSNDALGHRQLINWIKQMPANVQVICEPSGGYERALVRALVGAQLKISLVPANRVRQFARAAGILAKTDRIDAKLLCAFGEALQPGTISASQLEQQHLRELESQRRHLTHLLVMERNRAARMNDLCVCKMNRRLITQIKKQIEQLDLLIQGQIKASPELSTKAEKLTAISGVGARTAALLLAQLPELGELNRREVAALVGVAPFNRDSGRMRGKRAIYGGRKPVRHGLYMAALVAAHHNPILRNFYLRLRAAGKPAKLALTATMRKLLIVLNSALKPDLIYA

SEQ ID NO: 329238 - protein, 339 aa, unidentified
MELCCGMDLHSSNTVIGMIDEKRKHVIDRKLPNDPELIRSFLKPYKSDLKGIVVESTYNWYWLADLLQEEGYRVHLSHPVANEQYNGLKHSNDKHEAFWLAELLSLGILKEGYIYPRQVRSVRDVLRKRAHLVRVRSALIVSLQHMISRNCAVKVKTGDIKRLTADVISPCLEKEEALLLAGKTSKEVIDCLTRQIDKIEGWALKRLRREEVFNRLVTLPGVGDILGMTILLETGPISRFRAVGNYASYCRKVSSQWTSNDKVKGRGNIRNGNRYLAWSFSEAAAHARQTNEACRRFYDRKLRQTNTKVAHNALAHKLTRAAYYIIRDHVSYQEEKMFS

SEQ ID NO: 329239 - protein, 355 aa, unidentified
MQSNKISFKGQNIYVGIDVHLKTWHVTTLTETGCKYSFAQHADAKELFDRLNKKFPEAHFMSAYEAGFCGFSAHYALTEQGIENIVVHAADIPTTGKEKAMKTDAVDSEKIAWGLKRNELTGIYIKDKRYMDDTNLMRLRQRFIMDLSRQKNRTKHLLYTQGVTYPERFRNCRTHWSRNFMKWLREEVEFLSEQKLSLLLLCEQVENTRKAILKVTREIRRLSTTDRYKENYDLLITVPGLGLITSMSMLTELDNDIVRFPNERNFVSMLGLIPTCHDSGEKKVSGEKINRGNKHLGPLIVEASWVAIQRDYQLGAYYSSCCQIMKPHKAIIKVARKLACRAYAVLKTKTKYELS

SEQ ID NO: 329240 - protein, 359 aa, unidentified
MNLNIGIDIAKNVHEACLVNENGEQIGKFIQLKNSKKSIEKFTKHIEKVSKELNAEPRIGMEATGIYWYSLFSELSKKYKIHVYNPSQISGFASVNIRESKTDKIDAKTIANMLRFGESPKTNYSDTQRLELREYGRFYFKLTSIKINLKKRLRRNLHLIFPGYDEIFKNLFTATSKEIITNITTPEKVLEMGEKKLLEIMKEKSKNHIDPEKAKILIEKAEDTIPSEIIKESSLFEFQMMLEMIENYEKQIASIENKMMSIWNKVREKHYIQTIGGVTELRAAMIWAEMGNVDDFKHPDQIVAFAGYDPKVRKSGNKEVIGGPNKRGSKILRWVLGWTVQEAKCSNPVIGQYFDKKLS

SEQ ID NO: 329241 - protein, 462 aa, unidentified
MQTIGIDLAIVGDHKAVILDDQGSAIGKVFGLRTDPASLDELLRRAREGAAEDEPVRAVMEPTGLAWLSVASYLIQRGVTVYLVNTQQVSDLRKFYKKHAKSDRIDARVLARLPWVNPEALHPLQLSPADYLSGQRWCKQQEELADLMTAIKNRVQAWERGFWPGLEEVVGDLFAPWVRRWREVWYNPWRLLTVETRELAASLAEAGANPETVERLAAGLRQVARRAVALFGTPEGKPSPYVDYGTLQDQVLRELRLLAVYEAEHQALRRKVQRLYRQLYPQRHLESIKGVGENGAAVYVFFLGDVARFATQRKFRGWHGMVPASQQSSDAETKGLRITRAGPDPVKKYAYINAEVMRQWDPQIAAIYHEQMMHKGNHHCQAVCACATHLLDRVRAVLRDGRPYELRDVDGTPVTWQEARAIIAERYHVPEEVRKRNSKRARKARRDQRAERKRKRRSPPGR

SEQ ID NO: 329242 - protein, 319 aa, unidentified
MSKALFVGVDVSMSKLDISFTCDGSKYDTLSVFNNEKSILGFFDYLQSTFKNHVFYFGYEATSNYMHILQKLIQEHNFKQVMINPYAMSHYLKHLNSRKKDDVTDSIGITKFIQTLNQEDFKTIFNQNHKSLRKYTSSINLLRKLETQVKNFIHSQKENPILLLDNVLFELQNNIKTTKKQLEKEAEQVLKELFPHVVQLQKEIKGVGYALLLELIPIFLKSQNYTLKQLQSFVGLSPRVFESGSSVHKRESMSKRGSSLIRKLLYLSAMSALRYNEIIKQKYARLIESGKPSMIALVACMSHLFRAVYYKFNQGLVNA

SEQ ID NO: 329243 - protein, 344 aa, unidentified
MRIAVLGVDLGKNVCSLVGLDASGAVVLRRHAKRETVIALAAKLSPCIVGMEACCGAHHLGRVFAAQGHDVRLMSPEYVRPYVKAQKNDDRDAEGVAEAATRPTMRFVELKSQDQLDMQTLHRSRDRLVGERTALINQLRAILLERGIVAPQGKRKLEQFLVGLMDEQGGAGLSPRMIMLVTDARIQWAEFDRRITAFDAEFVRWTKENEGARRLATIPGVGATIASALIAAVGNAETFERGRDLAAWLGLVPRQFTTGGKTKLLGISKRGNKYLRKLLIHGARAALPYVAERDTPLGRWAKGLLGRAHRNIAVVAFANKLARIAWAVLRRGERFAAKDTPLAA

SEQ ID NO: 329244 - protein, 315 aa, unidentified
MSPQVFVGIDVSKAHLDVAVLPPERRRRFPNDSPGFEELIAWLGEPEATLIVLEATGGYQVAVTAALSLAGFAVVVANPRQIRDHARSQGRLAKTDKLDADCLADYAAKNKPPVRPLPDEQTRLLQALMARRHQLVEMLTMEKNHLQQASAPLAKPIRKHIQWLEKQLQQLDDELDHQVRGSELWRQNDELLRTVPGVGQVTSYTLLADLPELGQVNNKQVAALVGVAPLNRDSGKRKGHRVIWGGRAAVRTALYMATLSALRYNPVIKAFYQRLKKAGKASKVAIVACMRKLLTILNTMLKERQPWQPRLPQRA

SEQ ID NO: 329245 - protein, 413 aa, unidentified
MSSELLLREVPGDRLVVAIDPGKVSNRVWLTTGERGLIGEPVSLPVLRDGVDELYRLIVGSGVVGEPVIGIEATGALHRAWAAEVERRWPGSLRLFAPSETQAARAQLGSRRFKTDDRDCAALVWLLRQGAGRPSAPMTVEALLGAVRHRRQLVDARRVAQQRLHDQLNALCPGLSAPVGHGRALKLEDASGGAVLACAVAFAGRAPSARSLLARSPGRLSDANARFWVARWKRLLAPPADAELRAQRLGRDVERWLGLREDIAALEAQLGELLAGSDGQILTSLPGVAVVRAAGFAAHTLPIERWPSAEQLYSATGLAPASYQSASVTRRGRISRQGLPEHRDALMGIAWGLAQHSPAFAERDREYRARGFRPIQARVALARHACRLAWRLMISQQPYDDRRYDQARHRRGR

SEQ ID NO: 329246 - protein, 387 aa, unidentified
MSVPFDPRNPATAFDHTITVVTVLELSGKSWQLGASVPGVLRRPLRKIAVRDVCGVTRAIGQWKAEASKAGHTVSRVVLGYEAGRDGFWLARALREQGIEVYVMHPASIAVERRGRRAKTDRIDVDMLLGALLGWLRGEPRRCTMAPIPTEAEEDMREPGREREALVTARLKVENQIGSQLIRFGIEGFNPRLKKAAQRVEELRTFDGRPLPPKTLEKLRRLLAQHRLLSEQMKEIEAARQRVATATDPDRIERMIQLLAHIAGLGIETATVLVHEVFSRRFRDRKALAAFVGLTGTPFDSGGSTREQGISKNGNPRVRRIITQLMWRWLKFQPDSALACWFAERTGGAKGRIRKIMAIALARKLLVALWRYVEDGVIPEGARLAAA

SEQ ID NO: 329247 - protein, 339 aa, unidentified
MAIVGGLDVHRKQITFDYLDAETGEVRRGQVPGCRVAFRDWLAQIEPRPAMFAVEGCTGWRFVVEELRRAGMEAHLAEPADTQALRGPKRRAKTDGIDARHLRELLRAGTLPESWIPPEHVLEMRTRVRLYKALLDERTTWLQRIHAVLFHQGVNVDAELLSADQRRRLEAGEGLSSAGKETVVVALRRIDGINQEMTPLKQDFASFARRQPGCRALTKEYGIGSLTAVAIWAELGDCRRFSSSRDAVRHTGLDVTVYSSDGKRTHGHLSRQGPPVLRWALFEAAQCGARRTSPDLRYYTDVKERQGGNRAALSVARKLTRRVHHRLRALGDEAFADVR

SEQ ID NO: 329248 - protein, 360 aa, unidentified
MTKSKRRHSERDFTPTHPNAAAIDIGSRMHVAAVPPDRDTEPVRAFGTCTGDLQQLVDWFEHCGVRTVAMESTGVYWIPAYELLEQRGFEVVLVNARDAKHVPGRKTDVSDAQWLRRLHEYGLLRASFRPKGELAALRAYLRQRERLLDYSASHIQHMQKALMQMNVQLHHVVTDMTGETGMRIIRAVVAGERDPAVLATHRDRRCHASEEEITAALAGNWREEHVFALGQALELYDAYHAKVVECDLRIEIVLRRLRDAAAKPAGRLPPARHRDKTANAPAFDARAALHAVLGVDLTQIHGLGPSLALKLIGECGTDLSAWPNAKHFTSWLCLAPANKISGGRCFRPERGDPAAELRLC

SEQ ID NO: 329249 - protein, 358 aa, unidentified
MNFYTQQHKHYCGIDLHARAMYVCILDQNGTKLVHKNLPTTPEALLRLIAPYREDLVVGVECMFTWYWLADLCAKEGLAFVLGHALYMKAIHGGKAKNEKSDAQKIAVLLRGGMFPQAYVYPAAMRATRDLLRRRCHLARKRAELLAHLHNPNSQYHLPEMGKRLANKANREDVAEHFPAPSVRKTIEVDGSLIDHYDQVLGEVELYLTRSAETDAVQTFARVQSVPGIGQILALVLLYEIQDITRFPRVQDFGSDCRLVKGTKESNGNRLGTSGKKIGNVHLRWAFAEAAVLFIRQSQPGKEYFATLEHSHGKAKALTGLAHKVGRAVYDLLSREQAFDLQRFVTASPLRGEPEPMA

SEQ ID NO: 329250 - protein, 370 aa, unidentified
MKETIRFIGLDVHKAFISVAIADEGRGEVISYGEIANTASAISKLARKLNRDRCDLYFVYEAGCFGFVIYRQLSKLGHSCVVAAPSLIPRKPGDRVKTDTRDALKLARLLRSGDITDCHVPDESDEAMRDLVRAREDAVCAYRVSRQRLNGFLLRHGKVYGGKSRWGNMHMRWILDIKLDHEAQHIVMEEYRRRVEHDAACVDALTDQIRRLNQSWRWAPVVGALQALRGVSMITATTVVAEMGDLRRFAHPQQLMAAIGLVPSEYSSGGKRHQGPITKTGNGHVRRILVESGWNYRFPARLTRHIERRQRGLDKAVVDIAWHAQRRLCTRYQQLSMRGKNVKLITTAVARELCGFIWDIAQQVEPVSKQ

SEQ ID NO: 329251 - protein, 410 aa, unidentified
MNNALFVGIDVSSKNNVAYIMKPDGNKHSSFSIPNNRPGAEILVDRIVEVLRRLFIPKVIIGMESTSVYGDNLMYFLRETGKFSGFEKKLHMLNPKQVKKFRDTYSDLPKNDFVDAFIIADHLRFGRINKEVYMGDYRYEALKALTRARHQTVQSLTREKQRFLNQLFMKFSGFSQEKIFSNNFGATATAVIENFESLDGLAYIDSDELADFIKKHGRGKFEDVDGIVSNLQKAARNSYRPPTVIADSVNQILAISMSTIRLLQGQVKEYDKAIEKQLSTIPNTLTSVKGIGLVYAAGIIAEIGDINRFPSQASLAKYAGLTWTQRQSSEFEAEDTCLIRSGNHHLRYYLCEAANSLRKCDPEFRRFYNLKFHEVSKHQHRRALALTARKLVRLVYALLKTNRLYIPPEE

SEQ ID NO: 329252 - protein, 350 aa, unidentified
MMIGVDYHPSFQQIAFLIEGTGEYEERRLNHSDGEAEKFYRDLQLRGVHVRVGMEATGYSRWFERLLAELGFEVWIGDPAEIKAKRVKKQKTDRKDAQLLLKLMMEDRFPRIWVPSPENRDVRQLLWHRHRLVQMRTRIMNQLQALAMNEGRRWKSKLWSEQGRAELEKLALAPWASRRRQELLELLDRMNPTIEELTAAAEQEARKRPEALRLMTHPGVGPLTALAYVLIIGTPSRFHRGKQIGNYVGMIPSEDSSGGKQRLGHISKQGNSLLRFLLVEAAQAAARNNPDWRRRYMHLAMRRHKSIAKVAMGRRLGVRLYWMWRNGCEYSPSMEFGSYAGQLGTGHGVN

SEQ ID NO: 329253 - protein, 430 aa, unidentified
MTRQNLTPNHGVLVAIDIAKARNEVLVQIPGSQRRRRLTILNQRADHDRLIAQLAALDQPVICGFEATGNYHRPLGWRLLEAGFDVRLISSMALARTREALHNGWDKNDPKDAQVILHMLSIGACQRYYDPLAQGISDIQELSKTYEAISKAKTEVLHRLQTHYLPLYFPEIDRFRQSSRSDWLLAFLDRFPTPASIVALSKDAFIEAAWTIVGRKVAKAQLLGDIYETAATSIGLPIPADAIAVRMFRMVIAEARSLVQQRAEIEKVADTVLHQHPDYQLLRKIPGIGPINAMAIIAEAGDIRRFGHHRQFLKFCGLDLATQQSGTFRGQTKLSKYGNARLRRILWIASQVAIQQRENSFRDKFERYIAKDRDNKDLRRKALTAIAAKMARVVHAVIKTGSDYRPFFEGTVPGGRTPLCKGREGAIATL

SEQ ID NO: 329254 - protein, 331 aa, unidentified
MTTIHVIGIDLAKSVIHAHAVDSDHRVACKKKLTPEKMLAWLSTLSPCLIGIEACGGSNYWFRKMSQYGHTVKLISPQFVKPYVKSNKNDANDAEAICEAVIRPNMRFVSAKSLEQQDIQSLHRIRTRLVGQRTALANQIRGLLNEYGFVFPQGINAMRSRLPDVIEDAQNELTPRFRHLMQALYDELVSLDAKVKEFDDELQLIFRQSEACQRIGHIPGIGKVTATALVAAIGDPAVFENGRQMAAWLGLVPRQFSTGGKTRLGGISKRGDKYLRTLLVHGGRAVLRTAAKRTDRTARWAQRLQAKKGPNKAAVAIANKNARIGRYCRKT

SEQ ID NO: 329255 - protein, 317 aa, unidentified
MKGKDTYIGIDVAKAHLDLAVHLEGDPWRVSNNEAGISAVVKHLKELDPTLVVLEPTGGLELPLTAALATAGLPVAVVNPRQVRDFAKATGRLAKTDRLDAQVLAHFAQAVRPTPRPLPDAQTRELAALLARRQQLVQMLTAEKNRLATTRPPVRQRVQAHIKWLEQELKAVDGDLSSAIQESPLWRAKDDLLQGVKGIGPVTSITFLADLPELGTLDRRQIAALVGVAPLNRDSGLFRGRRKIWGGRARVRAALYMATSIAQRFNPVIKDFHQRLLKAGKEKKVARTACMRKLLTILNAMIRDQRPWNPGLARQNS

SEQ ID NO: 329256 - protein, 336 aa, unidentified
MEGTSVQSSPTPSTVAAARPVAFIGIDLAKESFQAAADADTPAARFNASFTYDADGIAQLLERLKTLDVALIVMEATGGLERKLAAELSEAGYAVAVINPRQARDFAKAIGTLAKTDKVDAGVLAQLARILKPQARPLPSAEQIRLKDLSARRRQLIHMRTSELNRKQQATLKEVSKSIKNHITMLDKEIAKIEKQIADLIDSNSHWKRKADLMDSVKGVAPDTAHAILAELPEIGTLSKREVTSLAGLAPHAFESGKFKGQSRIWGGRGSVRSAIYMATLAATRFNPAIKAFYDRLVKNGKKKMVALTACMRKLLTILNAIVRDGVMWNSEMGIV

SEQ ID NO: 329257 - protein, 460 aa, unidentified
MLYAGCDWSDQWLDVAVLDRSGTVVGETRIVYAESPDPVARYRDFLAPLARRWRTTITGIEDVTILFARSLAASGMDVVHVDPTRAARHRMARGIPKTDRADARLIASLTLAGEYRPLIANSPSAEALRVVTHAHRAAVAHRVEALHSLRAALMRIWPAAVSAWPKSVGGLRSPQARAVLNAAPSPRAAARLDRTSLVALLTAAGRKRTVQDEAERLRMIFARPVMLLDPHVEAAEAVRIRHLLAGLDHAVRQADDLQQALARHYTAHPFHQLVAGVPGIGDTLGAYLLAEIGDRPVERFTGGRSLAAYAGVAPVTWASGQTVRVSFRRASSTPLQSTLHAVAFSMVNHSPGAHAYYTMRRCAGDAHATALRKLARKIVLCLYHCMASGLPYEDATAFGYDPGAGGVVHRRRRGPLAEEQIAHARDMLARPGTTVTATARALGVSKQTIYRHVLGRPRAR

SEQ ID NO: 329258 - protein, 358 aa, unidentified
MQSNKKSFKGQKIFVGIDVHAKNWAVETLTESGFIKRHAQEASAKVLFDFLSKHFPDGEYHAVYESGFSGFSTYYQLKEYGINCVVVHAADVPTTQYEQVMKTDKIDAGKLARALRKGEIKPIYVRERENLDDRAVVRLRKTIQKQLSGCKTRVKHLLHTNGVKLPARFDKPGTHWSRAFMNWLKDEVVLLSSTRLSLDLLINQVESIRKNLLEATRAIRKLAASDKYKVNYELLLSIPGIGFNVAMCLLTEIYDFKRFGNENSFAHYLGLIPTCHDTGDKHSTGGKTFRGNKLLGPMIIEACWVAIYKDYGLSQAYCSYKQKMKPQLAIVKVARKMSNIIFSVIKNGKKYEPYKWEE

SEQ ID NO: 329259 - protein, 354 aa, unidentified
MKRTTKYVAFDVHQATTVASVREDSGRVIARSVLPTDRGALTEFVRGMRGARHVTFEEGTQAQWLYDLLAPLVDRVVVCDRRGAPRQGNKGDQVDADQLSELLRRGALRAVYHGSADRATLRELTRTYRNLVEDATRVMLRLKALFRARAIPTPGTNVYQARARGQWLVQLTDRGARFRAEALYAELDVLRALRPRAKAAMVTEARRDPAWPVLRTIPFLGPVRVALLLATMKTPWRFRTKRNLWAYAGLAVVTRSSAEYQLVAGQAVRRRRPPMTRGLNRNHNRLLKDVFKGAATAATARPGPLQDFYRSVIARGTREELARLTLTRKLAALTLRLWKKGEQYDPTKLTTPAR

SEQ ID NO: 329260 - protein, 388 aa, unidentified
MYYIAIDIGKFNHCASVTDSQGEVFVEPFFFKNNSEGFQLFLTTTKKFTHSRHLAGLEATGHYGDNFTAFLLDNDYHVGIINPISTDAQRNLKIRKTKNDKKDTFLIAKVLQAKEFTSMTKKKFQLRQAKQLTRLHSELTEDLNRIKNRLQYCIDILFPEYNSLFKTKYSKAYMAVLKAFGSASVIATTHLTKLSNVLFSTKRGKVQLSALELREAAKISVGEDNPIVVFQLHQLIAQIELINSQLSEVHKKIEDFALSSNSPIFSIPGIASISGTSILSEIGDIALFSQYSKLIGFAGVDPATYQSGEYHATTTAISKRGSRYLRKSLYQCILAVCTHNPTFKTYYTRKRNQGKSHRCAQGHCVRKLLRVIHKMLSENSQFDITKCI

SEQ ID NO: 329261 - protein, 422 aa, unidentified
MLEETNDTEELVQRVAALDIGKAELTCCVRVPSPGQPGKRLQEVRTYKTMTRSLLVLADRLRELGVTRVVMEATSDYWKSPFYLLEAQGLEVWLVNARDVKHLPGRPKTDRLDAVWLCKVAERQMLRPSFVPPPAIRRLRDVARYRADLVAARTAEKQRAEKLLEDAQIKLSVVASDIFGVSGRAMLAALVAGERDPKVLAQLARRRMRTKLGQLEEAFCGQFTDHHAFLLAKMLARVDMLDSDIAELDGRVEELIAPFADAVDRLDEITGVGRTAAQAIISEIGVDMGRFATPGHLASWARFTPGTKQSAGKTIGRGSTGHGNRYLARVLGEAAMAVGRTDTFLGERYRRIARRRGAKKAVVAVGRSILVIVWHLLADPQARFRDLGPGFYDARIDAERKKRSHIRQLEALGYKVSLQPAA

SEQ ID NO: 329262 - protein, 399 aa, unidentified
MAGVIIGVDPHKLSATIEVVDHHEKLLGSGRFTTDQAGYTAMRRYVAGWPDRVWAVEGSNGAGRPLAQRLLEAGERVVDVPAKLSARVRLFDTGHNRKTDARDAHSIAVVAVRTKTLRTLRADGELEALRMLADRREELTRSRVQTVNRLQRLLSELLPGQAKRDITTAQAKALLATVRPRDIAGKTRRRIAVEELHELVAIESKMKKSTAELKTLVLARRSRLMNLHGIGPVVAARTLADVGDITRFADRNRFASWTGTAPLDASSGEQIRHRLSRAGNRRMNHMIHIAAISQIRLNTPGRAYYRRKLAQGKTPLEALRCLKRRISDAIYRQLLADSKRAAQTDEGADPGGHCGAAHESSAVDSHPLIDTSDQPLPGPADPTLRPAPPGRKSHLKPTG

SEQ ID NO: 329263 - protein, 361 aa, unidentified
MRIEPKETIAVALAEGSSRDQVCEHGQISNTPAALTRLSKKLSRSGSLLQFCYEAGPCGYGIQRHLTAAGHDCVVVAPSLIPRKPGDRIKTDRRDAINLAKLHRAGALTAVWIPDPAHEAIRDLVRARLAAVRSLRQARQQLSGFLLRHGRHYSRSAWTLMHRRWLAGLRFEQPAHHIVLEDCIATIEAATARRDRLTAQIELMLADWALAPVVHALQSLRGLALVAAATVIAELGDITRFTNPRQLMAYLGLVPSEHSSGGTRRQGGVTKAGNATARRMLVEAAWSYRFPARISRDQLLRQETLPKPIRDTAWKAQVRLCGRYRKLSRAGKPATTVTTAIARELAGFVWAIACQMPRPTN

SEQ ID NO: 329264 - protein, 344 aa, unidentified
MAIVGGLDIHRRQITYDWIDTTTGETRRGQLSPATRLELRGWLARFTGQQADFALEATTGWRFVAEELECAGFRAHLAEPADTRALRGPKRRAKTDRTDARHLRELLRAGTLPESWMPPAHIADARTKVRLRRGLVGERTGWYQRIHAILFHHGLPERSQLLTADGRAWLARAELPAVARQAVELALRMIDHLEVELDTLDAQLAGIARVQPGCQALQRRYGIGWLTAVAIWAEFGDVRRFANSRQAVRFCGLDITITESDGKRARGHLARQGSPVLRWALHEAAMCAARPSSPDHTYYLQVKQRLGGKRAALSVARKLAREAYHTLRELGDQALVPADLPTAA

SEQ ID NO: 329265 - protein, 419 aa, unidentified
MIMAEEVEWFVGIDWASETHQVCLVDARGECAGERSVAQSGAALGELCDWLIARTGAKPEAIAVAIEMPNGPVVEALLERDFRVHAINPKQLDRFRDRFTVAGAKDDRRDAQVLADSLRTDRPAFRQVSVDDPVIVELREWSRIADDLQQERNRLANRVREQLWRYYPQMLKLPHHFAEEWFLDLWSQAPTPAKAARLRESTIERILKAHRIRRWQAAEVARILKQQPLSVAPGVAEAASAHIRAVTVRLRLVNQQLKAAHRRLDQLCDQLVPPEENQPGQRCEQHDVVILRSMPGLGRINLAALLAEAWLPLRRRDYHALRCLSGVAPVTRRSGKSCIVLRRYACNKRLETALYHWARVATQRDETSRNRYAELRRRGHSHGRALRTVADRLLSVACTLLEHQTLFDPAYKARQAAAA

SEQ ID NO: 329266 - protein, 368 aa, unidentified
MQNASTFVGLDVHKNTISVALLRPGQPPLEWSLANETAAICRLIRKLEREAEGALRGCYEAGPTGFVLQRQLTRAGIDCRVVAPSLIPVKPGARIKTDRRDARKLAELLRAGLLTEVKPPTEDEEAVRDLTRSRDDAQRDLTRARNRLSKFLLRRGCVYVVGRKPTWSAKYRAWLRALTFPRRADQIVFEDYLLAVEQVEGRLEGLNEEIEAVAQDQPWRERVQALRCFHGIDTVTAVALVAEIHDPQRFPHPRQLMSYLGLVPREHTSGMRERRGGITGTGNRHVRRLLVEAAWHYRHKPVVGRALRLRRREQSPKAIALADRALRRLTLRQRRMLYQGKHPNLVTIAVARELAGFVWNVLHPATAN

SEQ ID NO: 329267 - protein, 456 aa, unidentified
MGQEKGRGGSLSLECIEPNAAGIDVGATEIYVAVAGDRDGEPVRCFATFTEDLQAMAKWLQHCGITTVAMEATGVYWIPVYEVLEDAGIGVCLVNARHVKHVPGRKSDVRDCQWLQYLHSVGLLRASFGPESAICALRALSRHRANLVEIAAVHVQHMQKALTQMNLQIHHVLSDLTGKSGLAILDAILAGEREGEQLASLADGRIHADRETVIKSLVGNYRSEHLFTLRQSLEAYRQYQKMLVDCDRELEQRMGQLPNGGKGGQPPASLESSKRGKRRKNQFHFDMGKELYRVLGTDLLSVPGLSALTVHTLVTEIGTDLRRFPNVAAFTSWLTLCPGNKKSGGKVLSSKTRKSNSRAAAALRLAAQALHKSHSYLGAYYRRMRARLGAPQAITAAAHKLARIVYHLISTRTAYDESVFAHEEQKQNIRHQHRLHKQALALGFQLVPLPHPEVVH

SEQ ID NO: 329268 - protein, 360 aa, unidentified
MQMQSKELNFEGHNIYVGLDVHKKSWTVSVVMNDIILKTFSQDADAVALHRYLTKNYPGAQYYSAYESGFCGFWPHFKLIELGINNIVVNAADVPTSQKDKTQKDDRRDSRKIARSLSKGDLTAIHVPDVSTQSDRSLVRTRWALVKDMVRSKLRIKAFLSVYGISYPPEFSRSTTHWSKRFMKWLRDINLPHSTAKDSLDAMIDQFESQRVHLLDITRKIRKMSQSEKYQRNITLLDTLPGIGLITSITILTELGNIDRFKDSDHLAAYVGLVPTCHSSGEKENRGEMTFRHNERLLQMIIESSWSAMRKDPGLTLSYSNYRKRMNQNNAIIRIARKLVNRIYAVLKHQKEYKCGINNK

SEQ ID NO: 329269 - protein, 345 aa, unidentified
MPIVGGLDIHRKQITFDYLDTETGQVCRGQVSPADREHLRAWLARFAGTCDVAFAVEGCTGWRYVAGELAAAGATAHLAEPADTAFARGRKRHAKTDKTDCRHLRMLLSEGRLPECWIPPGRILECRAMLETYHDLRREHTAWVQRIHAVLFHHGAPALGGGTLRTGPGLAALREVSAACLSPAGQLQVATALEVLEALEARMSELRHQLLAEARHLTGAKVLAERLYGVGPFAALAMTCWLAGKDRFSSSRQAVRFAGLDVTVWSSDRKGPPGRLSRQGPPVLRWALYEAGKTHARAPAPDHAYYAAVKDRCNGKRAALSEARKLLRQAHHILAELGDDALSAA

SEQ ID NO: 329270 - protein, 464 aa, unidentified
MEQSRDDKSESDRGIEEPGFPVLRRNVAGIDLGSTSHWVCAPTVDGQGREVKVFGATTPELEKMAQWLEQRRVESVALESTGVYWIPPHEVLERQGFQVVLVNTRDLARVPGRKKTDRVDCQWIQRLHSCGLLRGSFRPPEQICMLRTLIRDKGNLVAERADWIQRMQKSLDQMNVRVHRAVSDIDGTTGMAIIRAIVAGERDAAELAKLRDPGCRNSREQIAEQLSGHWWEDHLFSLEQGLKMHDAITGRIQVYEKEILRRLGEMERAEYREKQAPTLQNKNKAKMIRQRGEEPMRQALYRMSGVDLTAIDAVGVGAVQAVLTEYGPDLSCFPTEKHFVSHVTLAPKNAVSGGKPVKKRKKRGSASSRVAAALRMAALSLRHSQSALGAYYRQIARRIGADVAVFATARKLATWIYRLLRWGHPYVDEGAAAYEKRYQEARIRRLIATAADLGYELAPKATQP

SEQ ID NO: 329271 - protein, 350 aa, unidentified
MMIIGCDLHTRYQQIAMVDTETGEMLECRLEHANGEARAFYAALQGPVRVGVEATGYTHWFEALLAELGHELWMGDAAKIRAAVVRKQKTDARDAAHLLDLMREGRFPKIWRPSPAERDLRQLVWHRQKLVWMRGAVKNQLHALAMGEGVCRKKQLFTVKGRKELEGLALGPWSSYRRQELLRMYDEMAAATAKLDLEVERAAKSLPLAVRLMTHPGVGPVTSLAFVLILGPVARFERSKQVVSYLGLNPQEHSSGGKQRMGSISKQGNPMMRSLLVEAGHTAARLDPELKRMYQRLKFRRGASVAKVAVARKLAVRMYWMLRSTADYAQLVRMQGSPPATRVELSPSLG

SEQ ID NO: 329272 - protein, 473 aa, unidentified
MRKAQMKVKSRGKAKSKAVQWNKQSSLLEQINFDAAGIDVGSREHYVAVPAERDPQPVRCFGTFTSDLEALAQWLRQCGVETVAMESTGVYWIPVFQILESRGFEVLLVNARQVKNVSGRKSDVSDCQWLQQLHSYGLLAASFRPAAQVCVLRSYLRHREHLVEQASTQIQLMQKALGQMNVQLHHVLSDVTGVTGMAILDAILAGERDPLKLAQLKDPRVRSSVETIAKALTGDYRAEHLFVLKQARESFRFLQAQVAACDVEVEKVLCGWEAKVDLEQQPLPPTRKKNRSQSKHKPLPFNLRQQLYRVTGVDLTEVDGLDVLSVQALISEIGLNMHRWPSEKHFASWLGLCPDHRISGGQVLHNRTRPVLNRAADVLRMAAQSLKDSQSALGAFFRRLKARLGPAKAITATAHKLARIVYQLLKYGQNYVDPGAQYYEQRYRDNVVKSLKKRAASLGYTLIENSALNVQVS

SEQ ID NO: 329273 - protein, 463 aa, unidentified
MTEVRLGIDVACRAPHQASLANETGTFLWQGWKFQTTTAELDALWAKIPADAKVVVVMEPTRNAWVPLAAWLTAKGAAVSVVPPEQSADLRDYYNKHTKTDRLDSKMLARMPMLHPEGMRVVDHLGPAEPLKRAVRHRSSIQKRRTASAHRLDSLLELMGPGWLDVFGTISYGTTAVTVLEKYANPFALRKLGRARLTRLLIRGSRGRWRETKADELLALAAQTLELWAAGGLDFDELADDIAIEVQQIKLFDDQIDALEDRIEVLYEKADPAGIVASAPGIAVTLSAGILGRTGDFNRFHSLAGIRSFTGLVPKIDQSGIEDHNKGPTKHGDPGLRHALFMAADLARKVDPTLAARYHRLFVEQGKHHNSAICTIAAVLITRIAACWRNGQLYEVRDTNGQLITAEEGRRICAERYKIDPATRAKRRNATTANKLKRAGRDKEESQSAPVTDPPRHEHTKAA

SEQ ID NO: 329274 - protein, 429 aa, unidentified
MNYNTQNAKIASITEKSLIVGIDVGSETHYARAFSWRNYEYSKKPFAFSNDEDGFASFKAWMDDIAEKHEMEKVIPGMEPTGHYWLNLGAYLQGQGMRPVHVNPHHVKKSKELDDNNPNKNDRKDPKTIAGLVNEGRFSYPYIPTGIYAEIRNLSNLRIQTQEEITRIKNRIARWFSIYFPEIKDVYKNPDAVSGLMVIKQAPLPCDIKGLGVDGVNKIWRDARLKGAGLKRAKNLVTAAEHSIGNTEAPRSARKEIRNLLNDYEIYKSRMDELMEEIEELLSGIPYIDKLMGISGIGIKTVSCFIAEVGDIERFDNPKQVQKLAGYAIVADSSGKHNGESRISHRGRKRLRYALYEAAVSVIGKNKEFKEIHHYYRTREKNPLKKMQSVIAVACKLIRIFYAILTKGIDYDGQKMLRDIVRPGMQSAA

SEQ ID NO: 329275 - protein, 355 aa, unidentified
MPGIVVIGIDTHKDVHVAVALDWRGGRLGDLRISTTHSGYEELLEWSLLFTSGSLSQLTFGIEGTGSYGAGLSRYLQAVGAMVREVSRPDKTARHRLGKSDEIDADLAARALLSGSATNVPKSGEGVVEMLRMLKSARDSATEARVKAINQIKAILVTAPGSLRDQLRELSNPLLVRACSRLQSMEMASPLAAAIRSLRLLGRRCLLLTEEIEQLSLDMDALTLQAAPQLRELHGVGVDAASTLLIAAGDNPERIRSESAFAALCGVNPLPASSGKTNRHRLNRGGNRKANCALWRIVLVRLRWHEATKAYMQRRTLEGKGKREIIRCLKRYVAREIYKVLLMTLGTPEAKQAHC

SEQ ID NO: 329276 - protein, 316 aa, unidentified
MDIASKSLEARVGPQGAAGSFANDLEGIAALGDFCRTHQVELVAMEATGGYEQQAFAQLSGQGLAVAILNPRAVRQFAQSMGSLEKTDRIDAGMIAWYAEVKKSQPVCLAPENQQHLRALVTRLRQLTDLRSVQLNQQRLVTDRKVQTSFKKLLALLARQIKELEQNIAVLLAKDPLWRAFDQAFRTIKGVADRTVARLMAEMPEIGTLSNKTISKLAGLAPLANDSGKRQGRRAVRGRRAAVREILFMVASVVGRHEPDFIAFRQRLRAAGKPPKVVRIALAHKLLVRLNAKAREVRQAMASPEHNRAALQAEPA

SEQ ID NO: 329277 - protein, 369 aa, unidentified
MEKGTTYVALDDSKRKIVAGILRPGDTEPELRELPNDPHHIRRLFERLKREGPVVACYEAGVSGYDLYRQIVGLGVACDVIAPALTPRRPGQRIKTDRRDAAKLVRFFRAGELTAIHVPAEAEEAGRDLLRCRDDIRRDVLRWRHRTLKLLTRHGRNYLGGKNWSRGHWTWLRTQHFALPPLQRAFEATLFALEQALARQAELDKEIETLALTDPYREPVGWLRCFRGLDTLSAMILVAEIIDFQRFRRPRELMAYLGLVPTEYSSGDTQRRGALTKAGNTHARRVLIEAAWHYRHRPTIGPALASRSQGQPPAILAQAWRAQQRLHRRYRHLMGHGKRPPVAVAAIARELVGFIWAAMTGRESRLQVA

SEQ ID NO: 329278 - protein, 453 aa, unidentified
MAQGSGLTRGDRNRNRKIAVLREVVARDRAVLAVDLGEDKQAAALVDHEGRVLARKVVKAKAHQLGGLLEWAAGRAARAGFAGLVVACEPTGHRWKALMGAADGAGHGFCCVQPVAVARAREGDDYTRDKTDHRDAYLIGRLAVRLDCYLPERAGEAWARLRHLGARRFALAGDVVSGRQQIGDLLACAWPAALGAAARPLQSVTWLAALGVVTDRCCGDPARLRKMGYARFLAAVRRELPRWGGKYVRHSIVAGLWEALADPGGVRAQRRGALERVHLLMADWRSLRTRLADTEARMCAVLDELDLTGLVTSIDGLSAAGAAVILAETGDLSRFASARSVVKHAGLNPAENTSATLTGRTRISRRGRPGLRTAAWRAAWAALHHNRVLAAKYAHLTGRDGSRLAGGQARAACAATLLRWLHAVVTRRQAWDPRIASGAIPARPRAVTAPAAA

SEQ ID NO: 329279 - protein, 423 aa, unidentified
MEVLHECVAGLDVHKDNVVACIRTVSGDKTTREHRTFDATTDGLLALLEWLTLCRCELVAMEATGVYWMPVWRILSDGAFKLIVANAAHIKAVPGRKTDMKDSTWLADLAAFGLLKASFVPDEEQHELRALMRTRKQLVREQTRHVQRIQKTLTEANIKLDSVISDIMGRNGRRMIEAMITGVRDPRKLAALADQRLKATPKQLYDALHGRLTDHHRFLLQLHLGQWDTLDATIKGVDREVATRVFRMDTEGTAAKANFSDLIDQLVTIPGVSRLSALTILSEIGTDMSRFATAGHLVAWAGMCPGQNESAGKRKRTRLRKGAPWLKTMLVQCAWAAKRKKDSYYKAQFFRLQSRRGPQKAICAVAASLLTAIYHMLKDGTIHQDLGSGYFDQRPPEIKVKRLVNQIAKLGFEVTLQPIAKAA

SEQ ID NO: 329280 - protein, 313 aa, unidentified
MTSLSKMKTIHYIGIDVSKKTLQIDATNLAPTCPNQAKALQAWLRQLPARAHLVLEATGGYEKLLATLAHRAGVPVSIVNPVRVRAFAKARGQRAKTDRIDAALITDYARCLQPAPTPPVSAAHARALELLRGRQALVSQRVLWINLLEHATDAGLIRLYKKHLRQTDASIAALEKEITTAVTAEAILAARYHRLLAQFGVGEVTAATLVLELPELGYLNRKQIAALCGLAPFAKDSGDKRGVRFVHGGRNQLRRALYMATLSAIRQKSSPLQSFYLRLRANGKLGKVALIACARKLLTYLNSQLKNPELSPK

SEQ ID NO: 329281 - protein, 328 aa, unidentified
MIYLGIDVSKLKLDCTLLLDPENDKRKSKVVPNSRDGVHELVRWCAKHGVMADQAHAVLEATGPYHEQAATTLHDGGIAVSIANPANVHDFSRALAMRSKTDALDSLVLARYGVAMRPAAWQPPPAHVRELRALITQLEALSKDRLRTMNRQEKIEASSASELVERSISDTLSFYDKEIVRLEKAIDDHIDRHPDLKDDTKLLLTIPGVGPKVARTMLRVMRTHQFKCAEDLAAYLGLVPVQRQSGTSLRGRSRMSKAGPADVRAKVYMAGVVASKHNPHVRALYQRLLAGGKTKMSALGACMRKVVHLCFGVLKTRQPYRPDYAFST

SEQ ID NO: 329282 - protein, 329 aa, unidentified
MLNEEAEVVERGKLKTTPAALQPWLEALPAGTRVVLETGTHSSWISRLIEQAGPETLVAQPRKIPQIYACKRKNDRRDAEKLARTGRLDPNSMGPIRHRSAEQQADLAVIQARDALVRARTQLINTVRGLVKSTGERLTGCSARSFARQAEEQIPQRLRAALLPLLSQIAALSEQIERYDVHVEQLAQRKYPETELLRQVSGVGPVTSLAFVLTVADRWRFRHSRDVGPFLGLVPGQDESGESSPQLGISKAGNGYLRRLLIGSANYILGPFGPDCELRRWGMKLSERGGKNGRQRAKVAVARRLAVLLHKLWVSGEVYEPLPEKRAAA

SEQ ID NO: 329283 - protein, 519 aa, unidentified
MSATRTRRRPATFVQKPRGAFHPRVQQVGPEHFGIVSVDCAKARSKWMLCDFYGNVLIPPTTVAHQQPALDRAIQQVRVAMTTHQIHDILIAIERTGRYHHVVRQAFAAANFETRIVHPFTTKQFRQPSDPGIKTDDTDLTAIHRAAVTGFALSAPPLEEPWLTLRLLIRHRRDLVRKTSLLCCQIREHLEAALPGYAACFANFWDSEVALRLARRYPSAAALRAAGRKGLINYLHDEKVQCHHTTLDAVLAWAAQAAPPEVTAICHHRIALNLDDDRRQKTLEIQALERDIAAQLVRTPYVLLLAFPGVHVVSAADFAGEMGPMPHYANARAISGRAGLFPARYQSDQVDHARGPLVRRANRRLRAAILGIADNLIRCNHHCRALATTWRAAGKDPRHTHVKIALRFCRIAYQIVAGRQVFRHPSMQQQSYILAKLNAFHRDHQTALAQHLRDLQAAIEQLPPAAYAREAQPLAEELQRIQEGRRHGPQPLGDILPLVLARLGVPVVQSLGSGESTSP

SEQ ID NO: 329284 - protein, 368 aa, unidentified
MSQYSTDTIWVGMDVHQDSITAAILFGDDPKPRIERLPGDLNAVRRMFRRLENHGTPRSCYEASGAGYVLQRCLEHDGFNCEVIAPSLVPKKPGERRKTDRLDAIHLAEQYRSGHLVPVAVPTQEQEEIRQLVRSRLAVQSHVVRLKHRIVRVLATHGHRFTAGKSNWTQKHRNWLRKLRRELDGPLQTVLTHHLEHLEYLEGQKYSLEAEIDRYASSEPFRRRVAALCCFRGVKTLTAMTILTELGDIRRFVRPTGLMAFAGLVPSERSSGNVQRRGSITKSGSRELRRVLIEASWHYRKQAAAGLIMTRRRMGQDPEVVAIAIKAQHRLHKKFWKIARKKHQCTAVTAVARELCGFLWSALRVIED

SEQ ID NO: 329285 - protein, 343 aa, unidentified
MQAITTVGLDIAKSVFQVHGVDATGTVLIRRQLKRRHVLPFFQRLPACVVGMEACATSHHWSRQLRALGHTVRLMPPAYVKPYVKRQKNDAADAEAICEAVTRANMRFVETKTPEQQACLMLHRTRHLFIRQQTSVINAIRAHMAEFGIVARVGRTGVAELLAVAGDPRDRRLPEVARTCVAALGVQLRMLKAQILEFDRRIGTWHRSNQTSQQLDQIPGIGPALATALVASVPDPEAFRSGRNFSAWIGLVPKQHSSGGKDRLGSISKQGDRYLRGLFTAGALAVIRYAKLHGTEHRPWLTALLARRPTKVAAIALANKLARMAWAVMAKGERYKEPAALAA

SEQ ID NO: 329286 - protein, 377 aa, unidentified
MSQRRPVAGDSSICLRSVRPSVSVGVARPKLRARTVARVSSRITQDRACFRRPSPGGSPKSSEAPAFVGIDVAKAELVVAIRPSGERWTLANDGPGIQVLVQRVRHHAPTLVVLEATGGYERAVVAALAAAQLPLVVANPRQVRDFARATGQLAKTDRIDADILALFAERVRPAPRALPNDAAQALDALLTRRRQVLEMLIAERNRLEHAGPAVRRGITQHIRWLERQLHDVDRDLDDTIRTSPIWRAKDDLLRSAPGVGPILSRPLIGELPELGTLPRKQIAALVGVAPLARDSGTLKHQRLIWGGRAPVRAALFMAALVGTRCNPVLRAFYGRLLAAGKPKKVALTACMRKLLTILNAMMRTNTTWRHAHPSQTI

SEQ ID NO: 329287 - protein, 433 aa, unidentified
MREAEDEPLFAERAAGVDIAKAGIEVTVRVPSETRRGGRQQDTRSFRTTRKDLLALADWLRVWGVAKIGMESTGDYWKPVLFLLESEGFDCVLYHAAQVKALPGRPKTDKLDSAWLAKITERGALPGCFVPPEEIRRLRTHTRYRRHLTQARTAEKSRVEKLLEDAHLKLSSVISDIHGVSGRAMLEAIAAGERNPGTLAQLARGTMRGKIARLVEALDCSFVTEEHAAVLTMMLSTIDYYTAQIGELTAKIAVLCQPYEHQIAQLDAVPGTGVITGQDIIAEIGTDMTVFPTAAHLVSWAKWCPQVAQSGGRRKGANASGRGNRYLSAALGEAAVNAGRTQTFPGAKYRRLVKRMPKKKALVATGNSLLAIYYALLSDPAAAYTDLGADYYERRANIRRQARNHVRGLERLGYKVTIEPADPATGATAEPAA

SEQ ID NO: 329288 - protein, 334 aa, unidentified
MEQITTVGIDLAKSVFSLHGVDGAGRVVLRKTVRRDQLVQTVAVLSPCLIGMEACSGAHEWGRRFQSLGHNVRLMAPKFVAPYRKSGKNDGNDAEAICEAVTRPSMRFVPVKSAEQQALLALHRVRQGFVVERTALINRLRGLLSEFGVVLPLRSVTVRHQAAAAAEGLPELARRAIGDLLEQLRLLDERIGGYDREIEAQAKLCEPAQRLMKIRGIGPTTVLAIVATVGNAREFKNGRQFAAWIGLTPSQYSTGGKARLGHISKRGDAYLRNLLVQGARSVLNSAGMHQDRMSRWILELQPRRGYYRTLVAIANKNARIAWALLAKNETLRSA

SEQ ID NO: 329289 - protein, 447 aa, unidentified
MPDASPSRRRRARLKVVNPRSAGIDIGSRFHVVAIPTELDDEPVRKFLSFTSDLQRMVEWLLALNITTVAMESTGIYWVPLYEILVAHGIEVFLLNARHAKNVPGRKTDINDAQWLQQLHSYGLVRASFQPDPCIARLRAYFRQRDVLVRYRSSHQQHIQKALMQMNLQLHHVVKDITGLTARRIIDAILSGERDPKTLAALRDRRCKESVETIAAALEGNYQEEHLFELKVAVEMFDVYSAKIQECELAGQSVLQELAGDDCIEPKRQASDWRITGNGFSFNPQELIKSVAGHDLLALPGLGPATVITLISECGLDMTRWPSAKHFVSWLGLSPQNKISGGRVLSSRTRQGTTRAGSAFWMAAVPLSRTSTALGAFQRRLSARVGKSKALIATARKLAILYYKTIRYGMEFEEHGDLAYQQASRERQIHGLEKRARALGYQLVATG

SEQ ID NO: 329290 - protein, 420 aa, unidentified
MRAIGIDVHRDFCEVAISEGGRLRSAGRVPSTPEALELLGASLSDDDEVALEATGNALAIARILEGHVARVVVASARELHAISGAKAKTDRRDARTLAKLLAAGMFAGTWLPGEEVRALRRRLAQRAQLVRARSRLKNEVQAALMRNLVGAPSATDLFGAAGRRWLADLVLPADERETLDSCLRTIAFLDGEVERFEVAIARYAMHSVEIRRLVTIPGVGLISAATLVAVVDDVHRFRCARKLVGYLGLDPRVRQSGSTPARMGHISKEGPAAARAALCEAAHAAMRTPGPLRAFGERVAARRGRQVAIVAVARKLATIAWRLLTSGEDYVYANPGQVRLKWRRVELLAGEPSQKGRRTGVSLASQHERELALAAERAYQRLVADRQAAGSRRKGAGAAPGRAPDGSSLRPGSAAGSAAQ

SEQ ID NO: 329291 - protein, 338 aa, unidentified
MKVTTVGLDLAKSVFTVHGVDEHGKTVLRKTVRRAKLLELFAQLPTCVVGMEACAGAQHWARELRKLGHDPRIMAAEFVAPYRQGGKNDANDAAAICEAVSRPKMRFVAIKSEEQQAVLAVHRLRQGLVEERTALANRLRGLLTEYGVVVGVGIDRLRRALPEILEDGANGIPGIAREVFADAAQQLHELDARIAAYDRRIAALARASEPVQRLMRIEGVGPVTATAIVASVGNATVFKNGRQFAAWLGLTPRQHSTGGKQRLGAMTKHGDIYLRTLLIHGARAVLRVTAHRSDGKSRWAEGLRRRRPDNVVAVALAAKHARIIWALLARTQDYQPAA

SEQ ID NO: 329292 - protein, 370 aa, unidentified
MEKSITIVGLDVHKDSIEIVVAETSDGQAVRHFGRIGGDMASLDKAIRKLQSQGAELRFVYEAGPCGYEIFRHLSRRGFHCAVVAPSMIPKRSGRRIKTDRRDAEALARLYRAGELTAVSVPLEQDEAMRDLTRAREDAVKAQRSARQQLGAFLLRHGLRYPGRSCGSAAHLRWLSDLKMAHPAQQVTLQEYICALMQCTERVQRLSKQIQQLLAQWERAPVVYALQALRGVAPIVAVTTVAEIGDLGRFANPRQLMAYLGLVPSEHSSGEATRRGGITKSGNGHVRRVLVEAAHAYGYPARVSRPLLKRQEGLAEPIRQIGWSAQVRLCGRFRRLLARGKSRNTVVAAIARELSGFMWAIAKQVAVSNV

SEQ ID NO: 329293 - protein, 317 aa, unidentified
MTQTSMTTAGIDTSKGKLDIAVHGRAEQWQVANMLPGWRILTNKLTKAGVSRVGIEATGGYECGVVQYLRAAGFAVQVLQPVQVKAFGRMHLRRAKNDALDAVMIAACTAALDQVRDAPDPRLAELAEQLTFLEQIEEDIKRFKTRLEHTSEPRLRRMVLGEITRMTARRLAQLRYIAKQLRAHRDLAARLDLVLSIPGIGERTALAILIRMPELGRISREEAAALAGLAPFDNDSGQQKGQRRIAGGRARLRRSLYAAALPAAFRWNRALIALYQRLTAAGKAHNAALIACARKLLIYANTVVQRGTPWTERPLGA

SEQ ID NO: 329294 - protein, 350 aa, unidentified
MHINTPVLASIGIDIGKEVFHIVGFGADGKIAFRRKIKRLALLDTFKDLPSCVVGIEACLSAHFVSRALRQLGHQPKIIPAIYVKPFVKGQKNDYNDAEAIAEAALRPNLRTVREKTQDELDLQALHRVRSRLVSRRTATINQIRAFLIEQGIAIRAGSRALRNSLMAILENRRDEISQRMRSLIVGLYEDWIGLDERIEAIAGEIETIGEKEAHCRRLMSVPGIGPLISTAVVAAIGTGEAFERGRDFGAWLGLVPRQYSTGGRTILGRISKRGSKYLRTLFIQAAKVILMRPHNWERFSFGAWLLNAAPRLHRNKLATALANKLARISWSILRNENVFDVPHHEALAI

SEQ ID NO: 329295 - protein, 354 aa, unidentified
MKENTTIAVDIAKNVFEAAVSVVPGQVRERRRLTRAQLPKWVAQREPSTVVMEACGSAHYFGREFEKQGHKAVLLPPAQVRRYVLRNKTDRTDTMALLEAYRNEDIKPVPVKTEYQQALAWMHRVRTGWKQTRTGRLNAMRGVLRELGITIPVGATKVVPAVVEAVANEKVPPMLRAVLLEAVDEVRQLEKRISAAEDDLVREAKTQPAVGALMTVPGIGILTATALFCAMGEPTRFASGRRFASFLGLVPREHSSGDRRHLGAITKRGDPYIRMLLTHGARSALLAAKRKKSNDRLRTWALSVEQRRGHNRATMALANKMARIAWAIWSRGGRYAPGSDPITDARTNAPIVKG

SEQ ID NO: 329296 - protein, 345 aa, unidentified
MSLYQHVSAVGVDSHKDTLAAAGVDSAGAEVFNVEVPNTLEGMDDLIGRVDDVAVVFGIEGTGGYGRGLCDRLISVGRLVVEVPTRITGRYRAQAGHGKTDKGDAVAIARAVLAERCAGVTHEPVPEALRIVVRQRQTLVGDQTAAVNRIRARLVELDPDTEKTLKRIRGVKMFTRLSQWPDNTPGDPYRAALVSVIRIDGTNCVTRLRQIQALEKAIAQIMPKAGEALQETVGIGLVGAATIIGNTRDIGRFPTEGHYGRYCGTAPLDASSGRQDHHRLNRFGNRDLNTVLQTAILTQLRLSGEAADYTARRMTEGKTKNEAIRAAKRHLTKRVYRTLKKHNLT

SEQ ID NO: 329297 - protein, 341 aa, unidentified
MKKFIRIGVDLAKNYFQVHALESEIGHAVTRKLKRSKMHEFFWQIEPCLIGMEACGSAHYWARELKAMGHEVLLMSPAYTKPYVKRGKNDAVDADAICEAMSRPGMRFVPIKSAESQATLMLHKTRELLIKQRTMSVNALRGHLSEFGIIAAKGIGRVDELLDLAESDATLPNAARASVKVLAQAVEGLDKAIDDLEKEISSAHAQNEMVRLLDKVPGIGKLIASVIAASVPDPSVFKSGRDFAAWLGLTPRQNSSGGKQTLGGITKQGNRYIRKMLVLGATSLLNVVGKRKGALRDWIVGLLAKKPARLVTVALANKLARILWAMMKTGECFRTETFAKA

SEQ ID NO: 329298 - protein, 410 aa, unidentified
MEIVYRCCCGIDVHKESVTACVLWAKEGQQGQEQKRKFNTFTRDLLAMADWLRECGVTHVAMESTGVYWKPVWHILEGQFQLLLVNAQHVKAIPGRKTDRRDSAWLAQLLQHGLVRGSFIPPEPIRELRDLTRYRVTLTQECNRIANRIQKVLEDANLKLASVATDPLGASGRAMLKAIIAGESDVTKLAEMARGLLRRKIPQLQLALEGKVTAHHRFLLGELMADLEFVESRMTRVEAEICRRLESSADTVERLCTVPGIDRVSAWGIISEIGLDMSQFPDARHLASWAGLCPGNWESAGKQKSGRTRKGSAWLRRHLCQSAWGVSTKQNNYLSALFRRLAARRGVKRAIIAVAHSLLVIAYEILKNGVEYHELGVDYFDRLNPVRLTRRLVKRLEGLGFQVMLEARPA

SEQ ID NO: 329299 - protein, 447 aa, unidentified
MKKKAGFPVLYPNAAGIDIASREHYVAVNPDAAEQSIRSFGSFTDDLHEIAAWLLQCKVDTVAMEATGIYWVSLYLILEEAGFEVVLVNAKHVKNVSGKKSDVKDAEWIRQLHSCGLLSKGFQPDHFTRTLRAYMRHRKNLTEMAATHIRMMQKALEQMNIKLQNVIADITGKSGQAIIKAIIDGEHDPQNLVKLLDGRIKATKESICKSLHGIWKTENLFELKQSFDLYHTYQEMIKECDLHIKRHIEEKASYCESDQIQSLYPVKKKYKTNKNNLNFDATDMLQKIVGTDLTEIFGITDTNATEIISEIGLDMSKWPTAKHFTAWLNLAPNNKVSGGKLLSSRVPRKRNKAGQIFKMAAFAVQRSKNWLAIFYNRIKMRSGTSRAVTATARKIAVIFYKLMKEKLRFCPLDRDQYLESFKVRQLKKLKQQATRLGLVLVPDNLVT

SEQ ID NO: 329300 - protein, 393 aa, unidentified
MICVGIDVAKDKHDCFILSSEGEVLADVFTIQNNAEGFDRLLQTIRRCARPEDKMKVGLEATGHYSYNILGFLLNEGLPTYLINPLHTNLYRKSLSLRKTKTDRIDARTIAAMLMSDVDLKPYTDTAYHNEELKSLTRYRFDKVCERAKLKQSVSRLVTILFPELEKLVPTLHMASVYALLSEFPGAKQVAGAHLTHLKAVLYDASRGRYGRDMATTLREAARCSVGSVMPAKSLELQHTIRLIRELDAEIEDIETAIQSMMDEIQSPITTIPGIGVRMGAMILAEIGDFSRFDSPDKILAYAGMSPSTYQSGQLSLSGTYSHMEKRGSRYLRYALYNATKYVCLWNPTFAAYLAKKRAEGKHYNVALSHAAKKLVRLIYAIEKSQKPYCSAA

SEQ ID NO: 329301 - protein, 340 aa, unidentified
MNEITTIGLDVAKNVFQVHGVDAAGSTVLRKQLRRGQVLSFFGRLPRCVVGLEACATAHYWARELGALGHEVRLMPAQYVKAYVKRNKNDATDAEAICEAVQRPTMRFVPGKTAEQQAAVLLHRARERLVRQRTMLVNALRAHLAEFGVIGPQGLRNVGKLITIVRDEGDTRLPKLAHQVLQVFATQIEQVETAVAALEQQLMAWHKSNPVSQRLATIPGIGPIIATAIAATVPEPSGFRSGREFAAWLGLVPRQHSTGGKIRLGGISKRGNQYLRRLLINGASANLLRSKATNADPWVIGLRRRRPSLVVAVALANKTARIAWAVMHRQENYQRMAAAA

SEQ ID NO: 329302 - protein, 370 aa, unidentified
MKKVSRGAGQKEKPAMTIGLDLGDRFSHYCMLNEDGDAIESGRIQTTEEALRRHFAGEPAMRIALECGTHSPWISRLLEQLGHQVIVANARKIRAITASESKNDKNDAEKLARFAFCDPRLLSPLRHRSPERQQDLNLIQARSTLVRARTMIVNALRGLVKSAGGRLPACSPQGFQARVEASIPSALAEAARPLLDQIAALNASIQQMDRGIEQLGNRYPEIPLLRTVPGIGSLIAAAYVLTLDRPDAVQHSRQVCAFLGLRPRQSQSGDSDPQHRISKTGNVYLRSLLVQAAHYVLGRFGPDSELRRWGLKLAASGGKRGKKRALVAVARKLAVILHRIWQTGNAWQAFPLANSNTASNKATNKDLCMA

SEQ ID NO: 329303 - protein, 341 aa, unidentified
MKKTTTISIDLAKNVFQVAVFNKHSKLKSNQKMNEKKMALFVAQHPEANICMEACGSAHHWGRRFLKEGHEVYLVPAHIAAKYRSGNKNDPNDVLAIYEAAQRPDTYFVAVRTLEQQDLACQHKLRQGYVKQRTQLANRIRGFGLEYGVKIPKGIGKLRRRLPEALEDAENELTVTARSILRNLLDQLLLLDQLIKEATEALIHQTQQIAACRELVRMPGIGWLGAGALYARLGNGSAFRRGRDASASIGLVPGHSGTGGHNKIMGITKGGDRYLRALIIHGARSAVSNVRDKQDGLSCWIRKQLAVNHMNNTTVALANKLVRMAWAILSSGGQYREPVAQ

SEQ ID NO: 329304 - protein, 353 aa, unidentified
MRYVGIDLSKHTFSAAYLDENGVLVQQSQFSTDDEGVGVFIGTLGPEDEVAFEAGCGMYRFYDLLVDRIASVKVINTYKFKVIKSSIKKTDANDAMLIARFLRMNELPEVFVVDPEYRIVRELAAFRKKLVSQNTMMRNRINALFQKHGISLERRFLDNRKHRAHLLEIDLPDDVFFQMTICLKAIDLYEESIEEIESKMKAVVTSHKQMYRDVSKLLQIPGIGEISSIIICAEIGGHIERFKTKKEIASYAGLVNRTQQSGQTTRQVSTKRGRPDLKTALIHAVLSQVGRYKNPIVEYYLFKKSEKCVGKAAMASARKLLTGIYIMLKYNKDYYYVEKELYYRKMRDFECIA

SEQ ID NO: 329305 - protein, 425 aa, unidentified
MPYQIAGIDVHKKMLAVVVADVEIDGDFHFKRQKVGTTPADLRRLVDWLVEHEVEEVVMESTAQYWRPVWEALEQHWRPRRRARDAAPPLAGTLHLAQAQSNRGPGGRKKDFPDAERLVKRLVAQELTLSFVPDTEQRLWRTVMRRKYQITRNRVQLHNRLEALLEEAHIKVSSIVSDLLGVSARRMLQALAEGETDPAALAALAASRLRATPAQLCDAFEACPTLHPVYRRLLKLTLEELRVIEDHLGQLDQQMADLLAAHHDAVQRLAEVPGLGVDSAQQIIAEVGATAATFPSPKHLASWMGACPGNEESAGVNYSHRCPKGNRQMRRVLNQAANAAVKAKGTIFAVVYRRIVPRLGHAQAIGAITHRLCRLIWKILHERVRYEERGPAVSVEAKKVRARKMIRELRGLGYRVELVAPSSTV

SEQ ID NO: 329306 - protein, 364 aa, unidentified
MWCLQGQDSTKREGGELEHTPEAVEAWVARLCQRFGNRPIAVALERSRGSLVFMLTKYEPLHLFPVPSTMSASMRKALYPSGSKDDPRDADVLLDLLLQHRNKLRRLSADTEATRRIQNLVEERRKLVDEKTEHTNRLASHLKIYFPQMLNWFEHLDTELVCALLERWPTLEELQKVPPSKLRTFFSKHHCRNQELIEQRILAIHQSIPAIRDRAVIEAKSAAVKVIVQLIRILLEGIADLDERIEEAAAAPPDFFIFKSLPGAGQALAPRLLAAFGSQRERYRNAGEVQTYSGIAPVMEKSGKKQWIHFRCRKMLNPKDRQLLYWRNLANGGDTDNSGELNQMEETRQAQLQAAPNMFPTYTG

SEQ ID NO: 329307 - protein, 385 aa, unidentified
MLAHPTQTQAAARCQAHTLFVSLELSKVRWLVTVSAPASDKLSRYDVPGGDGQALLKLLARLQAAASERTGAPVAIVVIQEAGLDGFWIHRLLVRNGIDSHVVDPASIAVNRRHRRAKTDRIDGVKLVRTLMAWMRGERQVCSMVQPPSPEDEDRRRLTRERARLLKERIQHTNRIKGLLCGQGIPDYDPLHRDRRARLVALTTGDGHSLPERLKTEIGRELDRLEVVVSHLAAVERERDALMAQTIAADPCAAPAALARLRGIGPELASLLWLEALFRPFDNRRQIAAYAGLTPSPWQSGGIDREQGIAKSGNPRLRRAMIELAWFWVRHQPGSALSRWFVERVGTARGRVRRIAIVALARKLLVALWRYVTQGVVPEGAVLKA

SEQ ID NO: 329308 - protein, 450 aa, unidentified
MEILYTNCAGLDVHKKTVKVCLLIHMSDGKTHKEFRTYFTTTEELLKLGDWLKEQGCTHLAFEATGVYWKPVFNLLEGSFEVLVVNAQHIKAVPGRKTDVKDAEWIADLLQHGLLKASFIPSGPQRELRDLTRYRVRLTEEKAREVNRVQKTLEDTNLKLGDVVSDIMGKASRMILHAIADGETDPGRLAALAVGRVRAPQEQLEAALRGHVTDHHRFLLSEHLTQIHHLEQAIERVTAEIVRRFTPSPPEDTPPSQKEEEAEQDLSPVSASLQESPASSPTNLSWAEAVALLCSIPGIGERVAIGILAEIGINMQQFPTAGHLASWAGVCPGNHESAGKRLSGKTRKGNPWLRCLLVQAAHSASHQKQCYLAEQYRRIAKRRGAKRAAIAVAHSILVMIYYLLRNQTTYQEKGETFFEEQERQGAEKRLVRQLSRLGYHVELQPVALAE

SEQ ID NO: 329309 - protein, 340 aa, unidentified
MDKVTTIAVDLGKRAFSAYWVQAETGEIGSRKMTRSKFEEWMRTREPSRVVLEAGGSAHYWGRWLRGLGHEVRLIAPQHVKPFVRTNKTDAGDARAIWEAAQRPEVKWVAVKSEASQAVLALHRMRRQLMTIRRMQSNQLKALLYEFGIVAPAKLTGQMVKEWVAAGRVSELIEASLSEQIERIAELKGQERQLTRRIEQHNESDELARRLREVPGIGRLTASALSAELAAGAQGFANGRQYAACKGIVPRLSGTGGKTRPGAINKRSDPYLRTLLIHGARSVITHQRRGKRLSPWLKGLLERRPMNVVVVALANKMARTAWALAAHGRTYQEHYGAQAA

SEQ ID NO: 329310 - protein, 412 aa, unidentified
MQVVYPRCCGLDVHKRSVVACVLLTREDGTVERAVRTFGTMTAELLALDDWLARLGVAHVALESTGIYWRPVFNLLEDEARTILLVNPQHLKRAPGRKTDVRDSEWLADPLRHGLLRPSFIPPAPIRELRELTRYRKALVQERTQEANRLHKVLETANLKLGVVAADVLGVSGRQMLAALLAGEEDPAALADLARGRLRAKLPALRRALEGRVQPHHRTLIARILAHIDFLEESVAQVQEEIDRCLGPYAAAVELLQTIPGVGATAAATIVSEIGVDTGRFPTAAQLASWAGLCPGNKQSAGKRLSGKPTKGDTWLKAALGEVAWSLARSRGSYLAAQYHRLARRRGKHKAAMAVAHSVLVIAYHLLQTGRPYSDLGAGYFDRLGAERIQHHHVKRLQQLGYEVALTRKEVA

SEQ ID NO: 329311 - protein, 345 aa, unidentified
MAHPAPARVTVGVDTHLDIHVAHAKDALGRRLGTCSIPTTPAGYAELLDWARAFGEVQAWGVEGTGSYGAGLARLLRDQGQVVVEVNRPDRSTRRRRGKSDPLDAEAAARTVQAGEATALPKAGTGQVEMIRCLRVARATAMKARTQAINAIKALLVTAPAELREQLRGLPAARLVATAARLEPDSLASPTAAAKLALCTLARRYQALSSEITTLSSELERLTATAAAPLVALFGVGADSAGALLVAAGDNPDRLHSEAAFSMLCGSSPIQASSGKTTRHRLNRGGDRQANAALYRIVVVRLRHDPTTQDYMARRIKQGKSKREVIRCLKRYVAREVFAALRQIT

SEQ ID NO: 329312 - protein, 341 aa, unidentified
MDHYAGIDVSLECSSVCVVEASGKIVREATVATAPEALIAWFGSLGFAVMRIGLEAGPLSQWLFAAMREGGLAVELLETRHVRDAFRAMPVKTDRNDARGIAQLMRLGWFRPVHCKSLAAQETRALLTARKLLQSKLHDVEMSLRGILRGFGLKVGKTTPKEFEGRIRELVAGHPNLEVIAAALLAVRAVLRREFNAFEKRVRTTARGDARARLLMSTPGVGPIVALTFASAIDDPARFKSSKRVGCHFGMTPRRYKSGETDISGRISKSGDGGVRWVLYEAAHVILTKPVKGGGVKSWAMRLAKRAGMRKAKVALARKLAVIMHRMLADGKPFDFAAAAA

SEQ ID NO: 329313 - protein, 317 aa, unidentified
MAMQAGKLIVGADVAKAELVIHHDDRDEIIRLKNSKLEIRRWLKQQPLNTAIAVEATNVYHLDLVELAHSLGFEVYVIDGFQLSNYRKGVGGRVKTDPSDARLLSRFLRNEGEDLRPWTPPPAVYGKLQSLLRRRAALVTARTAMTQSWANETLLKAAFETFVKSIDRLDQLIQKKIKEVLREAGLQEQVARCQAVEGIGFLTAAALVMAFMRGEFKSSDSYIAFLGMDLRVSDSGQKNGRRRLTKRGCSEIRRLLHNAAMAASRSAAWKELYEQHRNAGKATTQALVILARKLARVAFALMKNQDEYVTKGGKLAC

SEQ ID NO: 329314 - protein, 344 aa, unidentified
MGEVITIGLDVAKSVFQVHGVDGLGVVVIRKRVSRAKMLEFFAGLPRYLIGIEACPAAHHWARELQAIGHTVRLMPPSYVKAYLKRSKNDANDAAAICEAVTRPSMRFVAVKTKEQQAALMLHRARQLLVRQRTMLSNAIRGHLSELGIVSAKGRNGTDELLEIIGKDADSRIPLAARSVLKVLASQYVAIGVEIASISKSILAWHRACEPSRRLEEIPGIGPIVATALVAEISDWMAFSSGRGLAAWIGLVPKQHTTGGKDKLGSITKQGNRYLRWLLVNGAMAVIRYAQKHGTKKHPWLGQLMARRPTKVAAVALANKIARITWAIMVRGDRYREPALMPAA

SEQ ID NO: 329315 - protein, 343 aa, unidentified
MKLQALGIDLAKNVFHLVGLDSSGQVVIRKRCSRRQVLAFTANVEVQVIGMEACSGAHFLGRALREQGHEVRLMPAQYVKPYVQTNKSDYIDAEAIAEAVQRPRMRFVPIKTEEQLDLQALHRVRERWVMRRTAVVNQIRSLLLERGLTLAKGRRHLEQALPRILEDAELKLSGMFRALLAQLKLELEQLAVRIEQMDTEIQRVACENEACQRLTAIPGVGPVTATALVGAIGNGSTFGRGRDLSAWMGIVPGEYSTGGKQKLLGISKRGNKYLRRLFVQGARSVLQHREKQVPALSRWLAGLLGRTHQNVVIVALANKLVRMAWAVLCKNECYRAPVLAATP

SEQ ID NO: 329316 - protein, 343 aa, unidentified
MKDTTYDHYLAIDWSIKNMAIARMTKKSNKITAIDVPSDIEDLQAYLKNLRGTKILAIEETTTSQWLYTELKEYVDRLFICDPSRNKLLNEGPKTDKIDASKLVQLLKAGLMKEVYHSTDKFLYLRRVVSGYEDLVKAGVRLKNQRYALLRACGKNGKEKAGSPIDSQGEQFVLECLDRQIEAYEEEKVGYEKEFERLARKNLEIKHQKSLPGIGAINAVKIVARVVTPHRFPDKGHYLSYAGLIKLEKISGGRSYGKKNPRYSRQLKSVYKSGVLAAIGGNNPINDYYEHLIQEAGDPEHNARQKACRRLAILSLGVFKSGKKYQPFRRNDVKSSKEGTSGL

SEQ ID NO: 329317 - protein, 386 aa, unidentified
MTLINFVAANQKYYAFNLLSVFIMVFWSVQYLLQHLLVQTQLSDQLLQRLILILQLPQTPQFRHARPGKFFLPVNGMDYLLPLRLTVRNVLTRRITMNIVFLGIDLAKNVFQLCGLNQAGKPVYTKRTGRKELLQTLANIPACLIGIEASTGAFYWQREFEKLGHKVKVISPQYVKPFVRGQKNDGNDAQAIAVALMQPTMQFVPPKSPEQQDIQALHRARQRIVNHRTATVCQIRGLLLDRGIPIGSAVSRARRAIPLILEDAENGLSSRMRRTIAELYDLFNDLERRIHFFDKEIETVFRQSEACQRIAKVKGIGPKTATAVAAAIGKGTEFKNGRHFAAWLGLVPRQHSSGDRQVLMNMTKKAISICGHFYSWCPRCRQGCHE

SEQ ID NO: 329318 - protein, 323 aa, unidentified
MSPVVGIDVAKHSFDLAIDLANGKYRTKAKLPNDPKGFQTLRTWLQPHAQADSWIVMEATGTYHEALAEFVHALGYQVCVLNPAQMALYARSQLTRVKTDRSDAKLIASYGLRHASQLRPWQPDPPALKHLKALVRRRDDLLQMLQMERNRLDVAAPVVRDSLLETIGQLQANIAQIERAIDDQIDQDPTLRGQRELLVSIDGIADRSAALLLAELGDVERFSQASAVTAFAGLNPRLQESGKRKGQVCISRTGSPRLRAGLFLPALVAMTHNPVVRALKQRLRERGKANKQIICAAMRKLLHIAYGVLKSRTPFDPHKALAW

SEQ ID NO: 329319 - protein, 340 aa, unidentified
MTVIIGIDPHKASHTAVAIGCDEQQLSEIRVRATCQQTAKLLAWAEPLGERTWAVESAGGLGYLLSQQLVNAGEEVLDVPATLASRVRVLSTGHSNKNDPNDALSVAIAALRSPGLRSVEPANHTEVLRLLAKRNHEIGRLRNIVVSRLHAALANLSPGGIAKELNASDAVRLLGDFNPKTAVERTRYDLALELLDDVRRLDVQLKESHKRIKTAVQASGTTLTELYGVGPILACELIGYTGDVRRFTSRDKFASYAGVAPIELSSGGRIVHRLSRRGNRQLNHAIHMVAICQIRQTNSEGRAYFERKVAEGKTKREAIRSLKRHVANAVYRQLLVDANK

SEQ ID NO: 329320 - protein, 326 aa, unidentified
MNPQGGVASEVARLNVGIDVSKQFLDACWGTREERFGNDSPGWDGLITKLRQADVDLVVIEATGGYERGLLCALQGAGIDVARVNPRQTRDFAKSMGVLAKTDRVDARVLRDFADVVARHKERHKYITLASTPEREQLAAMMVRRRQLVDMQVAEHNRLDLANARAARSIRSVLKTLEKQLADMDRDVDDHLNRHFKQQSKLLDSVKGVGPVTILTLTSCLPELGRLDRRAIAKLVGVAPLADDSGHRKGPRRTWGGRAEVRAVVYMATLTATSHNPVIKAFYQRLLAAGKLKKVALVACMRKMLTILNAMLRDQSAWNPLRHAQS

SEQ ID NO: 329321 - protein, 450 aa, unidentified
MKQSPPRRHGKRPASGLSLLERINPNAAGIDCGAEEHYVAVPADRDPAPVRAFKTFTAELHRLADWLTACGVTTVAMESTGVYWIPLYEILEARGLDVVLVNARHVKNVPGRKSDVVDCQWLQELQSVGLLRGSFRPAAALAALRAYLRHRDTLVQSAATHIHRMQKALVQMNLQLTVVLSDITGVTGLRIIRDIIAGQTDPHRLAQHRDARCQASEADIIAALTGHYRPEHLFVLQQNLELFDMYHRQLAACDAAIEAHVAMLAAQAPPPAGPLPPPRTKTKPKARDNAPRFDIRTPLHQLTGVDLSQIDALGPYSALRLLAEIGTDMTRWPTEKHFTSWLTLAPHNKISGGRLLSAKTPPSANRVGAFYRRLAYRVGKAKAITATARKLAILVYRSLKEGLLYQDPGAAAYDAQHRQRVIRRLRQRAAQLGFALINRTTGQVLEGAVS

SEQ ID NO: 329322 - protein, 350 aa, unidentified
MYAITIGLDIAKNVFQVHGEASGAVVVTKRLRRGQMDEFFAKLPRSLIGMEACGSAHYWARTLKALGHEVRLIPAAYVKPFVRRNKTDARDAAAICRALTQPDMRFVPIKTVAQQAARGLERSRDLLVKQRTQLMNSVRSQVAELGIVAAQGLRGFSDLKALLEAGDEEVPPVLLSALRLLVRQVDQLATAILILEKQIVARARQDATMRRLTTIPGVGPLTAHAIVTAIGDGKQFASGRDFAAWCGLTRRVDQSADKRRERGISRQGEMRLRKLLALGASTIMRHVRSVPERATEWQHGILARRPVKVAVVAQAARNARIAWAMLQSGQAYRRPASTTAAPATNAVLAG

SEQ ID NO: 329323 - protein, 348 aa, unidentified
MEHIGIDVHKNSCQVCVLTEDGELIERRIKTDRSSLDLLFKDRPRARILIESSTESEWVARCLEQLGHEVIVADPNFAQMYATRSKKVKTDKRDARTLCEACRLGAYRPAHRTSDKQRDVRAHLAVRETMVRTRSKYISLIGALARREGCRIKSGVSRSFVTRVEQAGLPQHVLLEIDPLLIMLKSLNEQIKLADEKLAEIVKDDEVVKRLTSVPGVGPVTATTYAATLDGAARFKDARQVRSYLGLVPREHSSGEKQHRGRISKAGNSRARALLVEAAWALLRWKTPKTQALHEWATRIATRRGKATAVVALARKMAGILFAIWRDGTEFNPEHLAGRSSAGAVVGG

SEQ ID NO: 329324 - protein, 407 aa, unidentified
MRLFVGDDWAEDHHDIEVMDETGRVLAKKRLAEGAAGIARLHALIGRYLPGDVADAEVVVGIETDRGPWVAALIAAGYTVFPVNPMQACRYRERHGVSGAKSDGGDAHMLADMVRTDWHQLRPAAGDSPQAEAVKVVARTHKTLIWDRTRAVQRLRHQLREYFPAALEAFEDLDAPDALELLAKAPDPAQAAKLTRAQVSAALKRARRRNIAGKTGVILAALRGEYLGQPPALTAAYAATARSLIAVITALNEQVTTLEQQVREHFGQHPDAKIYQSQPGLAAILGARVLGEFGDDPHRYADAKSRKNYGGTSPITRASGKKKVVAARFIRNSRLTDALMAWAFASLNASPGARAFYDRQRAKGIEHNDALRRLANRLVGILHGCLKTRTCYDEAAAWSHREPSLAA

SEQ ID NO: 329325 - protein, 346 aa, unidentified
MMIIGCDYHPSWQQICWVDTVTGETGEKKLEHASGEAEKFYRGLSGAALIGMESTGNCQWFVEMAAATGHDLWIGDAAKIRACDVRAQKHDRRDAALILKLLLEGRFPRIWVPSSQEKDLRQLLIHRYKLVRIRAQVKNELQHLAMNQGITKKRRLWSKAGEKVLRELPLGPWTSRRREDLFKVREMLSAQIDLLDQAVVEVAEKNEKAKLLMTQPGVGPITSMAFVLTMGDVSRFQRGKQVASYLGLIPREYSSGGHQRFGSISKQGNWFMRMLLVEAAQNAVRYDPGFRNEYLHRCHNKAKGVAKVAAARKLAIRLYWMLRTNSGYPGVVRVESSSRVPLVSAS

SEQ ID NO: 329326 - protein, 448 aa, unidentified
MREPQLIDDAEHERVFERVAAIDVGKAAGVVCTRAAHPSRPGARRSTVWTVPALMGAVRALAAQLAGQGIEKVTLESTSDYWRIWFYLLEEAGLDVQLVAASQARQLSGRPKTDRLDAMWLARLTEKGLLRASFAPPPQIRVLRHYTRARTHLTQDRTRCYQRLEKLLEDALIKVSAVASKLTTASARDMIAALIAGEQDPQVLASLARGRMKAKHAALADALTGAFADHHSELAQLLLDQITFIDERISQLSARISAQLAQIREAWGIGADGTTGPDAGTGPGAAALPAAARLDEIPGISLEMAAAIIAETGLDMTRFPTPGHLVSWAGLCPRALQSGPRSRQAKNQGSSYLRSQLGQAATGAAKTTTFLGERHRRIARRRGGAKAQVAVARSILVIIWHLLADPAARFSDLGPSYYESKIDKNRQARSHIRQLQALGYTVTLTPAA

SEQ ID NO: 329327 - protein, 355 aa, unidentified
MDNLRYIGLDIHRDTISAVVLNREGQLIMQSVLPTRAPALLDFLHGIRGTLHVTFEEGVHSAWLYDLLQPRVARVLVCDPRKTRLLKSGNKGDLIDARKLAELLRNNSLSPVYHGEMSTLEVQQRTRCYTMLTEDTTRIMSRLKAVYRSQAIHYQGRSVFRPDRRESYLAQLPTAGLRLRAELLYKELDAVHRLRLRAKREMLAECRKHPAIKSLRSVPFLGKVRTAVLIGRVQTPHRFRTKRQFWSYCGLALETHDSAQYHVVHGQVERKPRSVQVRGLNWNHSHELKDVFKSAATMATNRDGIFREFYTGLLDKGMRPEMARLTLARKIAAITLKIWKEGGTFNAEYIKPQAA

SEQ ID NO: 329328 - protein, 351 aa, unidentified
MHMLADTVELVIGVDTHKHTHTAAVVAATTGAMLQQLTVPATPAGYQQLLELADRHDGRRVWAIESTGGDGAGLTRFLHAHAEQVVELDRPKRAARRHGAKSDSLDATRAAREALGRDQLAQPRAAGHRAALSVRLAARRSAVQASTDAQRQLHALVVAAPDALRSRLRDLTTPRLVSTCGRLRQRVNGDPETAATAASLRALARRIQVLNAEIADHTRAITTLVRAWRPDLLSRTGVGPIVAAIVLCAWSHPGRCPSDAAFAMLGGAAPIPASSGQTVRVRLNRSGDRQLNQALHVVVLTRLRYDPATRAYAQRRRAEGKTNREIRRCLVRYVARQLYRLLEANPRFDPT

SEQ ID NO: 329329 - protein, 402 aa, unidentified
MWYAGIDWANEHHDSLVIDEKGGQVGTLRVDHSPQGISRLNTFLEQIIGAESKEQMACIIETTHGLLIAHLLEAGWPVYPVNPRTVDRRRAASGAKTDTIDAYLLAKTGRADLADLHRLTPDSEKIAELKLLTRDQDALIQMQTRLVNQLTACLKAYYPVALELFAKLQQKSTLRFLQTYPTPQAAMAVSAEQIQEVLRQAKHSNPTPVAVKIFERLHQPHLQADAVITRTKSRLMLVSQLVPLIEQIAQYDKEIETLFLTHEDHEIFASLPRAGKRLAPRLLAEIGDDRKRYQDASSLQALGGTSPVLFQSGMYSKAHRRLGCIKPLRNALHQFAWQTTQSEPWAMQYYQRKRAEGKSHTVAVRALANVWVRIIFALWFHHRCYAASTFETAQQQHARRAA

SEQ ID NO: 329330 - protein, 339 aa, unidentified
MFYSGIDQHKLFSYITTVDSDGIIIKEAKLNNNNFEILNYFNSIGKDHIATVETTGGWYWMNDLLSSQGINLTLAHAKYLKAISYAKVKTDKVDSHILAQLLRLNFIPEAYKIPYDIRTLRDTLRARLRLSVKRTSCLNFMHRMLEKFNISVPSLLNSFYKLQYQQFDVQSKLLKEQMLTLEKSLYPSLIPNEDIQRMLWIPGIGKMNAFTILLEIGDIYRFPSEKNFFSYCRLVPSARNSGGKVKQKSSSKDGNKYLKIVFSDAAVHALQYYPVIKKYYNSKLRKKNKQVAKAIISKEIARIVYHVLKNKSEFNNQFKGIELEHKKSVQWPRITSPDV

SEQ ID NO: 329331 - protein, 347 aa, unidentified
MRFYNRQHRHYCGIDLHVKTMYICILDSAGQVLVHRNVKSTPEAFLEIVTPYRADLVVAAECMFTWYWLADVCAAEGIPFVLGHALAMKAIHGGKAKNDKIDSHKIAGLLRGGLLPQAYVYPAVMRSTRDLLRRRLHLVRKRGQLLAHIQNTRAQYQLPEFGRRLAYPANRAGISEHFLDPSVRTSVDVDLALIAQYDHLITDLELTIVRHAKRHDADAFHRLRSVPGIGKILALTILYEIHDITRFDRVQEFASYARLVKCTHQSAGRTYGTGGAKMGNVHLKWAFSEAAVLYLRHAPGGKKLLAEIEKKHGKGKALSILAHKIGRAVFYMLARGTVFSMDRFRAA

SEQ ID NO: 329332 - protein, 347 aa, unidentified
MRFYNQQHTYYCGIDLHVKTMYICILDATGQVLVHRNVSSTPAAFLETIAPYRTDLVVAVECMFTWYWLADVCAAEAITFVLGHALAMKAIHGGKAKNDKIDSHKIAVLLRGGMLPQAYVYPAAMRSTRDLLRRRLPLVRKRGQLLAHIQNTRAQYNLPAFEKRLAYPGNRDGVVEHFPDLSVRKSIEVDVTLIDQYDALVNDLELTIVREAKRHDGDAFHRLRSVPGIGKILALTILYEIHDITRFDRVQEFASYARLIKCTHQSAGKKLGTGGAKMGNVHLKWAFSEAAVLFLRHTTEGKKILARLEKKHGKGKALSILAHKIGRAVYYMLSRGTVFSMEKFLAA

SEQ ID NO: 329333 - protein, 339 aa, unidentified
MTVKTVGLDLAKDVFQAHGISESGRVIFNNAIKRAKLLAFFEALPPCMVGMEAFGSAHHWGRTLRKFGHDVRLMPANYVKPYVKRGKTDAVDAEAICEAVRRPTMRFVEIKTEDQQAILSIHRTRDLAVRQRTQLANMIRSLLREFGHILPIGIEAVTAFAKRHLDGDHPDMPEIANGMLGIQCYQFIGLNERVEGYSKMIEQHALLNADARRLMRMPGIGPITASAIVATIGDAKQFRTGRDLAAWLRLTPLNKSSGGKERLGKITKAGDRYIRKILVVGMTSRAVMAKRSPEKVDLWTAKIIAEKPFRLATVAMANKAARSIWAMLTKKQEYRQPAF

SEQ ID NO: 329334 - protein, 391 aa, unidentified
MESAQMLQPVFVPREFEVFAGLDVDKTRIAVTFTDHNRLLKSLQMPYSSQHLLNYTRKHFADRRVAFVYEAGPTGFGLHDDLLAAGHRCLVVAPSMVPRAPGQRVKTNRIDSRKLSEGLRGGQLNSIHVPSLAYRHLRHLVQLRDSHVRQMMAAKYRIKALLLYEGIPFPEAPASNQWSARVLQELGTLPCTSAVGFKLNSLVASLYFHKLEAAATQKQIRRFCQQDPELSRSIRYLTTIPGIGWIVASHLVARLGDWRQIRNVRQIASFLGLVSWEHSTGDQVQRGSITRTGDVRLRNKLVETAWTAVRKDPELEQFYRRIYQRHPRPIAARKAIVAVARKLTTRIYSVLKQQRPFRLKTVIAQAPLTPEETACPRGRLDQPQNEGTHGS

SEQ ID NO: 329335 - protein, 348 aa, unidentified
MIWIGVDAHKRLHEAVALSESGVMGSRRIRNDPPQWAALLDWARQWPERVWAVEGAGYLGRGLAQFLVEHGEEVHEVSGKWTARRRRGMRRPGKSDRLDAHSVATLLREERTALPRVYAEDDELASVQLWSRLEQEFSEDRTRILNRLHNLLLLCDPGYTAGLPALTTKAGIAAARTYTAPGTRSVAREREQAVRASAEQVALLDAQIAALRRKLGRASRSSFRALRAIEGVGPQIACTIVAELGAPRPGFGDEQLAALAGVAPLEASSAGATRHRLNRGGNRRLNLALHRIVLTQARMYEPARVYLARRRAEGRTAREARRALKRLICRRIIQAWRACFEQPLAPAA

SEQ ID NO: 329336 - protein, 475 aa, unidentified
MSKSKRTRGSGKSSAGSEVKVRYEDGLNRISSHAAGIDVGSEEHWVCVPYSGGDAAERVRRFGALTCDLLAIRDWLKERGVTTVAMESTGVYWIALYQILEEAGLDVWLVNARYIRRVPGRPKTDRLDCEWIQRLHSYGLMRRSFRPSDDICAIRSLWRYRDRLIDQWSRCVKQIQKALHEMNVLLHKAVSDITGRTGTAILEAIVQGERDPVRLARFRDPRVKATESELAEALRGDFREELVLIVASALRHLRFAESEIATLDAHIEQRMGGLQPRSTDIGEAELVSTELKRNTHRHAPEFDAVHLVQRLYGVPLGEVPGLSATTLTGILSEVGLDLSRWENAKHFGSWLSLSPSARISGGRIIASARTARTGNRAGRYFRQAASSLKHNDTPLGQFYRRMRARNGTKHAIVATARKLAEIFYTMVATGSPYRYLDNSEYDRKLREMQIRNLRRRAAKLGLELKEAEPQKSKTV

SEQ ID NO: 329337 - protein, 384 aa, unidentified
MCFIKNNKRFGKVKKIDHDIEGFKRLLEDIQKLEAATNEKVCAVFEATGVYTKPLERFLSKNSIKIYIINPLESARKRKEEIHNKKTDKLDPISISKVYYDKEEMMELKKKDETYNWLRKKNRLYEDQLNHLRKYKVTFQNQLSICFPGYLDLFKDGYSDIPMTILKKYPHPDLLKNKKAETVARYLEKNTCHTHKVSLEYALKIIEFAKKTYPGCEKDDVEVEIFKILLDKVIETQRECEKTLNEMITVASTLEEYRYISSIDGIGPNLAARIIAEIGDIEEFKSREALVAYAGLDPHIYQSGDQDGKHLKISKKGNKYLRCLLFLAVGCSIRGAKDNPVNRFYQKKKQQSNPLNSKAAKTACTAKLLKIIYGICKNKTTYER

SEQ ID NO: 329338 - protein, 343 aa, unidentified
MKLSYLGVDLAKNVFQLHGVDRRGKACWRRRLRRGQWLKVLLETVEPGCVIGMEACSGAHHWARLLQAKGFTVRLIAPQFVKPFVKSNKNDRNDAEAICEALMRPSMRFVAVKTVVQQDIQALHRVRADLMKRRNAKVSQIRGLVAEYGLVAPQTVCPLRMAIPAWLEDAENGLTGRFRWLLHRLWDDLQHLEQRLGKLDREIQAIANEDPVAQRLQQLRGVGPLVATALIATVGDGSQFKKGRQMAAALGLTPRQHSTGDKRRLLGISKRGDAYLRTVLIHGARAVVSQARHRDDPLSRWVTAIAQRSHTNVAAVALANKTARMAWAMPRQGTDYNPQLAVA

SEQ ID NO: 329339 - protein, 388 aa, unidentified
MQNVADQSVAPTTIGADLYAIFISLELSRSTWLATSLSPGRGEKMSKHSVSGGDIAALLARFSELRRKACARTGKSFPIVVIQEAGLDGFWIHRVLMSEGIESHVVDAASIATSRRRRRAKTDRIDGETLLRALLAHKRGEPRVCSMVRAPTPEDEDRRRICRERKVLIMERVQHVNRIKGLLFSQGASGYEPLRRDRRARLDALQTGDGRRLPQHLKAQVCRELDRLELLLEQIKAVEAERDALLNTEQTKASAPPPMLLGVHGVGPEFASVLWSEGLSRHFDNRRQVAAYAGLAPTPWQSGSVNREQGISQSGNPRLRTTMIQLAWLWLRHQPRSALTLWFQDRINRNGGRRRKTTIVALARKLLVALWKYVSAGVVIEGAMIRPT

SEQ ID NO: 329340 - protein, 355 aa, unidentified
MLYSGIDLHRDNSMITTINDSGTIINQQKLPNDELDILNYFFSMGNEHRAVVEATANWYWLSDLLNDHGIDLILAHAKYLKAISYAKVKTDKVDSQTLANLLRIDMIPTAHQIAPALRGLRDLMRARLKLVQKNTSCQNSIHRLMGKYNLTIPDDRKLHDLSTLDTLNDLPIPAEALLQLELHKEQMRLLHRQINDLEKSLHPKLIPNPDIQRLLWIPGIGKILAFTIYLEIDGMERFPDVNKFFSYCRLVPGADNSNRKVKHKSGNKDGNRYLKMAFTEASVRAVQYFSEIKAFYQSKERKKHKAIAKTLVAQELAKICYHVLSTKTDFNHTFKGKTLSRRKSMQWPRLASPGV

SEQ ID NO: 329341 - protein, 340 aa, unidentified
MEQYVGLDVSLEETAVCVLDSAGKIVWRGRCSSDPEAIARIVRERAPFAVRIGLVTGQLSTWLVHSLRHLGLPVVCLDARHAKAALSLQVNKTDDNDAHGLAQIVRTGWYREVAVKSMDSQAVRVLLMARAQLISQRQATANQIRGLLKTFGLMVGQAGGSRFAVRVRELVPEHPVLVAIVEPLLTVWQTLREQVAELDRQVRMRVREDAAARRLMTAPGVGAGVALAYTAVIDDPARFAKSASVGAYLGLTPRRYQSGEVDYDGHISRCGDGLLRSYLFEAANVLLSRITRPSWLKTWGQTLTQRIGARKAKVAVARKLAVVLHRMWRDNTEFRWEPAR

SEQ ID NO: 329342 - protein, 388 aa, unidentified
MKRYFGTDVHDTFLQVYVVNEDGEVEGESRVEREPDALLEWAQGLTRQDSVLMEASGSVWVLYDLLVQYAGNVVVGDPKKMKVIAETAFKTDRRDAKWMAILLRAGLVAQVMVPCERERYLRGVVGQRVGRVQSATESKNRIRSYLKGWGHQPPKGLFTEAGARWMDELTLTPDQRWMLTRERAQLAFLEGETEAFDQKLCEEAVMDEAALRLMMVAGINGVNAMTIMAQIGSIGRFGGPKHLSAYAGLAPRVSQSGGHRVYGRLAPGRKLLRWALIEAANTAVKHDAKLGAFYEKLKAKKCHAKAIAAAARKLAVIIWHILHENAIYQGLDREMLWNKLTVLATKAQVRTRGERPQDFKKRIYQLITGEEWRGVAGALEVEAAAPAA

SEQ ID NO: 329343 - protein, 352 aa, unidentified
MAKQVRKVYGGVDTHGRTHHAAAIDGTGRVLGDREFPATPVGYRKLISWFGQLGDVAKVGIEGTGSYGAGLARAMAEANMQIVEVDRPDRRARRRMGKSDPLDALAAARAALSGEAAGTPKTRSGPVEAIRALRVARRGAIKARTAAFNQLHGVIVSAPAGLRAALAELRGQQLVDRCAAFRIDDDRIDDPTTATKAALRAIARRIIALQDEIQAADRRLAPLTTAVAPRTAAIFGVGAEVAGQMLVTAGDNPERLRSEAAFAHLCAAAPIPASSGRTDRHRLNRGGDRAANTALYMVVVTRMRRHQPTRAYVARRTAQGLSKSDIMRCLKRFVVREIYHAIRADFEAAHAT

SEQ ID NO: 329344 - protein, 411 aa, unidentified
MSAQKARFVALDVHKSYVMVGAVDAEQEIVLHPRRVAFNGFESWINKHLRPSDELVLEATTNAWLVHDMLEPLVGRVAVAHPYHVKLISAATVKTDKRDTLALAKLLAAKMIPEVWVPPHHVRELRALIAHRKRLISQRTAAKNRLHSILHRHNLVPPSGRPFADDNRSWWDDLTLPSSEKLRLRQDWTIIEHLTDLIAEVELELTHLSVSPDWVDRVPFLIQLPGIGLLTAMTILSATGDISRFSSAKKRVGYAGLGGRIHASGNIHHTGSITKQGRKELRSALVEAAWITIKNHPYWLAQFQRLEIKKGSKKAIVAIARKLLVVIWNVLTAHASDRRAEPELVAKYLMNWASQHGLSNQLLGIRRPLFVRQQLDRLGIGQDLQGFKWGSTYFKLPPSSLIQQSPQPMVA

SEQ ID NO: 329345 - protein, 325 aa, unidentified
MKQVGIDIGKEKVDVCLLDEERQATTISLPNTKSGINQLHQWLKKQGAQQAHVCLEATGVYGELLAEEMHQRGYVVSVVNPARIKAYAASQMRRNKTDELDAALIADYCRTQEPAAWSPPVPEVKALRTLVRHLNRLKQEKRRAKNRLATQKDRTVSQHLKQQVNLLDKQIAQTEQAIRQHLDHHPDLKKDRDLLDSIPGIGHLTACVLLAELADVRRFDDVRELVAFVGLNPRQYQSGRNQATHSISRMGNASLRAALYMPAIVAKQHNPRLNVWAETLSRRGLTGKQVIVAVMRKLLHLAYGILKSGQPFDPHYQSAKLLATP

SEQ ID NO: 329346 - protein, 376 aa, unidentified
MNKCHSNTELSSHEGTRSQFNGGECAIKSAVGRMRPVCALGIDVHQDFYVVVEQVDGTNPKPPQRFPKRAFLRWAARLKENTGAEVHAVYEACGFGFSLQRQLSSLGVQCHVVCPQKLDEQNRRVKTDGLDAKALVLKLDRFVQGNRSALALVRVPTEEEEQKRAIHRQREQLVKARKQLEAQGRSLMVNHGLEPVQSWWKPRAFAALPVPQWMKELLANSQPILVALQQKIASLTIQLQSSATPKQPRGLGLMTSVIIDREIGDWRRFSNRRQIGSYTGLCPGEYSSGNTRLQSCVTKHGNPRLRAALVELAWRLVRFQPNYKPIVKWRQILAKGALATGAARKKAIVAVARQLAVDLWRIKTGRLRAEELGLIN

SEQ ID NO: 329347 - protein, 359 aa, unidentified
MIVIGIDPHMKTHTAVAVEAASGRTLAEKTVAADAQGHEQLLLWARGLGPERCFALEDCRHLTGRLERHLLPRGERLVRVPPKLMAGARSSARSYGKSDPIDAAAVARAALREPDLPVAVLAGPEQEVRLLADHRDDLVGERGRIQKRLRWHLHDLELGLELPPRVLGRYVWLERVEAALHGLPPSTRRRIALEQVRRCRELTAEVRALEREIRSLMRSLAPELLALPGCSALLAAQLVGQVAGAGRFSGEAAFAMHAGTAPLPVSSGKSTRHRLSRCGNRRVNAAIHMIAITQARMHPPAIAFMERKQGEGMSSREARRCLKRYIARTVYRAMLRSEQARAGDVVQAEFGAEELAVAV

SEQ ID NO: 329348 - protein, 316 aa, unidentified
MAMRVSKSIVGVDVAKVELVIYEPNQDLLTSITNEKPAIKRWLKTLPRPIAIAVEATNVYHIDLVELAYEAGLDVYIIDGYQLSNYRKRVGVRSKTDACDARLLARYLKNEGEDLRPWTPPPAVYGKLQSLLRRRASLVQAKTSLTQSWANDASLKAVFATFLKSVERLELLVQKKLKDVLREAGLLEEVARCQAIEGIGFLTATALVMAYSRGDFNSGDSFIAFLGMDLRVSDSGQKNGRRSLSKRGCSEVRRLLHNAAMSASRSIAWKEFYNKHMGSGKATTQVLVMLGRKLARIAFSLMKNQSEYQPKGGILA

SEQ ID NO: 329349 - protein, 422 aa, unidentified
MPYTIAGIDVHKKKLAVVVADVEVEDEYQFERRWYGSNPEQLRLLTEWLIEKHVEEIVLESTAQYWKPVWEVLERYWKPQCQRREVGQMSGTLHLAQALSNRGRRGRKRDFRDAERLVKRLLSQELTLSFVPDTEQRLWRTVTRTKHQLRRNRVRLQNQLEALLEEAHIKLSSLVSDLLGLSARRMLKALADGETDPGALAALAHERLRATPAQLCDALGACAELNPLYRRLVKMALEDLQLIEQQIGQLDQEIASLLRQHQDAVERLAEVPGLGADSAQQIIAEVGAKAATFVSAKNLSSWVGACPGEEESAGVNRSRRSPKGNRQMRRILNQAANAAVKHRGSIFEILYRRFVPRLGHNKTIGVIAHRLCKLIWIILHNGVRYEERGPAVSKKSRRLRTARMIRKLRILGYRVEPLGNPA

SEQ ID NO: 329350 - protein, 368 aa, unidentified
MNTVKFIGMDVHKKTITIAIMNEGRQKQPRIYGAIANQLEALDKFCRKMLSTSTRLHFVYEAGPCGYGIYRHLTEKGFDCMVAAPSLIPKKNGDRIKNDHRDAVMLARLHRAGELTAVYVPDAQDEAMRDLTRAREDAVMATRKAKQRLNAFLLRNGLTFPGRSKWSNAFFNWLADIAMNYPAQQIALQEYIASVHENQNRINRLTDQIRQLVPAWRLAPVVSALQAARGVSLVVAVTVLAELGDLSRFDKPSQLMAYLGLVPSEHSSGQSIKRGAITKTGNSHARKVLVEAAWAYRMQARNSRLLLNRQRGLPEAVCQLAWNAQLRLCARFRRLAAKGKPKQKVVTGIARELSAFLWAIAKQLQPVV

SEQ ID NO: 329351 - protein, 350 aa, unidentified
MVDVAMDLHKRHSQVATLDEWGEIRELRIEHDGDSREMEKFLDGLEAGSRIAIEATSNWWWVVDLAEKHGHEVVLSNPKKTRLIADACLKNDRVDTDQLLHLLRLGYLPRVWIPPAPLRYGKEVLRYRALLVHMRTGLKNHLGALLTKRNLKGPGKYLWSKPGQAYLEKLELNAEAGEIRHQTLALRKTLDALIGRWDQELGQRVRSGERVRQLQTAPGVGAQTAFAYRVFVGDVSRFRSGKQVAKYFGLVPRERSSGEQRHLGHITKEGDGLMRTLLVEAALRATRKAGPLREGYRRMVRHKGKAKARVAVARKLAVILYQMWKKDLTYGEFLQREAQFAGGLGNAVGH

SEQ ID NO: 329352 - protein, 433 aa, unidentified
MDSSPPYDLIVGLDRSDRKADLHLIQTATGQRRSQTIDTSPEALWEWLLQLRQQHPQARLALCLEQPAAHLIAFLEAYDGITLYPINPITLQKYREAFVTSRAKDDAKDALYLAELLLNHHDKLKAWAPEDSQTRAVQQLVFHRRAVVDERTGLTNRLKALLKQYFPQALLLCGEDLWRPLATRFLLKWTSLQVVQKTKPATLKQFYHLNGSRSAKLMERRLALIQKAVPVTDDKAILDSFALRVQLICRQLQDVVTTIKTFDLRIAQAFKEHEDHQIFSSLPGAGPVLAPRLLATLGSQRERYDKAANLQHYTGIAPVTKQSGGKCHIHRRYLCPKFHRQSFHEYAKESVLWSRWAAAYYLQQRTKGSPHHTAVRALAYKWQRIIFRCWQNRKPYEEKTYEAALRKANSPLLTLLDKVELGKSPYKNHVNKN

SEQ ID NO: 329353 - protein, 391 aa, unidentified
MIYIGIDVAKDKHDCFITNSDSEVLFKAFTIFNNLDGFNDLYQKIESVMDDVTKVKVGLEATGHYSYNLLGYLIDKGLPTYVINPLHTNLYRKSLSLRQTKTDKVDARTIASMLMSDVNLKAYSDTSNHNEELKSLTRYRFDKVKERAKLKTSVSRLVCILFPELEKLVPTLHMASVYALLSEFPSAKHVATAHLTRLTNLLSESSKGRYGKDTAITFRDSARASIGSNMPAKSFELKHTIKLIQELDSEIDEIENEIKIIMDEINSPILSIPGINYRMGAMIIAEIGDFNRFDSPDKILAYAGFSPSTYQSGQLDGAYAHMEKRGSRYLRYALYNATKYVCHWDPTFAAYLAKKRAEGKHYNVAISHAVKKLVRVIYHLEKTKQQYIKAA

SEQ ID NO: 329354 - protein, 313 aa, unidentified
MSPNSQNILYVGLDVAKLSLQLHLAGRFHVLANDAKGHAQLLKRLRGQPPAHVVCEATGGYEQAVVRVLQAAVVPVSIVEAGRVRYFARAQGRRAKTDPIDAAVLSEYGATFRPRPTPPASPQQQQLAELTQRRRQLLQLLASERNHAEHYADAFRRRQTRQLGKTLEKQIEQCDQAIATLITQDTELAHKARRLKAIPGVGPVVAATLLAEMPELGKLTPQTAAALAGVAPYNRDSGGQNGSRQINGGRGAVRGALYMATLSAVRYDRILKEFYLRLRAAGKKPLVAMTACMRKLIILMNRLLKNDDFQLAN

SEQ ID NO: 329355 - protein, 387 aa, unidentified
MQKPHDNSKASPAAFVQDNTLIAVIELSLSNWLVAGLIPGVSREPLKKLEPNPEDLLKLLHGWRDEAIKAGRPITRIAVAYETGRDSFWLARWLRERGIDAHVIHATSVTVSREHRRAKTDRLDTAMLKRGFLGWLRGERGHCTVAIVPTMEEEDAKRPHREREGLVHEQTRAVNRMKSALIQFGVRNFNPKLRKASVKLETVRTPEGKSLPPNTIAALRRDMERLKIIKEQIKAIEQARLQQFEQKPEALANRMVYLLVRIYGLGLETADLLAHELLSRTLRDRKAVARYAGLTGSPDESGSKRREKGLSRSGNARVRKIMIQLAWRMVKFQPDSALVQWFKQRTESAKGSRKPMIVALARKLIIALWRYANDGVIPEGFRLHSAA

SEQ ID NO: 329356 - protein, 354 aa, unidentified
MGGIIPGVERQPLKKIAIDEHALLKLLGRWRGEAEKKGHRISRIAVAFEAGHDGFWLARWLAAQGIEAHVIHASSVAVTREHRRAKTDRLDTGLLKRGFLGWLRGERGHCKMVAVPTLAEEDAKRPSRERETLVGEASRIITRVKAAFVRLGIRSFNPKLKTAAAHLETLRTPVGEPIPPNTLAALKRDLERHRIVKQQIREIEETRLERLAQAPSNGPHAMVRLLARVIGIGVETADMLVQEVLSRNMRDRRAVARYSGLTGSPDESGAKRREKGLARSGNARVRRGMIQLAWRFLMFQKDSALAEWYRQRTANAPSTRKTLVVALARKLLIALWRLVRDGVVPEGVRLRPAA

SEQ ID NO: 329357 - protein, 319 aa, unidentified
MQSKLTFGMDIGKNEVVVACHEGAFAILKMANAVAGLRRWLGSVPAGSRLGLEATGGYHEPVAELAYSLGFTVYILNPKDVHFYARALGARGKTDRLDAQIIAAYVAEHCARLHPFTPLSADEKLLRELARRRATLVNAKSMLQQSLRVLPGFEREGRELLRAMGSFADRLERKLAQIAARSSERATLVKRLQTIDGVGTLTSIRCATLFTRVPFHSSDAVVAFFGLDPRPNDSGQHRGRRRLSKRGPSEDRRLLYNAAMSAIRTPAWRPLYLHLRNRGLASTEAIIIIARRIVRIAFAMYRNHSNFNPRLVPRPYCPA

SEQ ID NO: 329358 - protein, 333 aa, unidentified
MGTEAATATAFVGIDVSKDTLDACLILCAGKTQEAAFANDPKGHAALLAWADRHAGGAGLHFCMEATGPYSEAPATHLADAGRLVSVVNPTRVKYAGLARGRGNKTDRADARLIAEYAVRENPPAWQPPSPAVRELQALVRRIDDLVEMAAREKGRLASPALSRSARRSINRTVTFLEKEADRLRAAAGELIAATESLAADRALLESIPGVGRQTATTILAELPAIDRLPSAESAAAYCGLAPREFTSGTSVKKRTRLSKTGNARLRKALFLPTQTAARFNPLLRGFFKKLVDAGKPRMQAIGACMRKLVMICYGVLKNRAPFDPTWASRIAP

SEQ ID NO: 329359 - protein, 346 aa, unidentified
MLILGCDFHPSWQQISWLNTETGEVGEQKLVHASGDAQRFYQRLAGPVLIGMEATGNSQWFVELVEDLGHVIWIGDAAQIRASYVRQQKTDQRDAGHILRLLVENRFPRLWMPDREQRDLRQLVLHRHKLVEIRSRIKNELQHLSMNKGVQQKHRLWSQAGQKMLRELPLKPWASCRREDLLGLLTTLDQQIGRLDDAVQTAAEENLQARLLMTQPGVGPNTALAYVLTIGEVSRFARGKQVASYLGLIPRESSSGGRQKLGAISKQGNRMLRSLLVEAAQTAVRLDPGMKKQYQHRCHQKPKGVAKVAAARKLAVRLYWMLRTQTAYPEIVGIESSPRVPLVGAS

SEQ ID NO: 329360 - protein, 336 aa, unidentified
MLIIGCDYHPSVQQIAFVDLETGETGERQLLHKDGEAERFYRDLKLRGISVRVGIEATGHARWFERLLAELGFELWIGDPAQIKAARVRKQKTDRQDAQLLLKLLVEERFPRIWIPSPENRDVRQLLWHRHRLVQMRTRVMNQLQAVAMNEGVRRKKALWSKSGRAQLESFVLSPWASRRRQDLLEVLDRLNPTIDELSTAVEQEAKKRPEVLRLMTHPGVGALTGLAFVLIIGSAERFACGKQIGSYLGLIPCEDSSANRFLLVEAAQAAVRCDPAWRRKFVHLAMRRDPRIAKVAMARKLAVSLFWMWRKEWNYEQVIKFGSHAGQSDYVHGVK

SEQ ID NO: 329361 - protein, 385 aa, unidentified
MAPPRMPEAVIGLDVGKSSHWACVATRDGEILLSAPVANREGDLDSLFGRFPDALVVVDQSRNIGALALARARAAGMSAAYLPGLAAHGAARLFAGDAKTDERDAMVIAKTALGIPDALLPVGDPGPTVAAARALAAQRNFLTCENTRSKNRLRSILLESCPAFEALVDLSDGPQLRLMASLGGAWSVADAGPRRAAALTRGAARGKIEALVRSTASSTRPDAAAIAAEDRAVKLLARRISENSAEIEAITAEISALLEGDDTYRCLLTVPGIGPKTASELAISIDIEDFPSHDRLASYCGLAPRNRQSGTSISSVTASRQGNKRLKNLLIFSCNCLTRTEGRWGDYYTRCRERGMSHGKALKALARKRLKVIYAVMRDRAPYAA

SEQ ID NO: 329362 - protein, 403 aa, unidentified
MFCGWDWGSTVHGVCLIDDHGAVVKRWMVQHTEDQLMNLFSELAQLVEGADVGQVPIAIERGEGLIVGLIAGAGHPVWMVEPAAFKAARPRWGSAGAKSDLGDAFMLADYARTDGHRLRRVEPVAQATRELAALVRARTALVEARTAASNQLWAILAEHWPGAAVVFQKLTSQIALAFLTDYPTPRAAALLGEGRMGQFCRRHSYRGGKLPAELVRRLRAAPANVNPIAPAILEAIVRGSTAQIRLLNTEITRLERNITDALATHPKTPLLQTLPCVATVSLAALIAEIGPLLERCENPEQVAAMCGAAPVTRASGKSRTVGFRYTANKPARVAITGFADNSRHSSAWASDAYRRARARGARHPHAVRILARSWVRVIWACWTADTTYDPARHRGEQIFAAAT

SEQ ID NO: 329363 - protein, 339 aa, unidentified
MKITTIGLDIAKTVFHLYAVNEMGRYVKKKQLKRQQLLPYLAQLSNCVIAMEACGGANYWAREMKVLGHEVKLIAPQYVKPYVKGNKNDYNDAQAIAEAAQRPTMRFVPIKSVEQQDIQNLHRQRERIKKARTALVNQIRGLLAEYGIVINKGVAAVRKSLPELLEDAENGLTMRSRELFAELFDELRLLDERFKQSETQIEASNRGNDVCQRLDEILGVGPITASAAYAAAGDGKDFVNGRHFSAWIGLVPGQHSTGGKPTLLGISKRGNGYLRTLFIHGARAVLRHSASKTDRFSRWAQALLERRGHNKACVAVANKMARMAWVIMAKGETYRPTMS

SEQ ID NO: 329364 - protein, 337 aa, unidentified
MKYYVGLDVSVKETSVCIVNQDGDILAEKSVSSEPESIFQYLQSQKLEYKRVGLEAGCITPWLYHELITLKLPMICIETRHAKAAMEAQNMKTDRNDARGIAHIMRTGWYKEVHVKSHDTHKTRVLINNRKCLQNKMIDITGQIRGTLKVFGHKVGHVSSKDYEGRIYELIGDDPELLSYIEPLLLVRDQLRRQFQKLDKMILDIAKNDSICELFMSIPGVGSLTALTFKTTIERPQRFKKSKNVGVHLGLTPRKYASGEIDHNGRITKCGDAVTRHHLYIAAQCLLNKVKKSCPLKAWGLRIAKRSSPQKAYVAVARKLAVIMHRMWIDGTYYQHA

SEQ ID NO: 329365 - protein, 464 aa, unidentified
MSKKKGRSPVPVAALPVIRSNVAGVDIGSREHWVAGPQSDPSNPNVRVFSTTTDGLNELVDWLVSIGVTSVAMESTSVYWIPLYEILESRRIEAVLVNARHLHNVPGRKTDMRDCQWLQVLHSCGLLRASFRPPEEIARMRAIHRQLGNLVVERTRTVQWMQKSLDQMNVQVHRAVADLTGTTGLSILRAIVGGERDPNKLASLRDHRCSKSEAEIARYLTGTWREEHLFNLTSSLRFYDFVEGEIARYNRQLDEELGRVESPEHRDQPLPTNPDQAKEKTIIREGKADRRDKLFRATGVDLTQIAGIGVEAATTIVDELGTELSAFKTEHHFVSWLRLCPNKAYSAGKPLPKKRKNGAGSNRVAAILRMAATTLVRSRTALGAYYRRIAQRKDGSVAVLATARKLACIIYRALRYGQAYVDTGAKEYEQAYAARRLKSLEQVARGLGFDLVPIATADAAATPG

SEQ ID NO: 329366 - protein, 334 aa, unidentified
MSKKVIGIDVGKKDLYLAHKYFTTTGKVKVKRKKFSNNLKGYKALIEWSKNIAKKEGDKSLHFIMEATGVYYEGIAYFLFEKGFAVSVINPSYIKSFANSSGVRTKTDQKDALVLVEYGEAMKPELWSPPAEEYRVLLNLCRAISSLKNRRDAVANRIESLKSSRVIAQAVLEEEERLFNEINKSIKRLEKQIREHVNKYPSLKKETKLLMSVDGVGWNTAVLMVAIMEGGRRFKSAKEAAAYLGLSVQEYTSGTSVKKRSRLSKKGAKDIRKALYFPAITAVRCNADVKALYERLLKRGKLKMVAIGAAMRKLVHICFGVLKNKTAFQPQTIG

SEQ ID NO: 329367 - protein, 397 aa, unidentified
MYIVGIDIAKRKHEAAVIDGEGTVIIKPFSFTNNCSGYNRLLAMLTKAKLPLDEVSFAMKATGHYWLALFTRLQKEGFRVQVINPVQTNSIRSFYIRQAKTDPRDALLIAEVIRFGHFSESTLHPENIYELRELCRGRHAIVSMQADVKRKVVALLDQVFPEYETAFTNLFGDTSMAILQTCPTPKELSEMRLEELCHLIEVSSHKRFRMAKAQELQALARNSFGFAMAGDVFSTMIRLYAKHLDFLKQQVREMDRKIAEIMETLDTPITTITGIGPTLGAYILSEIGDISRFSSAAKLAAYAGIDPTMRQSGEYNGVRNRMSKRGSPYLRHAIWLAASSAVLHDPALKLYFQKKRDEGKPYMASVGHACRKMVSIIYAVMRDNKAYTPYIPNEISA

SEQ ID NO: 329368 - protein, 367 aa, unidentified
MRKVSTVAAKPGKKISQQKLTVGLDLGDRNSWYCVLDESGQIQLEQRVRTHAKALREVFGGMPHSRIALEIGTHSPWISRLLSELGHEVLVANARKVRLIGESRKKDDRLDAQTLARLARIDPELLYPVKHRSEQAQADLTLIRARAGLVRARTGLVNTARGLAKSYGERLRSCNVRNMNWEKAESLSPELQAALEPLLNAIESLSERIAEYNERIENLAKESYPQVALLKQVKGVGTLIALTFLLTLEDPHRFHKSRDVGCYLGLQPGRRNSGQSEPQLHISKEGDPYLRTLLVQGAQHILGPFGVDCDLRRWGLRLAERGGRNGKKRAIVATARKLAVLLHHLWVSGEVYEPLHNSQRMTVAAAA

SEQ ID NO: 329369 - protein, 346 aa, unidentified
MVTTIGIDPHKATHTAVAIDESETVLGEITLPADRYQTKKLMEWAGNVDGDGARVWAVESAGGLGYLLSQQLVAGGERVVDVPAVLASRVRVLSSGKSDKNDPNDARSVAIAALRQPALAVVQREDHAQVLRMLAKRHLELTSLRTQAVCRLHATLMLLKPGGMQRRLSAKAASRMLQGIRNLDAIGEQRRRVAKAHMGDIRRLDRDITTNKTLIQRAVAVSETTVTDIYGVGPIVAAFLIGYTGDPTRFATSDRYAAYNGTAPIEVSSGGNKRHRLSLRGNRRLNHAIHMAAVTQIRFPTPGRVYYDKKLAEGKTKKEALRALKRHISDAVYQQLVTDQQRAQTS

SEQ ID NO: 329370 - protein, 459 aa, unidentified
MTKHRQKKMKAGKVDALDQINHNAAGIDIGGGEVYVAVPPDRDEDNVRSFPTFTADLQCLADWLNACRIDTVAMESTGVYWIPLYEILEARGFQVCLVNARHLKNVSGRKTDVLDCQWIQQLHTYGLLSPSFRPSEQIVAIRSLVRHREMLVQYRSAHIQHMQKALTLMNLRLCNVLSDITGVTGLKIIRAIVAGERNPQVLAGFRKAGCKKSAEEIAKSLEGHYKREHLFALKQALELYDFYDLELHECDAELEALYQQFDPPDDPGTPPPTPRRSKPRKNQAHFDLASALYRMSGVDLTQIDGLDALTVQKVLSETGTDMSKWPTEKHFASWLRLCPNNQITGGKVKQTGVQPTTNRASTALRLAASSLTHSDSALGAFYRRMRTRHGAPSAITSTAHKLARIIYFMLKENKPYHDIGADYYEQQYRTRVLRNLTRQASRFGFRLLPLDQLPVQEVS

SEQ ID NO: 329371 - protein, 327 aa, unidentified
MHYLGIDVAKAKLDCTLLLDAANKRKAKCVSNDKTGIHALLSWLTKQGLEPRQVHAVMEGTGVYHEQAAIALCDAGVIVSIINPAQIRDFAKGLAIRTKTDGVDSLVLARYGALLQPMAWIPPSRQARALQALLARREALQQDLRRELNRQEKAEATDTPELIQQSLIESIAFIGTQLAKLQQDIDDHIDRHPELKADLALLSSIPAIGPQSGSNLLAIMHTHHFVSAEQLAAYLGLVPVERQSGSSLLGRAHLSKAGPARLRAVLYMAAVVAIRYNPHVKALYHRLLARGKTKMSALGAAMRKLVHLCFGVLKTRQPYRADYARAA

SEQ ID NO: 329372 - protein, 352 aa, unidentified
MTEISKDQSITFVGIDLAKRSFHVYAADEHGQRVFSKKVTRARLPGFIAQLPPCTIAMEACGSAHYWARRFREAGHEVRLIAPQFVKPFVKSNKNDAADAEAICEAVQRPNMRFVAIKNAEQQDIQAVHRLRSLAVGQRTALINQTRGLLLEYGIEVAQGRAALRRRLPEILEDADNGLSERFRAELQRLYEELQHLNERVAHYDEQIDQVAKDNAQAQALMQLPGIGAKGATALLAAVGEDPSLLKNGRGMAAWLGLVPRQHSTGGKDRLLGISKRGDVYLRQLLIHGARAVLRCAERKDDALSRWAVALKARRHPNVATVALANKLARIAYAILTTGQPYDANRTISVAL

SEQ ID NO: 329373 - protein, 343 aa, unidentified
MYYIGLDVHKKTISYCVKDAAGCVHQEGKIGSTRRELDAWIKTLPQPRTMAMEATIFTGWIYDHLLPHAEKVKVAHPLMLRAIAAAKKKNDRIDAGKIADCLRCDFLPECHMASTEIRNRRRILRYRGLVQRQAVQMKNRVSGLLMETGVSYNKLRLHRMGYFAELMATNEEVSENIRPRLSLCREHIDRSIMLDTALLRSLERDPLLADRLRRLRTIPGVGPITALTWALEVGDTSRFRSIKQAISYCGLCSAEKSSADKVMRTPISKQRNKHIQQVLVEAARLAPRYSEELALLYERERQRGNGNRATLAVARKMVALMLAVERRNTDFVPAGEFRRSAAA

SEQ ID NO: 329374 - protein, 318 aa, unidentified
MSHDAGVFVGIDVSKATLDCASEEGGAVVMAQFANSEAARGELVSWVRSCRAQLVVVEATGGYEAAMVVALATAGLPVTVVNPRQVRDFAKATGTLAKTDRIDAAVLARFGRSIRPPLRAPKAEELSALEALLARRRQLVDMLTAEQHRHAQARGSIARQIDKHVTWLKRQIEDVDGDLGRAIEQSSLMQRKLDVLTSVPGVGRVTGMSLVAHLPELGQVNEKQISALAGVCPFSRDSGKMRGRRTIFGGRAAVRAVLYMAALVATRHNPVIRSFYQRLLAAGKPKKLALVACMHKLLLILNAMIKADSLWRKGALTP

SEQ ID NO: 329375 - protein, 413 aa, unidentified
MLQVIHERCAGLDIHKKTVVACVLVTKQDGQVEQQKRTFGTTTGEILGMAEWLKRPGVKSVAMESTGVYWIPIYNLLEGDFELVVVNAHHMKAVPGRKTDVTDAEWIAQLHRHGLLKGSFVPPKPQRQLRELVRHRTNVVERRSQSVNELQKVLETANVKLASVVSEITGVSAMEMVHGLIAGEQEPEVLAELARGRLREKKPQLAAALNGRLEKHHRFILSQLLADISFCEEQILELDLQIMIQMKDYQEVIKRLDEIPGVNRRVAEVIIAEMGTDTSRFGDAAHVVSWAGMCPGNNQSGSKRRTARVRQGNKSLKRVLVEAANAAGRKKDSYFSAQYHRLAAKRGKKRAKLAVGRSILETAFHMIQRQSTYKDLGSDYFDRRNPDKLAKRLAERITKLGFKVSYTPLVEAA

SEQ ID NO: 329376 - protein, 316 aa, unidentified
MQTFLNIGVDVAKDAVVVACAAQSFPAHSVANQRVPLLAWLESLPAGSRIGLESTGGYHELLAGLAHAQGHTVFLLNPLDTEHYARAMGNRAKTDRVDAELIARLIAQEHARLRPYTPPTANQRKLDRLVRRRAKIVRIKSSLKLTMGNLSGFTTELKAVLLKLDALITRIDAAMSAIAACSPQHVEAQQHLQTIVGVGPVVGMALANTLERVPFRNADAFVAFTGFDPRANDSGHKIGRRRLSKRGPGELRRLLYNAAMSAAKTKVWRPIYEHYRTQGWSTTAALVIIARKIARAAWSIHHYRSTFDPNRITKNA

SEQ ID NO: 329377 - protein, 340 aa, unidentified
MTQHKIIGIDLAKNIFFLFEINHKGKNLSRKKLQRSKLLSYIANKEPCTIAMEACSGAHYWAREFSQFGHEVILYAPQHVKTQRRRQKNDYNDAEAIAEVALYKRPHPVPHKSLEQQDIQSLIRMRRLLVTERTRIVNQVRGLISEYGIIMPKGAAAFRKAIPEILESDENKLSCILRELLSHQYERYLYIDEQVKWFDDKLNQTIKQFENAKRLMSIPGFGPLTSQAVAVWLGSGQQFKTGRDASAAMGLVPKQDTSGDKVILLGITKRGNTYIRSLLAHGARAALRRAKFKSDNLSKWMLELQERRGPNRAAVALANKLMRIAWAVITKNEEYQPKQS

SEQ ID NO: 329378 - protein, 452 aa, unidentified
MAKKKNKSKLLRACHPDAAGIDIGSDQHWVAVPLDRDDQPVRQFGTFTSDLQKLADWLQRCGVRTVAMESTGVYWIPIYELLEERGFEVLLVNAAHARNVPGRKSDVLDCQWLQELHTFGLLRASFRPGAKVTELRTYARHRQTLVEEAARQIQRMQKALDLMNVQIHHVIADITGKTGLTIVRHIVAGIHDPGVLAQYRDPRCRASKEVVVEALRGHYKVEHLFTLEQALSLYDTYGKHIATCDARIETVLRDLAAQFPETCAPKKSRKFPAMRNQIAIDVRNPLERILGGVDVQSIVGIGPLTALNLLSETGHDMSRWPTEKHFTSWLNFAPGTHISGGRRLSSRRRPGRNRAGLILRQAASSVGRTNTALGSFYRRISARRGKAVGIVATARKLACAYYRLLRYGGHYVERGAAAADHDYQERRIKSLRRQAKTLGYELLPAQPEARVT

SEQ ID NO: 329379 - protein, 388 aa, unidentified
MQIVTDRPQAPTAIRTDLGAIFVSLELSRSTWLITSLSPGGGEKMSKHTIRSGDVAGLWSRFSQLKDKVLDRTGQIVPIIVIQEAGLDGFWIHRLLQSERIESHVVDPASIATSRRRRRAKTDKIDGEALVRALLAYKRGEPRVCTMVRAPTPQEEDRRRICRERKTLTAERVEHVNRIKGLLFAQGISDYEPLSRKRGERLEELRTGDGRPLPEHLKAQIRRELDRLELTLEQIKAVETERNATLSPSDDGTPAPGAMLKNLKGIGPEFAGVLWSEGLFRSFSNRRQVAAYAGLAPTPWRSGSVAHEQGVSKAGNPRLRTTMIQLAWLWVRHQPRSILTVWFHQRTQINGGRVRKVLIVALARKLLIAFWKYVTAGVVLEGAETTSA

SEQ ID NO: 329380 - protein, 343 aa, unidentified
MERELFIGVDVSKRWLDLAYYDGVNVDWKHGHIRVDNKESGFVQIGKWLNGLGVDKDSVLFCMEYTGLYCQDLRAWLEKEGFVYGMVNPRKMHRFEPDLAAGERALDRIKTDEMDSFRIAMYCEKHCRKIRSQPSRLPAPAYFKLKRLIAERRQYVVQSALYKQQLHDVCDYDTDGSVCRKKEELKSLMAHVRQTDAEILSVMEEDACIKKNYDLLRSVTGIGIVVATETIILTENFTSITNPRTYACYIGIAPAKKESGDSVRGGEHVSRKGFTQAKADLSMACLKAIQTDANIKSYWQRRKTDGKKGGVVLNAIKFKLVLRMFAVIKRQKPYVEIDGYKKN

SEQ ID NO: 329381 - protein, 319 aa, unidentified
MLVGIDVAKAELVVAVRPTGERWTVANDERGVRALVERWRGAAPELIVLEATGGYELLCVGALAAAGLPVVVANPRQVRDFAKATGQLAKTDRIDADVLALFAERVRPAGRVIADADAQELDALLARRRQLLEMLQAERNRLGQAFGRGKQPVKKSLKAHIAFLERELRIADTDLGAMVRRSPAWRERDDLLQSVPGVGPVLSRTLLAELPELGRLSRREVAKLVGVAPLSRDSGTLRGRRFVQGGRAGVRAVLYMAALVATKRNAVIRAFYLRLVAAGKPKKLALVACMRKLLTILNTIARTGERWVVDYAAPVRAST

SEQ ID NO: 329382 - protein, 395 aa, unidentified
MFIVGIDIAKRSHEAIIIAEDGQVVRKAFSFRNNCTGYNLLLEQVRRLTLVKSQIVFAMESTAHYWLALYARLLKDGYAVMVLNPIQSHSLRELYIRKAKTDARDSLIIADLVRFGRCKASNVPQDKILALRELCRSRAYLVDMAADLKRKLIALLDRIFPEYESLFDSVFSKASIAVLSKYSTPQKVKNANLRKLTDILMESSNGHFGEWKAHQLKEAACSSFGIDDSGGVYSTLLGMFLEQILSLTAQADSLEKQISVFFQEFNNPLTSIPGVGTVLAATILSEIGDITRFSSADKLLAYAGLDPSVKQSGEFKSNQNRMSKRGSPYLRRAIWLASTVAVHRDPMFQTYYEKKISEGLHYMNVIGHVSRKMTAVIFAVLRDGQPYQPVLQTAD

SEQ ID NO: 329383 - protein, 339 aa, unidentified
MKLYSAFDLHSNNSYLAIIDENGKRVFHQKVKNDPQLVVQILDPFKNDIEGIVVESTFNWYWMVDLLSDEGYEMHLANPTKIQQYSGLKHSDDKDDAFWLAEMLRLKILPEGYVYPKEQRPLRDLLRKRGHLVRLRTSLIVSLQNILARNIGDKMKTNDIKALKEDRVAPLLAGNDDISLAGRVSKEAIDSLTRQINAIEVAVEKKMALRKPYDLLLSMPGVGRILALTIMMETGPIGRFAKVGNYVSYCRKVPAGRFSNEKKKGTGNRKNGNKYLSWAYAEASELARRLDAESRAYYDRKRRQTNAPIAHSALAHKLARAAYHIMKEEVPFMPEKTFA

SEQ ID NO: 329384 - protein, 353 aa, unidentified
MKKVLKEVAGIDVAQKELVVSLGRLYENLDIEIISYKVFKNTENGIKYFIDWVASNSNNANSVRYVMEATGVYHEKLAYALDESGFDLSIVLPNKISNFFRTLDINTITDKTASQAIMRFGLERKLDNWNRPKEAYRQLKQLTRERDQIVDQRSMVKNQLHAEKAEAVPNERSLKRIAERIKFLNGQEKEIKMDIATLLKDYPDIMERVKNICTIPGVGELTAVIVLAETNGFELIRNKKQLTGYAGLDVREKQSGTSVKGKPRISKKGNRHLRKSLHLPSLSSVKYNKSHRDLYTRIVAKSGIKMKALIAVQRKMLELIFVVDKNKTRFDNDHQQKRTLDANAESILLQTSS

SEQ ID NO: 329385 - protein, 455 aa, unidentified
MSIVSSLPSEFERININAAGIDIGAQKHYVAVPRGRDSKGRDVRHFDTFTADLYALVDWLKQCHIDTVAMESTGIYWIPLFEILEKNGFEVRLVNPRSIKHAPGRKSDVVDCQWIQQLHAYGLLTSAFRPDEQINVLRAYHRQRTMLVNHAATHIQHMQKALEQMNLKLTNVISDITGTTGMKIIRSILAGERNPKKLVKHRDPRCKKSDKEIAKSLHGNWRDEHLFALQQAVALYDFYQTQIEVCDQQIQAQLCRFEDRSHGGEPPPFTGKSKGSGKRLSFDATEHLYRMTGVNLTQIVGLNTPTVLTIIAEVGLDMSRWPTSKHFASWLGLCPGSKISGGKNFSSKSKPSANRAAHAFRMAAYSLHRSQTAIGAFLRRKKAQLGSPKAITATAHKIARIFYEMLKNRTEYKDLGVDYYQARYKERMLRNLKRKARAFGLELVKTNQDQLVTVN

SEQ ID NO: 329386 - protein, 359 aa, unidentified
MQCVGIDIAKKTFTACLCMYEFDMGCSTNPIVFNNNKTGFNQFVKWSCKEALKGYPLRYLMEPTGVYYEPLAFHLDKLGLDVCVVLPNKAREFAKNEGILTKTDDMDAYTLGMLGCLDKRLKPWMPPSPIYRELRQMTRFVADINKIRTELQNHLEALAHSVITEKSIVRHYNRLIDEIDKQLAANQKAIREKIKQEPGLSERIDHIVTIKGVGFMTVVTILAETNGFALITNRKQLTRYAGLDVPAHQSGPVDPKRHISKQGNVHIRTALYFPAIVSTQYNPQMKDFYGHLCARKPQSKMIGVTAVMRKLLLLIYSLWKSGERYDPERGELAYRKKKKEAETHEGQPHGIDVGALTKE

SEQ ID NO: 329387 - protein, 377 aa, unidentified
MSKVRFVGLDVHAATIAVAVAEAGGEVRSLGIIPNRLELIRKLIGKLGPVKDLKVCYEAGPTGYVLYWQLSRLGVACEVIAPTLIPTKAGDRIKTDRRDAEKLARCYRAGDLTPVWVPDAAHEALRDVVRAREAAKKDQLRARHRLSKFLLRHGQRAPEGIKAWTKKHLEWIKSHVRFDHAALEAAFADYVQEVDHCAERILRLEKAIAEAVEQAPASMRAVIEALQALRGVAQTTAATIVSELGTLTRFESPRQLMGYSGLVSREHSSGTHIRRGAITKTGNAHLRRVVVEASWAYQHRPNVTGFLLRRQKNLALDEETKKIAWEAQQRLHSRYRKLAGRGKNKNQIITALGRELLGFVWAIAVRIEQQHPLAQAA

SEQ ID NO: 329388 - protein, 417 aa, unidentified
MDSDKEIVCGADIHKDFLIATMISRSGLKLQERFNMNQDGLLAFRSWIINHRCQRLAVESTGGFWYPIFTILEGHVEFILANAYQIRNIERKKTDKLDSERIAIYCLNNLITPSRIYPKDYRDLRSITRARETLVNARSKIKNQIHQSLSTCCIKLSSVISDSFGKSGRYIIDRLLEGKTIDQIISGIPSKRIRKKEDELREAIKNGLDPVQVFLIKANLDVIDDISKKIKILEAEIAEKVKPFEDDLKIILSVPGVGFISAATIIAEMGDYRDFPSADKMAKYFGIVPSVYQSAGKRRTGKITKTGSKHMRRILVEVAKAISRTKKNSRLMRFFQRILARCGKKNIATVALARKVLCIIYHLLMNHENYQEPEVTKTKPKIPSSVSPIRMMDIDEMIKIISQAGYLVEKDLKEGCG

SEQ ID NO: 329389 - protein, 427 aa, unidentified
MKYNQNYRIMQVTESTLIVGVDIAKKKHYARAFDWRGIELDKTISFKSRYQGFKDFIGWVNEVSAKYCKDKVIVGLEPTGHYWYTFAQEILAQGYMVVQVNPYHVKKAKELDDNSPSKSDRKDPKTIAMLVKDGRYQIPYMPQGLFAELRKANNLREEWLVKSWSIKNKVQRWIDTYFPEFTDVFKSWEGKASLLTLTEIPLPDMIVKLSAEEIVSMWRTEVKRAVGLKRAQELRETAMYSVGVNEGTGMALYEMRLLMKEYHEIRTILEDIEAQLEELVLTIPGAARLLEIKGIGIKTTAGFLAEIGDINRFNHPKQIIKLAGLNLRENSSGDHKGMTTITKRGRSRLRAILFRAMLPLVAKNAEFNALHKYYTARKENPLKKKQSLIALCGRFIRIAYTLITRNVEYDPAKVLGGLVLTDTPVAA

SEQ ID NO: 329390 - protein, 389 aa, unidentified
MIYVGIDVAKDKHDCCILGSEADKLFPVFTIPNNKAGFDELYEKMFSVTDDKTKIKVGLEATGHYSLNLLGSLIDKGLPTCVINPLHTNLYRKGLSLRKTKTDKVDARSIAIMLMTNKTLKPYSDISYHNEELKSLTRYRFDKVQERAKLKSSVARLVNILFPELEKLVPSLHMASVYSLLSKLPGASYITECHLTHLKNLLETASKGHYGRDMAITLRNTARDSIGSVIPAKSMELKHTIHLIKVMTEEIDEIEDSIKSIMDTCNSPIMTIPGISYRMGAMILAEIGDFTRFNYADQILAFAGLSPSTYQSGQLDSSYSHMEKRGSRYLRYALFNAAKFVCKWDENFGAYLSKKIGEGKHYNVAIGHATKKLVRTIYRMELTGEAYRR

SEQ ID NO: 329391 - protein, 366 aa, unidentified
MKQQHQDSEVTIGLDLGERRHRFCALDGRGEVVEEGSLLNDRASLARLTARYPGALAVMEAGTHSPWVSRYLEGLGWEVIVSNPRKVRAIYQHERKSDQRDALMLARIGRMDRALLYPVRHGSEQAQQDLLRIKLRDSLVRARVALINSVRFSLKSLGYAVCNPSSERFHKVAMERLPERVQQMIAPSVQALAELSTRIAVLERGINVVARTKYPQTLWLQQVPGVGALTALYFVLKIEDPQRFENVRDVGAYAGLCPRRDQSGQSDPQLRISKRGDPYLRRLLVSAAQYILGPFGPQSALRAYGLMLAADGSARARKRAVVAVARKLAVLLLSLWKNRSHYEAFPHWQTIEDKRSGTIAMHRVEA

SEQ ID NO: 329392 - protein, 417 aa, unidentified
MEYPPDTLPAIPPGGVTCGIDWANDDHAVCVVDMAGTVVQRFIVEHTGEGLAGLVRRLWKAGVGEVAIERPDGKVVDTLLEAGLTVVVISPNQLKNLRGRYGSAGNKDDRFDSFVLADTLRTDRARLRPLLPDSPATVTLRQACRARKDLVGHRVAVCNQLRAHLKLAFPGAVGLFRELDSPISLAFLARFDGQDRADWLSPKRLAAWLAGQGYCGRKDPAELHARLAAAPRGATGDDGTAKAHITRALLAVLASLVQQIKALEAQIAEQLALHADAHIFTSLPRSGTVRAARLLAEIGDCRARFPTPEALICLAGVAPSTRKSGKTTFVGFRWAADKQLRDAACDFAGDSRHASPWAARLYNDAIARGKDHPHAVRILARAWLYVIWHCWQHHTAYDPARHKALQRVLAEEKPAAA

SEQ ID NO: 329393 - protein, 353 aa, unidentified
MIHVGIDLHTNNMVNIALNDNGKVVKEAKLPTSRRSLEDFFGSFSEPIQAVVECTSNWYWLSDWCRSNGIDLTLAHAKMVKAISYAKVKTDKVDAKTLAELLKADLIPEAYQIQHERRELRELTRGRLRLIRWRAKLQSTLWSQAIKYNVQISGPQWRQLDKLQDWLQPQLPSAGRLQAQLMLQQMSQLQQHIHQIEQEIERQVPFEEAAERLMAVPGVGKVGAWTILSEIGNINRFPSAKQFTSYCRLVPGAKDSGGARRHSSGNKDGNKYLRATFGQAAVSAYTHYQVVKKFYRKIKRRSGRPVARAVVGKELAKGVWHMLTKNEEYKGFKGQPVRAASQTCWPQPISPFA

SEQ ID NO: 329394 - protein, 389 aa, unidentified
MAARTVNNLPPAGTQNGAVRCVLAIELSKKSWIVAVNTPLSDKISRHTLKPCDGKGLLDLCERIRTRVAKETKKRVEIVSCYEAGYDGFWLHRLLEAHGIRNYVVDPASLQVDRRARRAKTDRVDVERLLRSLLAYLRGEPKVWSVVRVPSVAEEDDRRLHRERGRLINERIQHVNRIKGLLAIHGIYDYQPLRRDRMQQLELLRTASAQTLPPRLKAEVLRELQRLELVVEMIKTMEAERDAIASAKMETERRSSKKIQDLVRIKSIGPEFATTLVGEVFYRSFDNRKQLASYVGLTPAHFQSGSMCHDQGISKSGNAKARRIMVELAWLWLRYQPASNLSVWFHERVGKLKGRIRRITVVAVARRLLIALWRYLETGLVPEGAALKA

SEQ ID NO: 329395 - protein, 343 aa, unidentified
MSNDTRIAIDVAKAVFELAISDRAGHVARRERLPCALFLAFMAQQPAAVVVMEACGSAHYWAREIQRLGHRVMLLPPHHVRPYIRRNKTDRTDAKGILEASRNDDIRPVPVKTVNQQVLTSLHRLRSGWMLERTARLNALRGLLRELGVFIPVGSREVVPAAWYLIEDADSSLPEALRPIFAEACREIREIEARVKQVERQLEAIAEQLPAVEHLRTIPGVGLLSSTALVGFIGDIQRFPTGRHFASYLGLTPREYSSGLKRHLGRISKRGDGYLRTLLIHGARSLLVHARKQQPDRLREWANNLAKTHVHNKAAVAVANKLARIVWAVWKHERPFALMAKAA

SEQ ID NO: 329396 - protein, 351 aa, unidentified
MVTVGIDPHKHVHVAVAVGKDGTPAGKPLTAKNDALLIITLLKWVRSITDDTVTWAIEDGRGFARQLADGLLLAGQEVVWVPAKLAAAHRRLHEATGAKSDPIDAAAVARAAIATPGLDRHRIDERVRELRVLVDYRADLVKRRTMVINQLKAQLHVWLDQTPGDLTRARNVNALATLISAAQLSPHVRQALADMTAEIAALSRHVGDLDTTIRNLVSPLAASLLQVTGISYNSAAVLIAEIGDITRFPSSARLARYAGCAPIPVYSADKPRHRLHRGGNRRLNSVLYTAAIVQKRRTPQAQQLLARHESGKGSRGARRILQSHLIDVIYRAMTTDQATWQHQIIRHELAV

SEQ ID NO: 329397 - protein, 338 aa, unidentified
MKTYAGIDLHSSNNYIGVIDAKDKRLYSKRHDNRIEDVLKVLGKFKASLQGVVVESTYNWYWLVDGLMDQGYTVHLANPNAIKTYDGLKHTDDKWDSFWLAHLLRLGILAEGYIYPKQQRPIRDLLRRRLMFVSQRTSQILSLQSMATRNRGLNFSGAQIKRFRDEFIEKMFADPNLVFTAKRNIATIRFLDRIVSEIELEVASQIKLKKEFIKLLTTPGIGNILGLTIMLEVGDIRRFDKVGNYSSYCRCVESKKISNGKKKGKNNQKNGNRYLAWAYVEAANHAIRCCPKAQKFFQRKLAKSERVLATKALANKLTKATYYIMRDQVAFDEDKLFH

SEQ ID NO: 329398 - protein, 391 aa, unidentified
MALFVGIDVSKDKFDACGIGEEGEKIFSLTATMDRKGFEKLALNLKRKRSSLLLGLESTACYHIALFSYLTAKGYRVVIINPFLISNFVKLQLRKTKTDKKDALSIAQFLMLRKEALWNQSYSEDLMELRDLARRRERLTDQVTKLKSNMKRVLSVTFPELEHLTGVFAKSILQLLILFPSADALRKADADTVAALVVPRSWGRKSKAWVETLMTTAASSIGVSSPAKELVLKQDASLLLYIQGEIKETTKVLMSLCTEKMEKDVEILTSIKGIGVTTALNFLIEMGGDINLYQNDKKLIAAAGLDPSTYQSGKYEGTSRISKRGNRHLRRVIWLMAKTVVFSNDLFRTHFYKRKSEGLCYKKAVLATAHKLIRVMFAMLVHQTCFKEAGK

SEQ ID NO: 329399 - protein, 413 aa, unidentified
MALKIIYPICCGIDVHKTFVVACIASTNKGVTTYQSHRFSTYTKGLKELSQWLGNNNCPDVCMESAGKYWIPVFNVLEVSCNITLAHPKYVKAIRGKKTDKKDAKWIADLFKHDLIVGSFMPPLTIRQLRDLMRYRFKLTNFMSSEKNRLQNSLTVSNIQLGNIVSDTFGKSSMNIINRLLLNPLDTNLDIEPLIHASMKDKLPELELAIDGFITPEQAEKIKVIKHHYEDLQSRKAELENIILSLSVPYSEQINLILTVPSFKSIFSAIAIVSEIGDNMDVFPTAKHLCSWAGLTPTNNESAGKKKSVRISRAGCYIKPLLVQCATAVVKSNKHPEIRNRYLRLKMRRGHKRAIIAIARMLLTAIYNILKKKEPYNADLYRKADVLPVNREITVEQAILLAKSQGFHIMAAS

SEQ ID NO: 329400 - protein, 349 aa, unidentified
MSHKLNAGLAVIGIDIGKNSFHVVGLDRRGAIVLRQKWSRGQVETRLANLPPCLIGMEACVGAHNLSRRLTSLGHDARLMPAKYVRPYSRGQKNDFRDAEAIAEAVQRPTMKFVATKTAEQLDLQALHRVRERLVSQRTGIINQIRAFLLERGVAVRQGLRFLRAELPRILATPCDALSPRMMRVIEDLAGDWRRLDERIEGLSSEIEVLARRDVGCERLMSVPGIGPIISSAMVAAIGAGDAFSKGRDFAAWLGLVPKQISTGDRTILGKISKRGNRYLRVLFVQAAWVVLIKPKSWDRHGLKPWLEAAKKRLHHNVLAIALANKLARIAWSVLARGRAFEASRIQVA

SEQ ID NO: 329401 - protein, 370 aa, unidentified
MQNDSTVFVGLDVHKDSIVAAYSVDFGEVQTLGRIGVTERDVDRLCQQMKSKGSMVSFVYEAGPCGYGLQRQLARKGMACVVCAPSLIARKPGDRVKTDRRDAVILVKALRADDLARVHVPDVEDEALRDLSRAWGAAKQDLQRARQRLKSFLLMHGVRYTGKANWGPAHRRWISQFVFPQPMSQIAFGEYRRTIEDRLGQCERLEKVLREAAATWRWYPVVQAIQALRGIQFTTAITLIAEIGDLSRFAHPRQLMGWLGITASEHSSGPSRRQGGITKAGNGVARKALVEASWAYQYPAKVSREIQLRHEPLDQPIIARAWDAQLRLCGRFRRLVARGKLKNVAVVAVARELAAFIWDIARMTTSATTR

SEQ ID NO: 329402 - protein, 419 aa, unidentified
MRIHRNCCGLDVHKKMIAACLIREDAEGNSVTEKRLFGSMTRELHELAQWLCSAQVTAVAMEATGVYWMPVWNVLEPYGLQLLLINPEHYKAVRGKKTDLKDGTRIAELLQDGRLEGSYVPPVTIRVLRDLTRYRIKLVQYQSSIANRIQKLLEQCNIKLASVASDALGVSAMAMLRALAQGETDAVRMAGMAKKQLRKKIPQLQLALEGCVLPHHRLLLSEMIEDLDHVGAKITRIEDTIEQHMRPFQEAVNRWLTVPGIKHRLAWTLVAEVGPTVQAFPSAADIVSWAGICPGNNQTAGKRKSGTTRAGNPWLRRALCEAAWAASKSKGTYLQAQFRRLAALRGPKRALIAVANSILTAGYYMLQRATTYQELGPDYFDKRNKVRATHRLVKRLEALGHRVILEPHFSAYPLKASSS

SEQ ID NO: 329403 - protein, 347 aa, unidentified
MTIVEVPPGITGGVDTHLDKHVAAALDPLGRLVGTESFDADAAGYKALLAWLEEFGQVTKVGVEGTGSYGVGLARFLRRKGVEVIEVNRPNRQARRNHGKSDPLDAVEAARAVISGRALGTGKTKDGPVEAIRVLVVAKRSARQARVKAIVQMRHLVITAPDQLNSRLKGLSVKALVAEAAQLRAIRSPDPVTAATKASLSSLAHRVIAFDAELDELNEKIESLLHATAPDLMARFGVGPDTAASLLMAAGDNPERLHSEAAWAHLCGVSPVPADSGKNAGHLRRHNGGDRQANSALWRIAMVRIAHDPETTHYFDRRVKEGRTKRDVIRILQRYIAREVYRYLPRG

SEQ ID NO: 329404 - protein, 336 aa, unidentified
MNFGGIDLHKKTITVCVANQERTIVQRKTWACSDTEAIRCFFAGLRPFRAVVEATASYEWLWQLLEPLAERLVLAHPKKLRLIAESARKSDKLDAQILAEFLALDLIPEAYRPTPRQRQHRALVRQRYFLGRHITAVKNKIRHVLAAYNADRRDLFSDRGQEYLAGVAVSDADRFVVEQLLASWQHLEKQRGALDRQLRAFAKKAPAAEQEARAVLGSIPEVGPVTVDIVLSELGDVQRFRSAKKVAAYAGLAPGQRESAGRCKELGISKEGSALLRWALVEAAWRVVRKTGRWRTTLETLARRRGRKKAIVAVARRLLGVMVALLRTGQRYRLAA

SEQ ID NO: 329405 - protein, 334 aa, unidentified
MDKVTTVGIDLAKSVFSLHGVDGAGRVMLRRTVRRDQLIQTVAALSPCLIGMEACSGAHEWGRRFQGLGHTVKLMAPKFVAPYRKSGKNDGNDAEAICEAVMRPNMRFVPVKSAEQQALLVLHRVRQGFIVQRTATINRMRGVLCEFGVVLPLRSKTVRRQAAQAAEAVPELARRAIADLLEQLRLLDERIDGYDREIEAQARLSEPAQRLMKIRGIGATTALAIVATVGNAREFKNGRQFAAWIGLVPGQYSTGGKTRLGHISKRGDAYLRNLLVQGARSVLHSAAGHQDRMSRWILELQPRRGYYRTLVAIANKNARIAWALLAKNETPHTA

SEQ ID NO: 329406 - protein, 340 aa, unidentified
MPLYGGIDLHANNSVVVLLNEQDQVVYQKRLPNHLPTILEPLSRHQREIEGVVVESTYNWYWLVDGLMEAGYHVHLANPAAMQQYNGLKYTDDRSDARWLAHLLRLGVLPEGYIYPKAERAVRDVLRKRAHLVRQHTANVLSVQNILARNTGGRFSLKRIHEFTKQELEALLPEADQVLAVTSSLAVLDCLSHQIKALEKSVHQRLHHTPAYEQLLTVKGIGPILAQTIALETGDIRRFPTVGHYASYCRCVDSTKLSNGKRKGQGNVKNGNPYLAWASMEAAQFALRFQPAAQRFYQRKLAKTNNNTILARKAVAHKLARACYYIMRDLVPFDVMKAFG

SEQ ID NO: 329407 - protein, 406 aa, unidentified
MSIYIGIDWSQDKHDVAFMNASGAIIARLTIPHQPDGFHKLETTRQQLAVTAAECLVGLETAHNLLLDYLWDHGYQEIYVIPPLVVKSSRGRYGHSGARDDTLDAQLLADLLRTDRPRLHPWRPDSQLTRQIRAHVGFVTFLTHTANRIHNRLRAALLRYYPQALELFSGLMVPTTLAFIAAYNTPQALTALSYEEFTTFARQQGYWNRQGLLACYARLQHTPLQASATTVAVYQDEARLLAQQLRELILAKREVQRALNNLFAQHPDQAIFTSLPGVGDFLAPALLAKLGDDRDRLPSAASLQALAGTCPVTMASGKRKRVAFRHACDHEFRQIAQQWARCSLRKSVWAVAYWQQIRPRCASEHDAYRRLANRWLAVLWKLWQSQEPYDEAYHLQQRRQRSRPLA

SEQ ID NO: 329408 - protein, 350 aa, unidentified
MKKIVKQVAGIDVAQKVLVVCLGRMYDDWSPELYANKTFANTVKGIEALMLWVKKQTDQHIAVRFVMEATGVYHEMLAYFLEGKGYEISIVLPNKISNYMRTLDVKTVTDSTASQAITMFGLERKLDIWKRPKEIYRKLRQLTRERDQLVGERTMVKNQLHAEQTEAYPNKSSVKRIKDRIKMLDKQEKEIMKEVAAMIAQDSELQKMIIIICSLPGIGLLTAAVVLAETNGFDLVRNRRQLASYAGFDVIEKQSGTSVKGKPRISKKGNKYLRKVMHCPALTAIRHDERFKAIFARIVSRHGIKMKAVVAVQRKLLEMIFILYKTGKRFDKDYLMKTKAEKSEHELIKN

SEQ ID NO: 329409 - protein, 382 aa, unidentified
MRQVCGLDVHKDSVFVCILNENGIVFQEKYGVLTTELEQMLEVMMQHDVTEVCMESTSVYWMPIWRVLENYIPKLMLVNPYFIKQLPGKKSDVKDAEWIATCLLKDLIKGSYVPEDRIQQLRQYDRRIFDLNKEIAYKLIKLDMALQRCNIRISNYVAMTDGKSYQDVVRLISEGKTSPEELAKVIHGRIVNKHGRETIVGALTGVISETDIAIIRQLREEILLDQKHKDECQSKMNELCQKWFPTQLENLQTIPGVKTRSATAIIAELGTDMSSFEDAAHLVSWCGLKPRNEESAGKIKSRSITHGNKYLRKTLIECSWASSKTQGCFYNKFSYIQTVVRRKNKMKVQVAIARKMLSAIWFILHDNVAYRDYTPDIASADE

SEQ ID NO: 329410 - protein, 331 aa, unidentified
MNYSHFVGLDVGKKTFDASLMSADEKELSHKSFDNPPTGIQSLLDWIAGYHLSLSKLLFCAENMGSYVTELSVSSVSMGFSLALVCPLTIKKSIGLQRGKNDRIDAKRIANYAVLHYRKLELYKLPDKDLVRLRGWIIIRDNLVKQKVSSIKLLETFSWMAKLADVTESISFLEEQLKSIKERILEVEEDMEQLIAASTSLYTNYLLLRSIKGIGIINAIVLLCVTDNFQRFDNPRKFACYCGVAPFEHTSGISIRGKTQTSSLANKEVKVYLTRAAITAISWDPQMKAYYKRKIAEGKHKASVINAVRAKIIARSFAVIRRQTPFVTLAV

SEQ ID NO: 329411 - protein, 383 aa, unidentified
MEAILYCACGLDVHRDIIEACIMRGVNAEPEILRQSFGTTKPELQRLMKWLLENDCYTVAMESTGVYWSPIFQILETESVYLEKVWVVNAHHMRNVPGRKTDVKDAEWIATLLRHGLLEKSFVPSIDIRDLREAARLRRIFVQERCRYINRLEKFLQTHGFKFSSVMSDILCVSGRKLLDILCKTGMLTEKDVQENCRRLRRTSDEIAAAVCGTLTAAERRLLERLLHKLDSCQEDIDAILQDIRLLCAPFQEQVAIIDSIPGFDQESAMEIIAEISAAPQEHFETPQKLCKWAGVVPRNDESAKKVKSRKILHGNRHIKSVLCQAAWAAVKVRGSPFHSWFWSHQRKIGQKKAIIAVSRKLLMLIYLLLASGRMYEPPCKAA

SEQ ID NO: 329412 - protein, 361 aa, unidentified
MTTMTQPTIRVTGGVDTHKDVHVAAALDDVGRLLGVESFPTTTAGYRHLVRWLRSHGDVVAVGVEGTGAWGAGLSRHLRSNGVEVREVMRPNRQHRRRYGKSDHADAIGAAKAVLAGEATGTPKAGTGDVESIRLLRVARRSANKARTQAANQIHAVLDTAPAELRQRFTGQPDVDIVARAARFHRHAPSCPLEAARLTLRSLARRWQHLDHEIADIDTHLDQLTATVAPTLRAINGVGPQTAAALLATAGDNPDRLRTPGSFAAVCGVSPIEASSGRQQHHRLNLHGDRQANWALHVIVICRLRWHPPTQAYMARRLAEGQSRKAIIRCLKRYIARHIHRAILTDLAPPDIGTTPLPTAA

SEQ ID NO: 329413 - protein, 421 aa, unidentified
MLGAGIDWAEEFHVAALGSPGEGVIEVVRVAHRPDAVSALVARIAGLEPDPAEVRVVIETRHGLLVEALVRAGYTVLPVNPELVSRRRGPARKKDDAEDARICCLLALDRHAGLKRLIPHGQIAGELRSIARDDERACRDERRLLSRLRADLIVTFPAALAIAGEDPGATRILRLLERWPTARALAAATREEIIEFGRAQRTGYLQRFADKIQAALAEDQFTAPEHLVRAKVDTIRLTARQLLLIDAQRRVWEKRMGELLLGAPGRPAEDQPGNAFPGGEIYLSFPGLGRRLAARIAGEVGEHIEQFTTPNSLQCYAGRAPVTRRSGKRDLVVAHRLACNRYLADAVHKWAFASLRRSAWAREFYDTQRSRGKNHHAALRALGNRWLEVLWHCLTHGVHYDEAVHVANRNQALAAITAPAA

SEQ ID NO: 329414 - protein, 412 aa, unidentified
MQTLIERGCGLDVHQATVVACLLMVRRDGKVQKQMRTFGTTTRELVGLREWLLSEGCTHVAMESTGVYWKPIYAILEGALEIVVANAQHIKKVPGRKTDVKDAEWIADLLCHGLLRSSFVPPKPIRELRDLMRYRRKLVESQAAERNRLLKVLETANIKLANVATDVFGMSGRLMLRALIAGKATPQEMAELAKGLLRKKIPELELALEGKLEQHHRFLLELQLQRLEAAEKDLAVLEQRIRQMLEPYAAQLALLDEIPGVDWTLAAVIIAELGVDMSVFGSVSQLASWAGVCPGNNESAGKRKSSRIPSGNVYLKSGLVEAANAAARAKGTYLRDKFFRLKARRGYKRAVVAIAHKILVAIYHMLSQQVSYNDLGDLYLDKLNKNHLTRNLVHRLERLGYAVTLTLQQKAA

SEQ ID NO: 329415 - protein, 355 aa, unidentified
MTSTKYIGMDVHKESISIAVMNDAGKIVMECVIETKASMILQFIDGLRGDVHVTFEEGTSAAWLYDLLKPHVTKLVVCDPRKNASMREGHQSDKIDARRLAELLRLNHLHPVYHGEHGLRSLKELVRSYLTITKDLGRVMSRVKAIYRSWAIPCTGKQVYALRHRAEWLGKIGEPGVRRRAEFYYQQLDALRTVRQQVRRELLAESQKHQAWKRLCQIPSIGPIRAAVLLGILQTPHRFRAKRQLWTYSGVGIETSSSADHHVVKGQLERKKKQVEIRGLNRNYNHDLKNIFKGAAIVAASKPGPFAEFYAELLAKGMRPEMARLTLARKIATIVLIVWKRGVRFDAQYLKPQTA

SEQ ID NO: 329416 - protein, 345 aa, unidentified
MTEYKRIGIDTSKAVFTLHGIDQQDRPVLRINLRRAQMISFFRKLPSTVIALEACGSSHYWARELTALGHTVRLIPPQYVKPYVKRGKNDRNDAEAICEAAGRPGMHFVPAKSVTQQAQGMVLKVRETLIGQRTALINTVRGHAAEFGIIAGKGVGKIVPLLFAIEQEAAIPPEAKEMFALLGQQIDEIDARMKDIDAKLNAAHKASEVSQRLVTIPGVGPVTALTLAVEIDPAMFESGRHLAAWAGLTPKERSTGGKQRMGGISRAGNERLRVLLVSGATAVINAAMKPGSQQMTEWLRALLLRKPRKLVAVALANKMVRTAWAMMKRGETYRRPSAAAGAVAA

SEQ ID NO: 329417 - protein, 423 aa, unidentified
MGQWGARGVVSLTDRTSIDGNTKVDKAQTAWAGIDVGKTHHWVCVLDAEGNKLSSMKVANDQTEITATIATVGALADRIVWAVDIIGAPSAMLLALLIQAGQSVRYASGRVVAAMSAAYSGEGKTDAKDAYVIAETARIRRDLTVIDPGTDLVRNLELLTGHRADLIADRVRMINRLRDVMTSVFPSLEREFDYSSCKGALVLLTGYASPERLRRVGETRLAGWLQRRRVRNYAAVAARAIAAARAQSVTLPGQEIAAAMIAELATNTLALDQRLTELDAQIAATLDEHPQAEIIQSMPGFGPILGATLLVAAGDLAAFPSAGHLAAAAGLVPVPNDSGRRTGNLHKPRRYSRPLRHVFYLSAQTSMMRDGPNRDYYLKKRDRGRTHTQAVIALARRRIDVLWALLRQERIYTAIPPTLAQAA

SEQ ID NO: 329418 - protein, 338 aa, unidentified
MNIVFPGIDLAKNVFQLCGLNQAGKPVYTKRTDRKELLQTLANIPACLIGIEASTGAFYWQREFEKLGHKVKVISPQYVKPFVRGQKNDGNDAQAIAVALMQPTMQFVPPKSPEQQDIQALHRARQRIVNHRTATVCQIRGLLLDRGIPIGSAVSRARRAIPLIPEDAENGLSSRMRRTIAELYDLFNDLERRIHFFDKEIETVFRQSEACQRIAKVKGIGPETATAVVAAIGKGTEFKNGRHFAAWPGLVPRQHSSGDRQVLMNMTKKGDKHLRTLFIHGARAVVRVATNNNDGHMNQWVNQLKERRGFNKTTVAVANKNARIIWSMLRNETEYQVV

SEQ ID NO: 329419 - protein, 417 aa, unidentified
MNAEKEIVCGADIHRDFLVATMISRSGLKLQEQFGMDQDGLLAFRSWILDHRCLRVAVESTGNYWYPIFCILEGHVEFILANAFQIRNIECKKTDRLDSERIAIYCLNNLIKPSRIYPKDYRDLRSITRSREALVNARSKLKNQIHQSLAVCCIKLSSVISDSFGKSGRYIIEQLLDGKTIEQIISKIPSKRVKKKADELRKAIRNGLDPVQIRLIKTNLDAIDYLSEEIKLLDAEIAIKVKPFEEDLNIILSVPGIGLTSAATILAEMGDYRDFQNADKLAMYFGIVPAVYQSAGKLRTGKITKRGSKHMRRILVQVAKAITKTKKSSKLKRFFLRVFTRSGKKNVAAIALARKVLCIIYHLLMKREDYQEPEVKKNKPKIPSCVSPLSMMDIDEMIKTISQAGYLVKKGLKEGCG

SEQ ID NO: 329420 - protein, 348 aa, unidentified
MRFYTQQHRYTCGIDLHARSLYVCILDDTGQKLVHKNIKASPEALLKLIDKYQDDLIIGVECMFSWYWIADFCADHDIEFVLGHALYMKAIHGGKAKNDRIDSEKIARILRGGMFPYAYVYPRGMRAHRDLMRRQIKLTRERGELMSHIKNTLSQYNLPANTENLRYAKHREPLRTAFPDPSVQRSIDLDLARIEFYDDQLARLKWYLKKTARAVDPNTVIRLQSVHGIGDILSLVILYEIHDIERFPRVQDFVSYCRLVKCQRESAGKKHGTGGARIGNPYLRWAFGEAAALFLRGNPPAQRWLEKKTRKHNKAKAMTILAHKLGRAVYYMLKRETLFDQDRFLASS

SEQ ID NO: 329421 - protein, 310 aa, unidentified
MDMKAVGIDVSKDRLDVHVWPDGIAFAVARDGKGLAELIERLLPLTPDLVVVEATGGFETVVAAALAGAGLPLVVANPAQIRHFAQAAGTRAKTDPIDAAMIARFGHDMKPDVRPLPDEATQLLADLVARRRQIIEMIVAERNRERRATVRRIKKSIARLVRALEKELAEIDAEIDAGVRGSPAWRDKEDLLASVPGVGPVVARTLIAELPELGTLDKKKIASLAGLAPYTRQSGQWKGKSMIGGGRKSVRCALFLAALVASRHNPVLKAFRDRLRAAGKPKMVALIAVARKLLTILNAILRDQKPWQNA

SEQ ID NO: 329422 - protein, 423 aa, unidentified
MMKLKYSICCGLDVHKNVIVATIVTTNKDGISEYLQKSFSTINSDIQRFHNWLIENNCYHVCMESTGKYWIPIFNYLENDIDVCLTHPKYVKAIKGKKTDKKDSKWIADLYKFDLVRCSFIPPKDFRQLRELSRYRFKLVCMKSSEKNRIQNCMTISNVGIASVLSDPFGKTATEIMSYLLEHTADSMDEKAVRKLIKKGAKAKSDEIIEAIKGYTIETDQAKKLELARGHLEYLDDMITQTEVELYVRIKPYYEFVEFVSTMPGMTELSSTIVLAETGVDMDIFDDAKHLCSWCGLSPANNESAGKKKSVRIAKAGDYLKPMMVQCALAAIKSKKQPYFAIKYGRIKKRRGHKKAIIAIARMMMVCIYHMVSEKKPFTPTDYEELMNPQNHVERVVLNENNVFAYLESLGYDSSKLVKRNDN

SEQ ID NO: 329423 - protein, 529 aa, unidentified
MAAVMIGAGPHKRSHTAVAIGGAEEPLGKLRVRASASQAGRLVAWAAAWPERTWAAGGAGGLGHLLGQQRVAMGERVLDVQPKLGARVRLLATGASNKNDPDDALPVAVAALRSKTRRLVTADDHGAVLRVWSRRHRDLGRAKNQAAGRLRAVLCELVPGGVPEEITAAQATRILRSAQPSGAAGQARPDLAAELPDDMLGLDARIREPAKKLAVAVKASGTTLTDLFGAGPFTAATVTGDAAGVARFASRDHFASRNGTAPIEVSSGDRKTCRLSLRGNRRASHAIHMAAITQIRHSHSDGRAYYDKKVAEGKTHKEALRSLKRRISDAIYSHLVADARRAAAAARTEGPGGQPGNDSDSSAAGSHPERRLFGQATPGPGHHDTARHQSSHTLTAEADSKEDLDSHLTAAAKRTRSGRPPRWQAATGDGRELDDLVACWMAGHTRPAGCRSRSQSGWRPGAQRTTDLPVVAERVGDPGKAPAVFVGWLGSGGGACGDRLAEDRVGVIGNEQGAAGGAADRLRVDALPG

SEQ ID NO: 329424 - protein, 456 aa, unidentified
MKMKRKKKVLQVPKLESLKQINPNAAGVDVGASELYVCVPEDRDPRPVRVFQTFTSDLHEIAAWLKRCRVTSVAMESTGIYWIPLYEVLEEAGFEVKLVNAREAKNMPGRKSDILDCQWIQQLHSYGLLTASFRPPKDIVALRSLVRHRDRLIVARAVHIQHMQKALHLMNLQLDNVLSDITGVTGMRILRALVAGERNLDTLASYRDPSCKSSTQVIRESLKGNYQEEHLFPLRQSLELYDYHTTMIQQCDREIEQKYRALPSRVDLQRKPLPPSKKQQKKPRKNAPTFDLRSRLYETAGVDLTAIDGCNAATIQVVLSETGVDMEPWRTCGHFTSWMCLAPHNDISGGKVLRSRAKKTKNRANTALRLAAQALTHSDSWLGAYYRRQRARLGAPKAIIATAHKIARIIYYMLKYQREFVDLGANHYEAQHRKRQINSLTKKAASLGLLLVPAKA

SEQ ID NO: 329425 - protein, 313 aa, unidentified
MSQNTMTTIYTGLDIAKLNLQLHLVGRIHDLPNTAAGHRRLLKLLTTQAGVHVVCEATGGYERDVVAALHEAKVAVSVLNPARVRHFARATGQRAKTDDIDAAVLTAYGQALQPKPTAPRTEQEQQLAELVRRRVQVLEILVGQRQQVERLTVPALRRQAQSLVRRLERDVAHIEEQLKALRTQAAILDARVQKLEAITGVGAITALGVLAELPELGTLNRRQAAALAGLAPHPRESGQWHGRRSIGGGRAPVRRALYMAALVAAHSNRQLKEFYQRLRAAGKPAKVALTAVMRKLIVLMNHILKNPNFALQN

SEQ ID NO: 329426 - protein, 387 aa, unidentified
MTGQAQVSKFIPGDYDIFAGLDVDKRSIVMTFTDHKRLNKSLRLPYSSEQLLNYVRKQFPGQRVAFVYEAGPTGFGLHDDLVANHHPCLVVAPSMVPRAPGQRVKTNRLDSQKLSIGLRGGELRSIHVPSRSYRELRHLVQLRDTQVQQLTATKLRIKALLLFEGIPFPEAPPSSQWSARVVAELRGLPCSAEVRFKLDHLIGTMYFHFNSAAEVQKRIRRYCQNEAELRQSISLLKSLPGIGWIVAAHSVARLGDWREIENVRSIAGFLGLVSSEHSTGDKVNRGSITRAGDSRLRNKLIQSAWVAIGKDPELRAFYRRIFARHPQKVAARKAIVAVARKLTTRMYAVLKQQRPFVIRPDSATAPLTTEETVDPRVRLDAAQSDHP

SEQ ID NO: 329427 - protein, 421 aa, unidentified
MKKNSKSCRQSEPTTKRAKSRGPVQRDAKEVMAEVLEKLTGRGALDARAESGSARKGRRKNTVGPNLDRLTVGVDLGDRWSQYCILGLKGETLAEGQLRTTQEDVREFFQALTAARVVIEVGTHSAWVQDVITEWGHEVLVANPRLMEGSKRRKRKSDRIDANKLARLGRVDPQSLYPIRHRSREVRQDLVVLRARDALVSVRTELINTTRGLVKSMGTRLPRCSSPSFAQKVKDAIPVEVREALLPLVQLVATVNDGIARYDQKIEELGREKYGHTTLLRQVKGVGPITSLAYVLTLEDPQRFSSSREVGPYLGLVPKQEDSGDSQPQLGISKAGDRMMRRLLVGSSQYMLGAFGPDTDLRRYGLRLCECGGKNAKKRAVVAVARKLAVLLHHLWVTGDVYEPLHHSGAETGTAQAATAA

SEQ ID NO: 329428 - protein, 335 aa, unidentified
MKTWHVTTLTQSGYKYSFAQHSDAKELFDRLNKKFPDAHFKSAYEAGFCGFSAHYALTEQGFENIVVNAADIPTTGKEKVMKTDAVDSEKIAWALKRGELTGIYVKEKAFMDDTNLMRLRQRFVKDLSRQKNRLKQLLYTQGVTYPERFSRCRTHWSRNFMKWLREEVELLSEQKLTLALLCDQVDNTRQAILKVTREIRRMSTTAKYEENFGLLKSVPGFGLILSMSMLTELDNNPTRFPNERSFVAFLGLIPTCHDSGDKKVSGEKTFRGNKHLGPLIVEASWVAIQRDCELGAYYTNCCQTMKPQKAIIKVARRLACRAYAVLKTKKEYVLP

SEQ ID NO: 329429 - protein, 399 aa, unidentified
MMRFVGIDIGGERHALAVVDEDGTVLTKSTFFGEEAAGYKRVRELLGNADDCLVAMEATGHYWRNLFAFLASLGFEVALLNPLRTRRFAEEELERTKTDSVDALGIARFAAQKRPAPTPVSDEVTAELRELVRLRTRYVDELSDRMRQLHRAVDLGFPEFTRHVRIRTLLATAILARYPTARSFARVSVRKLARLTYDGRHRVGETLARALIEGAKVSVGNHHSEPYQLHVKYTCADIELLRGRVKQLEQDIERKLQTHEVGKLLTTIDGVGTQTAACLIAELGDPSRFRDAAALASYVGVVPRLRQSGKRAFSGARGLPLGNTRLRHRLWMPTLVAVRKNPWLRAHYEHLLAAGKRPKVAIVACMRKLLGAIYSVARNRRPFVPHLATTGHEQPVTAG

SEQ ID NO: 329430 - protein, 349 aa, unidentified
MLADELDYVVGVDTHRDEHVLAVVVAPTGTVVAQRAVPANARGYAQALRFVQEHADGARVWAVEGAGHYGAGLARYLAGRGETVLEIGRGPRDERRLRGKDDSLDAIRAARTALASEKLSLPRSGQRREALRLLLLARRSAVDVRREALVQLRSVIVTCPDSLREQLRGLPAGRLIQRCSRLRRSPSCTPDELATRLVLRSLARRVEAATAEAAELEREILGHVRALAPQLLAEPGVGPIVAAQLIVAWSHQGRVRSEAAFARLAGVAPIPASSGQTIRQRLSRGGDRQLNCALHTVILHRRQHDSTTKDYIARRVAEGKTTRDAVRLLKRYLARHLYRLLQNQEPSMA

SEQ ID NO: 329431 - protein, 318 aa, unidentified
MNSQVVYVGIDVSKENLDLAVNPRKQIRRFHNTATGIGKTIDHIRETGSTLVVMEATGGLEIPLAAALGEAGIPTAIVNPRQVRDYARSTGKLAKTDAIDAQMLADFAATVHPEPRPLAEPQARELKDILARRQQLNEMITAEKNRLQRARGVLLDHIRAHIDWMEKEMSDMDLALRRFIEESPMWREKDILLKSVPGVGPVLSFTLLAELPELGKLNRKQIAALVGVAPFNRDSGKMRGKRSVWGGRASVRAALYMGAMVATRFNPVIKRFYQRLIAAGKAKKSAITACMHKLLTIINAMVKHNSFWSYAPEPVVIS

SEQ ID NO: 329432 - protein, 400 aa, unidentified
MISVGIDVSKEKSMVCILRPYGEVIASPYEITHTADSIIALIERIRYLGNETRVVMEATGAYHFPLLSSLKQSNIFVSVINPLVMKKYASVAIRKGKTDKLDSVRIANYGIDNWFHLKDFQVLDAAYEELKILGRQYSHYFKMKVESKIALGNIIDRTMPGIKKLLPGNSDNLTKDKLSDFIREYWHYDNITKKTEAKFVSNYCQWAKKKGYHANEAKAKAIYAMAKAGIPTLSSSAASTKMLVLESVRVLGEVNQTLQTILAQMQMIATNMDEYEVVRSMPGVGDVLAPRLIAEIGNVKRFHSGSALIAYAGLDSPPYESGNFSGSKRKISKRGSSLLRKTGYEVMKCLKTVKPSNDAAVYQYIIKKESEGKPKKVAKIAGLNKFLRIYYARVMEVYQN

SEQ ID NO: 329433 - protein, 411 aa, unidentified
MDILYSCCAGLDVHKETVVACVRKLTGGAVRQEVRTFRTETQALLDLADWLTDEGVTHIAMESTGVYWKPIWNLFEDVFELLLVNAEHIKQVPGCKTDAKDSRWIAELLQHGLLKPSFVPDKPVRQLRDLTRQRVQLIRQKTQVANRIHKTLEDSNIKLASVASDVLGASGRAMLQAIIKGENDPIILADLARRKLRAKIPQLQEALSGEIEDHHRFLLGVLLEQVEFLETQIDKLTARITAVVPVPFAEAIHRLDTIPGIDRRAAENIIAEVGADMEPFASAGHLASWVGLCPGNNESAGKRRSGRTTKGNKWLRVVLVQCAWAASRSRGTHLRQLYGRLVGRCGKKRALVAVAHRLLLIVYNVLKKGQVYKEPVQAAPDRPQDKERLKQRLLKRLEKLGVKVQEIEAAA

SEQ ID NO: 329434 - protein, 391 aa, unidentified
MSMYFIGIDISKYKHDCCIISAADQKVVSKVTIKNNKAGFNELLTIIHSLANPADIRIGFESTAHYALNLELFLENSLLTFMEVNPVLISEYKKSKTLRRTKNDSVDCESIARWLMTVEYNPHSKGFYHAYSLKSLTRLRDKLIRQRSFYLVKITNVLDHTFPEFKPFFNERLSKTALYLLENYGSAEKMARMNSASYEKLRSVSRGKFSPQQFLRLKELASNTVGVNNSIFDVELNSLLSLYKSLIKEIDTIEKEINKLIEEVHPHYMSVPGIGPLSAAVIYSEYGDISNFTNPGQMLAFARIEPGINESGTESHGGKMVKRGSSQLRYTLINCCLPLIRFDMTFATYYAKKRGEGKPHRVAITHVAKKLIRVIYALESQDIDFNAQKLR

SEQ ID NO: 329435 - protein, 338 aa, unidentified
MEVLRQNVGIDIAKDSFVATFTVLLKGQLIKYKGTTKFQNTHKGFDKFSNWCKKLQEDNLLVNFTMEATGVYYERLAYFLFEKKQVVHVLLPNKSKKFAESLNIKSKTDKIDSKMLGRMGVERILEKWVLSSKIYRLLRTLSRERRQLVKERTRIKNQLHAEEHAGEPIKTTIRRMKSHIKYLDKQIDSIEKELETVVSKDAYLSEKVKKITTVPGLAFKTVVGVIAETHGFVNISSIKQLNSYAGYDISIKESGKWKGKARISKKGNSHIRQIMYMPSLSAIQHSITYKSFYERLNQTKQNGLISGTAVQRKLLGLIYTLWKNDSEYIENYKIKMAS

SEQ ID NO: 329436 - protein, 393 aa, unidentified
MFIVGVDIAKRNHEAIVIDQSGNVVKKAFNFKNDTEGFSKLISNLQSLSKTPTDFTIGMESTSHYWLALYSALKRLGYPVHVFNPIQSNALRGMYIRQVKTDEHDSFIIADVIRFGRYTEGGMPPSDIYELRELCRARTFIVDMTADLKHKVIALLDQAFPEYETLFTDVFGLTSSELLRTASTPDEILNIDTEKLTQLIEIPSRKRFGTAKAEEIKALAQNSFGIILEHNTMGILIKQHMEHIRFSEQQIAEIDSKIAELFSQFDTYITTIPGIGPTLGATIFSEIGDISRFSSPAKLAAFAGIDPTVKQSGEFVGTHNHMSKRGSPYLRRAIWQASTAAATFDPHMKAFFQKKRAEGKPYMNAIGHVTRKMTNIIFAVLRDNKPYYNPDEQ

SEQ ID NO: 329437 - protein, 418 aa, unidentified
MDVVHERCCGLDVHKQTVVACLVTPRSARAGGPPTKVIRTFGTMTAELLQLADWLSAADCTHVALESTSAYWKPVWNVLEGSFALLLVNAQHVKAVPGRKTDVKDCEWLADLLRHGLLRASFVPDQPERERRDLTRYRTAKVRERSREVQRLEKTLEGANIKLSAVATDITGKSGRQILAALVADASTATDRPAAAALAELAAGRLRAKLPALTQALEGRFGAHHRFLVAEHLAQIDFLEETIDRLSQEIATRLEPVEPALDQLDAIPGVGRRTAEVLLAEIGTDMSRFPTASHLASWAGMAPGSRESAGKRQSERTRKGNTALRTALVEAAHAAARTKGTYLAAQFRRLSARRGAKKAAVAVGHSILVIAYHLIKDGTVYQDLGGQYFDQRNREQLERRLVRRLEALGNTVTLQAAA

SEQ ID NO: 329438 - protein, 342 aa, unidentified
MSIHILGVDLGKNICSLAGLDGTGAVVFRKRIQRHRLLVVLSELPRCVVAMEACGGAHHVARFCREIGHEPRLMSPYYVRPYVKVHKTDDRDAVAIAEAASRPTMSFVTIKSAEQLDLQALHRARDRLVQSRTRLVNQARAFLMERGIRVPQGRHTFQRALADLLKDEHADISPRMTVLLEDMESELADLNQRIGAFDDEITALAKSDPTIRRLTAIPGIGPMIASALVAAVGDGATFKKGRDLSAWLGLVPRQASTGGKARMMGISKRGNPYLRRLFVHGARAALHLIKDRTTPLSRWVDQLALRSHGNVATVALANKLARVAWAVLVKQRAFDQSLLLGR

SEQ ID NO: 329439 - protein, 346 aa, unidentified
MMIIGCDFHPSWQQVSWLDTETGETGERKLVQSSGDAERFYRQLPVPSLIGMEATGNCHWLVDLLAEIGHELWVGDAAQIRASCVRQQKTDQRDAEHILKLLVEGRFPRIWMPSSEVRDLRQLLLHRHKLVTIRTRVKNELQHLCLNQGVQRKYKLWSKAGLQVLRELPLKPWATRRREDLLGLLAMLDQQIEPLDRAVKEEAQRDKMALLLQTQPGVGAVTALAYVLTMGDVSRFARGKQVASYLGLIPREHSSGGRQKLGAITKQGNRMLRMLLVEAAQMAVRCDPGLRKEYLHRCHQKPKAVAKVAAARKLAVRLYWMLRTQKPYPEVVRIESSPAQALVGAS

SEQ ID NO: 329440 - protein, 316 aa, unidentified
MTEAGGFVGIDVAKAELEVVVRPSGARWTVTNNPAGLAQLQERLQASAPSLIVLEATGGYEVAVVAALATAALPVVVLNARQVRDFARATGRLAKTDAIDAGVLAHFAEVVRPPVRPLPDAMTQSLQAWLMRRRQLVEMLLAEEQRRSRAPRPIQRQIDQHVRWLRAQLGAVEKDLAQTLRESPVWREKDNLLRSVPGVGPVLTTTLLGDVPELGQLNRKQIAALIGVAPLNRDSGTYRGRRAVWGGRARVRATLYMATLTAARYNPVIRAFYERLVAAGKPKKVALTACMRKLLTILNAMIARRTAWKPPAAVSA

SEQ ID NO: 329441 - protein, 507 aa, unidentified
MGTKSRKQVKRLMSGSSYSSEELSSLTMNDGTTVVYSVNGDIKRSICGSVDVHKKILMAAICITDPDSLKSTFFVRKFTTMNADIRTMAGWFKEHDVRDVCMESTGKYWIPVFNILEQNDIKPILTHPKYVKQAKGHKTDFRDAIHMASLFRMDLVVASFIPPAEIRDLRELCRYRLKLTYIRTSEKNRFQNSMTISKVRLDSVFTDPFGKSASAIMEYLISTDPEQVNDDDILALISRRGNVKASNEEILDSIHGYEFIGVQRDKLQIIRMHITQIDECIDMIDSKLEYYRQKYANIIHHLTTMVGITSMSALYILGEIGTDMSVWRDDHSLACWAGLSPANNASAGKKKSTKVGNGGHYLKPLLVQCALAAVKSTKKDPYFHHKYETLKKRRGHKKAIIAIARKMLVAIYHMIRDDTNFHPIDQEEVTQKTKKTQGLNLKNVLIFLKEHGADRNMIRMVEEQCSENTEIKDAKEKQSNLAITDASQPIQESVNGMSLSTSNRVAP

SEQ ID NO: 329442 - protein, 346 aa, unidentified
MNDTLVGVDLAKAVFQLAISCRPGRFDSHPRLRRDQFLSFFAQLPAAVVIMEACGTCHFWARKLQELGHAVVLLPPDLVRPFVRRNKIDRSDAKALVEAYRNGEIRPVPVKTPEQQVLTSLHRLRQGWMAQRTARLNALRGLLREQGVFIRVGAREVVPAVWALIEDADSPLAMPLRALFAEACQEIREIERRVELVERELAALARQMPSVERLMQIPGVGLIIATALVGFVGDLRRFPSARHFASYLGLTPREYSSGLRQRLGRISKRGDSYLRMLLIHGARAVLSRAGSASNPDRLRAWALALEERTHRNKAAVALANKMARIVWTVSVKQTDYRVLPATEKVA

SEQ ID NO: 329443 - protein, 418 aa, unidentified
MKGVARWKLSITCCCGLDVHKKSITACVLWAEAKGKSRKEKKRFGTSTHDLLQLADWLEQCGVTHVAMESTGVYWKPVWNILAERFEVLLVNAQHIKAVPGRKTDQKDSEWIADLLQHGLLRGSFVPPQPTRELRDLTRYRVSLVQEINRIANRIQKVLEDANIKLASVATDALGASGRAILEAMLAGEQDSARLADMSKGLLRNKIPELKLALEGRMTEHHRFLLRQLFEHLRFTESKRSEIEQEIDKRMLPFEDKVTRLCTIPGVDRVTAWGMLAEIGLDMNQFPSSGHLASWACLCPGNFESAGKRLSGKMRKGNVSLRRCLSQAAWAVSMTKNNYLSALYRRIAARRGAKRAVMAVAHALLAIGYHMLKRKEDYRELGADHFDRIDANRIRRSLVRRLERLGHKVTLEPLAQTA

SEQ ID NO: 329444 - protein, 417 aa, unidentified
MIRKVMEVIHQCVGGLDVHKKMVMACRRRMLGDGQVESETREFGTTTLQLRALSKWLSEWGCTHVAMESTGVLWIPVWNVLEGDFKLLLTNARHLKKVPGRKKDVTDAEWIAQLMQCGLLKGSFVPSREIRHWRTLTRRRMKLVDQRTGVVNRMHKVLQQGNIKLSSVATDVLGVSGRAMIEAMIEGESDAEKLAGLAKGRLKSKHEQLVESLEGRLNDDDRWVMKELWEQMEYLEEEIARYDDQIKEKMSPYEESLGRLMTIDLIERRSAENILAEIGPDMSFFPSDDNLVSWAGLCPGSEESAKKNRSGKTPKGNQWLRRALVEPAWGAARRKDGYLGAMYRGIAVRRGEKRAVVAVARTILQAAWHVLSKGVEYKERGGDYFDRQNSEQTKTKLIRRLERLGYEVELKPKQATV

SEQ ID NO: 329445 - protein, 332 aa, unidentified
MYFDHYLGIDISKATLDAALIIKEGEVVGQTKVANNSHGFNDLASWIRKLKVKLSDVLVCAEHTGIYGYDLQIWLDDMQISFAFVSALEIKRSLGIRRGKNDAVDALRIAEYAYIRRESISLSHKPSDVIFQLRALLGERKQYVRMRAALLARKDALHQYESKESIDRREEIIDKYAEYIASVDKQMRGLMEHDDEIKRNYELISSVKGIGLVNAINTLVYTNNFTSFQTPRQYACYCGIAPFEHTSGTSIKGRTAVSKMGNHQLKCELTMAARSAIIHDPWMKQYYKRKMMSKGNTPGAHGIVLNAIKFKLIVRMFSVVKSGIPYKVMAYC

SEQ ID NO: 329446 - protein, 380 aa, unidentified
MRMTTDQARVTAGVDAHADTHEAAALDERGRLLGTRTFRTGSEGYRELLAWLEQFGELVVVGVESTGSYAAGLVRFLHAQGVDVVEVNRPHAHTRRRRGKSDPIDAEMAARQALSGDASAIPKTTTGIVESIRQLRVARDGAVKARSAALCQLSDVIVTAPNGLRERLSQRKRTRAKASLCLGLGLRPRTTHLGEPAEAAKLARRSLARRIQDLDEEIATLDKHLGTLVATAAPRTTKLLGISTGHAGQLLVTAGQNIERLRSDGAFAALCGASPVPVSSGRRSRHRLNPGGDRDANRTLHMIAVVRLRYCHRTRAYAQRRSTEGKTKREIIRCLKRYIARETYRTLCADLHDLQQPPRPAAAVTIMCGAGPIGRTRRRT

SEQ ID NO: 329447 - protein, 442 aa, unidentified
MTDLSSSETPTEWAAFVAIDWADEKHSWALTLTASAKVERGELDATPEAVEVWAAGLNVRFSGRPIAVCLEQKRGALVYMLAKYAHLVIFPVHPKTAAQYRQTFCPSGAKSDPADAAWLLDLLLRHRHQLRELRPDTPDTRLLQHLTEYRRRLVDEATRQKNRLTSCLKIYFPQLLGWFDDIGSPVAGALLQRWPTLPELQRAHPGTVRRFFHEHNCRSEERIQERITSIAAAVPAIQDQAVVEAESLRARSLVALLTTLRSQIALFDTRIQELVAKHPEHGIFASFPSAGPVLVPRLIAAFGTQRDRYGAASDVQSLSGIAPVTEQSGKQQWVHFRWACSHFLRQTFHEYAAHSIVKSTWARAYYDSQIKAKKSHHAAVRALAFKWIRIMFRCWKDGKPYEEHAYVAALQKRNSPVAELFRATGIGWKPSAGFQRLSANPS

SEQ ID NO: 329448 - protein, 404 aa, unidentified
MWFTGIDWADTHHDIFIIEESGQKLTSFRVPHTPEGVAELIKRLEVVCGPHDKTAMACIIETNHGLLITKLLEAGFAVYPVNPKTVDRKRSASGAKTDKIDAYLLAKHGRSEFADLRRLSPDSPVIAELKALTRDQDGLIHSQTRLVNQVTACLKAYYPVALSLFSKVQQPSTLQFLQAFPTPQEAMNATPQQIAAVLKTAGHPKAQQAALKIVEQVHQPHLTADAITTRTKARLLLALIRQLVPVMQEIATYDKEIERLFLTHADSHLFSHLPRVSKRLAPRLLAEIGDDRERYQNAASLQALAGTSPVPYESGNYAKPHRRYACIKPLRNVLQQFAWQSIQTEEWAMAYYQRKRREGKSHSVTVRALANIWVRILFAMWIKREEYQPTIFEQARREHAPRAA

SEQ ID NO: 329449 - protein, 408 aa, unidentified
MRVMNCACAGLDVHQKTVVVCTLLGDANVEPQLQKRTFGTTTAALLELSDWLKEQAVTQVAMESTGTYWKPVWAILEGSFELTLCNAAHIKQVPGRKTDQKDAEWIADLLRHGLLKKSFVPPVEQQDVRELTRYRSQTTAERSAVSNRIRKMLEGANLKLGSVASDVMGVSGRRMLEALVKGETDPNQLADLAVGSLREKRAQLAEALRGRVRPHHREMLRLLLAQWKFLDALVGEIEQSIEEEMRPFAQAVEWCETIPGVSTTTARSLVAEIGTRMEQFPSSAHLASWGGLCPGNNESAGKQFSGRTRSGNRWLKKTLCQAAWAASHTHHCYFASQYRRLAAKRGKKRAILAVAHSILVVAYTLLKRQCSYQDLGADYFDRMQAESLKRFCVRKLEALGHRVVLEAA

SEQ ID NO: 329450 - protein, 418 aa, unidentified
MKFEKDTRGIKRYIGFDIHKEYALVGGQNAQQEWVLAPRRIGMEKLREWAAANLRKGDAAIIETTTNVWDVYDIVEPLVSYAVVAHAGGVRQIAEARVKTDKKDIECLIRLLIADIVPEVWVPPVEVRELRGMISYRNRLVKTSTMIRNRLQSLIHRHNLTTAGVPKGKLRDKAWWEAQKVSALEKIQIRQELAMLDEIEKHKGEVDAELGRQSLGEVWGKQSMRLLQLPGFGVIITMTVLSAIGDVTRFESANKLVGYSGLGAGVHDSGKEHIEKRITKSGRKELRWALVEAAWRAIRISPYWKEQYEKYLRRMRKPNQAIVVIARKLLVVVWHVLTKEETDERVSEEDLAYKMLVLAWDLDESVRMGLSYKQFAKYALMKLGVETDITRFVRKQVPRRLAPREEVLARMAELGIAQ

SEQ ID NO: 329451 - protein, 360 aa, unidentified
MPHPTVTRAAPLFFGLDVGDRTTHLCCVDGRRVVVERLSFPTTREGIGKVFADRAPARIVLEVGSQSPWMSDLLRSLGHDVIVADARRVAQLTRAGRKTDRRDAETLARLLQGMPELLGAIHHRGREAQTDLAMIRARDVLVRTRTRLVQHVRGTLKVFGLRTLSCSAKAFHSKARKDVPEDLQPALAPILDQLADLEQRIRHFDREIERIAEERHPAAARLRQVNGVGPLTSLAFVLSVDDPSRFKKSRRVGSWLGLCPKVMASGDRDPQLSISKAGCSYLRRLLVQSAQYMLGPFGKDGDLRRFGLRLCERGGKAAKRRAVVAVARKLSVLLHRLWISGEPYEPLRNSLRVAAATSSN

SEQ ID NO: 329452 - protein, 345 aa, unidentified
MLHVGLDLSRHRVDVRVLEPSGATVAELAVAPVDAELRRLAARLSAQGPVRAVIESMNGARFVHDTLELAGWDVLIADAAKVKGLAPLACKTDRIDALVLAELSRRDLVPAIWLPTPENRAERERARFRLHLVKHRSALKCRIHASLLAFGHPNRYSDLFGEAGKNYLDDLVFPEPWRHNVTAARALIDDLNIQIRGIEAELAGVAGTHRYVKLLRTAPGIGPILGYTIAAEIGDIARFETPTKLVGYSGLCPRVYQSGQSERRGPLAKNGPKFLRWALMEAAVHAAGAPLYRERYLRTRARLGRFRGPKVARVEVARRLAESAWHMLTKGEPFAPAGAASTLAS

SEQ ID NO: 329453 - protein, 338 aa, unidentified
MSVYVGIDVHRKRSQVAVVSEEGKVRLNRNVVNGSEPMLRLIGGLPAGTPVAFEAAYGWGWLVELLQDYGFDPHLVHPLRCKAIASARLKNDKVDAAILAQLLRADLLPEAWIAPRPVRQLRALLRHRASLVRLGTQLRNRIHAVVADFGHDRTGSYWTGPGRGWLAELDLPAVSREIITDCLAFLDALAPRIERLDAEVRRHARTDPRVKALTTLPGVGQFTALVMVAEIGDITRFGSARKLASWAGLTPTVRGSDRTVRHGHISKQGSAWLRWVLCQAAQTAKRHPDFAASYQAIAHRRGNKIATTAIARRLLTRAYHLLTDPEGPPGPGRARTVA

SEQ ID NO: 329454 - protein, 362 aa, unidentified
MEQFIGCDAHKKYSVFVAVNERGEPSQEVRVGHDREQYRRYLERLPAGSQIAVEASGHYYWMVDEMEAAGHHPRLTHPLEAKKRMGKTGKKTDKLDANGLGILLRNGTLPEVWIPPAGLRDQRELLRLRMFLVQQRTRLKNRIQGALARYNIQLGVGDVFGGEGRQCLGARLKEFPEHTRQSVELELVTLDFLEVQIEEVEKPLEAIMQVTAEADLLKTLPCVGRILSMVMTLEIGRVERFPSAAHLASYAGLVPRVHSSGGHTRLGQICREVNPYLKWAFVEAGNLVVINQRHMPGQHVVRLYQRVKRKRNHQKAVVAVARHLAEAAYWVLKKQEVYRPPQPQLKAPAKAQAAKVLSSTHG

SEQ ID NO: 329455 - protein, 343 aa, unidentified
MDSYVGLDVSLREVSACVVDEAGTIQFERTLAADPDVIAAWVHAQAPTVRRVGLESGPTSAWLWRELAKRGLPVICIDARHAKAALSMQINKSDRNDAAGIARIMQTGWYREVQVKSPHSHAIRGLLNSRSLLVKVQRDLENQVRGLLKSAGLIVGRAKDGVFSARTKQLLAAHIDLAAIALPLLEAREAIHGQLVQLERRVRQLAKEHRQTSAFMTVPGIGPMTALAFLATVDDPRRFRRARAIGAYVGLTPRRYASGEVDWTGRISKCGDTMLRTYLFEAAGVLLTRVQKWCALKAWGLRLAKRSGMKKARTAVARKLAVILLRMWRDGTQFHWTAAPAAS

SEQ ID NO: 329456 - protein, 360 aa, unidentified
MVTMTSVALDVHARSTQATSVDMVSGEVVRARLSGDTDELVRFLCGLPQPIHACYEAGPTGFGLARAALEAGVRMEVIAPSKTPRKPGQRIKTDRRDADHLVRQLIAGALTPIRIPTADEEAARDVVRDREQVRVDLMRARHRLSKFLLRNGRVWPGKSAWTQRHRAWLARQRFDELDLELVYADLLATVDALSDRRDRLNRALEQIARRDAYWSTVSRLRAFRGIDTISALGIHLEAGNWTRFATAKDAGAYFGLVPSLDQSGESKSSGAITKTGSRYARRLLVEAAWHNAHPPRVGLTLRRRQEGIPEPVRQISWACQRRLHHISRRFDERRVIPNKANIARARELACFLWAAATWQP

SEQ ID NO: 329457 - protein, 346 aa, unidentified
MGVVCRIGLDIAKNFFQAHGVDKQGKEVFNKKLKRADVLPFFANLSSCLIGLEACGGAHYWARELAKLDAGHTVRLISPRHIKPFVINNKTDAADARAICEVVGRPSTRFVNIKTVEQQDMAGWHRIRERKVKERTALVNQIRALLHEQGIILPQGITHVRKQLPHIVENLDNGLSLCARDYLSELYGELVDCDALVAKYEARIKTFAMNNEDCKRLQKIPGVGPLTATAIVAHVGTAKHFKNGRAFAACMGLTPREHSSGGKQKLLGISKRGNSHIRWLLIQGARIITRYCLLKLPEYAEQRIRWVRELAERRGKHVAAVALANKTARIIWALLARGEEYRPSLT

SEQ ID NO: 329458 - protein, 339 aa, unidentified
MKKRYMGVDLHRNCFTVYTRQEDGSGESREWSIGELKAFAKTVKTSDEVAVEATGNTRLFTEALKDRGCRIVVVNPHQFQVISRSVKKTDEHDAKVLAEFLSKGLLPEVRMKDEVHARVASLAQTRDKLVKLRTTLKNKVNNLLAARGVLIRKESLSSEKGLAEVLAAPVSPMEHMELEILVGEIRHLNESIKKLEGLLRDQGPKLPGWENLTSIKGIGDTGASILLSTIGNIKDFADEGKLAAYFGIVPRVSNSNETQHSGRITKRGCKLGRTALVQCALIAARYSPYLQAFYRKIAATRGTGKAIIALARKFLGVIYKTLKNNWIFEDFPRFVLANG

SEQ ID NO: 329459 - protein, 461 aa, unidentified
MRKARKVAGQRGKKRVDVTANLEILHPHAAGIDVGNAQHYAAVPVGRDPQPVQTFGSFTADLHRLGQWLRACQIETVVMQATGVYWIALYEVLEGYGFKVYVVNAKHTKTLPGRKTDVLECQWLQKLHTFGLLNNSFLPPEEIRVLRTYLRQRENLVAGAGTCIQQMQKVLTQMNVQLANVLSDLSGKSGLGILKAILSGERDPYRLAALADPRVQASRKEIAQSLEGHWREDLLFVLRQVHDLYFFHLDNIAECDRRIEAHLQTLQSKVDLASQPLPQPTSLPRRKHIPQTNLQEELYRIAGVDLTRIDGLQVQTAQVVLSETGVDMTPWEDEHHFASWMGLCPNHQITGGKVIRRGTKKVLNRAALALRLAAQTLHHSQSYLGAKYRRLRAKLGAPKAITAMAHHLARLIYRLLRFGTEYHDKGMQHYERQYRKNQIEWLKKQAAQLNMQLITNTGVAR

SEQ ID NO: 329460 - protein, 356 aa, unidentified
MGQKWLVIIKIIKYKSMQITTKFYLGIDVSKLWFDLSLLSVINYQKQAMVTERFNNNEAGIKTLRQWLKKQKVGFDDNTLLVIENTGIYHRLIWKFCSTHQLPIHIGNAAHIKWSFGIARGKNDTIDSQRLCSYAHKHADELKATPALNPVFIKLKDLMASRSKLIAQTGSISSYLTELKLSNNKTTQKLIEQAHKPVLAGLKKSIALIEKQILNIIDEDPAIKTNYNLLITVPGVGHLTAVYILCCTNNFIDKISGKQLACYAGVVPFQDKSGSSIKGRNKVHKMANKELKKMLHLCALSAIRYYPEFKQYYDRKKKEGKHSMSILNAIRNKIVLRAVAVVNNQKAYVENFKKAA

SEQ ID NO: 329461 - protein, 345 aa, unidentified
MSVYVGIDVHRKRSQVAVIDQVGEVLANRNVPNGVTPILSVIGDLPSGTPAAFEAAFGWGWLVELLEDYGFEPHLVHPLQCKAIASARLKNDKVDAAILAQLLRADLLPEAWIAPPQVRQLRALLRHRIQLVRLRTLLRNRIHAVLADHGHDRPGGYWSGPGRAWLASLDLPAVSAEVICDALALIDALESVIDRLDAEIRGHARSDPRVKILTQLPGVGPFTALVLLAEIGDVTRFASARKLASWAGLTPTVRGSDRTVRHGHISKQGSVWVRWILCEAAQTAKRSPQFAARYQIIARKRGKKIATTAIARKLLTRAWHLLTDAERAASPPAITTASAPPTGAP

SEQ ID NO: 329462 - protein, 344 aa, unidentified
MPCFAALDVSQETTAICVVDDNGTIIAETTIATCPEVITSYLRDRAPNLSRVGLETGPLAVWLWNELAARQLPVLCIDARHANAALKMRPVKTDRNDAAGLAQIMRVGWFKQVRIKSHDCYQVRSLLTARETLVRIRVKIENELRGLLRTFGVLFGKRVGGFTGRAYEIICGELEASPEMRIIAETLMKARASVCDQIKVLDTRLAAIARANPTVKLFMTAPGVGIITALSVVSAFDDASRFKRSSSAGAYLGLTPRRYESGETSRNGRISKQGDKMVRKHLYEAATTLLTRNLRSSSLKTWGMKLVKVSGFKKARIAVARKLAVVLHAMWKTNTPFRWTQSAA

SEQ ID NO: 329463 - protein, 477 aa, unidentified
MAKKAKTLPALTLLPILPHETLSIGVDVGKFKHVAGFLSRTLLERHEHFEGCPTFSFEQSREGFRAFVDRIHSYVPLEQATILLEHTGHYHKNVEQYLLELDMTVYRIHVQKRAAGLLKTDKRDALGLANTLYTQLELGAQVPDKMQLVRRAIPPTKAAAQLQSLIQHRYELSQASTRYRNKLTAICDEIFPEWIQGFHDPNLPTSLAFRERFPTPHAIATASLAALHELRARNFPSDAQLLHLQQLAQETIGVKDRDRQHGLLLEQGLLIKELRLIQDHLEVLQTEMSAIVNNCREGQRLLSLPPIGGIQAATIIATVGNIANFEKASELKAYFGWVPKRNQTGTSFDRTTLSKRGVRPMKQMLFLMAVRATTLDGEWAKIYQRLLPRMATYDERTKDYRGKLKVIGRIAGQMAAMIFALLKTDQELVSRVSPGQELPPPMLYDPETHRKHREGNSRSLKPDTQPRKIIQLPREPS

SEQ ID NO: 329464 - protein, 300 aa, unidentified
MEYYVGLDVSLKQTSICIVDQAGLVVREGVVDSDPEAISAYVKSKAPDAVRIGLETGPTSTGLWTELKRLGLPVICIDARHAKAVLKMQINKSDRNDAIGIARIMQTGWFKEVHVKDIDSHSVRALLASRALLVKIKRDLENHVRGLLKNLGLVIGRAKFNVFAVRVDELIEGRPELVAAVRPLLEARNAVEQQVSELDRKVMRLARHDAHVRRFMTVPGVGPITALAFKATIDDPARFARSRSVGAYVGLTSRRHASGEVDWSGRISKCGDAMLRSYLFEAAGVLLTRVPKWSAVKAWG

SEQ ID NO: 329465 - protein, 338 aa, unidentified
MNNNMEACGVEVSARELVVARKGKAGVQLTRFANTAAGHRQLLRTLTRGGQRVRVVLEATGLYALDLALLLSAQEQVQLMVANPRAVRHFAQAMMQRSKNDQLDAVVLLEFAERMPFTPWVRPQENALALWAIARRLQALTRLCTAEKNRAHAMGLSEAIPATVRRDIARSLQFHQRAMKKLRQQALQCIAADAQLQQRYQLLRSVPGLGEISAVQTLAELLLLPEDRDVRQWVAYAGLDPREYSSGTSVRKYTRISKVGNAHLRRALYMPALVASRVEPHMRGFYEHLLARGKSKRQALVAVARKLLHAIYGMFRSQRPYDGTRVYLAAAAQAEKFS

SEQ ID NO: 329466 - protein, 367 aa, unidentified
MFKNSTAFVGLDLGDKRSNVFMLDQGGEVIEETRIPTTEPAFRRKFASLPPCRVAMEAGTHSRWASRLLEQLGHEVLVANPRRLRLIYENSRKADEADAEHLARLARLDPQLLSPIRHRGPEAQAHLTVIRSRDSLVRARTLLINHVRGSVKSTGARLRACSADSFHHRVAPTIPTELAPALMPVLETIASLTAQIHAYNRQIEQLCQEQYPEARHLRQVSGVGAITALAYVLTLDDPDRFRKSREVAPSLGLVPKRDQSGSRDPQLRITKTGDSYLRRLLVGSAQYILGPFGPDCDLRRWGLKLAERGGKNAKKRAVVAVARKLAILLHRLWVTGEVYDPFYHSQPGQTSVTQTHLRVRQPEAVCA

SEQ ID NO: 329467 - protein, 410 aa, unidentified
MEVLYPHCAGLDVHKDTVVACVRHMSDGVVMREVRTFKTTTTDLLALSEWLASEGCTHVVMEATGVYWKPVWHILSDGDVALTLANAAHVKNVPGRKTDVNDATWLADLLAHGLIRASFVPDAATQEQRGLLRTRKQLVRERASHVQRLQRTLEDANIKLDSAISDVTGVSGRAMIQALIDGEGDPARLAELAHRRLRTSPETLREALRGRVTAHHRFLLALHLKQIDALDEAIAGIDAEVDRHVEPFRATIAQLTTIPGISALSACVILAEIGQDMSRFPTQGHLISWAGLCPKNDESAGKRRSSRMRKGAPWLKTTLIQCAWAAARKKGSYLQAQFHRLRARRGAKKAIGAVAASMLTAAYHMLKDGTLYQDLGADHFDRRAKQGAAKRLIAKLESLGYDVQITPSAA

SEQ ID NO: 329468 - protein, 353 aa, unidentified
MRTHYVGMDVHQASTSIAVMNGSGKLIGESLIETKAQTIIDFLKGLSGEVHATFEEGTQAAWLYDLIQPHVTELVVCNPHHNHLLKSGNKSDRVDARKLAQLLRAGMLRPVYHGEYGTRTLKELVRSYECLVSDTTRVKNRIKAIYRGRGVRTSGRAVYQASQRELWLGKIESAGLRLRAEFLFRQLEQLQLLRREAKRAMLKESRRHAANQLLNQIPQLGPVRIAQIIASVGSPHRFRTKRQFWSYIGLAVVTRSSADYRLVDNRMQKQRQSAQNRGLITNYNHRLKSVFKAAALGAAHSDAYREYYERLVTAGSRAELARLTLARKLAATVLSIWKSGAGFTIDKVMKQAA

SEQ ID NO: 329469 - protein, 337 aa, unidentified
MRYIGVDLHKSCFYVTFMEESGSVSQGEYRMNQLDEFKRELGREDWVAVEATGNSRYFVKQIGGFVKHVQVVNPSQFRVIKDSVKKTDKNDSELLALFLSKGLLPEVRQKDELQAQLKSLAQTRDKLVKLRTTLKNKIHNILSSYGIITRREAFSSKKGLREVLRYDLAATSRLELEVIVEQIEHLNEGIAKIDREIEERGSRLKGFENITSIGGIGKKSGTILLSIIGDINDFADEKKLSAYFGLVPRVSQSNETHHQGRITKQGSKLGRTTLVQCCLISIRHSPYLRRFYEKIKAKKGAGKAIIATARKLLSIIFHTLKNNWIFDDFSNFVLKEL

SEQ ID NO: 329470 - protein, 347 aa, unidentified
MNLKYAVGIDVSMKSFACCLSVINVQQEVKVKASHKFTNALTGFGSLLEWVKRHAKEDLPVVFVMEATGVYHESLAWFLHSKEQPVSILLPNKAKNYLKAIGAKSKNDSIDARGLAQIGAEKKLDLWVPPSKQLHALRAYTRHHQSTTETHTVMSNQLHAIQHSQFQNKEIIKQLKQFIRLCEKQLKETELAIAKTIKEDDVLNQHYQNIAAIKGISLLSFAVIAAETNGFILFNNAACLVSYAGYDIVENQSGKHTGKTKISKKGNSRIRRILHMPALCAVRDDQPQFKNLFERVFERTKVKMKGYVAVQKKLLVMMYYLWKKKQKYDPAFDQQQKIIAPEFQGYT

SEQ ID NO: 329471 - protein, 434 aa, unidentified
MNCSTKLEAITEKTMIIGIDVAKEEHVARVFDHRGEELCGRIKFETSREGFCTFVVDIENLKILRMKEDIIIGLEPTGVYGHTLISFLQTGGYNVVYTLGMQVKRAKELEDNSPSKNDYKDAKVIASLVRSGYYYTIRTYTDEIAELKEGTRFAYQLTKKLVRVKCQIKDCLTEYFPEFTTAFKYFKSSFGWNDSWGSKTAMVTLRAFPLPDQINALTAEQIVKYWRASGIKKGIGIKKAMQLKHLAENTIGIKATESVHIKLKGLMDEHDLLASQETEIWRRIKTLIEKNVDFRAIMDIPHMTMKLAAYLLAEVGDMRDFSHPQQLVRLAGFNLKECSSGRSKGTSEITKRGRPGLRRTLYFIILEMLKHAAPGWHQLHKYYTGRKERPLKKMQSVIALCCKFLRVVWGMLNNGTAYDPDMLIPKKKTRPKTA

SEQ ID NO: 329472 - protein, 370 aa, unidentified
MLDTTTFVGLDVHARSIKAVSLDVMTGEVRCATFGYDAGAVAEWVRSVDPEARCVYESGVTGFDLQKRLSGLGVDCVVGAVSKMIKPSADRRRKNDRNDAEFLARMLSVGNVVEVWVPDDECEAARDLTRALEDARDDLSRSKQRLSKFPLRHGLVFDERTPTGRRKGNWTRAHWSRIESIRFAEGADNDVLAYYVDAVRRAAEEKARLEGLVEAEARKPRWRKRVDSLRCLKGVDTATAADLVFEAGEFSRFGNARSFAAWVGLTPSEHSSGESDRRGAITKAGNKHLRKTLVEAAWHYLTCSGRPKDLAKGQAPDRGARRHAAKGVRRLVERREALLARGVHGNKANVATARELACWVWAVGLMAEEA

SEQ ID NO: 329473 - protein, 336 aa, unidentified
MKKIFVGIDVSKSWIDVCVTIDGKCILHHQFVNNIMGFKAMIKWIKEFSKQLNEWLICMEHTGIYALPLWNFLSEKNISYCVVSGSVITSGLEIRRGKNDKIDASDIAKFAMRYQDELKPHRLPIQVLQRLKMLFSYRERLVKAKVLISVPANEAKQFAAKESKEVRTDSSSLVQIIEARIKKAERLMWEIINSDKQTSKCYELIVSVPGFGLITACYLLIVTQCFTVLTRSRQLSNFGGTAPHPHKSGTSIKGKTRVSPIADKKLKALLSRGAGSLLQHHEETQYYAARMMAKGKHENLVRNNIKNKMLHTVCAVVKRGTPYIKNYVSPYQQNVA

SEQ ID NO: 329474 - protein, 379 aa, unidentified
MTCKERGRVAKLTRAMQYVNNTELSSAEETRCQFNGSKADIKLGIDVHQHFYTVVMQVGGCNPKPAQRFAKEAFLHWAAKLKQSCGGQVHAVYEACGFGFGLQRELSALGIECEVVCPQKLDEQNRRVKTDGLDAKALCLKLDRFVQGNRSAVALVRVPSEEEEQLRAIHRQREQLVKTRKQLEAQGRSLMVNHGIEPVQQWWKRRAFAALNVPKWMKELLKNSQPILLALEEKIHALTVQLQAAAQDRQPRGFGALTSVVIDREIANWHRFSNRRQVGSYTGLCPGEYSSGNTRLQSCVTKHGNPRLRAALVEAAWRLVRFQPNYKPIVKWKATLRKGALATGAARKKAIVAVARQLAVDLWRIRTGRVSAEELGLIN

SEQ ID NO: 329475 - protein, 346 aa, unidentified
MDQIIRIGMDTSKHFFQLHGVDAAERPVLRKKLRRNEVLAFFAKLAPTVIGMEACGAAHYWARELRKLGHEVKLMAPQHVKAYVKRNKNDGRDAEALCEAMSRPTMQFVPVKTEEHQAALMLAGVRQQLIARRTQLSNAIRGYAAEFGVTAAKGLDKIEPLLARIAQDATVPAQARELFAIQGQDYAQLQSELKGLNAKLLAWHRANAASRRLAQIPGVGPIGATTLVMKTPDPRVFASGRHFAAWLGLTPKDHSTAGKTRLGKITRAGDEVLRSLLVAGATAVIQQVRRGRGRPSPWLLALLKRKPPKLAAVALANKIARIAWKLMATGESYDGARMLGASALAA

SEQ ID NO: 329476 - protein, 404 aa, unidentified
MYNAVGIDVSKGKSTVTVLQPGGTVIRKPFDVPHTSQSLDELAKYLSSLEGDTKIVMECTGRYHEPMVKTLSEARLFVSVVNPHLIKNFGNNSLRKVKSDPADARKIARYTLDNWAELRQYSGMDNTRTQLKTLNSQFSFFMKQKVTAKANLIALLDNTYPGVNKLFDSPARDDGSEKWVDYAYSFWHVDCVRKIGLKTFTERYKAFCKKHHYNFQSDKSEKLFNASKELVAVFPKKKTYKLLIQQSIQQLNLASEHVERLRREMNELASALPEYSTVIGIYGVGKTYGPQLIAEIGDVSRFTHREALTAFAGVDPGVDQSGQHNSKSNRASKVGAGRLRKTLFQIMTTLLQNAPADDPVYRFLDKKRSEGKPYYVYMTAGANKFLRIYYGKVKECLRNLEQAE

SEQ ID NO: 329477 - protein, 420 aa, unidentified
MVCTRVPGDGPDGRRKMHVWSVQATLGAVTELGDHLRSEGIEVVTLGSTSDYWRIWHAVLEAAGLKVQLAGARAVRNVPGRAKTDKKDAVWLAKLTERGMLRPSFVPPYDIRRLREYTRLRADLVHDRARHWQRLEKLLERALVKLSSVSSKLTTQTSRAILEALIAGQRDPKALADLAIGKARARRNELAQALEGRFEDHHAELARILLDQIDALTAQIDQISARVSELITQIPAAQGVDDDGTTGPAAGRGPDAAALPAVARLDEITGCGIIAAQAIIAEIGLDMTVFGTPGRLVSWAKRCPQTRQSGKKSTAKPPGKGNPWLNGVLGEIAASASRTDTFLGERYRRLARRRGKRKALAAIARSILVIIFHLLADPSARFLDLGPGYYDNRISRDRKIHNHVRQLEALGLSVTIEEAA

SEQ ID NO: 329478 - protein, 348 aa, unidentified
MTTMVEDTRAITGGVDTHTDLHVAAALDSIGGLLGVQEFPATAAGYAELLSWLRSFGNLALAGVEGTGSYGAGLARYLAAAGVRVVEVDRADRQDRHRQGKSDPLDAVSAARAAQSGRASGAPRGRDGAVEAIRALMVAKRSARQERTQAVNQARALIVTGPEELRARFARRSPAQLIEAIAALRPRPGDVPGYATRVALRELGRRARFLDGQLDRLDELIGPLVTERAPGLLALHGVGPDTAALLLVAAGDHPERLRSESSWAHLCGVAPIPASSGKTAGRYRLNRGGDRQANSALWRVVMVRLRSHEATRAYADRRGKEGLSKKEIIRCLKRYVAREVYRQLRAEN

SEQ ID NO: 329479 - protein, 329 aa, unidentified
MTTNPPQIVFNHIVAFEVSKEKLVVHTLPDDEQWTIDNKPQAVRRLIKAEIKRNRKKQLGRMLVICEATGGYERHVLDVALEMGLSVHRAHGTRVRHFGHYRGLLAKTDPIDARLIAQYGLKTENIRLYSPPPPDIAALRALHARRTEIQQMLIAEASRLDHAQHKSVLKSLKAHIASLKAALAAIEADIAQLVEGSEMLRKKVALMQTVIGIGPISAMVVLAYLPDIGQLTKGQAARLAGLAPINNDSGKKRGARHVEAGRTAIRRALYMAAGVAMRANPILKEFSDRLRGKGYPFKYVVTAVMRKLIVILNAVLRDGQSWKGAQMAA

SEQ ID NO: 329480 - protein, 382 aa, unidentified
MRFYTQQHPFYCGIDLHARTMYLCILDQAGETLLHRNMPATPEALLKAIAPYREQIVLAAECMFTWYWLADLCADHGIPFVLGHALSMKAIHGGKAKNDKIDAHKIAVLLRGGMLPQASVSPAEMRATRDLLRRRMHLARKRGALLAHVHNTNSQYHLPAIGTKIASKANRDGVAERFADPAVQKSIEVDLALSTYYDELLRDVERTIVTTAKHHDAQTLYLLQTVPGIGKILRLVLLYEIHDLARFPRVQDFASSCRLGKCARESAGKRSGTSGSKIGNAHLTWAFSEAAVLCLRDNPAAQKLLARFEKKHGKGKALTILAHQLARAVYDMWQRQTAFALDTCLHGEGRGVGALNAELDSHGMHLLRHARYGVHHCVAARS

SEQ ID NO: 329481 - protein, 380 aa, unidentified
MTLEYRQMSPCILYAGIARVLNFKNTSGQFSAISLWRERQMQTILYNCCGMDVHKDSVVACILKTCTTSEASHSNADVEKEIRVFDTFPDELAKLREWLESENCTNVAMESTGIYWHPIYEAIEDACGDEMNILVTNARHMRNVPGKKTDMKDAEWIAGLLRAGLLAGSFIPPQDVRELRQLTRYRKNVVQDINTQKNRIEKTLQQAGFKMSSFLSDVFGVSGRNLISVLIKNGKLLPHDVDHETRRISKEKKADIKRAINGKLTEKQRNFLQLQITLLDGLLAHLETIEESIAELSIKWSDDIERLSTIPGIGLTSATAIIGEIGSDMSKFPTAEHFCSWAGVVPSDNTSAGKKKYKNHFRQPLHQRDNLRVRLVCCSR

SEQ ID NO: 329482 - protein, 453 aa, unidentified
MANNKGAKRSFPTIHEKAAGIDIGSRFHVAAVPPDLCEEPVQTFGSFTGDLHRLALWLKSLGITTVAMESTGVYWIPAFEILQEHGIEALLVNARSTKNVPGRKTDVNDAQWIQQLHQFGLLRGSFQPASDIAALRTFSRHRERLLEYGAAHIQHMQKALMQMNVQLHHVVSDICGATGMKIIRAIIAGNRDPKMLASMRDIRCKESVETIESALIGNYRPEHLLSLRHALELFDIYQSKVDECDKEIEIVLQVLQSHSDMPIDPIPPKPKRHRTKQMNEPRFDVRGLLYNIVGTDLTQVHGLGPHTALKLVAECGTDMSRWPTVKHFTSWLTLCPGAKISGGKILSSRSRRSTNRAATLLRLSAVNVGKTDTALGAFYRRLAARIGKAKAVNATARKIAVLFYNTLRYGTIYNDPGSSYYETQYRERVIKGLRKKAKQFGFDLQEAEAAGVS

SEQ ID NO: 329483 - protein, 346 aa, unidentified
MLYAGLDLSRKRLDVHVLREDGTTALVTAISPDGDAMRSLVRRVAAEGEPVRATIESMNGARFIHDRLEFLGWEVLIADAQRVRGLAPLAAKTDKIDARVLAELTRRALVPEIWLPTPEVRAERERARFRLHLVRHRSALKNRIHAILIAFGRACPMSDLFGVAGRELLDSLALPEPWQTNLVESLALVDDLTARIDALELELRRLGAEHPSMRLLMTVPGVGWVLAYTIASEIGDIDRFASPKKLAGYTGLCPLVRQSGGKDRRGPLAKNGPTYLRWALIEAATHAARDPRYRERYERTKQRLGRQRGAKIARVDLARQLAEAIWHVLTKNEPFHPAGPAMGLVA

SEQ ID NO: 329484 - protein, 356 aa, unidentified
MSSNIKYIGLDVHKEAISIAVLNDVGKWVMESIIETKAATLLQFLQGLQGELHVTLEEGGWAAWLYDVLKPHVHEIVVCNPRRNALLKEGSKSDQVDARKLAELLRAGMLRPVYHGEHGLRTLRELARSYQTISKDLRRVMNRLKALYRGWGIPCAGTQVYAPRYREQWLNKIRQAGVRRRAELFYQHLDGLQALRRQVRGEFLAESRKHKAVKVLRQIPCIGPIRAALLLALMQTPHRFRSKRQLWTYSGLGVETHDSAQHRYVNGRLQRCKKPPQVRGLNQNHNHEMKEIFKSTATNASRCAGPFHDFYAGLLAKGMKPEMARLTLARKIAAITLTLWKKGARFDAEHLKAQAA

SEQ ID NO: 329485 - protein, 456 aa, unidentified
MPASRSSRGRSSAQLTTINPNAAGLDVGSTFHVVAVPADRDEQPVQTFRTFSGDLHRLADWLEATGITTVAMESTSVYWIPVFELLEARGFEVLLVNARDVKHVPGRKSDVQDAQWLQQLHQHGLLRGSFRPRDGVVRLRAYLRHRERLIEYAASHIQHMQKALMQMNVQLHHVVSDITGATGMRIIRAIVDGNHAPEQLAEFRDVRCAASEATIRAALTGNYRAEHIFALRHALELYDFHQAKIAECDAEIEQVLRTLNEVRPTPTEPLPAMRHAKAKNEPEFDARPELYTLLGADLTQIHGFGAYTVLRLVAECGDDMRKWPTAKHFTSWLSLAPRNKVSGGRLLSSKTRRSSNRAATLLRIAAVNVGRTQTALGAFYRRLAARTGKAKAVTATARKLAILFYNALRFGMSYVDPGASYYEQRYRQRVIQHLQRRARHFGFTLVEDPAATGGVS

SEQ ID NO: 329486 - protein, 355 aa, unidentified
MNQEKYIGMDVHQATISVAVMDSSGKLIMECILGTKAATILEFIQGLRGSLSVAFEEGTSAAWLHDLRKPHVAHLVVCDPRKAARLKDGSKSDRIDARKLAELLRGNQLKPVYHGDDGVRTLKELGRSYLTITKDVSRVMSRIKALYRGGAIPCSGTTVYAPRHRAEWLAKIQEPGVRLRAEGCYQQLDLLQPVRQEARPHLRLESRKHHAVKLLRQIPSIGPIRAALLVALLQTPHRFRTKRQLWAYSGFAVETHDSGEYRYVRGKLQRNRERITVRGLSNNHNHDLRNLFKGAAISASTRPEPRCDFYVALLEKGMRPTRARLTLARKIAAITLTIWKKGANFDAQQLHRQAA

SEQ ID NO: 329487 - protein, 348 aa, unidentified
MRFYTGQHRYYCGIDLHARTMYLCILDHEQGKIVLHRNVRCEPELFLRTIEPYRDDLVVGVECIFCWYWLADLCTQEDIPFVLGHALYMKAIHGGKAKNDKIDAHKIAVLLRGGAFPTAYVYPRGMRATRDLLRRRLLFVRRRSELFTHIRIVFHQLNLPAPADRLREPRNRAGLLEAIPDPTVRANVEADLALADRLDEVIRSLERTIRQQAKVDDPKTLGLLKTIPGVGRVLALTLLYELHDVARFPRVQDFLSYARLVKSQKASAGRVTGTSGAKIGNAHLKWAYSEAAVLFLQKNPRGQRFVNRLRSKHGKGKALSILAARLGRASYYMLRRSTAFDLERFLMY

SEQ ID NO: 329488 - protein, 402 aa, unidentified
MNPVVGLDISKEESHGQAFLARGKPFRGTFQFEHTRDGLAILHQVLKDVEATSKLRPLLILEATGHYQSPVVQFLEEHHYIYIVINPLISNRLRKSQLRKVKTDAADAYLLGELYYKEEFEPFKKRSVQLLNLRYLTRQYESLSKMCVQTKLQFQAVLDQVFPAYKGVFGAMYSRISLRFLSDFPTSYSVLQTDEITLKSKMKELLSSKRGRSEDWINQRVQRLLHAAKQNPFQQTMYASHLINLKVLITLILQYQEHLAELEQNIDALAEEIEEYELIQSIPGIGHKIAATILSEIGEVDRFDHPKKLVAFAGIDPSVFASGKFTATRNRITKRGSRQLRYALVMAVQCGLIRSRNMRIKAFYDRKRAEGKPHKVALIACANKLVHWLYAILKNKKEFRPT

SEQ ID NO: 329489 - protein, 343 aa, unidentified
MSTLYYIGLDIHKRIISYCIKAIDGRLIGEGKIEADRKSLGEWAKGLPGPWVGAMEATIFTGWVYDFLKSYAVDLKVAHPEMLKAITAAKKKNDRADAEKIADLLRVNLLPECHMLSEEIRELRRVLRYRNHIVRTAVKMQNKISGLLMEVGVSYSKRRIHGRKYFHEILERVEEIPPSVKELLKLSRSSYEMFRSFQKRLVEALRTNSLIRDRVERLMTIPGIGELTALTWVLEIGDSGRFTSIRKAVSYCGLCSAQRESAGKEQRGPISKKRNKHLQTMLIEAAKLAPHWNEQLAIVHERELKRGDRNRATLAVARRLVAYMLAVDKKQADFKLPAEMQAA

SEQ ID NO: 329490 - protein, 452 aa, unidentified
MEVFMSTIPAPPAEPVFAAFAAIDWAKQEHVVAFVPAAGDRIEISKLKNTPEAVEVWSASLRQRFPAAPIAVAIEQKRGGVIYMLSKYDHLVLYPVPPTMSAAFRRAFFPSGAKDDNGDTLLLLDLLRHHRDRLSPLRPDTPATRLLRFLTQDRRSLVQQKVSALQQITDCTAQYFPQLRTWFGPLDTPWIESLLERWPSLQQLQRSHPGTLKRFLAEHRSWDDDRIAELIRQIHAAVPATHDEVVLEACSRKTAACLPQLRCLRDQIAAYDKRIAAVTAEHPDAPIFQSFPGAGVALVPRLIAAFGTDRNQWRDATDLQRFSGIAPILVRSGNSSRVAMRRACPKFLRQTFHEFAAHSIRFCPWAKLLYQSHLRPDKKNHNAAVRVVAFQWIRIAFRCWLNREPYDERIFLAAQTRRNSPFAGKAASERRIEVQTQTGMKKLTAKVTPGSR

SEQ ID NO: 329491 - protein, 403 aa, unidentified
MNNVAGIDVSKGKSMVSVLRPFGEVVAKPFSIGHTGSELKELADYLKSLDGETRVVMEHTGRYYEPVARFLHDEGVFVSAVNPKLIKDYGNNTLRKVKTDKADSRKIARYGIDNWAELRQHTPMDTIRMQLKTLNRQQSLYSKTKTMMKNNLIALLDQTYPGVNTLFDSPVREDGSQKWVDFATTFWHVDCVRNMSLTAFAERYRKWCKRHGYNFSQSKAVEVHAGAQDLIAMLPRDALTKTMVRQAIDALNAISASLERLKAEMQALAAQLPEYPVVMAMHGVGDSLGPQLMAELGDVTRFTHRNAITAFAGVDPGADQSGTHEAKSTRVSKSGAPELRRALFLVMDCLLKTQPQDDPVYRFMDKKRAEGKPYLVYMTAGANKFLRIYYGRVKEYLASLEGN

SEQ ID NO: 329492 - protein, 355 aa, unidentified
MEKAYDGRQVVGMDLHRRRSVLVRMTEEGRRVGTARITNNPQELRKEIARAGRHPRVVLEATYGWYWAAGTLAAAGAEVHLAHPLGVKAFSYRRVKNERDAADLADLLRMGRLPGAWIAPHEVRELRELTRYRIKLVRLRTSCKDQVHGVLAKLGVPVTCSDIFGTAGSAWLDALRLPRPYSGKVTSLRHLAGELTTEITMLGEVIASLLAGDRGYQVIQQLPGIGPVLAAVIVAEIGEVTRFNNAARLCSWAGLTPRHRESDTKVTRGHVTKQGSRLLRWALIEAIQRIPRDCVIGGVKDAIIARRGKEARNIAKVAAARRLLTLVFYGMRDGQIRCLSRPPAGPAATQTAQAA

SEQ ID NO: 329493 - protein, 364 aa, unidentified
MKKLTSAATNWIGKQERLTIGLDLGDRSSHYCVLDESGRIVTESRTATSPKAMEAVFGRMTRSRIALETGMHSPWVSRLLSQHGHEVIVAHARNVRLIGESRKKDDRLDAQTLARLARIDPELLCPVKHRSAKAQADLSLIRARAGLVRARTALVNTARGLAKSYGQRLRGCNVRNMNPEKAEALSPELQAALQPLLAGIEAVSEQIGEYNARIEKLAQESYPEVKLLKQVKGVGTLIALTFLLTLEDRHRFAKSRDVGCYVGLQPGRRNSGQSEPQMHISKEGDPYLRTLLVQGAQHILGPFGPDCDLRRWGLKLAERGGRNGKKRAIIATARKLAVLLHRLWVSGEVYEPLHNNRSATAVAA

SEQ ID NO: 329494 - protein, 352 aa, unidentified
MNNVKYVGMDVHKAITVIVVLNALGQMESHSKVKTKAENICDFFRGLSGKVEVVFEEGTHSAWFHKLIKPLVASVTVCDPRHNKLIEDGNKSDDDDAETLAQLLRIGSVKAVYKGDDDQQQLKELCRTDENLVQDATRAKNRIQAIYRGRGLDPSRAIYRADRRGEWLAKLTDEATRFRAESLLDQLEALQKLRKQAKKQFVLHARKHPDDQILSSLPGFGPVHVGQLIATVGTPHRFRTKRQFWPYCGLSVVTRSSADDKIIEGKIVKSQKKVSTRGLNLNHNPRLKRVFKGAALTSLRYKECKAYYQHLVEDGTRPELARVSVARKLAAAALAIWQRKEQYDPKKFSDNA

SEQ ID NO: 329495 - protein, 356 aa, unidentified
MKRTTTRKSYIGQDVFVGIDVHKKNYYVVARVNQEIVKKWTAPASPQKLGEQLIKYFGEGRIHTAYEAGFSGFALHRKLVKLGIDNIVVHAAGIEVAVNNRVKTDKRDATKLATLLEAKRLKGIHIPTEKEENQRLLTRTREQLVKDRTAVKNKIRMKFHQLGLIDYDENHAMTHKLVKEILILDVSRELIVVIQAYWRIWKSLDQEIRNIEKELKKQAENDPNEPTYRSVPGVGNIGARILSNELGNMSQFPNEGQLFSYTGLTPCEYSSGEAIHRGHISKQGNGRLRAILVEVAWRAIKKDPALEEFFNRLYPRTGKTRAIIAVARKLIGRIRAAFKKKEFYQIGFSSNNAYST

SEQ ID NO: 329496 - protein, 440 aa, unidentified
MTKVTVFETVHERAAGIDIGAARIFVSPDGMEVRNFDTFTSGYYECAEYLQEKGIQEVAMEATGIYWMALYAMLESCGLKVFLVNPKETRQVKGRKTDVRDCRWIQKLFSAGILRSSFIPEGKYMELRLLVRERLDIIDMGSTYVNKMQKCLELMNIKLTEVISQVQGASGIKMIKAIIDGCRDKEYLLSLCDSRIRKNKGDQVLKALEGNYNDTYLFMLQVNMSSWEDHQKKLQLIDSRVEELLKALCQIKGMQEVTSSPKRVRHHAPKVANLHQMLISLYGVNISSVSGMNDYTLMRLIGETGVDMHRFPSVKHFTSWCGLTPKNNQTGKTSKKVKGMQCNKAGQIFKECAQSLLSSKYIAIGSFIRKLKAKKDSGIAIKAGARKLAEAYYNAITKGIEYVEQGIKKYEQQLKQKEISLLKRLALKHNMHITENQYAT

SEQ ID NO: 329497 - protein, 401 aa, unidentified
MDATVSGNRKEGFTMYYVGIDIAKLNHFASVVSADGEVLVKPFKFTNDNDGFCKLLSVLASYEHSSLIIGLESTAHYADNLVEFLVSKRYQVCVINPIQTSTMRKNNIRKTKTDKVDTLVIARTLIAQPHRFFSQEDIDLMHLKNLGRFRQKNIKERTRLKIQLTAYVDRVFPELQYFFKSGLHQKAIYALLKEAPTPELVASMHLTHLAHLLEVSSHGHFNKEQAKELRILAQKSVGSSDRALSLQVTQSVEQIELLDRQIKDVESQMADIMLGLDSVIMTIPGIGYINGGMILGEIGDIHRFSKPCQLLAFAGLDPSVYQSGNFNASHTRMSKRGSRVLRYALINAAHNVVKNNATFKAYYDAKMAEGRSHYNALGHCAGKLVRIIFKMLTNDVTFSLE

SEQ ID NO: 329498 - protein, 397 aa, unidentified
MYIVGIDIAKRKHEAAVIDGEGTVIIKPFSFTNNCSGYNRLLAMLAKAKLPLDEVSFAMEATGHYWLALFTRLQKEGFRVQVINPVQTNSIRSFYIRQAKTDPRDALLIAEVIRFGHFSESTLHPENIYELRELCRGRHAIVSMQADVKRKVVALLDQVFPEYETAFTNLFGDTSMAILQACPTPKELSEMPLEELCHLIEVSSHKRFRMAKAQELQALARNSFGFAMAGDVFSTMIRLYAKHLDFLKQQVREMDRKIAEIMDTLDTPITTITGIGPTLGAYILSEIGDISRFSSAAKLAAYAGIDPTMRQSGEYNGVRNRMSKRGSPYLRHAIWLAASSAVLHDPALKLYFQKKRDEGKPYMASVGHACRKMVSIIYAVMRDNKAYTPYIPNEISA

SEQ ID NO: 329499 - protein, 356 aa, unidentified
MSRDTKYIGMDVHKEAIVIAVLNDSGKLVMESIVETQASSILQFIYGLRGELHVTWEEGTWAAWLYDLLKPHVHEVLVCNPRRNALLKEGSKSDKVDARKLADLLRTGMLRPVYHGENGQRTLRELARSYQTISKDLNRVMNRLKALYRGWGIACSGTQVYAARYREEWLHKIPHAGVHRRAEVLYQQLDGLQALRRTLRPELLAESRKHKAAKLLRQIPCIGPIRAARLLALMQTPHRFRSKRQLWTYSGLGIETHESAQYRYVRGQLQRSKKPQQIRGLNQNHNHEMKEIFKGAATRASCGVGPLRDFYVALLDKGMRPEMARLTLARKIAAITLTLWKKEERFDAEQLKTQAA

SEQ ID NO: 329500 - protein, 347 aa, unidentified
MLADQLDYIVGVDPHRDSHAIAVVEVVSGAVVFEAIVDANSDGYARALKLVDEHGPARRAFAVEGTGSFGAGLTRFLTGRGERVFEVGRLRRERRSGGKTDALDAVRAARSVLSQQQHAIPRAGGERQALQALVAAREGAVNAKRAGLCQLRDLLITTPEPLRSELRPLTRARLLQRLAATRPHGRSDAELRGSMLALRSLARRVLQLTAEERELAREIETLTRRLAPQLLEQPGVGPHAAAQLVLSWSHRGRISSEAAFARLAGAAPIPASSGQTIRYRLDRSGDRKLNRALHMILVTRKRSHPATIAYIQRRLEEGKTRREANRCLKRYLARNLYRLLEHPPMTA

SEQ ID NO: 329501 - protein, 351 aa, unidentified
MSGLLVRARTVARTLGTRATESASARKGQAIMDSPRPVVGIDVSKDRLDVACLPSSVLTPKEAAFDNTPKGHQRLIAVLKRIQPRLIVLESSGGYQRVLVATLGAAGLPIVVVNPRQVRDFARAMGVLAKTDTIDAMVLARFAEKVDPPIRPIPEPELVDINALLARRRQLVKDRTSETNRLEQCTCARVRTSHNIVIDLLSREIADIDNDLDQRIRNSPIWQHKVALLTSVPGVGDVTARTLLAFLPELGTINRQTIAALVGVAPINRDSGLMRGRRSIFGGRAVVRHVLYMATLTARRHNPDIKRHYEQLVARGKPKLVALIACLRKLLVTLNALIKHQTMWAPKTLQA

SEQ ID NO: 329502 - protein, 323 aa, unidentified
MNKDIKYFGIDISHLVFDVTDSEGNYYQFKNTISGFKNFAKLLSANSHCVMEATGYYHYQLAYYLLESGTKVSVENPLAVKRFIQMKLSKIKTDKSDSKLICEYAKQVELKLWEGQSKHQIECLQMTRLLSVYTKQSTMLKNKIHGESVLGNPSKAVVSSIKRSLKHVLKEIKTLEDKLMVLVKEVHQDVLTRLKSIPGIGNKTALMLVVLTDGFERFTSGSELCSYAGLTPVVRQSGRSVNGRSRISKIGNQKLRNLLFMCSFNACKYNYACKAIYDGLVAKGKSKKLALIAVCNTLLKQAFAIAKSGLTYDNNYRSVLVKN

SEQ ID NO: 329503 - protein, 333 aa, unidentified
MDVHRETIDVVAVEEESQETVLEKRIHNDMRSIVRLFETLLAAGPVAAGYEAGCMGFEPQRKLSAMGVECVVIAPGLIPRKPGDRVKTDRRDARIIAKLLKNGEAETVHVPQPADEAVRDYIRARDDLRRERMRYRQRLGHLLLRHGYSYSEGEHWTLRHRRWLSSLNVEDPTLRETLDIYYNRIVELEAKLLEMDQEIEQIASGQRYVKEVGKLRCFRGIEWMTALALKCEIGDFRRFGSAEQFMAFLGMVPSEQSSGQRRVQGGITKAGNGHLRRLLVEAAWHYRYYRPPSKILSQRRRGQCESDITHAERAARRLSKKFHRLILRRSCRP

SEQ ID NO: 329504 - protein, 350 aa, unidentified
MDYFAGLDVSLETVSICIVNAAGDILLEKKIEAEPAAIIALLKHFGRPFKRIGLEAGPTSSWLYSELRCVGYPAICLECRHVKAGLSAMRNKTDRNDARGIAQLVRLGWFRQVHVKSKGAQQIRMLLVNRQQLLTKALDLENSVRGSLKVFGLRIGTVTRRTFEARVLELVAEDRSLIAITEPMLRVRRALIAGLERLDRLCRQLARRDPVCHRLMTVPGVGTVVALTFRTGIDAPERFSRSRDVGAHFGLTPRRYSSGQTDYDGHISRCGDAMVRTALYQAANVLLHHGRWSSLRSWAMRIAKRGSVKAAKVALARRLAVVMHRMWVDGTDFRWSAVAAAAPAATAIAR

SEQ ID NO: 329505 - protein, 364 aa, unidentified
MNECTHIGLDVHKDTIAVAVLRPGITDCDERVIPNTPEAVRRLLSRYPDPSQLSICYEAGPTGYDTHRLITSLGIACDVIAPSLIPKRPGVRVKTDRIDARNLARLHRAGELVSVRVPTPAEEAVRDLVRAREEIKNDRRIARQRIRSFLLRYGRSYPAPGSRWSTRFEVWMRALHFDEPMSQAAFEHLVATYFMRDSQLAAIDRQIEQIASLEPLATDVARLRAFRGIDTLTAVTLVTETCDFRRFGSAGSYMAFTGLVPSEHSSGATRHQGSITKTGNQHIRRVLVEAAWAYRYAPAVRGKLKDRLEGQPPEVVAYSWAAQCRLNSTYRKLAAKKGANKAVVAVARELSGFVWGAMTGNMGA

SEQ ID NO: 329506 - protein, 328 aa, unidentified
MFYLGMDVAKAKLDCCLLLDEASAKRKTKVVNNTRSGIADLLAWVAKQQVSSLQLHVVMEATGVYHEQAALALADAGIAVSIVNPAQVRDFGRGLAIRTKTDGVDSFVLARYGTLLKPAAWTPPAPEARVLQALLARREAVAQDLQRECNRQEKAHATDTPEPIRQSLADSIEFLVKQLAGLQQDIDLHIDRHPNLRDDLALLQSIPAVGPQVGGNLLSVMHSHDFGSAEQLAAYLGLVPVERQSGSSVLGRARLSKAGPARIRAVLYMAAIVATRYNPHVKAVYERLIARGKSKMSALGAAMRKLVHLCFGVLKTRKPYQHNYAKIA

SEQ ID NO: 329507 - protein, 310 aa, unidentified
MEVRFVGIDVAKDRLDIAVRPGDERFSEPRDGDGLDRLVTRLAGIGPALVVLEATGGYETVVAGRLASAGLPLAIVNPHQVRSFARAVGRLAKTDALDADIIARFAEAIRPEPRPLASEEARQLGELVARRRQILEMMTAERNRRALLTQNRLRSGIDRHLKMLQSELSALENDIDTTVRGSPAWRADEELLTSVPGIGPTTARTLIAELPELGTLDRRRIAALVGIAPINRDSGKSRGRRAIAGGRATVRTALYMAALVATRHNTVIAAHYKKLRSLGKKPKLAIVACMRKLLVILNAILRDRAPWKNA

SEQ ID NO: 329508 - protein, 412 aa, unidentified
MQDILTCAMGLDVHRDIIVACLVKGAVDAEPEAETRTFSTLIPEMQKLRDWVIESECRNIAMESTGIYWQPIYEMLESCFDGEISILVVNARHMKNVPGRKTDMKDAQWIATLLRAGLLKGSFIPDKAFRELRHLTRYRKSVVHDITAQKNRIDKFLQSSGFRFTAFLSDTFGASGRNIIRHLIEHGSIDREALDKCLKTKTRNRIDEILVALNGSLSEHQRRFLNMVFRHLEDLEAHKHTVEDEITEEVLKHTDALNLLCSIPGIDVTAAAAIIAEIGTDMSSFPDSQHICSWAGLSPGNNESAGKRKSVHINKGDPYLKSMLCEVAWIMASHRKLYLSGWYWKVKQRKGAKRATIALARKILSIIYTMLKTGTPYNEECFEQRRLRCERKRANRLVNELQKLGYVVVAPD

SEQ ID NO: 329509 - protein, 313 aa, unidentified
MAKDKLDVAFSEDPAAPVDAIPNDPAGIDALVKRLLGLKPAVIVVESTGGLERPLLEAMLDAQLPVALVHPGRVRHFAKGVGILAKTDRIDARVLVRFARQAEPRLAEKRRKNHDELRDLVACRRQLTATKTQQTNRRGATFAKPALKSIDAVIKTLDKQIASLDKQIRDIIDADDDFKYLDGLLQSVPGVGPAVSATLAADLSELGETDRQCVAALAGVAPFPDDSGTTKGKRSIRGGRADVRCALYMATLSAVRFNPVIKLFAQRLKSAGKVNKVMITACMRKLLALINAMVRDGLTWDQLNVVKKLAPTH

SEQ ID NO: 329510 - protein, 394 aa, unidentified
MNCFVGIDVSKEKFDACGIGEQEEKIFSMTCSMNRVGFEKFIVQLPTDKTSFLLGMESTASYHIALFSYLAAKGYRVVIINPLLIANFAKRSLRKTKTDKKDALTIAQFLLREKEAFSLQISSSLVAELKDLARRRERLADHVTSLKADMKRLLSVIFPELEHITGVFTKATLRLLMKYPSAHALQRADLSDVADVFKSEIQGNRPRTTVKALMETAVSSVGVASPAKELALKQETSLLIHVQDQMEEVTKLLMSLLNERMKQDMDILCSIKGVGENTAINFLIEMGTEVEMYENDKKLIAASGLDPSTYQSGKYEGKSRISKRGNRHLRRVIWLMATRVIISNNIFRTYFYKRRKEGLPYKKAVLATAHKLIRVMFVMLSRKSFFVEGGIKYS

SEQ ID NO: 329511 - protein, 310 aa, unidentified
MEQIYVGIDVAKDRLDVHVLPSGEAFAVARDGEGLAALVERLAASRPALIVLEATGGFETVVAAALGAAHLPLAVVNPRQIRDFARALGRLAKTDALDAEVIALFAERVHPEPRPLPDAEAQALAELVARRRQIVEMMTAERNRRHRLASKRMRKSVDRLLAALQKELSTLEADLDDAIRGTPAWREAEDLLTSVPGVGDKLARTLIADLPELGQLDRKQIAALVGVAPLNRDSGTFRGKRTTWGGRAKVRAALYMAALVAAHHNPILASFYRRLLAAGKAKKLALTAVMRKLLTILNAILRDKTPWQPA

SEQ ID NO: 329512 - protein, 341 aa, unidentified
MRSYLGIDAHSNTGLELAALSEDGKLLWRDRCSLDSEQVVQVAQRAPRPCTVVFEQGELATWLHLTLRNACDEVLVANPRHNRLIATSPDKDDPHDAFVLAKLAAGGYLREVFQPAEKFTVLRLRVRHHYRLGRHLTAVKNQIKASYRTQGIRVSGTSVYSAASRDQWLQRLPGPAHLPAEDLYAVLDVVQARKDAALRALARAVRQFAPAKRMLQVPQIGPVTAATFVGYLVTPERFPSRKHLWSYCGFGLMARKSGHRAEPTRLRTAYNRHLKRVIKSTVERQIARSPTSPFAAAYQTRVQRGMLPTRAKLTVSRKLIDVLCVLWTDQEDYDPGRINID

SEQ ID NO: 329513 - protein, 344 aa, unidentified
MDITVLGVDLGKNVCSVVGLDRSGAIVMRRKVRRETLVRLAEKLSPCIIGMEACCGAHHLGRLFVAHGHDVRLMSPEYVRPYVKAQKNDDRDAEGIAEAATRPTMRFVELKSQDQLDMQTLHRSRDRLVGERTALINQLRAILLERGLVAPQGKRKLEQFLTVLMDEQGGAGLSPRMVLLVGDARAQWAELDRRIAAFDAEFVRWARENEDARRLTTIPGFGAIVASALVASVGRAESFDRGRDLSAWLGIVPQQFTTGGKPKLLGISKRGNKYLRKQLIHGARAALPYVAERDTPLGRWAKGLISRAHRNVAVVAFANKLARIAWAVLRRGERFAVKGSLVPA

SEQ ID NO: 329514 - protein, 388 aa, unidentified
MSPSFDASKSLTALDQDSTLVAVIEMSQTKWLIAATVPGFERNPLKKLDADPDSLLRLLRRWRSEAIQAGREVRRIVVAYEAGRDGFWLARWLQARAVEAYVIHPSSVAVSREHRRAKTDRLDTELLMRAFLGWLRGEKRHCSMAAIPTINEEEARRPNRERDNLVRERTRIVNRIKAILARFGIRTFKPNLRKAAEKLEALHTAEGMPLPERSRAELRRNLGRLHLLREQIHEIEQERLRQLSVVPDTEKGPRAMVRLLARIIGVGIETADMLVNEILSRGLRDRRAVARYAGLTGAPDESGQRRREKGLARAGNARVRYGMILLAWRFLQFQKDSALAHWFCARTADGRGGTRKTMIVALARKLLIAFWRLVTTGEIPKGVALRPA

SEQ ID NO: 329515 - protein, 356 aa, unidentified
MQSKANSFKGQKVFIGIDVHKKTWSVTTLLEVGMPKTHSQKASAKELIDFLNRHYPEAEYHAVYEAGFSGFSTYYALKEYGIECTVVNAADVPTTQYESVMKSDPIDSDKMARALRAGMIKGIYIREKDNLDDRGLVRLRKSIQQDLTRYKNRVKHLLHANGVEIPELFDRSPNWSKAFINWLREEVVLLSSTRASLDMLIEQVETLRQNLLIVTKKVRNLRFKEEYAEKYDALTSIPGIGPICAITLLTEIYDVKRFRNERQFASYLGLVPTCHSSGEKASFGEMTFRGNKHLGPLLIEASWVAIHWDDALSVAFTNYRRKGLMPQESIIRVARKLSNIIFSMLKTGNNYAPANA

SEQ ID NO: 329516 - protein, 408 aa, unidentified
MEVIHERCAGLDVHKETVVGCLRVRERGQVRREVRRWSTTTAELLKLGDWLRQAGCTHVAMEATGVYWKPVWHMLEGEFELLLANPAHIRNVPGRKSDVNDATWIADLLAHGLIRASLVPPGPIQELRDLTRTRKQLMREIAQHKQRIQKVLEDANVKLASVVSDVFGESGRRMLKALSAGQTDASQLAALRDGRLSASHETLAVALQGKVTAHHRFLLSQHLRMIDYLEQTIRDFEGQIEVVIAPFRAAVACLVTIPGISATAAHVIIAEIGVDMSRFATVAHLRSWAGLCPQLNESAGKIMSRRLRHGAPWLKTVLVQCAWAATRNKHNYLYAQFVRLRARRGPQKAIIAVAASILSIAYYLLRNQVPYRDLGALYFIRADQERIAQRLARRIKDLGYEVQIRKAA

SEQ ID NO: 329517 - protein, 352 aa, unidentified
MRIIGVDLHTRQQSLAMLDTETGELVEKILEHEGEKVQEFYSSLTSPVLVGIEATGSMSWFLKLMEELKIECRVGHPAKIRAAEPRKQKHDRRDARLLLNLLVENRFPAIWMPSPEQRDLRTLLRHRHQWVRMRTRVQHTLQSLALAHGLRRGDTLWSQAGQHVLQALPMAPHASQRRDALLRLYPRLQKSIDDLDEQVSEQSLRRPQAARLMTHPGVGPVTALATEVFLGDPMRFADGKAVASYIGMIPSERSSGGRRQRLGKLSKQGNALVRYLWGEATIHAVRRDPELKRFYRRKLIQKGLGKAKTAAARKLGIRLWIMLRDQIDYKEFCRRGLQRQKGGDARAGMPGR

SEQ ID NO: 329518 - protein, 362 aa, unidentified
MEYFAGLDVSVDETAICIVSDKGAVEMTSSVATDPESIAAALAPYLSRLRRVGHEAGALSPWLQPGLKDLGIPAICLETRHVRAAMAAQRNKTDAADALGIAHIVRTGWFRTAHVKTETSYRMRLLLVHRRNLKRKFLDLENAIRHSLKAFGIRLSKVGRGGFEHAVREAVESDAMTAGLMDCMLRARAALWAEYLKLHKLVVQITLSDELCRRFMAIPGVGPITALTYSTAIDNPARFKRSRDVAAYFGLTSRRWQSGTSIDTQGRISKAGDPDVRHALYEAASSMMTRFKGKDALKSWGTKLSKSKCHRKAVTAVARKLAVIMHAMWRDGTFYEGDPTATKEDAARWIAAKEKRVARADS

SEQ ID NO: 329519 - protein, 416 aa, unidentified
MSLSLSAAVPAAAFFTGIDWAAASHAVCVVDNAGHVKCQFIIEHSAAGFAGLIRRLAALGEPAGVPVAIERPDGRLVDALLQAGHPVVPVKPTAIKAWRDGEVVSGAKSDPGDALVIAEYLRLRQHKLRVAVPYSAQTLALRAVTRTRGDLVEARVAATNQLSALLDSHWPGAKAIFADVQSPIALAFLTRWPTAASAAKVGEKHIAAFCSRHGYSGRRPAAELLARLRAAPAGTAGDVLSQAVRSAVLAQVSLLQALNIGIKDLDQSVRARLGEHPDGKIFTSLPRSGQINAAQVLAEWGDCREAYDSPDAVAALAGLSPVTKESGKHRAVSFRWACNTRFRAAFTTFADNSRPASPWAADIYNSARTSGKDHPHAIRILARAWIRVIYRCWLDGVPYNPQQHGNASKLTNQIAA

SEQ ID NO: 329520 - protein, 387 aa, unidentified
MIYVGIDVASDKHNVCIIDAKETVLSEFVITNSRSGFELLLAAISGFDKVSIGLEATGIYGDNLVSFLHAHSFNTITINPLSAKRLLNAKSLRKTKTDKMDAFGIAGLLIQEFQNPDTPVSYHISELKSLTRLRYQLVTDRSKQKIRAKRLITLLFPEFKGFFFKTFCSTAMAVLRRYPSAADLSKCRINTLTDILYSASRGRYGQEKAEQMKAVAKSSIGIYSKASIIALKSCLELIDFYNQQIKEVEKEIKTLMDEIDTPITSVPGISTTLGAVIISEIGEISRFSSANKLLAFAGLDPSVYQSGKFKPTTGSMVKHGSPYLRNAIIQAAKQVSRFNDTFAAFLSKKISEGKHYNVAISHMAKKLIRVLFHLLVNNQSFSNLLLT

SEQ ID NO: 329521 - protein, 355 aa, unidentified
MSSEKYIGLDVHQATISVAVMDSQGKIIMESILETKASTILEFFAGLHGSLFVTFEEGTSAAWLYDLLKPHVTEVLVCNPRKIPLHKQGNKSDKIDARKLAERLRLHDLKPVYHGETGIRMLRELARSYLTIVKDLTRVMSRLKALYRSWAIPCAGRDVYYRRHRNQWLEKIPEPGTRRRAEQLYEQLDLLQRLRQQSRRELLAESRKHTITAKLRQIPSLGPIRSALAVALIQTPNRFRTKRQLWTYSGLGLETRDSGEYQFVKGQPQRRKKQATIRGLNKDHNHDLKGLFKGAATRASIKPGPFQDFYQRSLAKGIKPTMARLTLARKIAAITLTLWKKGEDFDIHKLNSQAA

SEQ ID NO: 329522 - protein, 313 aa, unidentified
MTTSGAWIGVDICKKHLDVAAMTGAPARLRNDADGRIALARRLKAENVRGVIVEATGGLERALVKALDAEGVPASIVNPARVRKFAEGTGQLAKTDKIDAVILARFGDYMKPAPTVLADAQRQKLRDLIAYRSQITQEITARSAQVKQYASSDIVERATAAIETLRTERKALEREIEVQIKSKDDTQSLYKRLLTVPGVGLIVAATLIAELPELGRLSRRQIAALAGLAPFPNESGDRKGYRSIRGGRDDVRQVLFNCALVAVRHNPVAKPFYEGLRARGKPHKVAIVATMRKLLTILNAMLKTNKDWTCKER

SEQ ID NO: 329523 - protein, 338 aa, unidentified
MTITTIGVDLAKNSFQLHGVDHTGRTVLRKKLSRSRFLEFFADLPACTIGMEACGGAHHWARELTRLGHTVRLMPPQYVKPYVKRNKHDAADAEACCEAVQRPSMRFIPIKSQEQQSLLMLHRIRDRLLAERTASINAIRGHLAEFGIVAAQGARGLGELRGVIGDVDDHRLPARARALLTYEVEHLQELEAHLEHLDHELVEQARTDEACQRLTGVPGIGPVIATAMVATVGDAKVFRNGRSFAAWIGLTPKQHSSGGKELLLGISRRGDGYLRRQLTHGARSLVKIARGREGKLWAWINGLLARRSFNTTVAAVANKLARIVHAVLSRGEAYRAPA

SEQ ID NO: 329524 - protein, 417 aa, unidentified
MSTQFRWFVGIDWGSAEHVLWVMDGDGTRHGTRVLAHTAEAVGDAIAWVLQHTDTTPDAIAVGIETPRGALVDTFLERGFAVFAVNPKQLDRFRDRFSAAGAKDDRRDARATADALRTDRRAFRRIQPDDPQIIQLREWSRMLEELQQEEQRLANRLRDQLYRVDAAWLTLVPAANEPWLWTILAETPHPDAWADLARRRITPVLREHRIRRLTVDEVTAALRQPRLHVAPGVADAVEARIASLVPQLRLLHGQRTTAERRIDQLLIALAAASSEDEPGEHRDVEILQSLPGVGRMVAATMLTEATGPLADRDYLTLRAQAGAAPVTKRSGKRALLVHMRYACKGRLRNALYHWSRTSIQHDQAARMYYDALRARGHHHARALRSVADRWLRILIAMLRTRTVYEPARFVRNVSVDA

SEQ ID NO: 329525 - protein, 347 aa, unidentified
MNFYNNLHPYYCGIDLHARVLYVCIIDQDGQTCVHKEISANPDKLKQLLEPYLGNIVVGVECMHCWYWVSDFCEDLGIDFILGHALYMKAIHGGKTKNDRIDSFKIANLIRGGNFPLAYTYPKEMRATRDLLRRRTKIVRHGAHLKAHVSNTTSQYNLPTHKVNLKNVGAREQLKTAFPDRVVQRSIDLDMAVLDCYAKELSKTECFLEQQAKRHNPVHWHLLNSISGIGRILALTIIYEIGHIDRFESVQKFASYARLVKCKAESAGKSYGTQGNKIGNAHLKWAFSEAAVLYLRGNEKAQKYLLKLQRRMSKAKALSVLAHKLGRCVYFMLKNGTVFDEKQFLKG

SEQ ID NO: 329526 - protein, 345 aa, unidentified
MTTMERITGGVDTHLDVHVAAALDARGALLETKSFPATAAGYRQLHSWLQAFGEIERVGVEGTGSYGAGLTRHLHSKGLSVVEVDRPNRQNRRRRGKSDTVDAISAARAAQSGDAAGEAKTRDGNVECMRVLRLVMLSARRNRTVALNQMRSIVSTGPEELRDMFRDATIHNLVERAAALRPGARRDVMGATKIALRNLAKRVQGFDAEIEEIKELLEPLVAETAPELMSMFGVGTDVASALLVTAGDNPQRLRTERTFAHLCGVSPLDASSGKQERHRLSRAGDRQANAALWRIVMTRMFYDDRTKHYIERRMNEGLTKKEAMRCLKRYVAREVYAHLPRETLA

SEQ ID NO: 329527 - protein, 311 aa, unidentified
MTEHTNVGIDIAKETFDVFISPDGIFLHLDNTPQGHQLLLDALSSRTVTRIVMEATGRYHNLLAATLELAGLPVAVVNPAQVKHFARALGTLFKTDPNDARIICEFGRRMTPDIRPAPDEQTQRLAMMVSRRRQLVDNRTMEQNRYGACSDELIRTGIKRHIDWLNAEIKDTDDDIDQQIKVMPLWQEKVKLLEEVKGIGRTTLAVLLSMLPELGQLNRRKISALVGVCPYAHDSGKMKGKRCIWGGRSAVRAALYMAAMSAVRYNPTIQAFFEKLRSKGKAFKVAMTACVRKLVTILNAMVRDNKKWAAA

SEQ ID NO: 329528 - protein, 296 aa, unidentified
MLIIGCDFHPRFQQIAMMDAETGELVERRLEHENGEARAFYASLPKPMLVGMEATGYAQWFERMLAEFGHELWIGHASEIRAGVVRKQKTDARDAQHLLRLLLEKRFLRIWIPFPAERDARQLLRHRYKLVCFRVSVKNQLHGLAMSQGVCRKKKLFTAQGREELEKLSLGPWGSRRRQELLGMLDQLNPVIDELDRAVRQEAESRADAARLMIHPGVGPVTALAFVLTLGPVARFRRSKQVVSYLGLNPKERSSGDKQHTYAISKQGRRNAVDLARGRAVNFSESRREPHKFGQR

SEQ ID NO: 329529 - protein, 319 aa, unidentified
MAQNDPGVVGIDVAKDKVDACIRAFKLQQTWPSTAQGQRKLVAWLRKHQVNKAVMEASGGYERAWARLLREAGIEVRIVDPKRVRSFALSAGRLAKNDAIDAEMIAWFAETFNEAPSQAHDAAREELQSLVKARLDLIDFRMRLVSQSEHAAPGLVQKAQARILRSLTSEIAKLEAAISAKTKSTPDFAERAEIIQSVPGLAETSSATLVAGMPELGQVSDAIAAALIGAAPYDDDSGKRRGERHIKGGRRWVRNAIYMPCVGAATQNNPVLKAYYQRLLAKGKEPKVALIACMRKLIVILNTMIARRQKWDSSRYALN

SEQ ID NO: 329530 - protein, 352 aa, unidentified
MEKNNKLDFGGQHIYVGMDVHKKSWSVSIHTEQFEHKTFTQPPEVEKLTYYLERTFPGATYHTVYEAGFSGFWLHDQLRAKGIDCMVVNPADVPTKDKERAGKRDRVDCRKLARGLRNGEINGIYVPPRVKVEDRTLVRTRQSMVRKQTRCKNQITSILFFYGIVIPEEGRWSRRFINWIESIRMERASGDFALKAHLEELKHLRQIIANLNKAILSLSRTEEYMADVLLLKSVPGISTLTAMILLTELADLSRFSSLDKLASYAGLVPDIRSSGETAYSTGITFRRNAALRALLIESSWVAVRKDPALTMAFNKLSARMKKTKAIVHIARKLLNRIRFVFKNRQEYVPAIV

SEQ ID NO: 329531 - protein, 355 aa, unidentified
MPSKADTAVARTIGIDTGKNTLHMIGLDEKGAIVLREKVARTRIAARFVNVPPCLIGIEAGMASHHIARELTELGHEVKQVPPAYSKPFRQGHKNDFRDAHAVAEAVERPSTRCVPIKTDGQLDLQALHRVRSRLVGNRTAVINQIRGFLLEHGIPVRQGHRFLRQQLPQLLATRTEVLSPRMIRIIGDLMADWRYLDERVEAVTDEIETLAGADEGCQQLITVPGIGPIISSAIVAAIGNGTAFCKGRDFAAWLGLVPKQMSTGDRTILGRITKRGNRYLRTLFIQGARAVLLHPTSWARHSFGPWLTTAARRMHRNVLTVALANKLARIAWTVLAQGRRYEARVEPRIEPAAA

SEQ ID NO: 329532 - protein, 318 aa, unidentified
MDQPIIGIDVAKATLDAYVHPSGARFPVTNDDEGIKTLLERLKAFPQAAVILEATGGLEFGVAAALTSAGFRVAIVNPRQVRDFARALGRLAKTDPIDAEILALFGDRLRPEPRPIPDSALRSLEAHVARRRQIVDMITAESNRLGQTTDADIKKQIKRHITWLQHELKSVDTDLGDAIRHSPIWRAKDQLIQSAPGVGRVTSFTLLAQFPQLGTLGGKQAASLVGLAPFNVDSGTLRGRRHIWGGRASIRSVLYVATLSAVRYNPVLAEFYQRLLRAGKSKKLAVVACARKLLVILNAMLRDNRPWTPAHLDPQHGC

SEQ ID NO: 329533 - protein, 329 aa, unidentified
MACAPADNSKQPIMTKISSRVEPPAAVLGLDIAKDSVVLYDAATNTTRTIENTPAALAAALAGYAGHALMVCEATGGYERAALDAACSVGLPAHKADAARVKAFIAAMGGAAKTDAIDARWLARYGIARNGALPRWRAPAPEREKLAMLVRHRQDLLQSRTRARNRNAAPGAAPLASFLEAEIAFLTDQIVTIDQAIADLIASDQTLHRAERALRAIAGIGPVAARTLLALLPELGTLSRRQIAALAGLAPHPHHSGTLKRHRRMVGGRNGLKPVLFMAALSAARRHPTLAAFYQRLVAAGKAKRLVLAAIARKLVTIANAVIRQPKLT

SEQ ID NO: 329534 - protein, 323 aa, unidentified
MYYLGIDVAKAKLDCMLLDGTSGKRKAKVVANTRAGFTQLLEWLDKQGAPAPYVVMEPTGVYHEPAALALTDAGLTLSLVNPAQLRQFAQGLGVKTKTDKADSTVLARFGQMQQPKPWQPPSRSARTLKALLARRDAVAEDLQRERNRQEAADFAQTPDEVKASITQTIVFLESELKRFEKMINDHIDSDPDLRSKKELLETIPGVGERVSTNMTALFAARSFERAEQVAAYLGLVPVQWESGSSVHGRPRMSKAGPAHLRKLLYMPAVTARQCNPHIRALGERLLAKGKPMMAVIGACMRKLAHLCFGVIHTGKPYEPTFAM

SEQ ID NO: 329535 - protein, 392 aa, unidentified
MIYIGIDVAKAKHDCCIIDSDGVIINDSLRISNSREGFELLYSSILSVLPNKDISNVKIGLESTGHYSTNLQNYLYAKGFHLSILNPLATNLFRKAQTLRKTKTDKTDALVIAKMLFSDDTKSYSPVSYQIQELKSLTRHRYRLIGYRSRLKLSITRLIDIIFPELPKYVWSIHQVSVYALLSELPSPKEISNCHLTKLTNLLAKSTKGKYSRAKAIEIKEVASNSIGTSTRSLSFELQQIIRLIRSVQAEIDALDKQIKDVVIEIDSPLMSIPGISYTLASIILAEIGDIDRFTDPAKLLAFSGLDPSTYQSGKYNATHTPMVKRGSTYLRWAILTASRTVSMRDSTFGDYLAKKQSEGKHYHIAMSHVAKKLIRVIFYLLKTNTSFVSQI

SEQ ID NO: 329536 - protein, 317 aa, unidentified
MRASATFFVGIDVSKQQLDIAVRPSGESWTVAHEEAGLSALVARLRGLAPTLIVLEATGGWEVPVTGALAAAALPVAVVNPRQVRDFARATGLLAKTDRLDAQLLAQFAEVLRPAPRPLPDAQAQELTALLQRRRQLVEMLTAEKNRLPLAARRIRPQLQAHIAWLHQQIAQFDEDLRQLIRSSPLWREKDDLLRSTPGVGPVLATTLVAALPALGTLSRRQIAALVGVAPLNRDSGTLRGRRTVWGGRAQVRAVLYMSTVVAVRHNPVLIAFYQRLRAAGKAPKLALTACMRKLLTMLNAMLKHHRRWAPVRAQHA

SEQ ID NO: 329537 - protein, 421 aa, unidentified
MKFKAQDKQNQLIENITVHHLVIGVDIAQEAHVARAVSFRGIALGTPLAFGNHREGFNLFVCWIQDLLKSYKLSSVIVGMEPTGHYWFSLARWLLDQGIDPVLVNPHLVKKNKENRDNTPSKSDHKDALVIADMVKNGYYSPVRFHPEAFEELRILMANRETVTKRLNAAVNQIHRWVDIVFPELRQVFKILTCTSAIATLRLFPLPKDISRLNIEQVLDGWKQFVKRHAGVKRAELLISLAKSSVGTAQALHAYKLHLGQLLEEFDLAQRQLEQIKHELQLILERIPYAQKLLEIRGINVTNLAGVLGEAGDLSGYTHGNALLRHAGLNLAEASSGKWRGKMVLSKRGRPRLRHFLYLMTMSMIMTNPEIRASHRYNVEEKNLKKMKSIMKLIGKVARMLIALAKNSTAYEPIKVFPQAA

SEQ ID NO: 329538 - protein, 343 aa, unidentified
MDYGAIDLHVRHTLIRFVNQEGTVLLDRRVTTTVEELQHVFGGRPRARILIESGTDSEWVAQAIEACGHEVIVADPTYALMYGHRDPRIKTDRRDVAALAEACRLGIYRRAHRVSAAQRERRRALRVREQLVRTRTQLINLVRAQLRQEGYRLPAGCSTTVVRRCQALPLPPGLRAALEPVLTVLTTIGDELRACTETLAAVAAQDPIVQRLQTAPGVGVITALTYRAVVDDVARFADARGVAAYLGLVPREDSSGTRQRKGTITKAGPPGLRTLLVQASWVVWRQRRGGGALHAWVHQLAARRGRRIAVVALARRLGRILFAMWRDATDFGVTPTAPGATVA

SEQ ID NO: 329539 - protein, 311 aa, unidentified
MGGVNATIEVGKHQLDVALGSNGELFSEPNQTRAITRLAKRLAELDCTRVLIEGGSYQNVLVAGLRAAELPVVIINPRRVREFAKSIGQLAKTDHIDARVLALYGERIEPPIRELPDEQNQALRGLWVRREQLIEMLVMEENRLEHAPKALHRSLRAHIDYLRKQIKQADNDLDRAVRNSALWDKYQLLSSVPGVGPVLSVALLSDLPELGRLNRREVAALAGVAPFNCDSGTLRGQRKIQGGRKRLRRVLYLATVASVRCNPVLRPFYLRLRATGKPAKVALVAAMHKLLLILNAMLKTQTVWRPPCPAA

SEQ ID NO: 329540 - protein, 356 aa, unidentified
MHTHGNQSKTIGPVVTIGIDTGKNTFHLIGLDARGAIGLQIKLSRSQLERRLANIPRCLVGMEACSGSHHLARQIQKLGHDVRLIPAQYVKPFLKGHKNDYRDAEAIAEAVQRPTMDFVAIKTPEQMDLLALHRVRSRLVGQRTGAINQIRGFLIERGITVRQGVAPLRKALPDILSSNSEVLSPRMVRLILDLADDWRRLDVRIEAVSAEIEALAEQDDGCQRLMSVPGVGPIISSAVVAAIGNGAGFRQGRDFGAWLGLVPRQDSTGDRTKLGKISKRGNKYLRTLFVQAAHVVLVRRPAAAERGLWPWIEAASKRLAHRNLLAIALANKLARIAWAVLARGRSYEPRVTSHAT

SEQ ID NO: 329541 - protein, 351 aa, unidentified
MIIVGVDYHPSVQQVAFLDTETGETGERRLNHSDGEAERFYRDLQRRQVKVRVGMEATGHARWFERLLAELKFELWIGDPARIKAARVRKQKTDRQDAQLLLRLVVEDRFPRIWVPSPENRDLRQLIWHRHRLVQMRTRAMNQIQATAMNEGMRRKKTLWSKAGRKQLESLLLAPWATRRRQELLDLVDRWNVTIAELSAAIEQEARKRPEVLRLMTHPGVGPITALAFVLVIGSPDRFACGKQIGSYLGLIPCEDSSADRQRLGHITKQGSSLLRYLLAEAAQAAVRWDPGWRRRFVHLAMRRDRRIAKVAMARRLAVSLYWMWRKECDYQQTLQFGSHAGEPGFVHGVK

SEQ ID NO: 329542 - protein, 349 aa, unidentified
MCEMYFDPKETGMKYCGIDLHSNNCAVIISDEEDRIVFNKRLANDLGQIRAVLEGHREELAGVVIESTYNWYWLVDGLMDVGYRVHLAHPSAIKKYEGLKHSGDFADAGYLAQLLRLGLLAEGYIYPREERGARDLARKRMQLVRYRTAQILSIENILIQQTGARIKGEAVKRLTAEQVDEFAFAPDVALAVEANRAVSQALGQQIEALERRLKERMSLRAEYRLLKTVPGIGETLATTIMLETGCIGRFAQVGNFSSYCRCVDSLRESNGKKKGEGNTKNGNKYLAWAFVEAANFALRYCPQAKSFYDRKKSKTNRVLAVKALAHKLARACYHMLRDQKPFDVGRCFG

SEQ ID NO: 329543 - protein, 345 aa, unidentified
MKVLIGVDPHKASLAVAAVNEAGELVEGAHFLQNRVGLRSLERWSKRFPKRRWAVENAGGLGRHLAQRLAAAGESVVDVPPKLSARVRVLSTGNSRKNDGLDALATALAAWRNERLAAVDPEDSSEALRLLSERREDLVAERTRALNRLHGLLRDLVPGGVAGTLSARRAARILRGIRPQSSSSRIRRRLASEVLSDVRTLDRKIADLNGRIKAEVEASGTTLTEIFGIGPILAAKIIGTVGSVARFPTKAHFASYSGTAPVEASSGEVVRHRLSLAGNRHLNYALHMVAVCQARSDARGGAYYRKKIEEGKSRKEALRCLKRRISDAVFASLVADSQAPWRSAA

SEQ ID NO: 329544 - protein, 391 aa, unidentified
MILAGIDVAKDKHDCFIMNSDGEILVKAFTFSNNLEGFNFLYEKIRSVTKPKDKIKVGLEATGHYSYNLLGFLLNKGLPTFVINPLHTNLFRKSLTLRKTKTDKVDSRTIAMMLMSDVALKPYTDTSYHNEELKSLSRYRFTKVQERSKLKTSVSRLVQILFPELEKIVCTIHMSSIYHLLEEYPGASYIASVHLTKLTNLLMEASHCRYNRNTAIKFRKAARNSIGSILPAKSLELKHTIKLIRELTVEIDEIDAEIKKMMDSIALPITTIPGIGYSMGAMIISEIGDFSRFSSPDKILAYAGLSPSTYQSGQLNNCYSHMEKRGSRYLRYALFTVAQKVCIWDNTFAEYLSKKRAEGKHYYVAISHAVKKLVRVIFHLERTGQAYLKAA

SEQ ID NO: 329545 - protein, 435 aa, unidentified
MEEVEDEPLFAERVAGIDVGKAAIMVTIRVPGDGGRRRQQETREFRAVRKDLLALADWLRCWGVAKVGMEATGDYWKPVYFLLEREGFDCVLYHASQVKALPGRPKTDKLDSVWLAKITERGQLPGSFVPPEDIRRLRTHTRYRRHLIQARTAEKERCEKLLEDAHLKLSSVIRDIHGVSGRDMLTAIIAGQRDPKVLAQLARGRMRVKIRELEEALDCSFFTSQHAFILAMMLANIDHLTAQVSELSAKIEVLCEPYARQIAQLDAIPGFGIITAQDIIAETGTDMTVFATAGHLCSWARQAPQVSQSAGKRKGRNATGTGNPYIGAALGEAAIGAGRTQTFLGAKYRRLVRHMPKKKAQGAIMRTQLALCHILMSDPGAAYEDLGPDYYERKANIRRRARDHIRGLERLGYKVTIEALSPDPDTCELPISKAS

SEQ ID NO: 329546 - protein, 466 aa, unidentified
MELKSKIVKRASSKKILERINHYAAGIDISPKENWVCVPPEATEVNVRKFGSTTPQIRKIVSWLKECGVKTVAMESTGVYWIPLRENLEKAGFEVVLVHAQYVKAVPGRKTDVLDCQWIQELHTYGLLRGAYRPPDKLLALRTYTRERTLLVREASRKLLKMQKALDQMNVLVHRAVSDISGKTGMCIIRSIVAGVRDPAMLARHRDKFCKRTQEEIAEALDGNFLEYHVDCLQLALQSYDFIQNQISALEAKIEAELLKFDPNIDVKDKPIPEPRCRAKKNKGDPCFDVRRIVYPLFGTDLTQIEAISNRTLMTIISEIGWDMGYWPTVKHFTSWLSLCPGSNKSGGVSHSGKTRPSANRLATAFRLAANALHKSQGPLGHYLRRMKFRIGKAEAITATAHKIARIVYTLLKTGAAYDPEKMRDLNGEQKRKQLKRLHKVAAEQGFYLVSEAQMLRYNQLSGVVS

SEQ ID NO: 329547 - protein, 337 aa, unidentified
MDRQYVGIDFHRRRSVIVRMSAMGEKLSSVRVANDPLAVAAAVAEAGPDPEVVIEATYGWYWVVDLLQANGARVHLANPQGLNWGQRRVKNDERDAVDLADMLRLGRLPEAWIAPPEVRELRELVRYRAKLVGLRSGLKAQVHAVMAKEGVLPAQGRMFGPAGNAQLDGMAMADSFTTRVASLRDLIERYDREVTMLEGQIHHQLLHHHGYQAIQSIDGVGRTIAAVLVAEIGDVGRFRSAEALCSWAGLTPKHRESDTKTTRGSITKQGSRLVRWALIEAVSRYHGGPRLAGDFRRIAERRGTNKARVAVARKVLTLVYYGLRDGEIRCLAQAPAA

SEQ ID NO: 329548 - protein, 416 aa, unidentified
MDLVVERPGALDVHKAKVTAAVRLPPPEGKRRRREVVAEFSTTVPGLMRLADWLAEHGVRTVAMEATGDYWKPVWAVLEERFELMLVNAQHVKQVPGRKTDIKDAQWLCRLLEAGLLRPSLVPPASIQALRELTRYRKTRIHERQREIQRLHKVLEDTGIKLATVATDILGVSGRLMLEALVSGTTDPDALAELARGRLRSKLPALREAMHGRFRSEHALLVRELLDHIDYLNGCIDRLSADIAERLREFDPAIELLCTIPGVQRRSAEVIIAETGGDMSAFPTARHLASWAAMCPGNDESAGKRRSGKTRKGSKWLRAALCESAHAAARTRGSYLQAQYNRLRVRRGPTRAVVAVGHSILIAVWHMLTTGEVYRDLGGEYFQQRDPQRATRRLVAQLERLGHTVTLTTPEGPAVT

SEQ ID NO: 329549 - protein, 319 aa, unidentified
MNKYLGIDIAKDKFDVALLVDEKFKTKAFSNTNKGFISLLNWLDKNNYNSNELHTCMEATGSYGLALATFLVENNYKISIVNPARVKGFSKSEMLRTKTDKEDCKLIARFCKAMVPELWKPNPKYIQLLQGLIRRLESLMLMKLQEENRLAVTTEDPIKKSINAVIEVIEEQILEVKDKINNCIKNNGDLNKKRELLATIPGIGEATINTILAFLSSEQFVSAKQMAAFVGLTPKHRESGKSVKGRTNISKIGDSQIRKTFYFPAIVAKKYNPTIKAFCERLEKNGKSKMEIICAAMRKLIHIIFGVLKNQKPFDPKMV

SEQ ID NO: 329550 - protein, 366 aa, unidentified
MDAIYIGVDFHARQQTTCYLKTETGELVISELKHQDKEQVRAFYQQFPSPVIVGLEASGYSPWFEALLEQLGCEVWLGHATEIRRRARWRQKNDRRDAELIWDLMVHDEFPRLHRPAATSREVLRMLRYRQKLIKLRTMAKNSLQAIALQAGLAKGKQLFTAAGQEEFKRAALSPVLQWQREHWFALLRPLNQQLLETMVWFKAQSKDDLRIQRLRTHPGIGLLTALCLLHTLQPVERFRNPRKVAAYAGFDPVERSSAERQHFLGISKAGSRLLRYLLVEAVQTAVRYDEDLKRFYKRVAERRGRPKAKVAAARKLLIRAYLMMRDEIDYAEFRHRAVAVRLARGGQGPSNVPAVLIGQPASPGA

SEQ ID NO: 329551 - protein, 348 aa, unidentified
MKHYAGLDVSVKETSVCIVDESGKLCRERKVVSHPEDLVAILSDPAFSLERVGVEAGPLSQWLFEGLAKAGFPVVCIETRHTKAFLDALQQNKSDRNDARGIAHMMRVGLFKDVHVKTLTSQKRRALLTARSLLQEKAIDLENEMRGLLRNFGLKVGHASGGMFERRILELVDHDVELAEIMEPLLAGRRKLREGLAKLDKRVRAETKQDDACRRLMTVPGVAPIVSLAYVSTIDIPSRFRHSRSVGAILGLTPVLKQSGEVSRVGHVSLRGDAMMRRLLYEAAQSMMTRVVKWCWLKAWAMNIAKRHGSKKAKVALARRLAVVMHRMWVDGSEFRWTKDENIANAAA

SEQ ID NO: 329552 - protein, 422 aa, unidentified
MLEQTQDEQEIIARVAALDIGKAELMCCVRVPDPKGGSRRVQEVKSYSTMTRSLQVMADRLMDLGVTRIVMEATSDYWKPPFYLLEAHGFDVWLVNARDVKNLPGRPKTDRLDAVWLCKVAERQMLRPSFIPPVPIRRLRDLTRYRIGLVSDQTREKNRVEKLLEDSQIKLSVVASDIFGVSGRQMLAALIDGQRNPQVLAQMARTRMRTKIPQLEEAFVGHFTDHHTFLLAKMLARIDALDSDIADLDTQIEAHVAPFADAVARLDQIPGVGATTAAVIIAEVGLDMTRFPTPAHLSSWARFAPGVKESAGRKKGTGSTGHGDRYLARVLGEAAAGASNTNTFLGERYRRIARRRGKKKAIVAVGRSILVIVWYLLSDPEVGFRDLGSGYYDSRVNPEHKKRNHIRQLEALGYKVTLEPAA

SEQ ID NO: 329553 - protein, 371 aa, unidentified
MIRSWTDSRRDWKPVAASVVGPRMSLVLRSFLPHPNSCLGTSPYQQGRDTKMAQLSFCGIDVAKDRLDVMVLPEELCWSVANDAAGWAELVAKLRGLRIAASGIEASGGYERGVVRALLAAGMSVRQINPFKLRQFAKACGVLAKNDRLDARMIALFVATLPTRSAQRYAPVERLAELVTARRQLSDDKVAAENASRLFEDAALRRLYGGRIARLAADIALLDKRLAEILAGDAMLARRYALLVSMPGVGPVLAVTLLALLPELGQMNRKQVAALVGVAPYDFDSGRLRGMRCIWGGRAPVRRVLYMAALIGCRCNPQLRAFHDRLAAAGKKAKVVLVAVMRKIITILNAMLRDNVPWVDHSIGQHILPAA

SEQ ID NO: 329554 - protein, 393 aa, unidentified
MQVHVARGAGLDVHRDSIVAVVLVGSKKVKKELRTFGTTSGELAELRQWLQSHKVTHVAMEATGVYWLPVVEALEGQFELVVANAHQVKNMPGRKTDACDAEWLATLLRFGLINSSFVPPAWQRQLGGLTRSRSSLTHSITRQRNMVLKLLESVGIKLAGVLSDVFGVSGMAMLRALRDGNENPELLSGLAKGRLRKKTSQIVAALKGRTLAPGARIVLAQHLQTLDLFDEQMQQLEAAIDAVVAPYSKIIARLRTIPGVNYVLATVILAEVGPDVAAFPTCAQFAAWSGTCPGNARSAKRSKAAGARKGNVHLTTALVQAAVSASRAKKPTFVSDKYHRIKTRRGPKRAALAGGHKIAIALWHMLHKGEDFHDLGPASISPRTKDSTRNNRI

SEQ ID NO: 329555 - protein, 322 aa, unidentified
MRYIGIDVSKATFVVAYSSDKGGEIRTFNNTTTGIKQFIGALPKDSSIHCVMEATGNYSAMLLYLLNVAGIAVSMENPLKIKNFARAMLSTVKTDKIDARLIALYGEKMNPQPFKIQGEAILRLRQKRTVIRQLTKQITAMSNLRGSLACLPVPDKGATHTVDETIKFLEKRRDRLQVELTDLVEIEFSRQLALLTTIKGIGITLATALIITTGGFTYFQNAKQVSRYLGICPTYEQSGTSVNIRGHINRNGDAYTRGLLYVAAWTASRFNAKCGETYTRLRQNGKPGKLAMIAVANKLVRQAFAVVTHDKEYVDGFVSNRP

SEQ ID NO: 329556 - protein, 361 aa, unidentified
MNWIGVDVGKVHCQICEISSTDEIWEARVPTQAERLKATFQPRPQARVLLESSTESEWVARILEGVGHEVVVADPNYAPMYSHRSRRIKTDRRDARALAEACRVGAYRAAHRTSDPRRHVRALIAVRENLVRTRTRWILLTRALLRREGFRTRSGRAESFVERVLELQLSAELNEEVEPLLELLGPLNDQIDDVDAQLARLATADPAARSLMTMPGVGPIVALAFVATVDRVDRFRNAHQLESYLGLVPREWSSSETQRRGPITKTGSKRTRWLLVQTARAVMRTPSRRTTRPLWEWGDRIGRRRSGRVGVVAVARRVVGILYAMWRDGPEYNVTKVKGSAALLRTALSGLLRLLDDSRDR

SEQ ID NO: 329557 - protein, 423 aa, unidentified
MTIVYPICCGVDVHKTFFVATLITTEGIVPMYLKRRFSTFNNQILAFKAWLLENNCRDVCMESTGKYWVPVYNLLEDSVNVTIANPKWVKAIKGNKDDAKDSKWIGDLFRIGLVPGSFIPGKDVRILREYTRYRFKLVSCKSGEKNRYQNVFTVCNVALDAVVSDMFGKSATSITDYIVNSDTFDPEHCTSLLQRSLKKKATEVVESIEGFQMTAPQRERAKMVKEHYDYLMSHIHKLDAAIDELSKPFEPAINLLSTIPGIRRDSAITVLSEIGTDMSQFDSAKRLCRWAGLAPGNNESAGKKKSVRITRAGVYLKPALVEIAHAAVKSKATPYYRLKYERISKRRGKKRAIIAIARMILTAAFHMLTTGEVWNPSDLNQIDMPPERREQQVHKSLCRAVKLLVAHGLVLPDTIRIPESVPA

SEQ ID NO: 329558 - protein, 338 aa, unidentified
MLHSGIDLHKRTVVLATVDATGACVNEAELPTTRAAVAAYFTAQPGPHRAVVESTATWYWLRDLLVPLGVDLTLGHSKYIKAISYAKVKTDAVDAHTLAQLLRNDLIPVGHMISAAHREERDLLRARLRLVQQQVRCRVTVDGLLAQYNVTAVEALPELVRWRVAMLTEQRALIVAHIKQMEQALVPRLVPTADIQRLLYIPGIGKIAAFTVLLEIDDIARFGSVKGFVSYCRLVPAAKNSGGKVRQQRSKDGNRYLKLAFHHAAVRAIQYFPEIKAFYRSLARRKPKAVARAVVAKEIARAVYYVLSRQEPFNGTFKGQPLSRTKQPRWPRLANPPV

SEQ ID NO: 329559 - protein, 370 aa, unidentified
MLNTTTFVGLDVHARSIKAVALDAMTGEVRSATFSYDAAAVAEWVGSLDPAAKCVYESGVTGFDLQKKLTALGVDCVVGAVSKMIKPSADRKRKNDRNDAEFLARMLSVGNVVEVCVPDDECEAARDLVRALDDAREDLKRCKQRLSKFLMRHGYAFSETTPTGRRKGNWTAAHWAWIRSIEFPEKADDDVLAYYVDAVRQAMENKKRLEKLVEAEASKPRWKKRVDSLRCLKGVDAMTAADIVFEAGEFSRFKNARSFAAWLGLTPSEHSSGESARQGGITKAGNKHLRRVLVEAAWHYISASPHPKDLAKGQAPDPAARRHAAKGIRRLVKRREEMLGRGVHKNKANVATARELACWCWAVGRMIENG

SEQ ID NO: 329560 - protein, 359 aa, unidentified
MIVVGIDPHMKTHTAVALDAATGRTLAERTVACRQDGHDELLAWAHALPDDHYFAIEDCRHVSGRLERHLLLHGERVVRVPPKMMAGVRHSARSYGKSDPIDAAAVARAALREPGLPEASMTGPEHDVRLLVDHRDDLVGERKRIQKRLRWNCHDLEVSVELPPRVLDRYVWLDRLEGVLGALPVSTRRRIALDQVSRCRDLTVDIRSLEREIRRRMRKLSPELLAIPGCSAISAAHLVGQTAGASRFSGEAAFAMHVGTAPLPASSGQSNRHRLNRSGNRRLNSTIHMIAVTQARMHQPAIAYMERKQADGMSYREALRCLKRHLARVVFKTMLRTEHKVAGNVLHVDFTAEPVAVAV

SEQ ID NO: 329561 - protein, 346 aa, unidentified
MALAAISVLGVDLGKNVCSVVGLNSSGAVVMRRKMRRETLIRLAEKLPACVVGMEACCGAHHLGRLFAACGHDVRLMSPEYVRPYVKAHKNDDRDAEGIAEAATRPTMRFVELNRQDQLDMQTLHRSRDRLVGERTALINQLRAILLERGLVAPQGKRKLEQFLAVLMDEQGGAGLSPRMIRLVADTRAQWAEPDRRIMVFDAEFVRWAKENEDTRRLTTIPGVGALVASALVAAVRRAGSFDRGRDLAAWLGLVPRQFTTGGKPKLRGISKRGDKYMRRQLIHGARAALPHVAERDTPLGRWAKGLLGRAHRNVAVVAFANKLARIAWAVLRGQERFAAQMTMAA

SEQ ID NO: 329562 - protein, 428 aa, unidentified
MHFNQNQRITQITSSTLIVGVDIAKFKHVARAQDFRGVEFGKPISFENSLEGFELFVNWFRKIMSEHGCEDVVVGMEPTGQYWLNLAHYLREQTIVFGVVNPLHVKKSKELDDNSPTKNDIKDAKVIAQLVKDGRYAVPNIPQGIYAELREAMKIREHLSTDLRVVQGRVHNWLDRYFPEFLTVFKDWECKSAIQMLSLNLLPHELVKLPDEFLLGHLREVAKRGAGLGRITRLKSAANRSVGIKQGTELAKMELQLLLAQYQLIQCKFAELEMKLDQLLHQIPGVNHLLAITGVGRDTVAGFLAEIGDIGNYHHPKQLIKLTGLNLKENTSGKHKGQTKITKRGRKKLRALLFRVIMPLVAKNRAFKALHEYYTKRPDNPLKKMQSLNALCNKLIRVLFGIMKKGHEFSEVKMLQDIPRFNILSTAA

SEQ ID NO: 329563 - protein, 349 aa, unidentified
MTIVGCDLHTRKQQVAVLHTDTGEVVEQELLHAGDAVEQFYRTLPRPVIVGIESTGYALWFHELMQRLGHTLLVGEAAKIRAMVVRKTKTDRRDAQHLLDLLKHDRFPAVWIPDPATRDLRALVTHRMRLVRMRTMVKNGLHAIAMNRRLTLGPSLWSQRGLAQLQGLALAPHTTQRRDESLQLLTWLTARIEALDDRVAAAAQADPGARLLLTHPGVGPLTALTTVVVLGPVARFPDSKHVVSYTGLAPAVHASADTCRLGQITKQGSPLLRFVLGQAGLIAAHAEVDLKRHYRTLLRRRGRPKAIVAIARKLLVRLYIMLRDQIDYEEFRRRGRTPRGQEVPPPALA

SEQ ID NO: 329564 - protein, 365 aa, unidentified
MTTIARSGVERRVLGGVDTHKEAHVAAVIDDLGRILATAEFPATGHGYRRLLAWLRGFGELVAVGVEGCGSWGAGLARYLSARGVQVVEVNRPNRQHRRRRGKSDTADAEAAARAVLAGEATVIPKTGTGPVEALRQLRVARAGAMKARTAAANQLHSLIDTAPERVRAQLRDLTFKKKVAVAAGWRPTITATPEGASRYAVASVGRRWRALAGEIAELDRRIKTILDDVAAPLVAVHGVGYDTAGQLLVTAGDNPERLRHERSYAALCGSSPVQVSSGKTDRHRLNRGGDRHANSALWRIVIVRMTSHQPTKDYIARRTAEGRTKQEIIRCLKRYVARELFPHINNVITPAGFQATPPDSQIAA

SEQ ID NO: 329565 - protein, 340 aa, unidentified
MKLYGAIDLHSTNSVLVVIDEEDKIVYQKRLPNDLALILKELCVYQSRLEGIVVESTYNWYWLVDGLMAEGYQVQLANTAAIQQYEGLKYSDDDSDARWLAHLLRLGILPQGYIYPKAERAVRDLLRKRSQLVRQRTMNLLSIQNLMTRNTGSSMTANQIKGLDKAQVDGLLPNADLSLAVKANWSVMCSADEQVERLEQRVTERVKLRAQFSFLKTVPGIGQILALTIMLETGDIGRFATVGNYASSCRCVGSQKISNGKRKGSGNTKNGNKYLAWAFVEAANFAIRFNSKIKSFYQRKKAKTKAVVAIKAVAHKLCRACYHIMKDRVAFDVTKAFGQK

SEQ ID NO: 329566 - protein, 414 aa, unidentified
MKKRTYRAKNVNKINWDKVAEQLSGEAGVFAIDVAKAKQYALLTNADNSVSELIWWNHPEQTYEVLTALKCLACPLDVVMESTGTYGDALRYQFKQSGFRIYQMNAKRVSDAQEIYDGVPSMHDAKSATVITRLHAEGLSKPWVELTDEERNMNALRREYNMHHTQYQRNQNRLEAFLSRHWPEVGEFLDLDSVTLESLLIAYGSPEHIAANAEDAAKKMRGWGRSLLSDEKIESVIKSARHSLGQPCTDIEVRYLQALAEEMRHSRLQQKRAKNALEGFIERDDELKELSNLIGMITTAILLSCHLDPRKHDCTRSFQKALGLNLKEKSSGRHVGQLKISKRGSSTARSYLYFATLRLIKNNPVAKAWYLNKVDPRAKNKTVIAVMRKLVKALWYVGRGERFDANKLFTLAKA

SEQ ID NO: 329567 - protein, 377 aa, unidentified
MYYVGIDVSKHHHDATVIDATGRVVIAPFRFLNTRQGVATLLSRLRPLNPVCIAMEATGHYWLPLYEALTDRGYSVSIFNPFQIKAYRQIGLRKTKTDAVDSFWIADFLRIGRGQPMVVPTPLVRQMRELARFRFSLLQRQGNIRRRALTILDRVFPEYLTLFPRPFSPTSRALLRRAVTASSFAAWPLEDLAQTLSRASRGHFGLREAGKLQCLAQDSLGIRSLGPVAYLEMQLLLDQLALLDDQIATLDEELARLLQRTGTYLTTIPGLSTTLAATILGEIGDIHRFANLKQLVAYAGLDPTVHQSGQFQASHSRLSKRGSTYLRWALWMAASIARQHDPDLKALYQRKRSQRKHPSCCHGCCLPSAPSPHLCGS

SEQ ID NO: 329568 - protein, 301 aa, unidentified
MPSMPQSLVLSQASSDPDEVVVGVDTHKDVHVAAVLTALGVLQETKTFPATAAGYQALLAWAGTFGILRRAGVECTGSYGAALARYLRAAGVEVIEVNQPDKATRRRRGKADTLDAESAARAVLSGRASGSAKAGDGPVEMLRMFKLAKASAVKARTQTINQLKAVLVAADPALREALSGLSTTMLIRHCAQLETTTPQDATDAAMDVTDAAIYTLRLLARRILALSEEVHDLEQRLTDTITSHTPVLLTHRGVGPDTAAALLIAAGDNPDRLCSEASFAALCGVSPQQASSGKTTRHRLM

SEQ ID NO: 329569 - protein, 391 aa, unidentified
MVCVGIDVAKDKHDCCILDSDGTVRADCFTIPNNMDGFKQLLQTIRDCTKKSDKIKVGLEATGHYSYNILGFLLDNDLAVYVMNPLHTNLYRKSLSLRKTKTDRVDARTIATMLLSDVDLKSYTDIAYHNEDLKSLTRYRFDKVQERAKLKQSVSRLATILFPELEQLVSSIHGTSIYALLGEYPGAKQISEVHLTKLTNLLTTASKGRYGKEKAIRIREAARTSIGSVMPAKSLELKHTIKLIQELASEINEIEDSIQKIIDELNPPILSIPGMGVNSAAVILAEIGDFSNFSSPDKILAYAGCSPSTYQSGKLTNCYAHMEKRGSRYLRHALYNATKYVCYWNPVFAEYLAKKRAEGKHYNVALSHAMKKLVRLIYALQKSGKAYLAAA

SEQ ID NO: 329570 - protein, 418 aa, unidentified
MKKHSKSSQRSEPRLERTKARGPVQRDAKEVLAEVLGKLTGKLDMPAVSTSAKENRRGNTVGPNRDRLTVGVDLGDRWSQYCILGLAGETLAEGQLRTTQEDVREFFQALTVARVVIEVGTHSAWVQDVITEWGHEVLVANPRLMESSKRRKRKSDRIDANKLARLGRVDPQSLYPIRHRSREVRQDLVVLRARDALVSVRTELINTARGLVKSMGTRLPQCSSPSFAEKVKDAIPIEVREALLPLVELVERVNDCISKYDQKIEELGREKYGHTTMLRQVKGVGPITSLAYVLTLEDPQRFASSREVGPYLGLVPKQEDSGDSQPQLGISKTGDRMLRRLLVGSSQYMLGAFGPDTDLRRYGLRLCERGGKNAKKRAVVAVARKLAVLLHHLWVTGDVYEPLHHTGAETKTAQATAA

SEQ ID NO: 329571 - protein, 446 aa, unidentified
MSRKKRTHLRGKRGQAFADKMRGISLERILCVSLDIHKYFHVVMLHNALGEIITPTFEIDIFQSGFEQLCQAIKEASHRVGAQVVLTGMEPTSHYFENLARHLQDGPYPVTLINSFAVKENRDQQMMHYEKDDEIDTAAIGDLLRRGEGSPYRPARGIYLKMQQLDRVRIGKIKIRTMLKNQIIAHLDRIFPGLVIVADAGKERYTPMFATNFWSCQTMQHLIRVCPDPRQLAAMSTQDLIDVFHAHHCAMGHITANKIITYARKILLPDPELIAIRSELLTHDIALFDDVQNHITQLEGRLCTLLAKTPYYIWARLKGFSLIQVASLAAAVGDPANYNVAKQVFRRSGLVCGRHDSGTRKRKGKGKHVSKAGDVYIRRNLMNSVSTLLLHQPVLYRYYQKLKLTKHDGVARVATARRAMGILWAIQRDQHSQTLVFKKGQQNVDR

SEQ ID NO: 329572 - protein, 438 aa, unidentified
MSNKVIFNLDELFISVGIDVGADFSWMSIALPNQQFVGKPYKILHNSIDSLTTAVSKIKEAEELYSLESRIFLESTGIYHYPLFCYLRDKGFNCSVINPIITKNSTNINIRKVHNDRFDSKKAALVGLKPDLKVSLMPSDLALNCRNLCREYYDLMDNRSAYVNKLQGELRMAFPQYLGIFSKVTINTSLTLLETYTSPSAFLKADKQEIIDIIKSTARFGLTYAQNKYNAIIQAATDANQFGYIIESNIKRIRLYISFIRKYDEEINSILESLHELVDANEDSDFVKQIHLIETFKGAGFLSSVSIMGEIGDFSAFSKPKQLFAYFGLDPAVKQSGKFEGTKVQMSKRGSSIARRVIHTLSLQSISISRNGKAKNPVLREYYLKKCDSKPKLVAMGAVSHKVCNMIFAILRDNKPFKIIAPQEHIQQYNAAKCDIAA

SEQ ID NO: 329573 - protein, 351 aa, unidentified
MIIGIDPHKTSHTATALDPVLNMGVASVRVDAALDGYRRLLRWGRQFDERRWAVENAKGLGSHLAQWLVDQGEEVEDVATTATARVRGLSRGGSRHNDVIDAAAAASVAALVGDSAVVTVEDQTTVFALLEERRANLAAQRVRAVNQLHALLRGLVAGGAPTSLKAATAAEALKRIRPKTLAQRTRKSLSWDLVGDIRVLDAQLAAIAKQMAAALEDYDSSLCDVDGVGPVLAARLIGRTGPPSRFGSSDAFAGYAGVAPDRGVQRQSCYTSALSQRRPRTQIDTAPVAVTRVRLPNSARRRYFDRKIDQAKTRNEAMRCLKRRIASHLWRRMLADDKPRHAESAELETAA

SEQ ID NO: 329574 - protein, 427 aa, unidentified
MPYRIAGIDVHKRMLAVVVADVAVDGEYVFERRLVGTTPDQLRALAAWLVERDVEEVVMESTAQYWRPVWEALERRWQPIRRIRVAAGPSAGALHLAQAQSNHGPRGRKQDFPDAERLVKRLVAHELILSFVPDVTQRLWRTVTRRKYQLTCNRVQLQNRLECLLEEAHIKVSSLVSDLLGPSARRMLHAVASGETDPAAVVALGSPRLRATPDQLRDALGACTDLAPVYRRLLSMTLEELEVIEAHIRQLDEELARLLRVHQEAVVRLAAVPGLGVDSAQQIIAEVGPTAATFATAKHLASWVGACPGHDESAGVNHSHRSPSGNRQMRRLLNQAANAAVKAKGSIFELVYRRLVVRLGHAQAIGAIAHRICRLLWKILHDGVTYEERGPAVTRHRAQRRAAKMIRELRSLGYHVEPIQAPANAPA

SEQ ID NO: 329575 - protein, 426 aa, unidentified
MDIVHPRVAGIDVHKKIIWVAVRLPGERPGERSVTVRRFATFWRPLQQMAAWLAELGVTDVAMESTGVYWWPVYHALAAAGIEVCVCNAAHMRNVPGRKTDLRDCQWIAELHEHGLLRASFIPAAEVAALRQRTRYRKKLIETRTSELQRLAKALEDGGVKIDSVASTLTTASARDMIEALITGERDPAVLAQLARGVMRKKIPELEMACDGRFTDAHAQVCRLHLDAYDHLGGRIAELDVLVAEAATPFARLIARLMTIPGIGQRTAQVIVAETGGDMSRFAAPARLAAWAGLAPGDNESAGKRKKAAARKGNQHLRAAMTESAWTAGRTATRPGARFRRLARRFGRGNEKKAAVAVGHTLICIAWAVMKHDADYTEAGADYYEHHDARNHEHLVRHYQQALARLGYQVTLTPPGDGSPPPAQAA

SEQ ID NO: 329576 - protein, 404 aa, unidentified
MWYVGLDWADTHHDVEVLDEAGKRVGARRFAHSHAGLNELKQFVLSIAASPEHLACIVETNHGLLITFLLEAGFPVYPVNPKTANQLRKAAGAKTDQIDAHLLAKMGRLDLAELRQLEPDSPTVQELKTLTRDQDALIQTQTRLVNQLTACLKEYYPAALHLFAKLQQRSALVFLQTYATPQAAQAASVAELTATLRAGKHTNPRRAAPKIFEELHRPQLGATEVIVRAKSRLMLSLVKQLLIVIEDIATYDKEISALFLTHKDQEIWRSLPRAGKRLAPRRLPEWGEDRRRYDDATSVQSLAGTAPVPLQSGNYAKAHKRFACVKPLRNALYQFAWQSTRQEGWARDYYRRKRAEGKTHSMAVRALANVWVRIIYRMWVSHTCYQPATFEAAQRAHAPRQHVA

SEQ ID NO: 329577 - protein, 346 aa, unidentified
MQFYTRQHKFYCGIDLHARKMYICILDEKGEVREHRNIRTDGNIFLQMITPYRENIVVAAECIFTWYWLADLCQKEGIPFVLGHALYMKAIHGGKTKNDKIDSHKIAVLLRGGMIPMAYVYPEKMRATRDLLRRRNHLMRKRAELFAHIQNTNTQYNLSDSFGCIAKPPNRNGIVEQFKHPAVQKSMAVDLEVVRTYDTILTDLERTIIKLANHHDPVSYALLQSIHGVGRILGLVMLYEIEDIGRFPRVQDFASYSRLVKCSHESNGKKYGTNGNKIGNAHLKWAFSEAAVLFLKGNDPAKRYFDRLIHKHGKAKALSILAHKLGRAVYFMLKNKEAFDQKKFLR

SEQ ID NO: 329578 - protein, 395 aa, unidentified
MRTQDKFVGLDVHKDTTTVAVADAGRQGEVRLYGKISSDLHAVEKALRKIRGERGVLHVAYEAGPTGFGLHRRLVQLGIDSIVVAPSCIPHPKGVRQKTNRRDALQLARLHRAGELGAIHVPGEVDESIRDLTRTRADASQDLKRARQRLKSFLLRYGYHYSGKANWSEAHQRYLRELELPLPALKSVLEEYLLAITQATERLARLDDLVAAQVPQWRLYPAVQALMCLRGFQLVAASILVAEINQVQRFAHPRGMMAYLGLVPREASTGDSRRLGAITKAGNAQARWILVEAAQHVHLPPKVSKELTERQRGQPEVYRRIAWKAQTRLHRRYWHLTRRGVMPAKVKIAIARELTGFVWDVLRNVPEMGGPVPAPQPRVAARRAPRGAPRLAAAR

SEQ ID NO: 329579 - protein, 356 aa, unidentified
MSYDVKYIGMDVHKEAIVIAVLNEDGKQVMESVIETKASSILQFLHGLRGELHVTWEEGTWAAWLYDLLQPQVQHIVVCNPRRNALLKEGSKSDKVDAHKLAQLLRTGMLRPVYHGENGLRTLRELGRSYQTISKDLTRVMNRLKALYRGWGIPCAGTQVYAARCREEWLSKIPQAGVRRRAELLYQQLDGLQALRRNVRPEFLAESRKHKAAKLLRQIPCIGPIRAARLIALMQTPHRFRSKRQLWTYSGLGIETHDSAQFRFVRGQLQHSKKPQQIRGLNRNHNHEMKEIFKSAATRASCGKGPFHDCYAGLLAKGMKPEMARLTLARKIAAITLTLWKKEERFDVEQLKTQAA

SEQ ID NO: 329580 - protein, 308 aa, unidentified
MEQYVGLDVSVEETSVCVIDGAGKTIRELKVPSEPDALLAALTEDACAIQRVGLEAGPLSQWLYGALAEAALPVICVETRHMKAALSAQIQKSDRNDARGIAQMMRVGLYRAVHVKTLASQKRRMLLTSRRLLQAKALDIENDLRGTLRNFGLKAGPVRTVKFEARIREPVAPHPDLAVIAEALLIARSVLREQIAVLNRQLLAVVREDEPCRRLMSVPGVGPVVAFAFRATVDVPARFKNSKAVGAAFGLTPRRYQSGEIDRMGRISKCGDAMMRILLFEAAQALLTRTRKWSWLKAWGMKLPATGV

SEQ ID NO: 329581 - protein, 370 aa, unidentified
MLDTTTFIGLDVHARSIKAVSLDVMTGEVRAATFGYDAGAVAEWVRSVDPRARCVYESGVTGFDLQKRLSGLGVDCAVGAVSKMIKPSADRRRKNDRNDAEFLARMLSVGNVVEVWVPDDECEAARDLTRALEDARDDLSRSKQRLSKFLLRHGLVFDERTPTGRRKGNWTRAHWSWIESIRFAEGADNDVLAYCVDAVRRAAEEKARLEGLVEAEARKPRWRRRVDSLRCLKGVDTATAADLVFEAGEFSGFRNARSFAAWVGLTPSEHSSGESDRRGSITKAGNKHLRKALVEAAWHYLTCSGRPKDLAKGQAPDRVARRHAAKGVRRLVERREALLARGVHNNKANVATARELACWVWAVGLMAEEA

SEQ ID NO: 329582 - protein, 410 aa, unidentified
MDAIVENCCGLDVHQKTVVACVIITGERRRAKREVRTFRTVMKDLLALRDWLASLGVTHVGMESTGVYWVPVFRVLEGRFELVVGNATHIKNVPGRKTDVKDSEWIADLVRHGLIRRSFVPPPAIRELRDLTRYRRKLVQDQSRERNRIQKLLETANIKLKNVASDVFGASGRAMLRAIVDGVDDPTALARMAKGVLRNKIPELIDALEGRCEAHHRLLLALELRHLEEIERTIAELDTYIDAKLAPYESEIALLVGIPGVNRVLAASLIAELGADMSIFPSVRHCAAWAGICPGNNESGGKRRHAGTRKGNVHLVTTLVQAATGAKRTRNCYYRDKFWRLRARRGDMRATVAIAHKILVAVFHMLRDRVPFKELGPDYLAKRNDARAALGLVRRLEAAGFLVKLERPPT

SEQ ID NO: 329583 - protein, 348 aa, unidentified
MTLVGCDLHARDQQVAVLDTATGEIQERRLTHEGSSVEQFYSALPGPVTVGIESTGYALWFHALLHRLGHEVVVGDAAKIRAMVVRKTKTDRRDAAHLLDLLQHDRFPRVWLPDPAVRDQRTLLAHRMRLVRMRTMVKNGVHAIALNYRLALGPSLFTRAGVAQLQALSLPAHTACRRSESLELLSWLNTHIKGLDDQIEEAAHAHPEAQRLMTHPGVGPLSALATVLVLGSVTRFPTSKHVVSYVGLAPAIESSAGKHRLGRITKQGNALLRYVLSQAGQAAIKRDPDLRRLYYAVLHRRGRSRAKIAVARKLLVRLYVMLRDQIDYQTFLYRAPAARRKELMPTTP

SEQ ID NO: 329584 - protein, 453 aa, unidentified
MAQRNRSISLKPGRSRAALTITHPNVAGIDIGSASHFVAVPPDRDDEPVREFASFTVDLNANAEWLQACGVDTVAMESTGVYWIPLFELLESRGFTVFLVNARHVKNVSGRKSDVLDCQWLQQLMTYGLLSAAFRPAEQVCVLRALARQREMLLKSQARHVQHMQKALTQMNIQLANVISDVVGVTGQKILRAIVAGERDGLALAACKDVRIHASAEDIAKSLQGNWRAEHVFALKQALALFDFIGTQLGECDREIEAQLQGLQAHDGEPAKGKKRSKARNAPKFELRTQLFRMCGVDLTRIDGIDVTTALVVVSEVGADMSRFASVKHFTSWLGLCPGTKITGGKVMSGKTRRCVNRASQALRLAAAALRSSKSAPGAYYRRMCSRMDKPKAVTAAAHKLARLIYTMLTKGQEYTDQGQDYYEERYRERVLRSLSQRAAKLGLKMVPITQPS

SEQ ID NO: 329585 - protein, 339 aa, unidentified
MKLYAATDLHSSNNYLAIIDENGERRFKQKLPNNADIILGALRTYKEEIVGIVVESTYNWYWLVDALMAEGYKVHLANPVAVQKYSGLKHADDKHDAFWLAEMLRLGILPEGYIYPKEERPVRDLLRKRGHLVRLRTSLIISLQNIISRNCGKELDCNSMKRLKTNHVTPLLKDNEDLALAGKVSKEGIDFLTRRIKEIESAVEHKVKLQAPYSNLQTIPGIGKIIALTIMLETGPVERFADTGNYVSYCRKVHTKWTSNGKQKGKGNRKNGNKYLAWAFSEAAELARRFDSKAKTYYQRKKQQTNFMVAHNALAHKLARAAYHIMKDNVSFMPEKLFA

SEQ ID NO: 329586 - protein, 348 aa, unidentified
MVVVGADVHKRTHTFVAVDEVGKQLGQVTVAATTKGHHKAMSWAWRTFGRELVWAIEDCRHLSARLERDLLSAGQSVVRVPPKMMAEQRRTGRTRGKSDPIDALAVARAAQREPDLPVASHDEVSRELKLLVDRRDDLVKHRTATINRLQWRVHELDPELPAKALDHAKRQQQLADALASFDCLLAEIAADELADVVELTSRINGLERRIAARVEQVAPTLLGMPGVGALTAAKIVGEAADVTRFRSEAAFARHSGIAPIPVWSGNTAGRVRLTRSGNRQLNAAIHRIAITQIRLDGLGKTYYQKKKAEGMSTPEAVRCLKRRLARIVFNHLHSDHQARAATGLATAA

SEQ ID NO: 329587 - protein, 394 aa, unidentified
MIIIGIDIGKNKHEATLIDEKGNIIGKSIKFENSTAGFNKLISSINNYNISNDKFVFSMEATGHYWLALFSKLVESDYNVQVINPIQTDACRKFYIRETKNDSKDSFLIAQVTRFNGYSKTTLPDEVMISLKELTRFRTFLVDDISDYKRKATVVLDKIFPEYTQIFSDTFGKTSKEILTKYPLPKDILNEDLESLAKVLSTSSKGRLGYSKAEQLQNLAKESFGIKFATEALVMEIKSIISTIEHLQNQVSKLDEKIAVLLRSLGTTIETIPGIGPVLGAIIVSEIGDINRFSHASKLVAYAGIDPTVKQSGEFNATKNRMSKRGTPYLRRALWTASVVAAFNDPNLHEYYLKKKDEGKHHGTIIGAIARKLIYRIFIVLKDNVPYQCNKCEA

SEQ ID NO: 329588 - protein, 421 aa, unidentified
MTRRIAGIDIHKNVLMAVVATVLEKEMDGGMEQQIEYEGRRFGSGTQERGHLVAWLRERQAEEVVMESTAQYWKPVWMDLELHFPKLHLAQAHSNKAPKGRKNDFADARRLTRRMAAGELILSFVPDGEQRTWRTMTRGKQQLVRDRVRLQNQTEALLEEMRIKLSGVVSDLFGVSGRRILEALAGGETNPEKLADLGDDRLKCGREALVDALTGHSEPMHLQILKLSIERLKLLDRQIQALEQMAAGALKKHGAAVTRLAGVPGFGVDSAQQVIAEVGSDAKSFSGAGELASWVGTIPGSDVSAEQNHSSRSPKGNKFLRRIFTQAAQAAVKTKGCHFQNVFRRLVPKLGYKGAIWAIAHRLCRLAWKILHDGVSYIEQAAETTPQAKKRRAQRLTQALRRLGYQVAITPIAPKAEVAQG

SEQ ID NO: 329589 - protein, 311 aa, unidentified
MASPDVFVGIDVSKDRLDVHVRPLEAGFAVSNEAAGYAALIARLRPLRATRIVLEATGGYERALWLALSEAGLVAAVVNPRQVREFARAAGRLAKSDRLDAAVIAHFAETFAPRPGKPDPVADRLGEHVLYRRSLQEEIVALEHQRRRLETPALRERAGRRHAALRAEVKEIEREMRAIVDGDPGKKALFACLTALKGVGLVLACTLIANMRELGSLTRHQAAALIGVAPLNHDSGVRRGYRAIAGGRRRVRNVLYVATLSAVRSNPVIREFYRRLSAGGKPAKVALVACMRKMLVMLNGRVRDHLATATA

SEQ ID NO: 329590 - protein, 388 aa, unidentified
MQTVADRPEAPTAIRTDLGAIFVSLELSRSTWLITSLSPGGGEKMSKQVVRGGDVAELLERFARLREKARARTGKVFPFVVIQEAGLDGFWIDRALQNEGIESHVVDPASIATSRRRRRAKTDGIDGEVLVRALLAYKRGEPRVCAMIKAPTPEEEDRRRLCRERKVLIVERVRHVNRVKGLLFSQGISGYEPLRRDRRQRLDTLQTGDGRLLPHHLKAQVCRELDRLELLLEQIKAVEAERDVLLAAQQVAAPAPAAMLLDIKGIGPEFAAILWSEGLFRHFDNRRQVASYAGLAPTPWQSGSVDREQGVSKTGNPRLRTTLIQLAWLWLRHQPQSALALWFEERVRRNGGRLKKTTIVALARKLLVALWKYVTAGVVIEGAVMKRT

SEQ ID NO: 329591 - protein, 371 aa, unidentified
MKSIIYIGMDVHKKTYSLCALLKETGEIIGETKIPADVSLIIKFIENAKKSVDSDDVQIKTGYEAGCLGYSLYWQLAEKGIECDILAPSTMHRSAKNKVVKNDRRDAKNIAANLANGTYKSVYVPTDEDVEIKEYIRMMHDFKIELKKVKQHINAFLLRFGHQYPGKSKWVPAHIKWFKELELSDMHREILDEYLSQLEILSEKIERFKHRLEELSQKETYNEKIGQLRCIKGIDTIAAMTMHAETSDFDRFPTANAFASYCGLTPDEDSSGESYHRLSITKQGNSMIRTTLIEAAQVLVRGTIGKKGKKVKSKQKNQDVKVIDYADKAVIRLQKKYHRMIFRGVKRNIAITAVARELACFVWGIETGHIS

SEQ ID NO: 329592 - protein, 338 aa, unidentified
MKVALLSIDLAKNVFQLYGVDERGHPLLSRRVSRNKLLESIVSLPCCRIVMEACGGAHYWARRFSAMGHHVQIIAPRFVKPFVKSQKNDRNDAEAIVEAASRPTMRYVAVNSVQQQDIQSMHRIRSLLMRDRIAQINQIRGLLAEYGVVIAQTALKVRQQLPAIIDDEHNELTELSRSMMRDMYERLVLLDKQISRYDELIHQVHKASPASQRLEKIRGVGPLIATAVIAAAGSATEFSNGRQFAAWLGLTPRQHSSGGKDRLSGITKRGNGYLRMLLVHGARSVVQQAIKHTDTLSRWILEVQARRGTNIAVVALANKIARTIWVLLARGLEYAPPA

SEQ ID NO: 329593 - protein, 421 aa, unidentified
MTPTSHDTFAAFVGIDWADAKHDICLQAAGTAKRECFQLDHTPEAIEAWVTTLRTRFSGQPVAVCLELTKGPLVSALRKYDFLVLFPLNPLTLARYREAFTPSRAKDDPTDAALQLELLLTHRDKLQPLQPQSPPMRALAQLVEHRRRVVGDTVRITHRLTRTLKNYFPQVLPWFQDKDTHLFCDFLSRWPTLKAAQLARRSTLETFFRDHHVRVGDVLAKRIHAIKTATPWPTDEGVIAPNALLVQALVSQLRVTLDAIEAFDHAIAQRAQRHPEFPLFQALPGAGPVFASRLLVAFGEQRERYTSATALQKYAGVAPVTERRGKKAWVHWRLQCPKFLRHTFVEWAAASMRHAFWAQVSYQQQRDKGNTHQAAVRALAFKWIRILSRCWQDRTPYDESVYLQALNRRGSSLIHNLAEAS

SEQ ID NO: 329594 - protein, 339 aa, unidentified
MRQITTLGIDTAKQVFQLHGVDAQGHVVLHKRVSRKQLLPLLAQLPPCLVGLEACGGSHYWARAITQLGHTVKLMAPQAVKPYVQGNKTDGRDAEGICEAASRPRVRAVAINSAAEQDMQTLHRVREHCVKMRTALANQLRGVLGEYGFVVPQGIGRVRKAIPLIVEDAENGLSALCRELLWDVYQRLCTLDAEITRYNARIAQLAEQTAACQRLTSVPGVGPLTATAFVAAVHDPGAFKNGRHCAAWLGLVPTQHGTGGKTVLGGVSKRGNQYLRRLLLQGAMAVIRRVEGKKDSRSLWLQQLLARRGTQVAAVALANKNARILWALLATGAVYRQAA

SEQ ID NO: 329595 - protein, 370 aa, unidentified
MKKNSTCPQSPRRGTKARRQEMTIGMDLGDKTSRYCVLNGDGEVIQEQSVATTKKGMLRVFGARKRCRIAMEVGTHSPWVSRLLGGMGHEVIVANARQVQLISASSRKDDRLDAQTLARLARVDPQLLRPIRHRSEKAQAHLMSIRVRAALVETRTGLVNTARGLAKSVGERLPSCDTDQMGVDRGEGLPRQLLETLQPLLEQVESLTEKIQESDATIEQIARSEYPETELLKQVSGVGTLIALTFVLTVEDRERFQKSRDVGCYVGLRPKRSDSGESQPQLRITKEGDIYLRKMLVQGAHCILGRRGPDTDLKRWGLKLAARGGKNAKKRAIVAVARKLGILLHRLWVTAEVYEPLRNSQARPRAGRAA

SEQ ID NO: 329596 - protein, 457 aa, unidentified
MAKKRNKETRTSNGMLPVMRPDAAGIDIGATEIYVAVPAERSSENVRSFPTFTQDLYALADWLKQCGIKTVAMESTGVYWIPLFQILEERGFEVCLVNARHVKNVPGRRTDVSDCQWLQFLHSVGLLRASYRPEQEVCAVRSLLRHRESLVQMAATHVNHMQKALDQMNLQLHHVISDITGQTGLAIVDAILAGQRDPQQLAKLRSERIKASEETIAKSLVGDYRHEHVFTLRQSLAAYRSYQKLIDDCDSEIRQQLAKFDPSSSPEPPAASKSEAPKPSSRKLSDDGLLKFELKRVWGVDLTKIPGIRTGIARTLLGEIGPDFSKFRSASAFASWMGLCPDNDISGGKVLWVGTRKVKCRAATALRMAAQSLHHSKSALGNFYRRMRAKLGAPKAITAAAHRLARVIFHLVNTRQDFDDSKFAAGQLRDQKRQEANLMAKAKALGFQVTPLQQAVP

SEQ ID NO: 329597 - protein, 414 aa, unidentified
MEDWPEAIPAFLYYQWEVHVMSFFIGVDVSKEKFDACCISEKEEKVFSLMCTMDRQGFEKLVLHLPANKTSLLLGMESTASYHLPLFSYLTAQGYQVVIINPLLIANFAKRSLRKTKTDKKDAFTIAQFLLREKEAFAPQTTDHLAAELRDLARRREKLVDHVTSLKGDMKRILSVIFPELEHITGAFTKCTLRLLMEYPSAHALRQADHAAVADIFITKSRGTRPRVSIKTLMTAAASSVGMVSPTKELTLKQEASLLIHVQEQMKETTEVIMNLLNQRMKHDMEILCSIKGIGENTALNFLIEMGGEIEMYENDKKLIAASGLDPSTYKSGKYEGKSRISKRGNRHLRRVIWLMATRVIINNTIFRVYFYKRRSEGLPYKMAVLATAHKLIRIMFVMLNRKTYFVEGGIKYS

SEQ ID NO: 329598 - protein, 388 aa, unidentified
MSQPIDMTRCLTPFDQQTTLLAVIELSLSSWLIAGMVPGLQRRPLKKMEPDHSGLLRLLHRWRDEAVRAGSTITRIAVAFEAGRDGFWLARWLRCQGIEVHVIHSSSVAVSREHRRAKTDRLDTNLLMRVFAGWLRGERGHCSMVYIPTIEEEDAKRPSRERESLVGERTRIINRMKGALIRLGIRGFKPELRKSPQRLDTLKTPEGTPIPSNSLDEIRRDMVRLDLVRQQIDKIERTRLEHLEKAPEAGPHPMVRFLASIVGVGIETADMLVTEVLSRNLRDRRAVGRYAGLTGAPDESGKKRREKGLAKAGNSRVRRGLIQLAWRFLRFQKESALVLWFQKRTEGPSAGRKTKLIVALARKLLIALWRMVTTGEVPAGVVLRPAAS

SEQ ID NO: 329599 - protein, 338 aa, unidentified
MQSTTIGIDLAKSVFQVSIANQAGRIVSRKRFSRPQFERFLANHEPPATLVMETCSSAHHWARKARQYGHRPQLIHAPYVRPYVRRNKTDAADADALVRASQDPELKPVPVKNETQQALQGLHRIRSQYDKTRKQRISLVHGLFSEFGLTLRGGIKRCADYIHQPTEQLPETLRVALLPILEEITELEERIQEIERQLAVIGAQDPVVQRLMTIPGVGLIIATAMVASVPHIYAFARGRQFSAWLGITPREFSSGNTRRLGSITKKGDPYLRTLLIHGARSALLSAARKQEHQRTHLQRWALEIKQRDCHNVAAVALANKMARIIWCVWTRDEEYQSR

SEQ ID NO: 329600 - protein, 328 aa, unidentified
MKYPALGIDVSRLLLAVVLLSAEGVWQHGNFSNDSKGFEQLRRWVRRHVGEQKVWVCLEATGRYSDELAHYLYGEGWVRQVSVLNPSRIHAYGQSQMRRTKTDKADARLLAHFAATQESEAWLPPSPQQQSLQELMRHRDNLIDSRQQVRNRQQAGVRHGEVQRQLREQEELLTRQISEVEAEVEQQIKQDAHLQRQFKLLCSIPGVGPVLASHFLAEVPDICRFDNAGQLAAFVGLVPTQHDSGTSVNKKGKLAKTGNVHLRTAFYMPALCAARFNPVIAALVARLQAKGKAKMTIVGAVMHKLLRLAYGVLKSGRPFDPHFTPLPA

SEQ ID NO: 329601 - protein, 415 aa, unidentified
MRKVNTFKLKFIDNNTLLATVDIGKDSFSGYARCPDLSEVKASDFTNNFSGFSRFWDILVRTKKARGLEQIVLGFESTGSYAEPLLHFFKDKGVRLVQVNPMHTKRVKELCGNSPNKTDQKDPKVIADIIALGHALCVVIPQGAAAELRRLTQARERTIKRRTALFNQLHDLVFISFPEFLQVVKDIQTKSARYLLQHHAGPKDIVALGLDTLTKVLNRISRGRLGSAKAQALFEAASNSVGIHEGRISVNLEIQEMLEWIESCDRFAERLESEMNRHLEEIPYSRLLLSMKGIGLLTVAGLIGEVADFTHFKTQKEILKLAGMDLFEISSGKHRGQRRISKRGRPLLRKLLYFAALNTVRKGGIMHQPYQKHLAKGMPRTKALIAIARKLLGIMLALVRTQSEYAMKTDLPEAA

SEQ ID NO: 329602 - protein, 377 aa, unidentified
MTDTTRRTESIGSTPSLLMALELSQRRWKLASTSEATTTVRTRTIDAGDWRAFTEEVARAKARLGLRADAAVVTCYEAGRDGFWIHRALTRLGIKNVVLDASSIEVPRRRRRVKTDRLDAIKLAHLLRRWVGGERCCRVVRVPSEAAEDARRPGRARRTLVKTRTRLTNQIKSALATVGAAAGSLRTLGDRLAQVVQWDGQPLPSELRAWVSDLVAQWTLCDRQVRALAQTRRAVAEDAATAEQVARLEALRAIGPTTADTLVFEAFGWRGFRNGREVGAVAGLTGTPADSGDRRHEQGISKAGVPALRHVAIELAWSWLRYQPRSELSQWYQRRFGSGGPRARRIGLVALARKLLIALWRYATTGVVPAGAALRAP

SEQ ID NO: 329603 - protein, 358 aa, unidentified
MYKFMKKFFIGVDVSKDTVDVSFFDDDRMKSPEYLAQYSNSPKGFREMVKDLRMCCHGVSSGQWLFCCETTGRYDHPLCHWLVDHGMVVWRESALQIKWSSGIQRGKNDRVDSLRIAEYAWRHQDKMQKFVKPSESLSNLKAAFTHRRRLVEKRTATRCQLKSMSSEKGLSASLARMIVRDLSREIERLSASITTMDESIQKIIRSDSELDRNYRHIISVKGVGPITAVALIVCSGNFKAITSAKKMACYCGVASFRSQSGTSINRKASVSNLSNRQIKSLLSMAARSASRSNPVFAEYFNRTLSRGKPVALVYNNLRNKIITVVYKLIERDCDFDVDYMRMHSTGQRANEPAIREAV

SEQ ID NO: 329604 - protein, 421 aa, unidentified
MRAAVVRAKPYDARPTAAIATDGAAWLRDQAQHQVRHNPHMLTLPPRNVSNGMDAPTFDGINVPEWKCQQPLEPEGASTMQITTIGIDLAKNVFQIHGADQRGKAVLRKQLRREQVAPFFANLPPCLIGIEACSSAHHWARKLQALGHTVRLMAPQFVKPYVKSNKNDVADAEAICEAVGRPTMRFVPIKNVEQQSVLSLHRVRQAFVKARTAQANQIRGLLAEYGLIVPKGIGFIATRVPDLIEDASNELPGLFRQLIDRLLKHLKLLDQQVDEIEVQIKAWHRDDETSQKLQKVPGIGPITASALAATVGNAKNFDNGRQLAAWLGLVPRQNSSGGKQTLLGMSKRGDAYLRTLLIHGARSVLYRASQKNDTESWLIKLTARRNANVAAVALANKTARIVWALLAHDREFRPDYTAAAA

SEQ ID NO: 329605 - protein, 385 aa, unidentified
MHASASAPATIHVDLGAIFVSLELSRSTWLITSLSPGGGEKMSKHSVRGGDVAGLLEQFAKLRTKAQARTGKTFSIIVIQEAGLDGFWIHRVLEQEGIESHVVDAASILTSRRRRRAKTDRIDGEALLRTLLAYKRGEPRVCAMVQVPSSEAEDQRRLCRERKTLVAERVKHVNRIKGLLFAQGISDYQPLHRNRRQQLTDLTTGDGRSLPAHLKAQIDRELDRLELLLEQIKAVEAERDALLAPMADAAPTPAAALAGLRGIGPEFGAVLWLECFFRSFSNRRQVAAYAGLAPTPWQSGSVQHEQGVSKSGNPKLRTTMIQLAWLWLQHQPTSELSLWFKERVQRDGGRGKKTAIVALARKLLVALWKFVSNGVIIEGAVMKAA

SEQ ID NO: 329606 - protein, 431 aa, unidentified
MNNLQKLPQTNHSNCLSVFVDISKDYLDYTIGWESGNTPAKANRIDYRVNTVQQWISELIAEHQLSSGEQLEFVCEPTGGLQHKLLLVARHNAARVRYVDTERMYNARMITYGNSEKTDEKDPGAMRNLYLIGRHRPAVSRDVLHQTVRSISQEYEELSQQAIRARNKIHGLLGYVFVDYNKSANFTFSRSGQALAKEFSFCPQYILQAGYQEFARRLKSQVSRIRRTILQQIWAMAERSVAITDTDFPDPRLDYMVTLYEQWIGLEARKSELKERLHAYGELYQEQGLMPVNLPPKVTPWMLVRVIAETGSLDGFKHIRQLWAYLGLKLARRQSGKYKGHSKITKKGSSLARKLLFQICLPLVKKGAWLHSAYKRQNPKGKRGGKGIRAMTSMMRKFVKIMLAMHQSGDCFHVSRLGCCESQYNPEMTHH

SEQ ID NO: 329607 - protein, 343 aa, unidentified
MEQVTIIGVDLAKNVFQVHGASDDGSVAFRKKLTRPQFKRFMREVDPCLVAMEACSGAHYWARELAAVGHEVRLIAPRYVKPFLKRQKNDAADAEAIAEAALRPTMRFVEPKSADQQAQAVVFRTREQFVSQRTDLVNALRSHLYEFGYSAPQGIQYLSRLAEVVEEEGTDLPDPARYACRLLLKQIAILTEQIKALQNKVAEISVKTGVSRQLQTMPGVGPIGALAIETFAPPMEQFRRGRDFAAWLGLVPRQHSSGGKQVLGKVTKMGQRDIRRLLISGAMTVIVACKRFGKHQGTWVARILEKKPPMLVAVALANKMARGIWAMITKGQDYREPSVNVMA

SEQ ID NO: 329608 - protein, 337 aa, unidentified
MEQYVGLDVSQETTSISVRQDGRRVWRGKCPTDPKALSEVIRKHAPHAVRVVFETGALATWLYHALQAENLPVVCIDARHAKAALDMAPNKTDANDADGLAQIAEIGFYREVRVKGYGQMLTRTLVGARSQLLCISIQLSNQIRGIMKTFGLIVPKGAGRIFERNARALLETNEAVARVVLPLLETWQVVRARAAEFDRQLIAAARTGSSYRLLMTIPGVGAITAVSFVAAIGVPENFKRSRAVGAWLGLTTRRYQSGETDYDGHISRRGDRYLRALVYEAAVAVLTRTRTDCALRSWGLKLKAKVGFKRAAIAVARKLSVIMHTMLKTGAAFAAAA

SEQ ID NO: 329609 - protein, 415 aa, unidentified
MKKVQDTRGYERYMALDIHREYILVGAWDEEKDWVLTPRQVSTEKFPEWAKKNIRAGDIVVLETTTNVWVTYDIVAPLADRVLVANAAEVEEIAKARVKTDKEDIKKLLKLLVGGIVPEVWVPPMHVRELRAFISYRGRLVKTSAMVRNRLQSLLHKHNLKMSETGLLDQAWWEAQKDISPLEKMQIRQELALLQEVEKLKAAVDEELQRQSTSALWGKPALQLMQLPGVGYIVAMTVLSAIGDISRFESAKKLVGYAGLGAGVHNSGKTHKDKKITKKGRRELRWAMVEAAWRAVRMSPFWKAEYEKYLSRLRKKNQAIVVIARKLLVAIWHVLSKEETDIHASEDDLAYKMLLLSWSLNENVRQGLTYKQFAKYALMQLGVEKDITRFVRKNVPRRLAPREEVLARMKELGLA

SEQ ID NO: 329610 - protein, 338 aa, unidentified
MKTTTFGVDLAKRVFQVHWVDMDTGEINRRQLKREQLMTFFAKQAPALVAMEACGSAHYWARRFASFGHQVRLIAPSFVRPFVKRNKTDVADAQAIWEAAQRPEMRFVAVKSEAQQAVLTLHRVRQQLIKMRRMQINQTHGLLYEFGAAVHRGSHSMNDAARLLAELADTLPPMVVDTLREQLQRIEALTRDIRAVEHRLAAWLRHDEAATRLAAIPGVGLLTATAAIATIGDAGTFRCGREFAAFLGLVPRQSGTGGRVKLLGISKRGDVYLRTLLIHGARSVLSHSKQLSDTLQRLLARRPFNVVVVALANKMARTIWALLAHARTYQPGYVAHAS

SEQ ID NO: 329611 - protein, 309 aa, unidentified
MDIIVGIDVSKDSLDVAVSPSGASFCVHNDHDGIEELVRRLKAEKADLVALEATGGFETLAVAKLAACDICVIVVNPAQVRAYASAIGRRAKTDTIDAALIAAFVVATKPQIRPLRDAQTQALSALVDRRRQIVQMIVAEENRLRMALDKTTHKSIKRLLAALRREMESIDADMDDHIRKSPLWRVREALLTSVPGVGRATARTLLAEMPELGSLDRRQIASLAGLAPWTRQSGKWKGKSFIGGGRTKVRAVLFMAALVASRHNPLLKEFRDRLVASGKPKIVAIVATMRKLLTILNAIIRENKPWQNA

SEQ ID NO: 329612 - protein, 351 aa, unidentified
MGNYNTMTIGCDLGDRSTNLCMLNQQAKVVERRKIATSKLGFQKVFAKRKRALVVVEAGTHSPWVSALLEKTGHEVIVANPRNVRLISKNNSKSDRIDAELLARLGRADRKLLAPVKHRSEQAQRDLAIVRARACLLESRTKLINHVRGSVKSFGERLYKCTADSFAQTAKFSLPEELRLALSPVLESIEQLTVQLKAIDKRLEKELPERIPEMTALRQVDGVGTLTALTFILTLDDPNRFKKSRKAGAYVGLRPGRSQTGKKDPELRITKAGDRYLRSLLVNCAQYILGPFGKDSDLRHWGLKLAARGKKNAKKRAVVATARKLAVLLHRLWVTGEVYQPLGYEEQRIVA

SEQ ID NO: 329613 - protein, 418 aa, unidentified
MNENPKPGLFIGIDWADQKHDIHVIDRQGKGFHQQFEHSAESIHAWVGDMLKLAGGQPIAIMLEQSRGALIHALMFRENVLLYPVNPKQLARYRESYPGVGKNDPTDAMYLARMLRERITTLNVWQPDDENTRLIANLSQQRRKLVDGQTKLRLQLTALLKSYFPLVLEIFGKQHQLPLLLSILRRWPDPRQLRRADRRLICRVLCEHSLRNEQQQKEIIERIRAAQLLTRDDALITPSAMSVKLLAYQIQQAQKMIKEFDDAIDEAMKQHPDAHLFANLRGAGSALAPRLLCAFGSQRDRWEDAESVASFSGIAPVTKQSGKQRHVHRRFACPKYLRQTFHEFADCARRHCPWSKARYRMLRDRGMKHHAALRKIARSWIRILFRVWKTRVPFDCDRYIANLKQRCPDIVPYFAQEN

SEQ ID NO: 329614 - protein, 433 aa, unidentified
MVKINYMSTLFVGIDVSSKTNSVYAMDFEENKYLSTSFGNNQPGADELVNRIAACMQKHKNLDTLLIVLESTSVYSVHISNFLASSEVLMPYKPYVFCVNPKTTANYRKSYIGMEKTDPTDAYLIADFGRVGRTKKLEPWRGGQFIALKRLTRHRMHLSECITREKTYMVSNLYLKFSELQLLEGDDKPFGNLYGATSSAVLTEFLSPQEIIDMPEEDLLAFLAQKSRNRISDLSKTSELLRKAARDSYRLDKCMYEPLNISLTSSFNCIQAYQKEIRLIEQAIDKCIKGMNTNALIILQSIPGIGPVWASGILSEIGDITAFHSSDALAKYAGLYWPKGDSGDFISEDNQMSKAGNPYLRYYLGEAANSVRKHIPEYADFYARKYAEVSKHQHKRALALTSRKFVRLVFGLLAKNQLYTGEKLDAEYNIEPN

SEQ ID NO: 329615 - protein, 318 aa, unidentified
MTAAQAGRQAASSTVEVVGGVDTHKDTHTAAAVDTAGRVLGSAQFPTDAAGYRALLRWLRGFGTLLLVGVEGTGVYGAGLARMLAAQGVAMVEVDRPDRKARRWQGKSDPVDAEAAARAALARVRTGVPKQRDGRVEALRTLRVARRSAVGQRADVQRQIKALIVTAPESLRAQLRKLPDRELIEVCADLRPDRADADDPGTATKIALRSLARRHRRLSVEVADLDELLGPLVAQINPGLLALKGVGAEVAGQLLVTAGENADRLTNEAAFAMLCGVAPLPASSGKTTRHRLNRGGDRAANCALWRIVITRMGTDQRT

SEQ ID NO: 329616 - protein, 343 aa, unidentified
MRKYAALDVSMEQTAICVVDESGKKINEGKVQTDPDTVTTWLAEKAGSLEKVGMETGPLAVWLWNELRARGLSIVCLDARHASAALAMMPNKTDRHDAAGLAQIVRTGWYKEVRIKSHAAYVVRALLSARDALVGIRGKIENEIRGLLKTFGVMFGRKVGGFTRRAEEIVAGELAASPEIKRIIEALLEARRAILDRIKLLDSRVRSVAKANATARLFMTAPGVGAVTALSVASAYDDPARFSRSSSAGAYLGLTPRRYESGEISRNGRISKRGSKLTRKHLFEAANALLTRVGKFSSLKAWGLRLAKIAGFKKAKVAVARKLAVILHAMWKARTPFRWSVAV

SEQ ID NO: 329617 - protein, 361 aa, unidentified
MEQTQQNILQQPPFQAAGWVGIDVSKDTLDAALSLPGSPSKASRPSKGSRPSNGSNQTVTGNFQNDSQGFAKLLKWAKRLAHGAPLHWCLEATGSYSTPVAEFLVEAGQHVSVVNPYRVRHAALAQGARNKTDKADAQLIADYCRKEQPPLWRMAAPEVRELTALVRHLDNLKQLDVQQNNRLAEASVSRLVSQSLQTLIKQTQTEIASVEAAIKKHISGHPNLKADAALLESIPGVGSTLAAHLLAELPDVTEFPSAQSAAAYAGLNPQEFRSGTSVHKRTRLSKRGNAHLRAALYMPAMSALRFNPSVKSLAERLRTAGKAKMVILGAAMRKLLMLAFGVLKSRIPYQENYLSPRFAKT

SEQ ID NO: 329618 - protein, 351 aa, unidentified
MKNYTGKKVFLGIDVHKKTYAVTGICEGIVIKKATLPAIPEALVTFCQKYFTGASIESAYEAGFSGFYLHRILEKHGIKNIIVHAAGIEVAVGDRVKTDKRDSLKIATQLATNRLEGIHVPSEEREEKRALTRIRDTIVEHRTSIANQIKSLLHQYGLISPLAKQKVSPKWISSLKQLPMREGVRYSIHHLIDMWQQLTLKIEEIKLEMAKQAVEDNTLEAIYRSTPGIGPVGARVLANEVEDMSYFENERQLFSYTGLTPSEHSSGGYVRKGHISRQGKTIIRKILVLAAWKAIQKDVKLRETFDRIRIRAGGKKAIVAIARRLIGHIRACFRKRCFYKTDVKTSVVAAA

SEQ ID NO: 329619 - protein, 323 aa, unidentified
MMGLPNSLCVGVDVSKMSLDIASNQTISPFSVSNDVDGFDAIIAELKQHSIALVLMEATGGLEAAVACSLQAQGFDVAVINPRQARDFARSMGYLAKTDRIDAAMLAQMAEVINRHPERARFIRNLPDAEREMLNAMVVRRRQLITMLTAERNRLHPSHPQSRKSISTIIGALQDELKRINKSMEVHISTHFKTLAEILGGVKGIGAATIATLLTEVPEPGHLSRREISALIGLAPFNRDSGNMCGRRTIFGGRANVRSALYMTTVVATAHNPVIKQFYNRLVESGKAKKVALVACMRKLLTVLNAMIKKNEPWDSSHHYLSQ

SEQ ID NO: 329620 - protein, 332 aa, unidentified
MRMLAIDLAKQSFHVHGISADGEIVSRRVGRQGLPSLIVKLAPAVIAMEACATAHYWGRLFMAAGHEVRLINPHFVKPFVRGSKNDAVDAEAIFDAASRPTMRFVPVKTEEQQDLQSLHRVRDRLVAQRTSLINHLRGLLAEYGLIYPKGAALLLPRVRCGLAEARVSAMARETFEALLDELESLEARIERLDDRLSAICREDETCRRLMTLPGVGPIVATALAASIGDPRQFQSGREMAAWIGLVPRQYSTGGKSRLGGVGRRANHYLRRQLVHGARAVALRLKTKTDPRSRWFQAVIDRRGFNKGIVAMANKTVRIAWAMLMRQEDYARA

SEQ ID NO: 329621 - protein, 379 aa, unidentified
MEISSSTLPAVAAERATMFVALELSKSSWLVALHSPVADKVSLHRFVGGDVAGLLALIARKQTQAEARLGRTIRVLSCYEAGYDGFWLHRLLCARGIDNRILDAASILVDRRSRRAKTDRLDAAGLLRTLMALDRGESRVCGVVRVPSVAQEDARRRSRERTRLVVERGQHSNRIKGLLMTLGVRDFEPTRRDWQERLGGLRTADGRELPACLKAEITRECRRLHQVIVMIAEVEAEQAAALDAEEGRAAQLIRLRGIGLVSATVLADEVFYRDFRNRREVAGYLGLASSPWASGRVQRDQGITKSGNPRARRTAIELAWLWLRHQPGSLLTQWFRQRVGTTRGRMRRIMLVALARKLIVALWRYLSDGLVPDGAELKA

SEQ ID NO: 329622 - protein, 391 aa, unidentified
MICVGIDVSKDKHDCYIATSEGEVLADVFTVPNSMEGFKQLFQKIKSVAPDLSKVKVGLEATGHYCYNILGFLLDKGLPTFVLNPLHTNLYRKSTSLRRTKTDRVDARTIAAMMMSDVVLKSYSAISYHNEELKSLSRYRFDKVAERAKLKQSVTRLVCILFPELEQLVPTLHLSSVYALLSELPDAKQIADCHLTHLTKLLEAASKGRYGRDKALQIRNAARNSIGSAMNAKSLELKHTIRLIAELDSEIEEIETQIKQIMDSLSSPILSIPGITYRMGAMIIAEIGDFSRFDSPDKILAFAGLSPSTYQSGKLDNAYAHMEKRGSRYLRYALYNATKYVCQWDKTFSDYLARKRAEGKHYNVALSHAAKKLVRLIFALQRSGQMYAPAP

SEQ ID NO: 329623 - protein, 412 aa, unidentified
MTATNQFAAHVGLDWADKKHDVCVQFKNGERVFDVIEHTAEALDAWLTELHQKVKGRIAIALELKKGPVVYALQKYPFITVFPVHALSLARYRQAFSPSGAKDDPQDAELALELMLRYPQKIKAIEPDNADIRLLQQLVEQRRQLVEDKRRFVNRIINTLKQYYPQPLEWFSHRGSLLLCELIIRWPSLQQLKRARRDTIRNFLNAKGGRAMALTEQRVASIDNAIPLTTDPSVIEANALMATALATQIKVVSEIIKTYDERIETLFDTLPDSGLFKSLPGMGPCLGPRMLAALGDNRDRFNSAEEIQNYAGIAPVTERSGQKSWVHWRWQCARFVRQTFVEWAAKTVNSSYWARLYYQGLREKGKSHQSAIRALAFKWIRIIYRCWKTRTRYDEAKYLLALEARHSPLLKP

SEQ ID NO: 329624 - protein, 337 aa, unidentified
MSEIIRIGMDSSKSIFQLHGVDQAERPVLCKKLRRGDVERFFASLPPTVVGMEACGAAHHWARVLRGLGHEVRLPPPQYVKPYVKRGKNDAADAEAICEAMSRPSMRFVAVRTAENQAELMLHGVRDLLIKQRTMLLNAVRGHAAEFGVVGAKGRWRMAELLERIAINAAVPPLAPAIFARLADQIDSLNAQLTELDRRLRAWHRGNERSRRLAGIPGIGPIIATALAMKVPDPSVFRSGRHFAAWLGLTPKDHSTAGRQRLGIITRAGDETLRRLLVSGAMALIKGAKPGCASPWLLALLARKPKKLAAVALANKTARIAWVILARGETYRRPVAA

SEQ ID NO: 329625 - protein, 324 aa, unidentified
MMQARQVGIDVSKLTLNTAFRDASGCWQDGKFSNDEDGFQRLSAWAGSDSIFTMEATGRYHVNLASFLYRDKHRVNVSNPLQVKRFCQMQFRRTKTDRADARMIAEFAVFNGSVLTAWQPSDAGLAEAQSLQTAVRLLIVHCTAMNNCIQALRLTDAGRKAALALAKILRSERKLIKVMEAEIAKLVSVSYKEEYQCAMSIPSVGTKTAAAVILATGGLALFDSSKQLSAYFGMSPRQFQSGTSINGKGHICKMGNPHVRALLYMCSVSSLRHNKVCKDFYDSLVAKGKPKKVAMMAVANKLLRIIFAVMKSKTPWNPEVAAAH

SEQ ID NO: 329626 - protein, 424 aa, unidentified
MKRTQNEKILQIKNETLVVGIDIGKETHYARAFDFRGIEQSKLLRFSNTNQGYEALESWMQEIMKEKGKTEATVGFEPTGHYWFTLGDHLQRKGHHLGIVNPFHVKCTRELDDNSQTKNDRKDPKTIAMLVKDGRFREVYIPEDVYQELREAVSERERLVEQMISLSNQVIRWLDIRFPEFNEVFKKWSGLAALLTLKNFPTPAKVMLAGVEGIVRIWGKGMKKPSSKKAERLFKLASESIGRTAGSEAAEAALQNLLKQYEMVLEQIQVIEKLMQELLLRVPNASKLVDIKGIGMVTAAVIVSEIGDISRFKDPRQIQKMAGLSLRENSSGKHKGKTTISKRGRKRLREGLFKSIITMLATNQEFRMLHQRNLNREKKPLNKMESIIALCGKLIRVIFAILTKGNDYDANRMISDMNRSMKAA

SEQ ID NO: 329627 - protein, 350 aa, unidentified
MTISHYIGFDVHKKSVSYCVKTGDGTIVEEGRLRATHEALRQWAGKRPEPWHGATEATLFSGWIYDTLKPFAAKLQMGHPAQMKAIFASKKKNDKLDARKIADMLRADLLPACYVAPTEMRELRRMLRYRNLVVAQAVQMKNRMSGMLMEVGAEYSRRRLHGKQYFSELLDRLEEVPESVKDLLRLSRGSLEMFETVQRQLLDRLRKEPLLGKRVELLRSIRGVGEVTALTWALEVCEPRRFPSIDDAVSYCGLTSALVESAGKQQRGPISKQRNAHLQTVLIEAAKLAPRWNPQLAAVHERELQRGHRNRATLEVARKLVAYLLAVDKSGRPFQIRTPPTTETEAQKVA

SEQ ID NO: 329628 - protein, 348 aa, unidentified
MVDVGVDLHKNYSQVAVLDAWGEIRQEHIEHQGRDMEEFVRKLEPGSRLAVEATGNWWWFVDLVESQGHQVVMSNPKETKAIAHARLKNDRVDAEKLAVLLRSGFLPQVWIAPTAIRYAKEVLRYRSLLVGMRTKLRNHLGAMLRKRNRQAPGQSLWGRKGRAYVESVALNPEADQMRGEALEQIKALDRLIGGWDQALGRRAKGDPLTRRLMSVPGVGVQTALAFQTFVGEVERFASAKKVASYFGLAPRERSSGNRRQLGHITKEGDSLMRHLLVEAALIATRRPGPLREFYRRLLRHKGKAKARGAVARKLTEILYQLWKQGCDYHGYLLRGLRTVGEPVIRTGL

SEQ ID NO: 329629 - protein, 305 aa, unidentified
MKTYIGIDVAKLNLDIHQDGKASRIPNNEKSITAFLKSLSEHSIIVCESSGGFEALLISLAHIHLRSIARINARQVRDFAKAKGRLAKSDAIDAQILAEFGHTFHPSPLSIPDRLQQEIAALVKLRSHFLTQITQNNNLTETISDKSLLAIIKKTVSSLKKQADNIQKLIVEKIKSSPRLQSKVSRLQEVQGIGEITASSLLGLMPELGSLSDTQAASLAGVAPFNHDSGQFRGQRHIRGGRSQVRSVLYMSALVASRHNPILKALYLRLLDAGKPKKLALTALMRKLIILANRLLKNPNFSLAN

SEQ ID NO: 329630 - protein, 450 aa, unidentified
MPQPILAIGVDPAKRLHRAVAVLFPDEVVLDVELPNAFDAIANLDHRLCELANQHGAGLVYGLEDHRRYGRLFCQVLTERGRDVRVVNPLWTNRQRAFYGQDKDDAIDGRSIAAVVLRRHHQLPLASDFGEVAQAIREAERSLQDLSKARTQLGNRLHLQLSDTYTAAYEEYFAKLRSPLALRFFRRFPLPQDLVGHNVEMLASLLLELAGGKMGPHKGGNRLIAMRRKAQAILGTSAAMRASPRTLALELKAELIRQLCDELLANHDRILRLERMLREQLLPATKQTITTITGISTILAATIIGETGSITRFRSHAAFAVYNGTAPARNSTGGRDRHKARRDCNHRLKRAFYLAARAAVLHDPIAKAYHQSCKSRGLSYVEALKRVARRMSDLVYALLKSGKAYDRSIIEHAIERRREQAAHAARSHAKQPCPLPTNAFYSPLSQQQVM

SEQ ID NO: 329631 - protein, 344 aa, unidentified
MEKHTVVGVDIAKSVFEVAVSKEPGRVSDRRRLSRAAFLVFLAQIPKGTVVMEACGSAHYWGRRIQELGHQVVLLPPHQVRPYVTRNKTDRTDAKGILEAHRNADIHPVPVKSVSQQVLVCLHRFRSGWISSRTAQVNTLRGLLRELGFVIPEGIEKVLPQVRVLIEDADSDIPAGLRAVLATACDQIQALGESIKMTERQLQAVAEQTPLVERLQSIPGIGLMTSTALVAFIGNVERFPSGRHFASYLGLTPREYSSGLKRRLGRISKRGDSYLRMLLIHGARSVLCHAKKATEHDRLRTWALALERRAKHNKAAVALANKLARIAWAVWKRGRDFESRPKAA

SEQ ID NO: 329632 - protein, 334 aa, unidentified
MQNVTLIGIDLGKHSFHVHAQDKNGNALLRKKFSRNPLTAFLSTCAASTVVMESCAGAHFMARHISQFGHQVKLISPQFVRPFVKSNKNDFIDAGAICEAASRPSMRFVTPRTEDQQAMSALHRVRDAIVRDRVKTTNQMHAFLLEFGISMPRGIAVIRRLAAVLEEHELPPYLARLLMRLHQHYAYLTEQIEELEQELKTHMADDDTAQRLLTIPGVGLITASLLATKLGDGKSYASSRDFAASTGLVPRQYSTGGKSTLMGISKRGDKNLRRLLVQCARAFMQRPEHNQGRLADWVKAQLSRHHSNVVACGLANKLARIAWSVTTHRTAFIQ

SEQ ID NO: 329633 - protein, 372 aa, unidentified
MSQGVLFFRSFIGVDLHKYTVTLVAVAPDGTVISRLTISTKSRDKIAAWLSALPRPSHLAVETVGFVEWFIDAFRGCVDRIDIADATELANRRGKRRKNDPNDAADIAKRLARGECPLGYIADDELMQLRKLGRHWRQLSTVLARAKQCMKSMLLAANLRGPKFDGASAQRWLLAHGKRLKPAQRRAFAHFVQIVQLIELQRQPLRYDIVMASRSERFAGLMKILQSVPGVGEIWSCIIAAEIGPFDRFPNANALEFWAGMTADLKESAGRTQSGHITKAGSRTLRWALCNAALTLCHSDAKQEAIRQRLIRKTGGIKGKANTAMGRRLLRILYAMVRDGKPYQGGPSRRRNLAANLARMAKRARKNRKEAA

SEQ ID NO: 329634 - protein, 339 aa, unidentified
MDRTAVGVDIAKNVFQVHYVDQATGEIVNKSIKRAKFLEFFANRASCMIGMEACGGAHHWARRLVMMGHNVRLIPAHFVKAFNIRNKNDAADAHAIWLAVQQPGKPVAVKTEIQQAMLALHRMRQQLIKFRTMQINSLRGLLTEYGEVMGKSRAALDKAMPDVLGRVSEQLPAMVIDTLREQWNGLAKLDEQVAQIERRIREWKKEDKAVKAISEIPGVGLLTATAAVATMGDPKAFKSGREFAAWTGLVPKQTGSGGKVNLHGISKRGDTYLRTLLIHGARSVLTHAKEPGPWIEHMKKRRPPNVVVVALANKMARTIWAVLAHERAYQKDYISVKPA

SEQ ID NO: 329635 - protein, 429 aa, unidentified
MQNESTPGARGPVFCGVDTHADSHWLCVLDWRGRRVLSRRFPADAAGYEALAGAIAAAGEPACVAMEGTSSYGAGLTRHLASLGMPVREALSPAGMQRRRPGQGKCDEADAERAARAAMSGSRLGTPKSQDGWVDGVRCMLAARSGAVKARTSAINTARSLLTTAPEGLRSRFRGMGGPRLMEELPSVRAEGALGAALGALADLRAAARDAALDMERAIEASLEENCPALLAMYGCGPVSAAKLAVAAGDNPGRLRSEASFAAICGACPIPASSGKTVRHRLNRGGDRQANSALHEIARQRVMRDPETAEYAERARARGKSDREVMRCLKRYVAREAYRALMRPHEIRRPEDASELVAARRAAKVSQVRAASILGTSEKYISMLERGQRELKPIRRAYEAWVEAGLPLDWDRQAFEAERKMDSKRHLAK

SEQ ID NO: 329636 - protein, 367 aa, unidentified
MATEPVTVIGGVDTHKRTHYAAVLDELGRLLGHQEFPATDRGYRELLAWMAAHGQISAIGVESTGSFGAALTRALTAAGHQVVEVNRPNRLTRRMDGKSDRLDSEQIARAVLGQTSTAVPKSKSGMVEVIRTLRVTRTSAVKARTQAFNTLWGVMIGAPSPLRDELVELSKRTLVNYCLQLQFETENLLELASDPQRMLAAGTATSLRDLARRWKALDEEIKSLNRQITELVHAAAPALLELKGVGIELAAQFLVTSGDNADRIRSEAAFAKLCGVAPQPASSGRTTGRHRLSRGGDRAANSALYIVTIVRMRHHQPTRDYVERRSAEGLSKREIIRFFKRYTAPEIYTHLPRPTALDTSSQLHPAA

SEQ ID NO: 329637 - protein, 367 aa, unidentified
MGKSSTVFVGMDVHKESIDVTLAEAGGEVRRFGGIGGDRAAVHRLLKQLSRAHGRLHVVYEAGPCGWWLQRLCVGLGHACSVVAPSLTPRRAGERVKTDRRDSEKLARLARAGELEALYVPQAGDEAIRDLVRSREDAVVAQRRARQQLKALLLRHELRYVGRTSWSGAHRRWLSDLKLPEPAQQIAFEEYVMAIEAAGERVARLGGAIEEQVPAWRFAPVVAGLQALRGVQFIHAVTLICELGDLTRFETPRQLMGYLGLVPREDSSGPARRQGPITKAGNGFARRALIEAAWAYQHPARVTPIIARRQTGLAKPVRDIAWAAQLRLCARFRRLAARRLNKNKIVVAIARELAGFVWAIAREFKLA

SEQ ID NO: 329638 - protein, 319 aa, unidentified
MYKVIGIDVSKATLDGCFLDGSQKESFVVSNTQQGFKKIALKAKGALVVMEASGPYYLQLSNYLHTHGIEVSVVNPLVIKRFSQMNLQRAKTDKKDAETIANYGRIYDPKRWSPNSKNTNSIGQLHSAMELLDKQIRQLKGQQEAFDNSGELASLLRKELKSMVNFLVKKKLSLEVERLAEQEFGEKIDEITSIPGIGKKTAIMLNVITDGFTKFEHHKQLTAYIGFSPRVYQSGTSVKGKGHICKMGNAQIRKLLYLCSWTAKFCNKACREMYERLKEKGKPERVIKIAIANKLLKQAFAIGKSQMNYSENHGDNICF

SEQ ID NO: 329639 - protein, 451 aa, unidentified
MGKSTKKTRSKKQNLNEFNIVNPNAAGIDVSSKDYVVSVPADRDKKHIRTFGAFTCDLKIIANWLIECGIDTVAMESTGVYWKQLFVVLQEHGIEVFLVNSRHVKNVTGKKTDEEDAHWIMRLHTCGLLVNSFQPEEEVRTLREILRQRKSINDNKSIAVNKMVKALNSMNIKLNMVLSDLTSVSGQKIISAINSGERCPDELIKLVHYKVKTPREDILKALEGVWREECLFELKLAQEYYQFLQKQMSECDEKIEEQLLLIAAKYNDGDISELKKKAAKKHTRKNDFSFSVRPYLKGILGIDVCEIYGFSDETSLTLFAETGSNLDSFSTANRFASWVGLAPNNKISGGKVISSHLPRKKHAIKRVLIQSANSLYRSDNALGDCYRRLKSRIGAKAAKCAMARKLAIIYYHMVTKKEAFNVELFEQHQASFKEKRIKFLEKQLSEMKKVA

SEQ ID NO: 329640 - protein, 295 aa, unidentified
MKNRITFVGLDVHKNSIDVAIADSERDGEVRNYGKIGGDLDSLHKVVRKLQSTGATLRFVYEAGPCGYEIYRSLTKQGFDCIVVAPSQIPKKSGDRIKNDRRDALNLARLHRAGELKAIYVPTEVDEAMRDLTRAREDAVKAQRVARQTLLSFLLRHGYRYEGKSNWSLAHFNWLADIKFPHRAQQIAFQEYIHAVKELTERVQRLTYQVQELVTTWELAPMVKALQALRGVSLIVAATTIAELGDLTRFDSARQLMAYLGLVPSEHSSGNTVRRGGITKTGNGHVRRVLIRFKY

SEQ ID NO: 329641 - protein, 436 aa, unidentified
MFVGHRFRTDPDELDTLWARLPKDAERIEVVMEPTRNAWVALAAWFRRHGATVVMVPPEQSADLRDYYNKHTKTDRLDSKVLARLPLLHPEGLHREDSLGPGDELKRAVKIRSGLVHRRTACMARLDALLEILGPAWIAALGSDMTLTALRFLARYANPVQVKRLGKARLAAFFRRSSRQAWADERADAVIEAAATTLRLWGADGGELDFDALAADIAAEARLALTLTDEINGFDKRIGALYDKADPAGIVRSVPGAGRVCAPQILGRLGDPTRFANLAAVRSFAGLVPAADSSGQADGHRGPTKAGDCCLREALFIAADHARKVDPTLAVRYQRLMLAGKHHDSAVCTLAAVLLTRIAACLRAGTHYLLRDTDGRVITEAQGRAIVAERYTVPPEVRAARRKITPHRHPRRNERNERAKTGVATRSKASPVPQPA

SEQ ID NO: 329642 - protein, 331 aa, unidentified
MTEYLLFCGIDIAALSASVAIGKSLNDEFRLLDIQQTPHEHQKLHNRLKRYSASAPETLVVMEATGTYWMNLALYLSRHDYVVSVINPSTAYHFAKSMLKRDKNDPLDAKTLLELGMLHHAQLPIWREPPAVYEAIHQRLTQRDAFVHMKVQTQNRSHALAHRTAQIDAVDQRSDDLIAYLEDQIACVERELEHLYLADHEWSLSAQRLLSIKGIGIVTAGWILVATQNFQTFDTAEQAASFAGLVPRQRQSGTSLKGKHEIGHAGHARLRRAMFVAAKSAAQHNPHIKPFYKRLKNKGKLGNVATIAVARKLMNICWACVKYERMYDPNY

SEQ ID NO: 329643 - protein, 456 aa, unidentified
MKKKKISLEVVNPNAAGIDIGSRGHWVAVGQNAQDVKEFGVYSQDHQELCEWLKKHKVTTIAMESTGTYWQNLFSSLVVFGFDVILVNGRQTKNIKGKKTDILDCQWIQKLHTLGLLSSSFLPDSTTAVIRTYSRHRQNILKQSASAILKMQKYLRLMNMRLDVVVKDIVGLTGTKIITAFISGQKSGKTLAQNRHYNCKKSEQEISKALQYNGREDYYFALKQEWETYLHLQKQIDQVDIQIKKHLEDVIDNNDDKKQHIATKKPYKRKNKNTIRNTDMNQLSYQYFEGVDLMAIEGVNDATIMAFISEIGLEGIKKFESAKQFTSWLRLAPNNKISGGKVLSHHLPKGSNRLKVALRQAANTIGNLKEGHLSDFFRRINYKKGRATAVSATARKLAVIIWNMLTKGISYKPPTEYLFLDQKRKLKMVSRIKRNMAKFEIKPEDVGFDKILNIST

SEQ ID NO: 329644 - protein, 401 aa, unidentified
MSKKNTRNALDTSLSYAVIGLDLAKADCAVAAVPCADDELGLIDRMDYESLFEQAEKLGPTLFAMEPCCGYSQISLRLQNMGHEVKVISGHAVKNWIATHKSNQKTDLNDATALAKLALYDHDLQPIRVKNVEECRIASVQAIRIQLRTQATKSLVCFKSLCQCWGIVIRRGSLNTKKMAEAVAAVEKLLGVEVASSLMILRDAYKFTMKQINALDKLLDALVEANEQARTMKTVLGIGTQTAARLAVTTGDIKRFPMPRSYVAYFGLAPRNIITGHSGTPSPSKRGALKPVSSRGQGKVSRRGDRVARSFIIQGAATIYMLYCKDMLPECQLRRWLHEQIKRGKPYGKIIVSLAAKLLRIVWALLTYGEKFDSHKAGVPRSVLAAMEKPLKHDAAAESAA

SEQ ID NO: 329645 - protein, 323 aa, unidentified
MTAVVGVDIAKRTFDLAILQPNGKHRTKSKLSNDKAGFAVFADWLQRYAEPGAWIVMEATGIYHEALAEHFNGLGYRIAVLNPAQIARYAQSQLQRSKTDKLDAKLIATYGQLHMNHLRAWHPEPIAVRQLRALTRRLEDLQSLRQMELNRLDVSPATVKDSIQAVLQRLDEQIAWTLEQIKRHIDDDPDLRDKRDLLVSIDGIADKTAALILAELGDIQRFTDARAVTAFAGLDPRLQESGVYRGHTSISRTGSARLRAALYLPAVVALTYNPAIKEQAERLRAKGKKGKQTVCAAMRKLLGIAYGVLKSGKPFDPALAIAR

SEQ ID NO: 329646 - protein, 392 aa, unidentified
MEKHSTEFVGLDVHKESTAIGRASAGRSAGRFVGTVGPTLAELLKSLKSLGRPGDLSIVYEAGPCGYGLVRELRARGYACEVIAPSKIPRRSGDRVKTDRRDAVRLAELARAGELVSVMVPDERDEAIRDLSRARVDAVRARLAARHQLKAMLLRHGHRYGRSSWTQAHERYLAKITFAHAAQDATFAEYRQAVSEANERVQRLVEALRDQCTTWRMQPVLEALMTLRGIDFVAAVTLVAELGDLKRFAHPRELMSFLGLVPSEYTSGDSRRLGKITKAGNGHVRRILVEAAWNYRFAARMSVVLQKRQEGQPKVVRDIAWRAQLRLAQRYRRLSARHLHHNKVCVAIARELAGFIWDIGRHVSIRDIPVKVAKTRGTEHKGCRAIAAPAPL

SEQ ID NO: 329647 - protein, 423 aa, unidentified
MTKLTSTPAGAVLVAIDMSKNRQEILIERPEGGRRRRMTVMATRQDYDGFAEQLAAIGRPIIVGFEATGNYHRTLAHRLLTAGFELRLISSVALARTREALHNGWDKNDPKDAQVILHMLRIGATQRYVDPLVAGINDLQELSKTHETISRMKTQTWHRVLTHYLPLYFPEIARFAGNSRSDWFLALIERFPTPATITALDREAFSAAAWPLIGRKVSKAHLINDIYETASASTALPVPEDSAAITMFRMVIAQGRSLIHQRDEIERLAHARLADDVDYQLLRNIPGIGPINALTILAEAGDLRRFNHHRQFLKFCGLDLATCQSGTFRGRTKLSKYGNARLRRTFWMAAQVAARQRDNSFRDKLGRYVAGHADDADRRRKAMTALTAKMARVAHAVVKTGTEYRPFLERSDARWKDPSLQVP

SEQ ID NO: 329648 - protein, 349 aa, unidentified
MVTDEVDYVVGVDTHRDEHVLAVLTAPAGTVVATQAVEANRSGYREALCLVERYAPGARAWAIEGAGHYGAGLARYLSERGEAVLEVSRTPRAERRLRGKDDLLDAVRTARAALASETLTLPRSGERREALRVLLIARRSAVDVRREALVQLRSVIVTAPDRLREELRGLPVGRLLERCSRLRRSAVTAPDELAVRIVLRTLARRIEAASAEAAELEREILAHVRALAPVLLDEPGIGPIVAAQLIVAWSHSGRLRSEACFARLAGVAPIPASSGQTVRHRLSRGGDRQLNRALHTVILHRRQHDPATRDYIARRVAEGKSTRDAVRLLKRYLARHLFRLLQNQEPLMA

SEQ ID NO: 329649 - protein, 341 aa, unidentified
MRKFIRIGIDLGKNYFQVHALESEDRKATTRKLSRLAMRKFFSEIDPCLVGMEACASSHYWARELLAMGHDVRLIPPIYVKPYVKRGKNDAADAAAVCEAMSRPGMRFVPVKSEENQATLMLHRARQLLIKQQTMSVNALRGHLAEFGIVASKGIGRVDELVEKAENDATLPSAATAALKLFVQHLAAIGASIADLDRRISSAHAQNGTSQLLAGIPGIGKMTASAIVASVPDPNVFKSGRDFSAWLGSTPRQNSSGGKEKLGSITKQGNAYIRRLLVLGATSLLNQVGKRKGALHDWVVALLARRPARLVTVALANKLARITWAIMTTGESFRIEAFAKA

SEQ ID NO: 329650 - protein, 488 aa, unidentified
MQVEYERCAGIDLHKKTAVTTIMMTHPDGRVEEHTRTFSTMTSDLLALDDWLRAHHVEIVAMESTGIYWRPVFNILEEGRTIILVNAQHMKAVPGRKTDVKDSQWLADLLRHGLLSASFIPPAPIRQLRDLTRYRKTLVQERAREINRLQKVLETANIKLAAVATDVLGKSGRDMLDALIKGGQDPEALAELARGRLRAKLPDLRLALEGRVEPHHRFLLEHILAHTDFLEQSIAQVQQEIDERLVAFQDAVTLIQSLPVQLQAGAATVIAEIGVDMTRFPSDAHLASWAGVSPGNCESAGKRKSGKTTKGNPYLRGVLSEMAWIVSRMKDNYLSAFYHRIARRRGKKRAIIAVAHKILVIIYHMLKDNKPYQDLGGDYFDQLDAARIERRAVQRLEQLGYNVTLTPLEAADMPREQEAVDKTAKQKAADKTAKQKAADKTAKQKAASKTAKQKAADKTAKQEATNTIAKRALANKTSQEVASLSSAH

SEQ ID NO: 329651 - protein, 430 aa, unidentified
MNSNTQNKKIEAITEKTLVIGIDVGSETHYARAFDHRGIEYSKKPFKFSNDEAGFASFKAWILEIKEAREKDKVVPGMEPTGHYWFNLGKFLQDNDMKPVLVNPHHVKKSKELDDNSQTKNDRKDPKVIAGLVREGRYMIPYLPDGVYADLRTASNMRFQIQSELTRTLNRISRWFNIYFPEYKTVYGNLDAVSGMLVLKTAPLPEDVLALGVDGINKIWRDAKIRAVGKKRAQTLVSAAEHSVGSKEGAISARMEINMLIEDYESRSARLQEVMALIEELVKKIPMAEKLLAIKGVGIKTVSGFLAEVGDVSRFKSPKELQKLAGLALVENSSGKHKGETTISRRGRKRLRYLLFEVAMSLVSKNREFAELHQYYTTRKQNPLKKMQSLMAVAAKLIRVFYAMLTKGVDYDPKKMSDDIRRPAAGSQAA

SEQ ID NO: 329652 - protein, 343 aa, unidentified
MTEVSTIGLDLAKNVFQIHGVDVSGETVICRQLRRRQVLPFFRKRPPCLVGIEACATSHYWAREISALGHEVRIMPANYVKPYVKRNKNDAADAEAICEAVTRPSMRFVAVKTAEQQSVLMVHRTRELMVRQRTMLVNAIRAHMAEFGVVARVGLPQVRELLEVITDEADKRIPPLARTCLASLARQLLSLEREISAAEQRIHAWHRANEVSQRLETIPGIGPITASALAASITDPSVFRSGRELAAWIGLVPRQTSTGGKERLGRISKAGDHYLRWLLVAGAMTVIRHGRRTNFSKRPWLADLVARKPTKVAAVALANKNARTAWALLANGGTYRQPAITAA

SEQ ID NO: 329653 - protein, 358 aa, unidentified
MQRNKISFKGQKIFIGIDVHAKNWEVAIAPEIGIVRRHSQKPSAKELFDFLKKNYPDGEYQAVYESGFSGYSTYYALKEVGIECMVIHAADVPTTQYEEVMKTDRVDAVKLVRSLKAGLLKGNYIMEKQYIDDRSVVRIRRTIQKQLSGYKSRVKHLLHCHGVEFPERFSKKQTHWSRAFITWLMKDVCLMSDTRASLDLLIRQVEVLRGTLLEATRQLRKMSQTERYKRRHDLLRSIPGIGLIVTMCILTEVCDVKRFHNENQFAAYLGLIPTSHSSGEKIVHGEKTFRGNKQLGPMIVEAAWITIGRDAGLGAQYYQYKKRMEPQEAIVRIARKLSNIIFSVLKNEKEYVPYQTGN

SEQ ID NO: 329654 - protein, 434 aa, unidentified
MKTYILRDPKAVEPQKARFVQAVEPQNPRSPRRRDPALAATVDVICGPPANVPPARAGLVLLIGLDVHNDSIAVSLAPSDSTEVRRYGIIGGQHDDGLRLIKKLAAAHPGAVLKFCYEAGPRGYPLCRFIRQHGAECLIVSPSKVPRQPGDRVKTDRRDADQLARLFRAGELTGIYVPDPQDEAVRDLIRARYQVQKQQHRARQQLKMFLLRQNIRYAGTTSWTPKHLRFLATVKLPFAEQQFVFQEMVHVISDAGQRLERYEKEIASVVAGWRWAPVVQALMSLRGVALLTGATLVAELGDLERFATAPQLMSYLGLCPGEHTTGEDRQQGGITKMGNGIARKAMIEAAWNNRRPARISRTVLARQEGLPKAVTEAAWNAQARLHQRYKHLTGVGRKKSQVAAAALGRELSGFVWAIGRMVKPRAAKPEAVKQ

SEQ ID NO: 329655 - protein, 327 aa, unidentified
MQIYGIDVSNAHLDIHSEFEDQVFVKRISNSFKGICKFLVGLEKGSVLCCEHSGVYGELLVHLANCYGLKIALIEGYVIHKSFVMEKGKTDAIDARKIWEYGTRFYDKLRFAGIIDMALHELRELLGLRNQLVKQRKMLKTNLKGKQKQVIISIVVATTQQKIIDSLTEQIKELEKQIRLVIKQNPAIEHNYSLARSVTGLGPLIVTELIVYTQNFTKITDPKKAAAFAGVCPYPHQSGSYRKKPKVSQRSNKRLKSLMYLAALNMCRANKEFRIYRERKIMEGKHFFLVMNNVANKILRILFAVIKSGKPYDPMYIQLDPREKIKN

SEQ ID NO: 329656 - protein, 355 aa, unidentified
MMNDKQVKVYGGIDTHADTHHLAVIDQAGRRLADAQIPTTATGYQAALRFLGSWPGLVSVGIECTGSYGAAVTRVVREAGITVFEVNRPNRFDRRLHGKSDPFDAYSAAEAVLGGRVSAAPKGGDGLVESLRVLRTSRSSALQARTATINQIKGMLITAPEDLRTRYKGLSTPKLIAALAASRPTPTPVTAAEATAYSLRLLARRWQALTGQIEDLAGHLQRLLDDHAPDLMRVFGCGRDTIAQLLITAGDNPDRLRSEAAFAALAGVCPIPASSGKTKRHRLNRAGDRQANSALYHIVMVRLRYNQETRDYVARRTAEGKTKMEIIRCLKRYLVRQLYPLIVETLHPRKEVAAA

SEQ ID NO: 329657 - protein, 312 aa, unidentified
MTKIICGVDVSSAALDACLRPGRITRRFPRTSEGIKALAAFCTAQGVALVAMEATGGYEKLPLDLLWAHGMPAAIVNPRAVRRFAESMGLIEKTDRLDAGVIAWFAETKRIAPQPPAGARQEQLRALVTRLRQLTELRTAQGNQRRLVTDATVRELFEGMLALIARQVRALETAIASLITEDPLWRELDKAFRTIKGVADRTIARVMAEMPEIGTVPGKAAAKLNGVAPLAHDSGSRTGRRPIRGGRSGLRSILFVVADVVRRHDPDFAAFHKRLSDAGKPKKVIRIALAHKLLVRLNAKARDVRRQRRCPA

SEQ ID NO: 329658 - protein, 344 aa, unidentified
MITIGIDPHKTSVTAAALDPVGETVGHRRVACTAKTADQLIGWADAWPDRRWAVEGASGLGRGVAQQLIAAGEQVIDVPAKLAARARLLGSGSSRKSDLVDAVSVGSVALYNSKLRTVEREDEAVVLRLLSDRRDDLVSERTRTVNRLHVLLRDLVPGGARRDLSTLQAGRFLSGIRPLTTVDIERKRIARALLEDLRRADRQLRAIGTTIETAVAASNSSLTEVFGIGPVLAAKIAGHTGDITRFASKAHFASYSGTAPIEASSGDLRRHRLNRRGNRQLNTALHTAAVCQIRSPGPGQDHYRHKLAELKTTKEAQRSLKRQLSNVVYRHLVDDHRRRQLTFD

SEQ ID NO: 329659 - protein, 367 aa, unidentified
MKKVSTAAAEQIGNFSQQRLTIGLDLGDRSSYYCVVDESGGIVVEQKISTTAKVLQAVFGAIPRSRVALETGMHSPWVSRQLSELGHEVIVAHARKVRLIGESRRKDDRLDAQTLARLARIDPQLLCPVKHRSAKAQADLTVIRARAGLVRARTALVNTARGLAKSYGERLRSCNVRNMNPEKAEGLSPELQTALQPLLAALQLLSEQIGEYNERIEKLAQTSYPEVALLKQIKGVGTLIAMTFLLTLEDAHRFGKSRDVGCYLGLQPGRRNSGQSEPQMHISKEGDPYLRTLLVQGAQHILGPFGVDCDLRRWGLKLAERGGRNAKKRAIIATARKLAVLLHHLWVSGEVYEPLHNSNRAALRAAA

SEQ ID NO: 329660 - protein, 407 aa, unidentified
MARYYLGVDWGEEQHGVCVCEETGAIVWEGMVPHTPTGLSVWGRQLDEWCAAGIELWAAIEKPDGRVVDCLLDHGVVVYPVNPKAVDRARDRFRMSASKSDTFDGRVLAQFLRTDHVHLPPLRPSSVAAQEVKLLTRDHTRIVRQQTRTLNQLTSTLKEYYPRVLDLFGDLTTQLALDFLQTYPTPATLTKLRLSSWKRFAQQHRLGSVRTTVLWEQLHASQLPVPEHVVRAKARLVAVLIAQVLVTHRAVTEYQAEIEHFFGTLLAAEWMQTLPGGLSGTMIPRLWAELGDAPGRWASWSHLQAQAGTVPLTRQSGKSCVVHFRVACNKHLRQAIWQLAFQSLRHSEWAKHYYQQCRARGHQHNQALRALGAKWLKIIFRMWQHQVPYDESYHLANMTRQYLRATA

SEQ ID NO: 329661 - protein, 408 aa, unidentified
MLVCVGDDWSEDGHDVWLMDESGARLAGGRLPEGVEGMARFHEMVAGLVSDPSEVVIGIETDRGLWVEALTGAGYQVYAINPRSVARYRERHSVSGAKSDTGDAKVLADLVRTDRHNHRQVAGDTPESEAIKVLARAHQNLVWERTRHVNRLRSALREYYPQALATFPQLAHRDALAVLAVASTPTLGAALSRTQIRAALRRGGRQRNLDTHIDRIHTGLRTQALAAPVPVTEAFGAVTKAEIAVISALNRQIDDLETGMAHSFEQHPDAGIYLSLPGIGIVLGVRVLGEFGDDPDRYADVKSRRNYAGTSPVTIASGKSLTVTSRWVRNNRLYDPLIRWAFCSLTASPGARAFYQQKRALGLTHHQALRALANRLVGILHGCLKTHTPYNEHTAWAHRQPTPQQHAA

SEQ ID NO: 329662 - protein, 359 aa, unidentified
MGHERTFVGLDVHARSVVACGIDGDTGEVVRARLTPDHEEIWSWLAGLEGPVAVAYEAGPTGFGLARFLGQRGVRCVVAAPSKISRAPGDRVKTDARDAMLLARLLKLDDLTAVSVPSVEAEAARDLVRAREDCRGDLMSARHRLSKLLLRQGIVWSGGHAWTGAHDAWLRRQRFDQSARQLAFESAYESVAMTLARRDRLDDAIAAMAADSAFTPVVVRLGCLRGISTLTGFGLAVEIGDWHRFTGSTIGSYVGLVPSESSSGQSRSQGSITKTGNTHVRRLLVEAAWHHRRRNYAGAEMHRRWNLAPVEARQRGQDGNKRLHARWQRFDARGKRVTVANVAVARELAGWCWSLAVMD

SEQ ID NO: 329663 - protein, 342 aa, unidentified
MYYIGLDVHKKTISYCVKDAAGKIHQEGKIGSTRRELDAWIKTLPQPRMMAMEATIFTGWIYDHLLPHAEKVKVAHPLMLRAIAAAKRKNDKIDANKIADCLRCDFLPECYMTSTEIRDRRRTLRYRGLLVKQMVQMKNRISGLLMETGASFNKQRLHKVGYFAELMAGNEEIECVRPLLKLSRETINRSQKLDYALVSSLERDPLLAERLKRLRTVPGVGPITALTWVLEIGDVARFQSIKQAISYCGLCGAEKRSADKVVRTPISKQRNKHIQQVLVEAAKLAPRYSHELSLIYEKEKQRGNRNRATLAVARKMVAWMVAVERRKQDFVPAEERGGTVAA

SEQ ID NO: 329664 - protein, 429 aa, unidentified
MAKLDIAWVGIDVGKAHHWVCVVDTNGTVLLSLKVANDEAEIDALLLRAASLAAHVIWAVDIIGAPSALLLALLARAGHTVRYASGRIVAAMSAGYAGEGKTDAKDAYVIAETARLRRDLTVIDTNTDQVRNLAVLTGHRADLIADRVRMINRLRDLMTSVFPSLERAFDYSAHKGALVLLTGYASPDRIRRIGQTRLSDWLRNRRVRGSADVAARAITAAKAQSVVLPGQDLSAAVIAELASAILTVDERVKTLDGQIQEVFVEHPQAEIIESMPGFGPILGASLLVGAGDLRAFPTAGHLAAAAGLVPVPNDSGRRTGNLHRPLRYSRPLRHVFYLSAQTSMMRDGPNRDSTSRSAAEAPHTARRSSRWLGAASTFYGLCCGRTHLEPSATITSASGGLTKPLRFPVPGDGAVGCLRGALGEHDVGR

SEQ ID NO: 329665 - protein, 352 aa, unidentified
MKNYKRFIPEGKTVFIGIDLHQKSWHMTAIVENQEVFSGNIPPDPEDLFKFLRRFGCNPIEVAYEAGCFGFWLYELLMSYDIKCIVVPPSLVPVESGNRVKTDRRDSRKLAYLLSRGLLKEVWVPSPQQLAHRQVIRRRRQLIGDRVRVQHRIKSELRCFGFPLPDSRGQWSVSLVRWLKAVRFQDYYQQQSFNHLLEEYDYLCKLVEEQTRLLKKLAATEPYATQVKLLKTISGIGLISAMELLLELGDISRFARGEQLAAYLGLTPSQYSSGDKIRFGRITKTGKASLRGTLTEAAWRAVRKDRELQAAFENLKARCGAKRAIIAIARRLLLRARRILLDQKHYNLVEAA

SEQ ID NO: 329666 - protein, 423 aa, unidentified
MYEKEETRMTPESSSPLSAVAPLAYAVGIDIGMEACTMCCLTMDKRQVIKPSSFDNTAQGCSWLLTRLEQLKSQPQQILIGLEATSRYGENLYHALLKGGYRVCLLHPGQVHAFSQQRGLRAKTDRLDCNTIARVLLSGEARFGYVPSEQIITYRELVRLQLQLAEEGVRYKNEIHALLVVLFPEFSQVFADPSKPTALAVLKAYPSAQAMGETRPEDVYCLLHELCPRHYGRKTAAKLVQLAQMSVSSGQAVATRSSCLRILCDQLQHTQRNLSLLEEEIDRLLDQDPKSQGVLSIPELGPMTVAVLRAELGDLDRFTRMDQVVAYAGMDLQVRQSGKWKGQTKLSKRGSGHLRRILYLAALRSIRLPTSPFGIYYHRLVDRGMKKGMAVIAVMRKLLIVAAHLIQTQEDYDASKVARPAVS

SEQ ID NO: 329667 - protein, 364 aa, unidentified
MLDSSTLVRKIRPQEYEVFIGMDVDSRSIVMTQVDHLGIEKSVSMPHQGRFLLRYVGNHLRGQRIAFVYEAGPTGFGLHDTLSQAGYPCLVVTPAAVPTARGRRVRTNRLDARKLALQLRGGGLEGIRVPSEDYRLLREYVQLRKLHMTEAARCKQRIKALFLRHGLEFPEAPAGGYWSQELIRQLRDYPCAPALQFKLASLLTSLEFSRLQAATAQAAMRRFVAASPEIAESVGYAMSLPGVGWIVATYAVARIGDWRLLGDSKEMASFFGLTQREDSTGKGAERGSITKAGDPVMRSLLIEGAWTAIRKDPELRGFYQRVKDNHAQDKAARIAIVAVARKLACRLHCVLKERREYQIRKTED

SEQ ID NO: 329668 - protein, 394 aa, unidentified
MFIVGIDIAKRSHEAIIAEDGQVVRKAFSFRNNCTGYNLLLEQVRRLTLVKSQIVFAMESTAHYWLALYARLLKDGYAVMVLNPIQSHSLRELYIRKAKTDARDSLIIADLVRFGRCKASNVPQDKILALRELCRSRAYLVDMAADLKRKLIALLDRIFPEYESLFDSVFSKASIAVLSKYSTPQKVKNANLRKLTDILMESSNEHFGEWKAHQLKEAACSSFGIDDSGGVYSTLLGMFLEQILSLTAQADSLEKQISVFFQEFNNPLTSIPGVGTVLAATILSEIGDITRFSSADKLLAYAGLDPSVKQSGEFKSNQNRMSKRGSPYLRRAIWLASTVAVHRDPMFQTYYEKKISEGLHYMNVIGHVSRKMTAVIFAVLRDGQPYQPILQSAG

SEQ ID NO: 329669 - protein, 339 aa, unidentified
MKHYSGLDVSLKETFISIIDEKGKIVKEGVVASESSAIAEFLLGQNKKYESIGIESGQLSISMCKELRNLGLPVTCVDARHMAAALSARINKNDKNDARGIAQMMRVGLFKEVLVKSDEACQVKIILGSRRQLIRCREQIAGTIRGLLKIYGIKVNQRLSSANFALKVQEMVNNLDEISQTSIESLVHSLEIIEESTRKLDKMLSEQSKKDEDCKLLTTVPGVGIIVAMTYKAAIDDLHRFETSYTVGAYMGLSPRQYASGEIDRHGSISKMGPVDCRNMLYEAAQVLLVKCKRTFKLRSWGLKLKKKKGMKKAIVAVARKLAVIMHKMLIDRKEFCYQ

SEQ ID NO: 329670 - protein, 321 aa, unidentified
MADKAVYAGVDVSKATLEVAICDIAEVKQFANDQDGIGLAVRYLKGFETAGIILEATGNLEAHLVAALQAAQLPVMVVNPRQVRDFARSTGALAKTDAIDAHSLALFGERVQPEVRPLPDKQARKLAGMVSRRRQIIGMLTEERNRHFLAEDDVRESILKHVQWLEKELADISGDLDKRIRKSPAWREKDDLLQSVPGVGKALSATLVAELPELGKLNRRQIAALAGVAPFNRDSGQMRGKRFISGGRSKLRATLYMAALVATRHNPVICAFYQRLLAAGKAKKLALTACMRKLLTILNAMMKTGKPWHYVTSLQTTSVEA

SEQ ID NO: 329671 - protein, 343 aa, unidentified
MNEVTTIGVDLAKNVFQVHGVDASGQVVVRRQLRRSQVLPFFEKQVACVVGLETCATSHHWAREIAKLGHDVRLMPARYVKPYVKRNKNDAADAEAICEAVTRPTMRFVAVKTEEQQSVLMLHRTRQLFVRQRTTLINAIRAHMAEFGIVAGVGRNGVERLLRLIDEGADGRVPPVARECLQALRTQLVLVKRQILEADRRILAWHRSNELSRRLETIPGVGPLIATALVASIPDPHAFGSARDLPAWIGLVPKQNSTGGKERLGGISKAGNRYLRSLLVVGALSVIRRAKQVGYTRRAWLAELMARRPVKVAAIALANKIARIAWALMVNGTRYEEPVPQAV

SEQ ID NO: 329672 - protein, 415 aa, unidentified
MALKIVYKICCGIDVHKTFVVACIASTNDKGVTTYESHRFSTYTSGLKDLLQWLLKRNCRDVCMESTGKYWIPVYNVLENDCSIVLAHPKYVKAIRGKKTDKKDAKWIADLFKHDLVAGSFMPPADIRQLRDLMRYRFKLTCFMSSEKNRLQNCLTVSNIQLGNVVSDTFGKSAQAILDKLLENPADTSFDLEPLVYKSLKKKLPELRDAIDGYITPEQAGKLKVIKAHYENLESRKAELEELILALAAPYQQELAILQTAPGIRSDFTAIGIISEIGTNMEAFPSAKHVCSWAGLTPTNNESAGKKKSVRVSKAGCYIKPLLVQCANAVVTSKKHPEIRNRYLRIKKRRGHKKAIIAIARMLLTALYHMLKNGENYNAELYKKSDSLPLDREITVEQAIILVRNQGYKIKSATA

SEQ ID NO: 329673 - protein, 397 aa, unidentified
MQSMIIEYVTQDAVGAERPPAVETRLGAVFVSMELSRSTWLITSLLPGDGERMSKHTLRAGDIAGLMERFVVLRQKASARTGQVFPIVVIQEAGLDGFWIHRVLEQEGIESHVVDAASIAASRRRRRAKTDRLDGEVLLRSLLSFKRGDPRVCAMVRPPSPDEEDRRRNSRERKVLVAERVKLVNRIKGLLFAQGVSGFEPLKRDRRARFDELVTGDGRALPPHARSEIGRLLDRIELLLEQMQAVEMVRDQISEATPTTDTLCGTGMLRRLKGVGPDFAEVLWAEGLYRHFDNRRQLASYAGLTPTPWQSGSVSHDQGVSKSGNPRLRTIMVQLSWFWLLHQPDSALSRWFHERVKLDGGRRKKPAIIALARKLLIALWKYVREGLVIEGAVMSKA

SEQ ID NO: 329674 - protein, 346 aa, unidentified
MTIVEATRTVTGGIDTHSEVHVAAALDEIGGLLGAESFDANPAGYEALFTWMSAFGDVTKVGVEGTGSYGAGVARFLARAGVEVVEVDRQNRQARRQSGKSDPLDAVEAARAALSGKARGQAKSRDGSVEAIRVLVVAKRSARAARIKALTQMRQLIYSAPDQLQSRLKGLPIAEFVAVAQGLRPTRSADPVTAATKASLSSLAHRVADLEEEINELDARITPLLKATAPELLAVYGVGIDTAAALLVAAGDNPERLRSEAAWAHLCGVSPLEASSGKVTRHRLNRGGDRQANSALWTIVMSRLASDPKTQAYMERRVKDGRSKREVIRILKRYVAREVYRYLPRA

SEQ ID NO: 329675 - protein, 423 aa, unidentified
MKVVYPICCGVDVHKTFFVATIITSEGFTPHYQKKRFSTFNNSILEFKRWLLDNNCLDVCMESTGKYWVPVFNLLEDSINVTVANPKWVRAIKGNKDDVKDSKWIGDLFRLGLVPGSFIPDKSIRILREYTRYRFKLVSCKSSEKNRFQNAFTVCNVALDAVVSDMFGASASSITGYLVDSDSFDPQHCVSLLQRSLKKKAAAVIASIEGYQMMPEQKYRVRTIRNHLEFIEKSIHKLDDMLNVLASPYESAIQLLCTIPGVDRTSAITVISEIGTDMSRFSSSKRLCCWAGLTPGNNESAGKKKSVRITRAGVYLKPALVQITHAAVKSKDNPYYRIKYERIAKRRGKKRAIIAIARMILTAIYHMFSTGEVFNPCDLCKVDIPPELRDKQKEKALKQAAKLLIAQGLIQETDLPSLFLKPA

SEQ ID NO: 329676 - protein, 316 aa, unidentified
MTTTPVFVGIDVSKDRLDVALRPTSDRWALANDAPGVATLVARLQGLAPTLIVLEATGGLAVPLTGALAAAGLPVVVVNPRQVRDFAKATGQLAKTDALDAAVLAQFAEAVRPALRPLPDAATQALSALLARRRQLIEMLTAEKNRLGSALPPVHKGIRAHIRWLDRRLADLDADLAQAIRESPVWREKDDLLQSVPGVGPVLATTLLASLPELGTLTRQQIAALVGVAPLNRDSGAWRGKRRVWGGRAPVRAALYMSALVATRYNPVLRAFYQRLCAAGKAKKVALTACMRKLLTILNAMLKYRTPWENNFAHAS

SEQ ID NO: 329677 - protein, 330 aa, unidentified
MQTITTVGLDIAKSVFQVHGVDAAGQVVVRRQLKRRYVLAFFQKLPPCLVGIEACASAHHWARELQVLGHTAKLMPPAYVKPYVKRHKNDAIDAEAICEAVTRANMRFVATKTPEQQSCLTLHRTRHLLMRQQTSVINAIRSHLAEFGIVAPVGRNGVEQLLGVVADPNDKRLPELARACVAALGAQLRVLKLQILEFDRMITAWHRSSEASKRLDQVPGVGPLLATALVASVAEPKAFRSGRDFSAWIGLVPKQNSSGGKERLGNISKRGDRYLRSLFTTGALAVIRYAKIHGTRHRPWLTALLARRPTKVAAIALANKIARMAWAMMA

SEQ ID NO: 329678 - protein, 435 aa, unidentified
MKMTHRVEKINRKFYLTVAFDVSKDKLNYYYEIPGRLKSKHRELVECYEGEIENKAQVINESLLDLDRFAKDHGYEGLHVVCEPTGPYDRKLMRIARAQGHTTAYVSGESVCKMKVVENNDTGKTDIKDPRVIYMLSKNMGKELTCRDLKDEYQLLRELNRMYDAEDSAHTSMKCQIHFLLQRLFCDYSFKKDFLYTLTGRVLVEQYHASPYRILKSGYKRFCTKMKKHAPRVRKLTLERLWQDAQSSILHQMDKEIIMLLERRLLFLWEEYELHRKRKAQIKQEIIVLYRHLLKKGEPVPRPHKRFLNEFRIGRILGETGRLTDFPNKRAVLKYGGLNLRERKSGYYFGKTRLGKKGRSTLRNVVGQAAFRLVRKHEVFGPYYHRKKKEGMVGTKALAAVERKLLQVFYVLGIRKQDFYLHRLHQCESRMEKVA

SEQ ID NO: 329679 - protein, 350 aa, unidentified
MLIIGCDYHPGFQQIALVDTQTGELGERRLAHREEAELFYRELKQQSLSVRVGMEASGHARWFERLLSELQFELWIGDAAEIRTKRVRKQKTDRQDAQLLLRLMVEDRFPRIWVADAENRDLRQLLWHRHRLVQMRTRLMNQLHVVALNEGLRRKKALWRPAGGNELASLKLAPWASRRRQDLLDLLDQLTPKIQELTRALEEEVEKRPVTRRLMTHPGVGPLTALAFELVIGSPERFHCGKQIASYVGLVPWEESSGDRRRLGHISKQGNSLLRYLLVEAAQVTVRSQQHWRSKFFHLAMRRGRKIAKVAMARKLAVHLYWMWRRGWDYGQFEKLGAHAGEPGNRQGVQ

SEQ ID NO: 329680 - protein, 400 aa, unidentified
MTTTRARAWAGVDAGKGHHWAAVVDDTGATLWSKKIDNDETAILTALGEILALAEEVSFAVDISGTASALLLALLAAHGISAVYVPGRTVNRMSGAYRGEGKTDAKDAYVIAETSRHRNDFATIDVPAQLAADLALLTAHRTDLVADRVRMINRLRDVLTGVFPALERAFDYSTHKGALILLTGYQTPTAIRRRGHTRLTAWLAKRHVRSAETVAATAVAAADAQQTTLPGEGVAAQIVAELARAILDLDDRITRLEGQIRDTFRTHPQAEIIESMPGIGPILGAELIVAAGDLGAYTDAGHLASAAGLVPVPRDSGRRTGNLHRPKRYSRRLRRVFYLSAQTSIIRDGPNRDFYLKKRSEGCLHVQAVIALARRRVSVLWALLRDGRAFTPAPPVVLAA

SEQ ID NO: 329681 - protein, 346 aa, unidentified
METMARITGGVDTHLDVHVAAAVNEFGAVLGTASFPTTAAGYRKLLEWMSEFGQVVLVGVEGTGSYGAGLSRFLHRQGVSVVEVDRPNRQRRRLSGKSDPIDAISAARAALGGTANGAAKTRDGNVEAIGVLRVAKISAHKARTQAINQIHSLVCTAPDELRDKLRGLSTPDLIAACAGLRPGTSGDVTAATKTTLRALARRVHHLDEEIADLEALIRPIVTATAPALLAHSGVGPDTAAALLVAAGDNPARLRSEATFARLCGAAPIPATSGKTQNRHRLHRGGDRQANSALWRIALTRMSWDPDTRAYVERRTKEGLSKREVMRCLKRYIARELFPDLPQQILC

SEQ ID NO: 329682 - protein, 341 aa, unidentified
MEKITTIGLDIAKHVFQVHAVNDAGAVVARRKLRRDDVAGFFKALPPCLIGIEACATGHHWARVLMALGHEVRLMPASYVKPYVKRQKNDATDAEAICEAVTRPTMRFVPVKSEEQQSMLMLHRVRELLIRQRTMLVNALRGHLAELGIVTRQGIAGVGMLITLVEDDDHDLIPSLARSALLPLIGQLREVHEKVSEMDRQIHAWHRSNELSRRLETIPGIGPITASAITATVVDASLFKSGRQLAAWIGLVPRQNSSGGKDRLGRISKQGDPYLRRLLVVGAHAVLRFSRNSKTAPTRWAAELLAKKPYNVVAVALANKMARIVWALMTTGRRFEVAVAL

SEQ ID NO: 329683 - protein, 366 aa, unidentified
MLYLGIDQHGKQLTVNIRNEEGSAILKRQVSTEWKRVREFFDRLREEAREDGGFAAIVEVCGFNDWLLKMLAEYDCREIVLVQPDKTSKRKTDRRDAGKLSELLWVNRQRLLAGQKAQGMRRVLPPSAEDAEARQLTSVRKRLAEERTKTINKVHHILQKHNLQQECPTKGKKTKTARRWMAAMTLPSVDRLEMDQLLAQWDLWDDQLEAIEKRIDESQAKHPVARIVRSMPGAGTYSSLALASRIGPIDRFPRPSSLANYWGLAPGCRNSGDVTNRSGSITKEGSAIARHILGQMVLHVLRDDKYVKKWYMRIKKRRGSKIARVAVMRRMATVLWHMVKYDQPYMFGGPPQVKASREAYEAFRDV

SEQ ID NO: 329684 - protein, 404 aa, unidentified
MNNVAGIDVSKGKSMVSVLRPFGEVVAKPFSIGHTGSELKELADYLKSLDGETRVVMEHTGRYYEPVARFLHEEGVFVSAVNPKLIKDYGNNTLRKVKTDKADARKIARYGLDNWAELRQHTPMDTIRMQLKTLNRQQSLYAKTKTMMKNNLIALLDQTYPGVNALFDSPVREDGSQKWVDFATAFWHVDCVRNMSLTAFAERYRKWCKRHGYNFSQSKAVEVHTGAQDLIAMLPKDALTKTMVRQAIDALNAVSASLERLKAEMQALAAQLPEYPVVMAMHGVGDSLGPQLMAELGDVARFTHRNAITAFAGVDPGADQSGTHEAKSTRVSKSGPPELRRALFLVMDCLLKTQPQDDPVYRFMDKKRAEGKPYLVYMTAGANKFLRIYCGRVKEYLASLESSD

SEQ ID NO: 329685 - protein, 424 aa, unidentified
MTDNVMWLAGIDWASETHQVCLLDIDGKIVGERAFPHGGAGLAALCDWLLEKTGATADKIAIAIEVPHGPIVENLLERGFVVYAINPKQVDRFRDRFSMAGAKDDRFDAHVLGDALRTDRHRLRRLQPTDPTVVELREWSRMGDELKHEQTRLANRIREQLWRYYPQALKLSANIAATWFLDLLELAPTPTRAAEVSESAVAEVLKAHRVRRLDAAKALAILRETPITVAPGTTEAATGHIRMLAARLKLVNDQIREADRQLDVLCDKLNEAENGVTPEPNDKSDIEILRSCPGVGRIIASTLISEAFDLIQRRDYDALRPLCGVAPVTKRSGKCKVVLMRQACHNRLRNAVYHWARVAIQHDEVSRERYTALRQRGKTHGRAIRSVADRLLGVACSMLKNRTLFDSDRHTKRLGAAVTQPITT

SEQ ID NO: 329686 - protein, 371 aa, unidentified
MNTIVYVGMDVHKESYTLCCYSYDTDKVEYKQTVPADYKLILKYMEQVRKRYEGEVSFVCGYEAGCLGYSLYHQLKDHEVDCKILAPTTMAITNTSHVKTDKRDAANIARCLAFHTYSEVYVPDDEDNAVKEYIRMRDDQKQMLKKIKQQILAFVLRSGKKFDGGKTYWTIAHLKWLRSLDLKGLDKETLKEYLITYDYLVEKIDRLDQRIEELATNEKYTRTVKNMGCFLGVKTHTALSMIVEIGDFDRFEKASKFAGFLGLVPSEDSSGDSTNRYSITKAGNSHLRRLMIEAAQSYTRGSIGHKSFALKQRQKGCDPEVIAYADKANERLRRKFYRMTLNKGINRNIATTAIARELACFMWGMATGNIS

SEQ ID NO: 329687 - protein, 355 aa, unidentified
MSQSSTITAGLDLGDKYSYLCLLDTRSGEVIEEGRISTNPKALQRRFSGCEPMRIAIEAGTHSPWVSRLLKDLGHEVLVANARKLKLIYAEGRKNDRLDAQNLARLARLDPKLLAPLKHRGETSQAHLAIVRSREALIEARAKLINHVRGTVKSFGSRLPKCSSTTFHKKVGAHVPEPLRPALEPLLETIASMTESIQEYDRQLELLAEESYPETKLLRRVHGVGTLTALTFVLTLEDTSRFGTSRAVGAYLGLVPSKGQSGERDPQKGISKQGNGLLRKLLVGSAHRVLGPFGEDSDLRRHGLKICERGGKNAKKRAVVAVARKLSVLLHRLWVSGEVYEPLYNAKRSVEGQAA

SEQ ID NO: 329688 - protein, 355 aa, unidentified
MDSAKYIGLDVHKESISIAILNAAGKLVMECVIETKAISILQFLRGMHGELHVTFEEGTSAAWLYDLIQPHVTEVVVCDPRQNALLNAGNKSDRIDARKLAELLRGNQLKSVYHGEHGVRTVKELVRSYLTISKDVARVMTRVKALYRSWAIPCTGKQVYAPGHRAEWLAKITVAGVHRRAEFYFQQLDALRSLRQQVRRELLSESQKYPAWKLLCQIPSMGPIRAAVLIGIVQTPHRFRTKRQLWAFSGFGIETHSSGDYRLVEGQLRRTNRPVSIRGLNTNHNHDLKNLFKAAAIVAAHKPGPFQEFYTALLAKGIRPEMARLTLARKIAAITLHIWKKGARFDAQYLKPQAA

SEQ ID NO: 329689 - protein, 347 aa, unidentified
MLADQLDYVMGVDPHRDAHAVGLVEVRTGLVVFEATVSADSGGYAEALRLADQHAPGRRAFAIEGTGSFGAGIARFLTRQGEQVFEVSRLRRERRSGGKTDALDAVRAARSVLAAKRPAIPRASGEREALRALVATREGAVNARTAALCQLRDLIITAPEPLRGELRGLSRARLLNHLTATRPDRRQDPSLRGTHLALKALARRIQQLTTEERELAREIEQLTRELAPQLLNETGVGPLLAAQIVLSWSHHGRIANEAAFARLAGAAPIPASSGQTIRHRLDRSGDRKLNRTLHQIIVTRRRWDPTTIAYIERRTQEGKTRREATRCLKRYLARHLYRLLENPPMTP

SEQ ID NO: 329690 - protein, 326 aa, unidentified
MSYKKWIGVDVSKEVIDIAIYDRKQHTFFRIKNEEKTITKFFSKLEKAEEYHIVMEATGIYHLVLFTALIELNFAVSVVNPLIIKRYSEMKMIRAKTDAVDARLIAMYAFEQKPKLSQLPHETQEKIFSLFKAVEAFQKIITSLNNRLLALNSYNCEHKIIINEIKKHIRSTKRSIVKLENEIYDIIENNYAQLNKRLMQIPGVGPKTSSMIIGCFGHFENFDNAKQVVSFAGLNPNPRLSGKSVNRGSNISKKGNPLLRKMLYLAALSAKSCNPNCRMMYERFLNKGMPKMKALVAVAHKLLRQIFAIAKYNRSWSPDYCRKCLT

SEQ ID NO: 329691 - protein, 368 aa, unidentified
MKKKVLYVGLDVHKKTTDVAIAPGRSNGKVRSYSKIDSTLDALNKLINKLQVDDKQLQFVYEAGPCGYQIYRHLDAKGIDCSVVAPSMIPRRSGDRIKTDRRDALNLARLFRAGELTSIYVPTVEDEAIRDLIRCRDDMKRFERKARQRLLSFLLRHGYQYSGKRNWTKGFYNWLATVKFSHSAQQVTLHEYIEATNECSERIKRITEQIQVHVEEWSRARFVKAYQALRGVSLIVSTTVASEIGDMRRFPNPKQLMAYLGLIPSEHSSGKTVRRGPITKTGNSHVRRALIEAAWTYKMQARISTILLKRQQGLPKSVCDISWKAQTRLCARYRRLMARGKTKQTVITAIARELSAFIWAIDKEMQFD

SEQ ID NO: 329692 - protein, 411 aa, unidentified
MDIVYPRCCGLDIHKKTVVACVIVPGAAGQPRKEMRTFGTMTADLLELADWLDARGVTHAAMESTGPYWKPVWNVLEGSLTLLLANAHHIKAVPGRKTDIKDAEWIADLLRHGLIQGSFVPDRDGRELRELTRYRTTLVQERTTVINRLQKTLEGANIKLAAVASDILGKSGRQMLEALVAGETDAAALAQLAKGRMQQKRPALEQALAGRVAAHQRFLVAQQLAHIDFLDEAITRASTELAERLRPGERAALDRLDTIPGVGRRTAEVLIAEIGADVTRFPTAGHLASWAGMCPGNRESAGKRLSGKTRKGSKWLRTALVEAAQAAGRSKTTYLGAQYRRLIPRCGKKRAAVAVGHSILVIAYSLLTRETDYQDLGPQYFDQRERTALEKRLVRRLEALGHKVTLEPLSA

SEQ ID NO: 329693 - protein, 359 aa, unidentified
MNNKKYIGMDVHQASISVAVRDSAGKLVMESIIETKATTIREFIRGLGGSLSITFEEGTSAAWLYELLKPEVAEVLVCNSRQNALLRAGNKNDRVDARKLSGLLRAGLLSPVYHGDSGVRTLRELARSYLTITKDLTRVMNRIKGLYRSWAIACAGKKVYAARHRGAWLEKIAETGVRRRAELLYEQLDALAKIRRETRRALLQESLQHSASKLLRQIPRLGPIRVALLIALLQTPHRFRTKRQLWAYCGLALQTQVSGEYRVSDGQLQRSKKSPALRGLNHNHNRDLKSLFKSAATQASASAKKDPLGEFYENLLAKGMKPAMARLTLARKMAAIVLRVWKKGESFDPAQLKCQSVCV

SEQ ID NO: 329694 - protein, 341 aa, unidentified
MDKLDFVGLEVSKQELVVALQREGQRKARKTFANTPPGHQALIHHVSHPGRKVRVCLESTGLYGLDVALALHRAGLEVMVANPRAVRNFAKALMERSKNDQIDAGVLLEFAIRMPFQAWVAPRPAVLQLHALARRLEALTDMQTAEKGRLEAAQATDTLLPALRRDLERSLRSLRRALARLSGEAVKIIDQDPGLKLRFELLISVHGSIAAASAIRILAELAVLSEDLDVRQYVAYAGLDPRECTSGTSVHKPPHISKAGNAHLRRALYMPALVAIRHQPNLRAFYLHLRAQGKPKMVALVAVMRKLLHAIFGMFKHEQAFDGAKVYALPAPEISTKEVAA

SEQ ID NO: 329695 - protein, 356 aa, unidentified
MISRRIVHVPKIIVGVDTHKEEHVAVVIDKLGARMGQLTLPTTNMGYVGLERWARNLGKIEAFGIEGTGSYGAGLTRFLRGQGHTVIEVNRPDRSTRRRLGKSDPTDAEMAARSVLAGVARDQPKSGVEEVEMIRMLKSTKDSAMKGRTQAINQMKALVVTAPVELREVLSGLTSSQLVARCSGWHSGQLDTPTTAAKYALRSLARRYTRLTEEIKGLNRELARLTVAFAPMLIDSIGIGPDTAADLLVTAGSNPERLRSEAAFAALCGVSPIPASSGKTNRYRLNRGGDRRANAALYRIVIIRLRYDVRTRTYLQRRTEEGKTKTEVIRCLKRYVAREVFGILHDIGLRHIFQNA

SEQ ID NO: 329696 - protein, 385 aa, unidentified
MQTLSDLSQSRIVLKQDSTLIAVIEMSLSSWLVAGLVPGVERQPLKKLAVDESVLLKLLHRWGEEAEKTGRRIERIAVAFEAGRDGFWLARWLRARGIEAHVIHASSAAVSREHRRPKTDRLDTELLKRVFLGWLRGERDHCKMVTVPTIRDEDAKRPNRERESLVGEQTRIVNRMKAALSRLGIRGFNPKLKKAAARLEDLRTPEDEPIPPNTLAELRRDMERRRLISDQIRQIEDARLERLERMPNDGSHAMVRLLARVIGVGIETADMLVQEVLSRTMRDRRAVARYAGLTGAPDESGAKRREKGLARSGNARVRRGMIQLAWRFLMYQKDSTLAQWFRARTENARGTRKTMIVALARKLLIALWRLVTTGEVPAGVVLRAA

SEQ ID NO: 329697 - protein, 363 aa, unidentified
MIVIGADTHKRTHMLAAVEEGTGREAAVKEIAAADGGHLDALRWARQLGNERVWAIEDCRHVSRRLEQALIAAGERVVRVAPKMMGQTRRGERTVGKSDRIDALAIARAVVKDGVDRFPAAFLDEQAMEIRLLSDHRDDLVAERTRMQNRLRWHLLDLCPELEAQIPERSLARDVVLARIDRKLRGFKDNPRVRVAREELAHIRTLTRQARSLERELHTLVKAYRPALLIETGCGTLTAATLIGRVAGAERFTTDAQFARQAGVAPIPASSGKRDRYRLHRGGDRQLNRALHVIAITRARLDPTTQQYIQRRIEQGKSRREAIRALKRHLARLFHRLLMTPNHPDPQAARIRIHAPIQAACLT

SEQ ID NO: 329698 - protein, 341 aa, unidentified
MAKFIRTAIDLGKNYFQVHGLESEGGQSISRKVKRSKMHEFYSQIEPCRVGMEACGSAHYWARQLTAMGHEVVLIPPAYVKPYVKRGKNDAVDAAAICEAMSRPDMRFVPIKSADQQAVLMLHKTRELLVKQRTMAVNALRGHLAEFGIVAAKGIGRVDELLARAKVDAALPHIAGAAVACMAQHLEGLDLSIETVDQEIAKAHRQNPTSRLLDEIPGIGTLIASVVAASVPDPGVFKSGRDFAAWLGLTPRQNASGGKEKLGAITKQGNRYIRKMLVTGATSVLRVAARRKGALADWINALRARKPERLVAVALANKLARICWAVMTTGEDFRTDTYVKA

SEQ ID NO: 329699 - protein, 428 aa, unidentified
MKQDDLIRVEEFRQLRKQIRGSEDYLIVGIDVAKHKHHAFFGTATGKTLFKRLVFDNGREGFDKLLIQTEAIKVQHGLQEAVFGLEPTANYHKPLGEFLIKRGHSVGLISSVAVKRNRELLDGRWDKHDTKDAANVADLISQGKFLFYELPCQELRDLRSLLSLKRKLKKLEHGLRIRIRNHLVAQYFPELDRLYGQRESENLAIVRWCLNPALIGALGYEKFFQLVTTRDRGISQHKRLRAIWEKAAASIGCHVGEAVEFEAEVLVETLKRLREAIKTTDYRIKNIGCSLPEFNYLLTIPGFGPDVSAKVIAAIGNPFRFDSAKQVLKLAGFDLSADRSGNRSDAAIPVISKRGKTYLRYALYQAAFIASIRNRHFIVYYTNTLRGRERERGIRTKMRVKLAAKMLTIAWTLMKKKEPFDPDYLNID

SEQ ID NO: 329700 - protein, 349 aa, unidentified
MRFYTGQHRFYCGIDLHARLLAVCILDQAGNVVHREQIAADKQLLLQTLAPYRPDVVVCVECLFAWYWVADLCQAEKIPFVIGHALYMKAIHGGKAKNDDIDAEKIARLLRGGNIPPAYVYPKGLRETRDLLRRRMYLVHQRAALIAHIQILNAQNNLPEFGKKLMYARNRADLKVAERFAEPHVRKSVEVDLALVDVLDERIAELELYLERTVKVEDPQSYFLLKTIGGVGKILGLVLLYEIHDIRRFPGVGEFLSYGRLVRCRHESAGKKLGTGGAKIGNAHLKWAFSEAVCLLIRNYPAVKAWQAKKEKRHGKKKTLGIPAAKLGRAVYHMLRKKEAFDAKRFLGQ

SEQ ID NO: 329701 - protein, 324 aa, unidentified
MAKRITICAGIDTGKRKLDVAIDGSSLQLQVENTAEGHKVLLEWLRRHKVKRIGIEASGGYELPVVTELRRKRFVVVVFQPAQVRAYAKFHLQLAKNDKIDAALIAACTAAVKKIHAAPDPRLQPFAEHLTLIEQIGEDIKLYKNRIETCRDPRIQKLWKEEISRLAKRERAELKALVAAIRQHRDLAQRLDLIYSVSGAGMPTAVAILVRMPEIGTLSREQVAALAGLAPYDDDSGERSGARHIDGGRKRLRRALYTAALPASFFWNPHLIALYQRLRAAGKVHKSALIACARKLLIFVNTVVGRGTPWQEQQPVRATNPAAA

SEQ ID NO: 329702 - protein, 342 aa, unidentified
MTLFQSFVGVDIASASLMACVGTTPWKLTVKPVKFENDEEGFVSFLGWLREHHLSPEHTVVCMEATGVYGEGLAYFLHASGYKVAVEPPLNIQRKFPVNASKTDELDCQYIAEYACRYVDKLSFWQPRAEILEQVQVLLTTRQHFSVQLTGHKNALHAVNRKKVSSELAKQVHHNMVEQIAKSIKAIDKEIRRLIESDPTFKQTLLLLLSVPGIGLQLAAHLLIAMQKTLDPKVLAAFIGICPIQHESGSSVFATPTSRHYGPSVLRKLLYLGACSVRNHKKQFQQYFFRKVAEGKHKKLVLNNIQNKILKIACAVVRSNQPYISNYVSVNPLVFQKSLTAS

SEQ ID NO: 329703 - protein, 338 aa, unidentified
MEQITTIGLDLAKNVFQVHGVDVAGKVLVRKQLRRAEALRFFAALPPCLVGMEACGTAHHWARELTKLGHTVRLMPPAYVKPYVKRGKTDAADAAAIAEAATRPTMRFVAVKTVDQQSVLMLHKVRELLVRQRTMLINALRGHLAEFGIVAARGPGGVTAVITALHEAQGGLPDLARQVLHGLIDQMRVICAEITKAEKRIMAWHRASEASQRLATIPGIGPITASAIAAAVPDATLFRSGRQFAAWLGLTPRAHSSGGKQRLGGISKQGDGYIRRLLVIGATAVIRFARQDNASKTWAASLLERKSARLVSVALANKTARIAWAVLARNQSYTATAI

SEQ ID NO: 329704 - protein, 354 aa, unidentified
MDLKETLVILGVDTHADEHVVVALDDFGRRLGHKSVPSTEAGYAALVAWAEEFGTLLRAGVEGSGSFGVGLVRFLRARGVEVLEVNRPNRQHRRRFGKHDTADAEAAARALQADTATGEPKSADGPAEMVRALHVARRSALKARTQAANQLHALLVTSPEELRAELRDLSTAKLVAVAARFRPGSLSKDLRAASKLAMRSVARRHRRLSEEIAELEEQIAQLVSEAVPALVALPGVGTDTAASLLVAVGDNPERLKSEASFALLCGVAPVPASSGKTVRHRLNRGGNRDANRALHMLALGRMSWDERTREYVARRTAEGKSKREILRCLKRYVAREVYRILTAPGALPSYVSVP

SEQ ID NO: 329705 - protein, 414 aa, unidentified
MLKIVYRICCGMDVHKSFVVACIASTNEKGVTTYKSKRFSTFTGDLRRCAAWLAENNCKDVCMESTGKYWIPVYNILEHTCTIVLAHPKYVKAIRGKKTDKRDAKWIADIFKHDLVSGSFIPPADIRQLRDLFRYRWKLTNFTTGEKNRAQNCLTVSNFKLDDVFSDVFGKAASAITARILEYPMERITDVSAFRTKGMKATNEQVLAAVDGEMCEEQAEKLRIIRSHMDSLALCKLNLESLILTSAEKYIPQLNLIMTAPGIQSFAAIGIISEIGVDMSVFPTSKHLCSWAGLTPQNNESAGKKETTRISRAGAYIKPLLVQCALCAIRAKRFPEVRNRYLALKKRRGHKKAIIAIARMLLTAIYNMLKKNEPYNPELYRQADRPPAHREVSVKEAIFILQRQGYLVTAPPTV

SEQ ID NO: 329706 - protein, 446 aa, unidentified
MNDRSGLSRGDRNRNARLARLRQLLPVDHAIVGIDLADDKQAAVVTDHDSRVIARRRVIARAWELGGLLDWALARARAAGFGSVTVACEPTGHRWRVLDQLAAERGLALVCVQPLLVYRAREGEDLTFDKSDPKDAVIIARLAAGLHCYEPDRADAVWARLRHLGARRNQLTTGATAQVNQIRDLLECAWPAVLTASGSPFRSASWRAALAVVLGRCAGDLARVRRMGEARFTAAVRRELPRWGATRPCLRIVRAVFAALADPAGVTAHRPGALERADLAMADWHDTRERLADTEQRMVTVLDELGLTELVTTIAGLTPVGAAAILAETGDPARFASPRSLVKHAGLCPRDNASGGYQGKTSISGRGRPALRVAAWRAVWAALPNNEVMAARFTYLTTREDNRLARQQARTACAAALLRWMHVVVTRRVSWDPAIAAGSTPLPRAA

SEQ ID NO: 329707 - protein, 315 aa, unidentified
MICGVDVSSQFLDVRVGRDGVSAHFDNDAEGIVQLAEFCQLHQVHLVVMEATGGYEQLVFGLLWARGIEAAIVNARSVRKFAQAMNILEKTDQIDSGVIAWYAETKKVVAMRPASVEQQRLKALVTRLRQLTETRAVQRNQRLLVTETEVLGYFHQLMVFLNQQIKTLEKTIAGLIGSDPIWQKLDQTFRSIKGVADRTVARLMAELPEIGTLSNKKISKLAGLAPLADDSGKSKGKRKIYGGRHGVRDILYVVATCVSRYNADFSAFQARLTQAGKPKKVIRIALAHKLLVRLNAKARDVRQLHQPAAAAISAP

SEQ ID NO: 329708 - protein, 382 aa, unidentified
MRAYPHTWEADMTDDITFVGLDVSKETISVGVAPGDRREAVHYFGTIAHRPTALYSLCKKLSRDGTHLHFCYEAGPFGYSLHRRLSDWGHACDVVAPSLIPKRPGDRVKTDRRDALSLASLLRAGQLTAVWVPDATHEAVRALVRLRHLAASDVRRAKQQILSFCLLHDRVYRAGTTYWTKTHRNWLVDQKFEHGALALTYSELLDRLERAEAMLARTRLELKEHLGDWALYPVMDALQALRGFDWENAATVAAEIGDFRRFPTAAHLMAYVGLVPSEHSSGDRRKRGEITKSGNAMVRRVLVEAAWTYRYPARQSSPIRARSGHLPEPIREKAWQVQTRLCRRMRDLRGRGKPQNTVLTAVARELAGHVWALARMVPPPMA

SEQ ID NO: 329709 - protein, 343 aa, unidentified
MQTITTIGLDIAKSVFQVHGVDAAGQVVIRRQLKRQSVLAFFQKLPSCLVGIEACASSHHWSRELQALGHTVRLMPPAYVKPYVKRQKNDMADAEAICEAVARANMRFVPTKTPEQQSCLMLHRTRHLFIRQQTAVINSIRAHLAELGIVAPVGRKGVTELLHIVADASDNRVSEVARACLVALGGQLLSLKQQIVEFDRMILAWHRSNQTSKRLHYIPGVGPMLATALVASVADPSTFRSARNFSAWIGLVPKQYSSGGKERLGSISKQGDRYLRSLFVAGALAVIRYAKIHGTGHRPWLTALLARKPTKVAAIALANKIARMAWAMMAKGERYREPIALAR

SEQ ID NO: 329710 - protein, 482 aa, unidentified
MAKTKTTSKAPGGRVTSGSPVKAGSQKRKPARKAKRVHRKLRAQKPANVESRPLLEPNAAGIDIGAREMYVAVPPDRDEHPIRVFDTFTADLNELADWLVACGITTVAMESTGVYWIPVAEILEARGVRPCVVNARHMKNVPGRRTDWHECQWIQFLHSVGLLRPAFRPEAQVCALRAVMRHRGELVQMAGQHVQHMHKALTQMNLQIQHVISDMTGLTGLAIIDAILAGERDPATLAKLRDPHIKARPEIIEKSLVGNWQPEHLFTLKQSRRLYAEYQQQLAECDAEIERLVGEFEPRVDPEVKPLPPDSKKRSRNYAKKRKKRVPKQTAVGEFDLRTEVYKLFGVDVTQIPGLEFLALLLFSEVGRDMSRWKSAACFVSWLALCPDNDISGGRVLWRGARKAHNRAGQLFRMAAYSLDRSATPLGDYLRRMKAKIGPQAAHTATAHKIAVIFYAMVKNQVEYDGTIWEKRDSGAKGRPPT

SEQ ID NO: 329711 - protein, 401 aa, unidentified
MEGPIVSIDVSNGNSHYMCFIKNNKRFGKVKKIDHDIEGFKRLLEDIQKLEAETNEKVCAVFEATGVYTKPLERFLSKNSIKTYMINPLESARKRKEEIHNKKTDKLDPISISKVYYDKEEMMELKKKDETYNWLRKKNRLYEDQLNHLRKYKVTFQNQLSICFPGYLDLFKDGYSDIPMTILKKYPHPDLLKNKKAETVARYLEKNTCHNHKVSLEYALKIIEFAKKTYPGCEKDDVEVEIFKILLDKVIETQRECEKTLNEMITVASTLEEYRYILSIDGIGTNLAARIIAEIGDIEEFKSREALVAYAGLDPHIYQSGDQDGKHLKISKKGNKYLRCLLFLAVGCSIRGAKDNPVNRFYQKKKQQSNPLNSKAAKTACTAKLLKIIYGICKNKTTYER

SEQ ID NO: 329712 - protein, 429 aa, unidentified
MTSASSTTRTVWVAIDVAKQVHQVLIEGPDGGRRALRTANTVSDIDRLVTYLRSLGAPCTVAFEPTGDYHRAVMYRLGQAGFELRQVSSVAVARTRDALFNSWDKNDPKDAQVILHLLKTGTTQRYLEPLVTGHNDLQELANTYQQVSLRKVRLHHAIVTHHLPMYFPEAERYLHSTRAEWFTELLLLTPCPAAVRRYTKPEFIRAVGAQVGGRKVDKARWLSDFYETASGSLGLPVDEETEAMRMFRLVLEEYRQLCQRRKALEQNIVHRLTGHPDFDRLQTIPGIGPILALLILAEARDLRRFGHARQFLKFCGLDLCTEQSGQFRGLTHLSKRGNARLRYALWLAGTVAVRMRQNSFRRKFDDYMRPDPHHADRRRKAYTAVAAKMGRVVYAVITSGIDYRRFPEATRPGGRIPSRGAVEASQTTS

SEQ ID NO: 329713 - protein, 345 aa, unidentified
MEIRTIGIDLGKTVFHLVAVDARGKVVARKKCSRTQLLRFTSNLPPCLIGMEACAGSHFQGRALREQGHDVRLMPAQYVKPYVKTNKNDYIDAEACAEAVTRPGMRFVPIKTDDQLDLQSLHRVRERWMARRTAVINQIRGMLLERGITIARGRRRIEESLPGILEDADNKLSGALRALLGELRLEMQYVHRQIGESNKQIERIADELEDGQHLMTVPGIGPMIATATIAAIANGSAFKKGRGFAASIGVVPGERSTGGKQKLTGTSRRGNKYLRKLFVQGAHAVLQRRTKQDPVLRAWVERLAARKRPQLVAVALANKMARMAWAVLSKGEVYRPPLAAQAAAA

SEQ ID NO: 329714 - protein, 415 aa, unidentified
MDTIYDRVAGLDVHQKFITVGVRCRLETGKLFAEVRTFGTMTRDLRALADYLEALGVTHVAMESTGVLWKPVWNILENRQFTLLLVNPRHVKQVPGRKSDVSDAEWIAQLLQCGLLQGSFVPKRELRELRDLTRYRAQLVSEQTRVANRVQKVLEDANIKLGAVASDVLGKSGRAMLWALNRGERDPDKLADLALGRLRAKIPELKLALEGHFSEHHQFLVEHLLRHLDDLEREIEQISQRIGERLPSILDDQRLRRLDAIAGVNRTTIENVVAEIGADMSQFPDEHHLSSWAGISPANEESAGKRLRNRTTKKNRWLRRAITEAAWAAARTKNSYLSAQYRRLAPRRGKKRALIAVGHSLLVIFYHRLKYDVEYQDLGVDFFDKREPERLRNYLVKRLQLLGYQVCLTPQTDAA

SEQ ID NO: 329715 - protein, 409 aa, unidentified
MLKIVYPNCCGIDVHKTFVVAVIAITNNQGITEYHRKRFSTFTNGLTQLRDWLEYYSCFDVCMESTGKYWIPVFNILEEQTNICLAHPKYVKAIRGKKTDKKDAQWIADLFKYDLVASSFIPPLKIRQLRDLFRYRMKLTQLQVGEKNRYQNCLTWSNLQIASVVSDVFGKSAQAIIKSILDNPQDKPNIEQLVHKRMKNKVQDLEIAMEGALTPEQAEKIRVIKAHYDALAICKEDLEQMIRELGQDYQHQVKLIQTVPGFKEDLSALRIISEIGCDMTVFDSAAKLCSWAGLVPANNESAGKKFSTRISKGGKYLKPFLVQVANAVVKSDKHPELRNKYLKLKKRRGHRKAISAICRRLLVSVYQVLRKQEDYNPVLQGLTEIRNPDKTMSVQDAVRFAQQHGFNVA

SEQ ID NO: 329716 - protein, 341 aa, unidentified
MNVKTIGIDLAKNVFQIHGVDEHGKRLFNKQLRRAQMASFFANIPPCLIGMEACASAHFWANKLISMGHNVKLMAPQFVKPYVKTNKHDAADAEAICEAVTRPNMRFVPVKTAEQQAVLALHRSRQSFIKQRTAQANQIRGLLAEFGIVVPRGIQQLQRRLPELVEDADNPLPVLFRTQLSLLQHHMAYLFDVIATLDKQIEQCYRQNALCQRIGKIPGIGPVTASALIATIGKANNFENGRQLAAWLGLVPRQHSSGGKQVLLGISKRGDTYLRTLLIHGARAVLQSAKHKQDAVSSWANQLMARRNNNIASVALTNKNARTVWALLAKEREYCAPIISA

SEQ ID NO: 329717 - protein, 350 aa, unidentified
MVVVGADVHKRSHTFVAVDEVGKELGHKTVDATTAGHQAAVRWAWDRFGRELRWAIEDCRHLSARLERDLLTAGQSVVRVPPKMMAEQRRIARTRGKSDPIDALAVARAALRDPDLPVATHDQASRELKLLVDRRDDLVKYRTATINRLLWRVHELDPAWAPPARSLDVAKRQQILADHLASIDGIVAELARDELADIIDLTDRVNRLERRISALSAAAAPTLLAMPGVGVLTAAKLVGETAGVARFKSEAAFARHAGIAPIPVWSGNTAGRVRLTRSGNRQLNAAIHRIAITQIRMDSLGKIYYDKKKAQGMSTPEALRCLKRRLARIVFHHLTTDQTTAPANRLAHAA

SEQ ID NO: 329718 - protein, 362 aa, unidentified
MTKTMPRVGLDVHANQTHRAALDVATGELSRRRIQGPPERALDDLARFGEGVIAVYEAGPTGFGLARAAAKRGIDLRIAAPGLIPRGAADRVKTDRRDAERLARLLAAGELHFVRVPTLDEERFRDLVRCREDLRRDLMRARHRLSKFCLRRGLRYLGPGKSWTQRHHAWLAKLDFEDEASAVTFADYLAAVDALVQRRSALDAAIERLWSESPHAAAIARLRAFRGIDTLTAAGICAEVGDFRRFAKPTLLAGYLGITPSERTSDENRRQGSITKAGSGHARRLLVEAAHHYARHPAIGDQLRRRQAGQDPRVVEIAWRAQLRLNARWRHLGQRRGKPAGKVAVAVARELSAFCWEVATLR

SEQ ID NO: 329719 - protein, 407 aa, unidentified
MEVIIERACGMDIHKDSITACIMTPEGKVIQTFSTKTVFLLQLIDWIKEHGCTHVAMESTGVFWKPIVNILEAESIEFSVVNAQHIKAVPGRKTDVKDAEWIAKLLRHGLLKASFIPDRTQRELRELVRYRRSMIEERARQHNRIQKVLEGANIKLGSVVSDVMGVSSLDMLRAIAEGENDPEKLAGFARRSMKKKKAELELALRGYIQPHQRLMIKTILTHIDFLTAQIELLNQEVACRLSTHQEDIERLDSIPGIATRMAEQILAEIGTNVEKQFSSAAHLCSWAGLVPGHNESAGKRKSSAMKKGNKYLKSALIEAAHSVRGSKTYLGALYRRTAARKGKKRAGISVAHAILRIAYYLLTRKEMYVDLGEDYFDKQKEQSIIRYSVRRLESLGYNVTITELGAS

SEQ ID NO: 329720 - protein, 461 aa, unidentified
MCAGRSFKHKCVGLEPCNLIFGETDYFNLSVSVQSLPGPLNTFLRGCVMLRIVYPVCCGMDVHKSFLVACIATTNAQGVTTYLSKRFSTFTGDLRYCAKWLAEHNCRDVCMESTGKYWIPIYNILEPTCKIVLAHPKYVKAIRGKKTDKKDAKWIADIFKHDLVSGSFIPPADIRQLRDLVRYRWKLTNFTTGEKNRAQNCLTVSNIKLDDVFSDVFGKAATAITIRLLDNPAERITNVSAFRTKGMKATDEEILAAVDGEMCVEQAEKLRIIRSHMDSLDLCKSNLESLILSLAEKYLPQLELVMTVPGIQSYAAIGIISEIGVDMSVFPTSKHLCSWAGLTPQNNESAGKKKTTRIGRAGAYIKPLLVQCALCAIRKKSNPEIRRRYENLKKRRGHKKAIIAIARMLLTAIYNILKKNEPYNPELYAHINTPPKQRTVSVEEAIFILQRQGYLVTPNAT

SEQ ID NO: 329721 - protein, 414 aa, unidentified
MDNSPTPRFVGIDLHKHFAVVAAVNAQQRLVLPPMRRIDLDEFPAWAPTHLHPTDVVVLEATGNAWWLYDLLAPLVQRVVVANPLQVKWIAHAAVKTDKHDAIRLAKLLAANLIPEVWVPPLHVRELRALLAHRRALVKQRTAVKNRLHSVLHRQQIKLPSGDPFAAHHRAWWLALDLSPTERLRLRQDLDTLEHVEKQLADLDSELARLSNQPPWNLAMPFLIQLPGLALLSAMTVLAAIGDITRFPTAKQLVGYAGLGTRIHDSGETSSEGHISKEGRRDLRRILIEAAWIAVNTHPYWKAEFERLCRHKPQGVAIVAIARKLLVVIWHVLTERAADHHADPVMVACKLMRWSWELTEEQRGGLTSRQFVRYGLLRLRLGNELTTFTYGGMPRRLASVEEMLARFPDLAESS

SEQ ID NO: 329722 - protein, 403 aa, unidentified
MHQSRTLDVGRDGHKESIAVAYVATDHDAEVISLGTFGTRPCDIDTLIRKLPSKAKHLVFVYEAGPCGYWLYRYLTKKDYVCWVVAPSLIPKKPGDRVKTDRRDAMQLARLMRSGDLTPVYVPAVDDEAIRDLSRAREDTLRDLKAAKLRLKAFLLRHDIRYTGRANWSPAHLRWLSEVVCPTPAQQIVFQEYVQTVTEQSERLGRLELELHEQVQTWRLAPVVEALQALRGVQGLVAVTTVAELGDLTRCANPRQLMHSLGLTPLAYASGARRQQGSMTQTGHTHARRALVEGAWAYREPAPGSRHLPLRLEKLPPAIQVISWQAQVRLGTRYRQRMAPGKQAHQVVVAMARAGSAFLGAMAKQGAGAPQASRWRRVDTHACAVSTLSRQRRSPGVVEPSAA

SEQ ID NO: 329723 - protein, 370 aa, unidentified
MGEITRALIARVGVDLAKHLIQVHAVDAAGRRVMARALKREQFMAWCAQLPAGCVVAMEACSSAHHWARKLRALGLDARLIAANFVSPYRMEGKSGKNDMTDAAAICEAASRPSMRFVPIKSCEQQGVMSLHRVREGLKEERNACINRIRGVLAEFGLVFAKSPKALRAVLAEVIEDASNELSAMARRVLQRAFEHWRELDEHMRWCDRQVGQHVRSSAAAQRAAKIIGIGELGASALTAGVGDFHQFSGGHQFGAWLGLVPSQNSSGGKTSLGRITKRGDDYLRTLMIQGAKSAVMSAGKRDDPTSRWLAQLAARVGWQKACVAMANKNARILWAVMTRDQGFDPRHVSDKPLAKRSAHERIALTCTAA

SEQ ID NO: 329724 - protein, 476 aa, unidentified
MSKTSHIQGNKGISIRNKLKNIDFNQVLVVAIDPGKFFPKALTCNYYGEIIQKPFFFHIDKKGFDILTSNIEIAAEKIHAQKILVGVEATGHYHQKIVQYLNDNDYDVLIINASTTSDIRSENLNWSKTDDIDLYAIATAITENKITESYLPQGIYQKLLRLTRNRRHEVNNRSRIKIKIRTFMDHIWPNFQGESKLSNQNNNSKSVNNIFSDFWSKSSVCIMENYPHPTQILKLGAEGLKNLSKEHELKMRQSTINKLLAFAKNAYTQPVEVLNTEITLLKKKIEDLKHTNDKINYLNEKIEELFVKTPGILLLSLPGISVVIGSEFTAELGPVENYDYAKQIIKRAGTNPVVKESGGKKPIYGSISKQGNPKFRRVIYLAGKTLKLHNPYFKIFAERLNSKGKSGKQVSIACGNKFIKVAFAMLKRKEFFHPPKWDGEPLTKNVYKKLSDDDNITEARKTLIKELELNPEKFVS

SEQ ID NO: 329725 - protein, 349 aa, unidentified
MDRTTYGLDIAKNVMQLHWIDAETGEIGRKKLARAKLAAYFAQLQPVRIVMEAWAARTTGRACSAAWATRWNCCRLARCERFVRSNKDDAADARAIWLAAQQSDIRRVPQKNVQQQAALSLHRTRQHWVSVRTATVNALRGLLYEFGVVLRGGRRAGLKALAEQRASIDEQIPATMRALVDGQLNTLEQIGQRIDQLEREIAALQEQLKGARELDRVPGIGVLGSTALAATLGDAKAWRSGREFSASLGLVPAHAGTGGKVRIGHLSKRGDPYLRTLLIHGARAVIEHTTDKPKWLQELLVRRPPNVVVVALANKMARTAWALIAHGRTYQRDWKSTKPGSGAAQAAGA

SEQ ID NO: 329726 - protein, 486 aa, unidentified
MPRYVGLDVHKQFIEGCFIDEQGKQLHRCRVAVTRESIQTFVAQCLQPSDHVVMETTTNTWEVADLILPQVAKVAIANPLKVKAIAESKIKTDKVDAGVLAQLLRCDFLPEVWIPDKTTRLLRQMCAYRAGLAADQTRIKNRIQSLLAQRLIPVPVPVLFNGCGRNWLSNLELNPQDRVLVDGCLRVLDQLELEKSGLQKALAQLSYDNDQIRLLMTLPGVGAAGAQALYAALGDWKRFKDGAHVASYLGLSPSTRQSANHCYHGSITKAGNSLARWLLTQAARQVAQHPGPLGVFFRRIHKRKNFNIAVVATARKLVTIGFLMLKNAEPYRYSLPGPTQRKLSVFRVEATGSRRSKSKLRLPMQRREPGTRVQSIPSLDEVYFSENLPPVTKADALASGERRMLQQMGIAIFQNAFKLFRRAPINSENSILNQRKIHHDSESLRPSIWNKGLIAGPCISRLGGNSSANFPLSRLTAPEIGSRAAV

SEQ ID NO: 329727 - protein, 337 aa, unidentified
MDHYAGIDVSLERSSVCVVDATGRIIRETKVASEPEALVRFFRELGLPLTRVGLEAGPLSQWLHAGLTGAGLEAVLLETRHVKAALSAMIVKTDRKDARGIAQLLRMGWYRPVHRKSPDAQEARALLAGRKLLQAKLRDVELSIRGILRGFGLKVGEVSKGRFAARIGELIAGHEMLEAVIGAMLRAREGLRAEFVRLHRRMLAIVRGDAVCRRLMTVPGVGALVALTFKTAVDDPERFRRAKAVGAHFGLTPKRYQSGETDVSGGISKVGDASVRTALYEAANAMLTRVSGISALERWAMGVAKRRGMKRAKVALARKLAGACWTTWQTAERLSRA

SEQ ID NO: 329728 - protein, 486 aa, unidentified
MFSLVQDSHVAMFGEAHAIPFERVIVEKLSHPLNFKEYFMESTLECIEPNAAGIDIGSFSHFVAVPQERDSEVVREFGGFTEDLHLMSEWLKKCGIKTVAMEATGVYWIPVYEVLLEQGFDVCLVNARYYKNVSGRKSDVLDCQWLQQLHSYGLLKPSFQPGEEEGKLRQLVRHRANLVRWGATHAQQMQKALAQMNLQLTNVVSDILGDTGMKIIRAICHGERDPKKLAILRDTRCKNSVETIEKSLHGYYRAEIVFSLKQALSSYDHYQQQIAECNGEIEKLTDYFDDKSDGQKVIKKREAKRNNIGFDAQERLTRILGVNLTEIPGINALTALTVIAEIGLSVDKWKNSKAFASWLGLCPGTKISGGKRLGGKTKACKNRASEALRIAASALYRSQTSLGSFLRRMKARLGPAKAITAAAHKLAVIIYTMIKEKKSYDELGAGYYDQLHKERAVKNLEKFARRLGFEITPKKIEQASMTACST

SEQ ID NO: 329729 - protein, 314 aa, unidentified
MADPCSVGIDVSKGTLDVAWSTNPTARWQTTNDDVGWTALVAHVRALQPTIIVLEATGGYEIGAASALSTADLPVAIVNPRQVRDFAKAFGLLEKTDAIDAAVLAAFGARIRPTPRPLPDDLQADLQALVTRRRQLVDMLTAERNRVPLARGAVRRNVLAHIAWLEKQLAKTDRDLRTQIEASPIWRARDHLLQSVPGIGPATSARLLASLPELGTLSHRQISKLVGLAPVPDDSGRRRGYRRIQGGRGDVRSALYMATVTAITHNPTIRAAYRRWRAAGKLPKVALVAAMHKLLIHLNAMLRYQTPWHPPATA

SEQ ID NO: 329730 - protein, 366 aa, unidentified
MEKIYIGVDFHARQQTICYLKTETGELVIAELKHQDKEQVRAFYQQFQGPIIVGLEASGYSPWFEALLEQLGGEVWLGHATEIRRRARWRQKNDRRDAELIWDLMVHDEFPRLHRPAVQSREVLRMLRYRQKLIKLRTMTKNSLQAIALQAGLAKGKQLFTRAGQAEFQVAAMSPVLHWQREHWLALLQPFNQQLLETMVWFKAQSKDDVGIQRLRTHPGIGLLTSLCLLHTLQPVSRFRNARKVAAYAGFDPVERSSAERQRFLGISKAGSRLLRYLLVEAVHTAVRYDEDLKRFYQRLAARRGRPKAKVAAARKLLIRAYIMMRDEIDYAEFRRRAVAVRLARQGHGPTNVPAVLIGQPASPGA

SEQ ID NO: 329731 - protein, 317 aa, unidentified
MCCAGIDVSKPHLDLALVFSTAKPTRFRFPNTPEGRQALLAALAHHRPDWVALEPTGPYHLPLLHLLAQRGFPVALVNPYHLAAFRRAAGERNKTDHQDALLLARYALVYREELQAYTLPPETLRELKALVGYREDLARRERAILNQQEAAHWAGSEEVIPLLQRELACVKELLREVEERIQALLSLIPEAEVLMALPGVGPQVAAAVLALLPPHLWGQAKRAAAYAGLIPEREVSGKSVERSRLSKKGPPLLRRKLFMGALVAVRHDPRMRAFYHRLLSRGKRKKQALVAVAHKLLRCMMGRLREYYANRLGQGVA

SEQ ID NO: 329732 - protein, 403 aa, unidentified
MAAVMIGVDPHKGSHTAVVIGPAEEPLGELRVRASAAQAGKLLEWAAAWPQRTWAVEGAGGLGHLLAQQLVAAGERVLDVQPKLASRVRLLQAGDTNKNDPNDALSVAVAALRSRTWRQVSAEDYPAVLKVWSKRHRDLARTRNQVACRLHAVLCDLIPGGHPKEISAAHAARILAQISPSGAVALARAELAAEFLADLHHLDVQLHATRKKLAAAVKASPTTLTQVFGVGPVIAGTIIGDVGDVARFPGRDHFAAYNGTAPVEVSSGNRKTHRLSLRGNRRINHAIHMAAITQLRHKHSEGRAYYDKKVAEGKTHKEALRSLKRKVSDAIFARLRADARQASAKGPEGQPGNGSDSSAASSHPERQLFGPATPGPDTTIRPATTSDTPAPPKPATKKTRPAA

SEQ ID NO: 329733 - protein, 430 aa, unidentified
MNKTNYISVGIDVGSAFSLMSIVDQHETLILKPFKIIHNNPDSLARSVLAIKKAEESNSMKCRIFLESTGIYHFPLFCHLKESGFEVFVINPLITHSIKNMGIRKVKNDKLDSIGIAKLGLKPDLKTSLMPTELVLELRSLTRNYYDLTDERASHVTAIKTCLHTVFPQYLDIFSDILGTTSKMILRQYSTPDKILRGHKNTMIEKISKASRKGLIRSTECYEKLVHAATCAKSFGCKVDSIYFNIQLKLDLIDCLNLSISKTMERIISLLDEYENHTFVNQIRLLDTIPGVGLLTAVSIMCELGDFSAFKSPKQLFAYFGMDPNVNESGKFKGTEVHMSKRGSRIARRAIFAIALASIRTKRNGEALNPYLYQYYNKKKESKPKMVAIGAIMHKVSNIIFAVLRNNSVFELRSPEQHRNNYRQPELKVA

SEQ ID NO: 329734 - protein, 355 aa, unidentified
MNETRFHWAGLDVAKKSFDAAVVFYGQHYPETKLHEVPCKTFERSPDGVKQLLAWLDEQLPPVDDSHPFSVRAVMESTGKYSQDLALWLLQQTKEPVAAIVNPGLTANFIKSMGLRNKTDRLEARALAFYGVERRPAPYKPLTLAHSELRELSRLRDSFITERVACKNRGEHESPNTFVRKTSTRRIRELNRHIDAIENRIKKLIIKDEALNHDYEILNTIPGVNFVTAAVILAELGDLRRFERARQISAFAGLSPRIHDSGSSVKGKQHMCKFGNRRVRQALYLSAVSAMRFCPSLRKCYQRLLLEGKSKMNAIGAVMRKLLVLMRALLIADEPYNPEHCNGGKTCGKPTASCG

SEQ ID NO: 329735 - protein, 335 aa, unidentified
MKHYAGIDLSMETSHICVVDADGRKLGAACVDSTPEAIAAAVECYGPVDRAVIETGRMTPSIALGLRELGVAIVCIDARQAHQSLKAMKANKTDPHDAAGLAQLARTGFYKEVHVKSPAAHGVRSVITARGHLVEARVRLDNTIRGLCATFGIRLGIGQGERFLARTRVAASVPGLGEAVASLLRARERLVDEIRQLDRQLKAISLASPACQALMSIPGVGVQTSAAFAAAVDDASRFRRSRTAGAYFGLVPRRHQSGELDWTGRITKQGDGTVRKLLYEAANSILTRTRQSFALKSWALKIAKRRGLRKARVALARRLAVIMHAMLRDETLFEA

SEQ ID NO: 329736 - protein, 361 aa, unidentified
MNYNTQNAKIASITEKTLIVGIDVGSETHYARAFDWRNYEYTKKPLEFSNTEAGFLTFKAWMEDLAEKHGKNVVIPGMGPTGHYWFALGKFLQDNGMKPVHVNPHHVKKSKELDDNSPSKNDRKDPKTIAALVNEGRFSYPYIPTGIYAEIRSLSNLRFQTQEELTRIKNRIARWFSIYFPEYKDVYGDVKVVSGRKVLQIAPLPEDIKKLGAEGVNQIWRDAKLRGAGMKRAKTLVSAAEHSVGSKEAPEAARIELRHLLNDLDVYATRLDELLHRIEAILGEIPYVDKLMEIKGIGLITVSGFLAEVGDIKRFDNPKQLQKLAGYAIVTDQSGKHNGESRISYRGRKRLRYLPETSIDQ

SEQ ID NO: 329737 - protein, 463 aa, unidentified
MKHHRKREREANKERVSISLLERIQPDAAGIDCGQNSHFVAVPPDRDSQPVREFRTFTGELYRLADWLAQCGVKTVAMESTGVYWIPLYEILEQRGFQVVLVNARDVHNVPGRKSDVQDCEWLRELHSVGLLRASFRPSAAIVPLRAYLRQRETLVQETSTRILRMQKALTEMNLMLHVVVTDITGQTGLRIVRSILAGERDPERLAQHRDPRCRASHAEIVAALTGNYRAEHLFALKQNFAAYEFLLQQITECDSEIEALLSKLADRQPPPTAPLPDARSKQVSKHTPTFDVRSPLHRLTGGTDLSQIDSIGPHAALQLIAEIGTDMRRWPSEKHFTSWLTLAPSNKISGGRLLSSKTRPSANRAAVILRRCAMSLTRSATALGAFYRRLAARVGKPVAITATARKLAVIVYRVLSGNLVYNDPGATAYHQLHSARELKSLRKRARLLGFHLVDQTTGEVSV

SEQ ID NO: 329738 - protein, 430 aa, unidentified
MKSNTQNKKIEAITEKTLVIGIDVGSETHYARAFDYRGIEYSKKPFKFSNTEAGFVTFKEWILDLKEKHEKDKVVPGMEPTGHYWFNLGKYLQDNEMKPVLVNPHHVKKSKELDDNNPTKNDRKDPKVIAGLVREGRYMIPYLPDGVYADLRTASNIRFQLQSELTRIQNRISRWFNIYFPEYKTVYGKPDAKSGMLILKEAPLPEDILTLGIDGVDQIWRDAKMRAVGKARAKTLIEAAEHSVGSKEGAVSARMEIRMLLEDYESRNMRLQEVMVLIEELVKQIPMAEKLLEIKGVGIKTVSGFLAEVGDISRFNSPKELQKLAGLALVENSSGKHKGETTISRRGRKRLRYLLFEVAMLLVAKNPEFRELHNYYTTRRLNPLKKMQSLMAIAAKLIRVFFAMLTKGVDYDPKKMVSDIKRPAVYLQAA

SEQ ID NO: 329739 - protein, 312 aa, unidentified
MKEPERFVGIDISKEELVVAMRPTAELQSFPNTEEGLAALVRHLQPLQAHTIVLEATGGFARAAVNALALAALPVVVVNPRQIRDFARSVGLLAKTDAIDARIIARFAEAVRPERRPLKDLETQQLEDLNNRRRQIVEMISAEKNRYAMATEKRVRRDIQVHIRWMEKRLEDINNDINDLIKKSPIWRQKEKILTSVLGVGPVVTTTLLCGLPELGTLSARKLSALVGVAPFNRDSGKSRGKRSCWGGRAHVRAALYMAALTASRCNPVIREFYLRLRLAGKPAKVALVACMRKLLVILNAMVKNNTCWQQA

SEQ ID NO: 329740 - protein, 386 aa, unidentified
MDQATPSTASSNTLHCALELSKKSWLLAIQFPDREQPSLYPIAGGDAEGLMAKLTAARDRWAKTSGALPMITLCYEVGYDAFWLARFLKTRGIECLVIDPGSLQVSRRGRRVKTDRVDVKTLLRTLIAWCRGERHVWSLVRIPSIDEEDLRRSHRERSRLVRERTAHINRIKGPLFAQGIRGINVKSRYKTLAVDKLVTGDDHRLPPRLAGEIAREIRRLAMVQEQIAEIERERDAAPITCEATERKRDLLSQLKSVGPTISAFLSREVYYRQFANQRQVGSFLGLTPSPYDSGEVERCQGISRAGSGHAGAIMIEAAWLWIKHQPKSALTRWFVERTAGQSKRVRKIMIVAVARKLAMALWRYVELGLVPQGAIINPPMTRKARS

SEQ ID NO: 329741 - protein, 344 aa, unidentified
MASKAIIGIDTHIADCNYFCMEKQTGEILGAGEFATNATNFIKAVIQFPKPRVVIVEQGPLSGWIERILEKHVEDVVVADTKRNSWIAKDPGKNDLIDGEKLAHLYMGGYIKRIVSRSKEKEELISLVIHYHSLVRESTRLKNQIGAKFRQGGIRKIGIHAYKEESIKDDLRYLWHNKGLQMGVKNYYAQLKVVKKQVEEVTRRMQKLSCKYPEISYLESFPGIGFVGSSTLSALIDIPERFSTIKQLWIYCGYGLDQQSSGGRSRRPRITKRGNRYLKGIVGTAAHNIITVCKDNNVYKHWYNENIKIGKDPNKLKANLARKLIKDIWLGWIEFNKQRLSKAA

SEQ ID NO: 329742 - protein, 476 aa, unidentified
MEQVYRRCCGIDVHKKSISVCVLPPVGSRGVPIKEEQFRTFTRDLKRLRTWLRNCKVTDIVMESTGQYWRPVWNILEEAKFNKMVLVNPLYVKAIAGRKTDRLDAQWLATRLERDDLKGSFIPPKEIRELRDLTRLRVHWLDDLNRIKNRIGQLCETGNIKLSSVATDLFGLSGRRMLTALREGQRDAGWMADYARGRLRNKKGQLELSLQGTFTPHQRLLLGRMLEQMEGLEQQLATLQTEIEQRVLPYKEILDRLDTVPGVDQITAWTVLAEIGTDMEVFGDSRHLASWAALCPGNRESAGKRISGKTRKGNRYVRRALCQSAWAASRKKDSHLAALYRRIRNRRGEQKAAMAVAHQMLIIIFHLIKDGSVYRELGGDYYDQRNKPKVVGKLVERIQRLGFYVTLQPIETEVPAQTDSAVQTQGASEPLPTGPARPKRGRPCKCAERGIPCKHQRLINSPEIGARGEGADVLNA

SEQ ID NO: 329743 - protein, 388 aa, unidentified
MIYVGIDIAKLNHFAAAVSSDGEILIEPFKFTNDYDGFYLLLSKLAPLDQNSIIIGLESTAHYGDNLVRFLISKDFKVCVLNPIQTSFMRKNNVRKTKTDKVDTFVIAKTLMMQDSLRFLTLEDLDYLELKELGRFRQKLVKQRTRLKIQLTSYVDQVFPELQYFFKSGLHQHSVYALLKEAPTPNAIASMHMTHLAHILEVASHGHFGKDKARDLRVLAQKSVGVNDSSLSIQITHTIEQIELLDSQLFHTELEMANLVTCLHSVIMTIPGIGFVNGGLILGEIGDIHRFSEPKKLLAFAGLDPSVHQSGNFQAKKTRMSKCGSRVLRYALMNAAHNVVKNNTTFKDYYDSKKAEGRSHYNALGHCAGKLVRVIWKMLTDNVEFNLE

SEQ ID NO: 329744 - protein, 322 aa, unidentified
MNKYKEIFGVDISKDVFDVHGSKSGHDQFKNNASGFKSFLKSLPKESLVVMEATGYYHYRLAQFLYKQNIIVSVVNPLSVKRFIQMKLAKIKTDKSDAKAICEYGQINEVPLYTALTNVQSECLQLFRLMDSCIKKRTATKNKIHGEEVLDIPSKYVYRSLKRIKKYLDKEILGIEKKLLSLVKQEQQVQLTLLTSIPGIGLKTALFMIVITDGFTKFENSKELCSYVGITPTIRESGSSVRGRSRISKVGNRKLRNLLFLCSFNACKHNKACRDIYERIVNKGKSKKLALIAVSNKLIKQSFAIAKSGLPYNEKYVSVLSK

SEQ ID NO: 329745 - protein, 378 aa, unidentified
MKNTPTSSKNTVKQTAEVIKLGLDIHANKYVVARQIDGSAAQSPQRFTAEGFLAFARKQTRLGGKIYCCYEAGCFGYWLHRKLEEMGIVNYVVRPRNWDEYGQNVKTDNRDANALLDNLDRYVAGNKKALAIVRVPTPEQEQVRSVSRQRDSLSKERKRLEAQGSSSARYYGYSLPLHWWKPKNFEAQREELPEHLFSLLEVWQKLLVAIDASLAKATAAVELSGARLLPVGLGALTAACLDNEICDWYRFGNRRQVASFSGLCPKEDSSGGRHMQGSITKHGNTRVRHLLLEAVWRMFQFQDEYKAILYWKDRIADGPALTKAGKKKIAVAIARQFLVDWWRIQTGRMTPEQVGLKMALPQSPSLSAWRTAQRKASS

SEQ ID NO: 329746 - protein, 358 aa, unidentified
MKKIVIGIDISKEKIDASAIDVRDCQQGVVRLDYQTFDNRPMGFRRMLVWARHLMNGATLQDVLFCCETTGGYDRGLCDYIYGKGLDIWREGALQIKRSMGVRKGKDDKADSLMIAEYAMRHMDKAVIYESPNETIRELKALFLYRHKLVQEKAEKQVRAAHLTDTAAKSRSMRFILHDARRSVKAIQKSIKECEKHILELIESDEEIQRNYGHIVSVKGLSIVNATAFIAYSNNFRGITTANKMASYYGVASFRDRSGSSVDKKACVKYYSCSLLRATITQAAEWTVKENGIYRDYYLRLKAEGKPYGVIINNVKNKLIHLVFSLVTNDTDYEQNHEFLRVKRKTENRKSTQLENIN

SEQ ID NO: 329747 - protein, 437 aa, unidentified
MFMRAPRSTRLLAVREEPTVEIVYERVAAIDVGKKIIAVAVRTPGERAGKRRQEVRKFNTYYRTLTEMVAWLVAEGVTHVTMEATGVYWRPVFHSLCEAERPLEVLLVNARHVKNVPGRKSDALDAVWLAELTECGLLRGSFIPPAEIASIRELARYRKKLIQQRTSELQRLAKVLEDSGIKIDSVASALTTLSARDMIEALINGERDPAVLANLARGKMRNKIPDLTLACSGRFGAQHALMCTLHLEHIDHLTDMIARLDTRIDEASLPFAQQTELLATIPGISERAAQVIISEIGVDMARFPTAAHLASWAGLCPGNNESAGKHRSGRTRKGSKELCAVLTECAWSAGRTNTYVGAQFRRFHRRFGKKGGQKAAVATAHTLIVIIWHVLAETTAYRDLGSDYFTVRIDHPDARKRRLVRELEALGHRVTIEPAAA

SEQ ID NO: 329748 - protein, 388 aa, unidentified
MSKQTAAASAIQISEAGETLMLAMELGESGWLLGFARAFGEKPLRRKIASRDQKALLAQIAWAKERLGLARDARVVSCYEAGRDGFWLHRFLEAHGVTNLVVDSASIEVNRRKRRAKTDRVDLEALLDLLSRHLAGSAKPVWSVVRVPSMEDEDRRHLYRELKLAKKDRTRTSHRIKGLLANQGLTLDLRKDLRGQLERMRRWDEAPLAPGLRGRLERYIEDYNYLTGRIERLEGERRGILREQKGPVLDKVRQLYTLKAVGINTAWAYGTEFFGWRDFHNGKQVGSMAGLTPTPFDSGQRDREQGIGKDGSRWIRAVAIEFAWGWLRFQPQSELSKWYQRRFGHGSKRLRKIGIVALARKLLIALWRFLETGVIPEGALLKTDLRLR

SEQ ID NO: 329749 - protein, 371 aa, unidentified
MNSIVYVGMDVHKEQYTLCCYSYDTDKVEYKQTIPSDYKLVLKYMEQVRSRYKGEVTFVCGYEAGCLGCSLYHQLKDHAVDCKILAPSTMAVTNTHHVKTDKRDAANIARCLAFHTYSEVYVPDNDDNDVKEYIRMRDDQKLYLKKVKQQILAFVLRQGKRFEGGKTYWTIAHLKWLKTLELSDLQRETLDEYLLTYEYLKEKISRFDERIEELASAERYEEKVKHMGCLLGIKTHTALSMIVEVGDFERFEKAPKFASFLGLVPSEDSSDTRVNRYSITKAGNSHLRRLLVEAAQSYTRGNVGHKSVALKQRQKGNPPEVIAYADKANERLRRRFYKMTLNKGVNRNVAATAIARELACFIWGMMTEHVS

SEQ ID NO: 329750 - protein, 356 aa, unidentified
MSNISKLDFTGQHLYIGMDVHKKSWSICILTDHFEHKTFTQPPDVGVLVNYLKRNFPGASYRAVYEAGFSGFWTHDRLREQGVDCIIANPADVPTKDKERAGKTDAVDCRKLARCLRSGELEGIYVPSRTAVEDRCLLRTRRSMVKKQTRCKNQIKSLLAFYGIHIPEDLAQSHWSRKFINWIDEIRMERASGNYSLKAYLDELNHIRRILADLNRNILALSRTADYQANALLLRTVPGISTLTAMTFLTELNNINRFSSLDRLASYVGLIPNTNSSGEKDNTTGITNRRNPALRGILIESSWVAVRKDPALIMAFDKLSKHMTKTKAIVHIARKLLNRIRYVLKNQKEYVPAVVQ

SEQ ID NO: 329751 - protein, 345 aa, unidentified
MLYVGIDLHKQTIVIRGVNQARELVSHGKFFCQETTRIVEFFRQLGRFQAVIEATASYEWLWELLEPLAERLVLAHPGKMRVIAESRNKNDKVDAHVLAVFLALDMIPAAHRPTPRQREHRALVRHRSYLRRGTTSAKNKIRRILSDYNADRKDLFTSEGLQYLAEFKVSAAARLVLDQLLAKWEHLEKQITALDKALKAFAKKAPAAEKEAREVLASIPQVGDGTVDVVVSELGDVRRFSSAKKVAAYAGLVPGQRESAGHKKELGISKQGSRLLRWSLVEAAWRLVRKSPRWCTIFEGISKRRGKKKAIVAVARRLLSVMVAMLRSGKSYRFAASEVQAGLNA

SEQ ID NO: 329752 - protein, 458 aa, unidentified
MKARRTKGKVKALELEVIRRDVAGLDLGSREHYVCAPAADGQGREVERFGATTGELYRLVQWLKARGVRSVAMESTGVYWIPVYEVLEHHGLEAVLVNARALKSVPGRKTDVLDAQWIQMLHSCGLLKGAFRPGDEVCALRALIRERSTLTQAAADWIRRMQKCLDQMNIRVHHAVADLTGVTGMAIVRAIVAGERDPQALAGLRDRRCHKSVEEIVAYLEGNWRSEHLFVLEQALKTYDFLQERLGQFDAQILLQLHALEHPTAAASPAAGDVAPAKLSRMRKRGQQPLHEALRRMSGVDLTTIDGLGVETVQVVQSEIGTDVSAFPTEHHFVSYLKLAPKLAISGGKPVASKKRLSTSTRVGAALRMAATTLRYSKTALGAEFRRLARLKGAGVAVFAMARKLAILIYRLLKFGQAYVDQGVQAYEERFRQRRLAACHSMAMSLGLQILTPETTTP

SEQ ID NO: 329753 - protein, 453 aa, unidentified
MKSYQSYQKKRSNVADKTIIGIDPGKSRHQAVIIDATGIPIGRTFSFSVNHKGYHEKLWNEIKKQLPDYSSLNLLFAVEASCNLWQTISDYLRLEGYSVVLISPMCTKQSRVMLNNDFSKTDPKDALLIALNTQRGYYIEMRDYSERSNNMHTLSISYNKLRKDHSSYQGRLRAAIELIFPEFLEVITLGTKTSFYLLGKYIFPEEYLNMDIEFESLQIGNISRQQYGIKHLQKLQELAKHTIGISSNNALYDRTIVLTWLEGVKEIGSRMKVILAQLIKLASSMKEYSILTNLMGISSETASLFLAEIRDISAFDNYKEIEKFAGYNLRLTQSGKHIGSRRISHLGNTRLRWVLYRMTEETMKYIPEVRIKYLKRQLKKQIYRKNLVSCIPQLLKLIFSLLKENRYYEYYEERVAEMEKLNIQYQVVKAERAAKHRKKRNIITIREELRKTA

SEQ ID NO: 329754 - protein, 251 aa, unidentified
MPCFVGMDVAKAQWDMALRPAGERWAVPNDARGIAPLVDRLQALHPTLSVLEAPGGLERAATAAWAAAGLPVVVVHPRPAREVARATGPWAKTEALEARALAHWAAVIRPTPRPRPDAQTHAWRALLGRRQPLRVMRTAAQHRLAGTSGRLQTDMAAPLTWRNARLATLDDDLATTLRASPRWRENDERWPSAPGLGPVCARTLRRELPALGPLTRQQIAAWVGVAPLHGASGTLRGRRTMWGGRAPVRTV

SEQ ID NO: 329755 - protein, 436 aa, unidentified
MRGCRCSMIMGFTKPIEHFNLQRKKVITMNTLYVGIDVSSKSNVVYLMLPNGDKHSNFSVANSHEGSTLLVKKIYSALTSHSLDTVLIGLEATSVYGVNLVYFLREDATLAPFNRKIHVLNPKQVKKFHDTYNDLPKNDYVDSFVIADCLRFGRINKEVYLGDYRYKALQNLTRARFFAVQNLVKEKQRFMNVLFKKYSTMTQEKVFSDAFSTTALAVYDEFESAEALANMDLHELTDFIIEKGKNRFPDPDAVAKAIQKAARSSYRLPKTVNDSVNQVLSISITSMKALESQIKEFDKAIKALMELLPNVLISIPGIGPVYSAGIMAEIGDINRFDNQASLAKYAGLAWKQHQSGGFEAEVTRLIPSGNRFLKYYLCEAAFSLVRCDKEYSDFYHLKYKEVNRCQHKRALALTARKFVRLVFRLLKDNRLYCPAK

SEQ ID NO: 329756 - protein, 448 aa, unidentified
MVLLTADELEELKKSKPPSKNELKKIAREQKKQIKKQRRKNYKKKIKVDSLKQINEDAAGLDIGISEIYACIPEGRNDENVQRFDTFTSDLYKLAEWLSEHGIKTVAMESTGVYWIPIFEILEKRGFNVNLVNARQIKNLPGKKTDILDCQWIQQLHSYGLLNSSFRPEEQMVALRAFVRNREMLVKYRAIHIQHIQKSIEQMNIKLGTVIKDITGKTGMNIIRSIINGERDTVKLAQFRDPRCFSSEDEIAKSLEGNYKAEHLFTLKQAVRLYDFYAMQIHDCDREIELNYTAIKCYKGNKKELPSLPKKRKRNLKNKPSYDLRTHLYNLCGVDLTDIDGIDALTAQTVISEIGLSMDKWQTVKHFTSWSGLCPYNKITGGKVFYSGTKKVRNRATLALRVAARSLHRSKSALGMFYRRMRAKHGSLKANLAAAHKTARIIYSMLKS

SEQ ID NO: 329757 - protein, 346 aa, unidentified
MEHYAGIDVSLELSSVCVVDAQGRIVREAKVASEPEVLVAFFASLGFAVKRIGLEAGPLSQWLHAGLKRAGFDTLLLETRHVRAALSAMMVKTDRKDARGLAQLIRMGWFRPVHAKSMGSQEVRALLVARKQLLGRLIDVELSIRGILRGFGLKVGVVTRKGFEGRIRELVSGHITLERIARAMLSARATLKVEYEKLHKTVLTIVREDAVCRRLMTVPSVGPLVAITYKTAMDDPNRIAKSKAAGALFGLTPKKYQSGEKDVTGGITRTGDEMARTALYEAANVLLARITRFSKLKRWGMDVAKRRGSKRAKVALARKIAVILHRMWVDGTTYRWTNAQPIAVQV

SEQ ID NO: 329758 - protein, 428 aa, unidentified
MNDVLISVDPHKASNTLAVLDPVTKTPIEEARFANSTMGYRDLMAFANRWKDRRWAVEGCHGAGRSLAQRLVADGELVLDVPPKLAARIRVFSTGHGRKTDKDDALSIGLAALDGEGVQAVSPDDATVSLRLLCDRREELVALRTQAVCRLHRLLLELTPGGMRKDLSARKAASVLVRLRPEDEVAKVRFELATEQLADIEVLDAKIKASHAQIDTLVKATGTHLPELYGIGPVIAGRILAEVGDVARFPTKDHFASYNGTAPIDVSSGDQVRHRLSGAGNRRINHAIHMMAVTQIRQPLSPGREYDERKRLDGKTPKEALRCLKRRLSDVVYRQLVVDNRGRIEGCGSPMTARPTPSTSTSPTGPYNRAPRPASKPGRPRVSRRSSCSTGETTVSSASKSSTQAPDSPKTSSRPRKSSTRRLKTGTA

SEQ ID NO: 329759 - protein, 417 aa, unidentified
MEYARVALPDAPPGGVTAGVDWANDDHAAAIVDGAGRVVQRFTVTDTGHGLKELTRRLSAAGAAEVAIERPDGTVVDALLEAGLTIVVISPGQLKNLRSRFGSAGNKDDRFDAFVLADTLRTDRARLHPLVPDSPATITLRQTCRARKDLVGHRVALANQLRAHLKTAFPGAVGLFADLDSPISLAFLARFDCQDRADWLSPKRLAAWLASVGYCGRKDPAVLHARLAAAPRGATGDDGAAKAHTTRALLAVLAATAEQIKVLDAQIAEQLALHTDAHIFTTLPRSGTVRAARLLAEIGDCRARFPSPEALICLAGVAPSTRQSGKAKVITFRWAADKQLRDAVCDFAGDSRRASPWATKIYNDAIARGKDHPHAVRILARAWLYVIWHCWQDHTAYDPARHKALQRLLNQDQLAAA

SEQ ID NO: 329760 - protein, 437 aa, unidentified
MDEVTDEPLYRDRVCGIDIGKAGMVATIRVPSDRDPARRASETRSFGTTRREVLALADWLRVWQVPAVVMEATSDYWKGPFYRLEAEGFDCVLADAKQVKHLPGRPKRDPSDSRWLAACFERGAITACFVATPEFRVIRLHTRYRRDLTDERSREKQRAEKLLESPAVKLSSVVTDLHGVTGRDIMDHLIAGERNPKVLAQLARARARRKISELEAALEGAEFFTPAHVALLAAMLERIDRVNAEIARLTGVIETLLEPYEEQLQQAESMPGWGRRSAQDAIAETGTDMARFPTGAHLASWAGRIPLDNSSGKRQGNAKSKKGNRYLGGLLGETAIAAGKTQTREGARYRRLARRRGKAKALVAVGNTQLKVYHALLSSPGLRYEDLGPDYYERQASTRRQIAHHVGKLGALGFEVTLCRLPEPDPDPRQAASTQAA

SEQ ID NO: 329761 - protein, 354 aa, unidentified
MTISIANYDLLFPMDVDKKRIHLAVMNKERLIRKVTVPYDPVNLLNYVRNGFPGQKGIFVYEAGPTGYGLHDFLIEKGEDCVLAVPSMIPKAPGQRVKTNRLDAFNLGVQLRTNDLKLVQVPEKKYRDLRHLTRLRLKYGKRIVSTKNGLKSLYLFEGIKFPDGKWSRQVISELQQIKYRSVVEFKVEQLLIDLEFFRIQELKTKAEIRRFCREDQEMNGCIAHLMSLPGVGWTVSTYILGALGGFKHLISVTKTSGFLGLGPRENSTGDKVRRGEITAVGDPSARKMIIQASWVGIKKDLELRSVYDKVYSRNPEQYGKQKAIVTVGRKMICRIHAVLRDQRPFEKRFNKKAA

SEQ ID NO: 329762 - protein, 429 aa, unidentified
MSYRIAGIDVHKKMLAVVVSDVEIESEYQFERRMFSSNPEQLRSLAAWLVEQKAEEIVMESTAQYWKPVWETLERYWKPLCEKREGARRRSGTLHLAQALSNRGRRGRKRDFVDAERLVKRLVARELTLSFVPDAEQRLWRTVTRKKYQLRRDLVRLNNQLEALLEEAHIKLSSLVSDLLGVSARRMLKALADGETNPAALAALAHERLRATPEQLCDALGACTELKPVYRRLLKMTLEHLQILEQQIGQLDQELATLLHPHQDAVERLAEVPGFAVDSAQQIIAEVGPAAATFPSEKCLSSWVGACPGEEESAGVNYSHRSPKGNRQMRRLLNQTANAAVKAKGSIFEIIYRRCVPRLGHNQAIGVIAHRQCRLIWLILHQGTRYEERGPAVTKRSRYQRTWRMIRQLRNLGYRIELPNPQASQAQAQ

SEQ ID NO: 329763 - protein, 401 aa, unidentified
MESPIVSIDVSNGNSHYMCFIKNNKRFGKVKKIDHDIEGFKRLLEDIQKLEAETNEKVCAVFEATGVYTKPLERFLSKNSIKTYIINPLESARKRKEKIHNKKTDKLDPISISKVYYDKEEMMELKKKDETYNWLRKKNRLYEDQLNHLRKYKVTFQNQLSICFPGYLDLFKDGYSDIPMTILKKYPHPDLLKNKKAETVARYLEKNTCHTHKVSLEYALKIIEFAKKTYPGCEKDDVEVEIFKILLDKVIETQRECEKTLNEMITVASTLEEYRYISSIDGIGPNLAARIIAEIGDIEEFKSREALVAYAGLDPHIYQSGDQDGKHLKISKKGNKYLRCLLFLAVGCSIRGAKDNPVNRFYQKKKQQSNPLNSKAAKTACTAKLLKIIYGICKNKTTYER

SEQ ID NO: 329764 - protein, 358 aa, unidentified
MQSNKINFKGQNIFIGIDVHLNSWSVTAITPSGYKRQTSHRADAVELYAYLTKNFPGGIYHAVYESGFCGYSCCYELRELGIDCVIVHAADVPSTQKSRLSKTDSNDSMRLAMSLSNGELNTIYIPPKEVLGDRDILRYRTIVQKGMSRTRSRIKHLLHTNGVSYPREFREPYKHWTRRFIKWLREDVKLLSGKRLELDFLLEDLEHQRSQLLKATGKVRELSRTSRYAEDYGNLISIPGIGLITAMTMLTEVTDIHRFSSQKKFMSYVGLIPVMKDSGETIRQNEITPRGNQRIRRMLMESAWSAVRYDASMAAGFGTYCRRMKKNRAIVRIARILASRTYHILKTRTKYDTALCTA

SEQ ID NO: 329765 - protein, 421 aa, unidentified
MSRQDVKDEVLYMRAAGLDLGKRFLVACVRTPNPARQGTWSLETEQFATTQGEIRRLRTWLVQRRVELVVLEATSDYWRAVYYTLQESLRLMLVNPAHLRGIRGRKSDPSDAAFLARAGASGMVMASFVPDRAIRELRDLTRRRTEMVVARGQEAQRLEKELEDTAMKLTSVLTDVTGVSSRRILQELIGGQRDPAVLANLAVGSARKKIPALIEALEGTFTEHHAFMCQHYLGQIDHVDAVIAMLDARIAMLLSDHDEDLRNLDSIPGVGRRAAEIIIAETGGDMAPFATAANLASWIGVCPGLNESAGVRKSGRIRDGNGNLKRVLGVAAMAAVRDKNSYYGAYYRRLGARRGRQRALVAVMHKLAVAIWHVLHDKTGHRDLGADYFAKRDPERAMRRMTREANTLGLTVRFDPLPQTA

SEQ ID NO: 329766 - protein, 347 aa, unidentified
MLALHPGLDVVIGVDTHKDTHTAAAVGATGAVFEHLTVPADPAGYRQLIGFGRRHGATLWAIEGTGSFGAGLTTALLARCERVVEVDRPQRPARRGGVKSDDIDAVRAARQALAGVGLSVPRRRGDREAIRVLLATRAQAVTFRTRAISALHALVASAPDGLRERLRTLPLGQLLQTCAGLRDSSHRSVEESATVLAMRSTARRALACQREAAELEVQLDRLVRRLAPELLDQLGIGPVVAGQVITSWSHHGRIRSEAAFAKLGGAAPIEASSGTVIRHRLNRSGDRQLNRALHTIVLVRMHQDSTTKDYVQRRLAQGKTIRDIKRCLKRYIARQLFRQLEALTPTT

SEQ ID NO: 329767 - protein, 357 aa, unidentified
MESVGRPVRRSGQSPNSCLGGRARIRQGRARAGALALGGLMEPGLFVGIDVAAAHLDVAVRPGGEAWRVANDEAGIAALVTRVAALGPALVVLEATGGYEAAATGALAAANAPVAVVNPRQVRDFARATGRLAKTDALDAAVLAHFAQAVRPEARPLPEEAALELRGLLTRRRQLVEMITAEQNRRRGVPARVLRQIDTHLAWLRAQLAALERDLAALLKASPLWHAKERALRSVPGVGPVLTLTLLADLAELGTLDRKAIAALVGVAPLNRDSGAQRGRRRVWGGRSPVRAALYMAALAAARHNPVIAPFYRRLLAAGKPKKVALTACMHKLLTILNAMLRDGTAWDPSRHPTLPA

SEQ ID NO: 329768 - protein, 426 aa, unidentified
MKSTQNEKISQIKTWTLVVGIDVAKEIHYARAFDYRGIELAKLLKFSNTAEGFQKLNQWIQDICRQHNKTDIIVGFEPTGHYWFTLGDYLKSQGHRLAIVNPFHVKRSKELDDNSPTKNDRKDPKTIAMLVKDGRYREVYIPEDVYQELREAVAERDRLVQRMTSIDNQVNRWLDIHFPEYQTIFSDWQGKAALLTLRHFPTPEKIVSAGPEKIEAIWKASMKRSAGLKKAQELVKVAEESIGRKTGLVAAEASLQNLLTEYELYRKQYEQLEQLMMDLLKQVPNAEKLLDIKGVGLITAATFVGEVGNINRFQDPRQIQKLAGFNLVENSSGKHNGKTRISRRGRRRLRHGLFMAMITILATNQEFRMLHQKNLTREKNPLTKMQSIIALCGKLIRVFYGLLRNGTDYSAEKMLGDIELGMRAAA

SEQ ID NO: 329769 - protein, 345 aa, unidentified
MDVHAASTTFAVVGPSGKRLGTHVVETNGPAVVEQLKRIAGQRHVCLEEGTQSTWMYEILSPHAEQVVVIGVAESRGLKSDQRDAYGLAERLGTGAIERQVFKQTGAYTKLRELARMHTMIVQDVVRVQNRIKALYRSRGIAVAGQTVYSVHGRQGWLPKLPEAPRCAAITLYAQYDAVEEVRRKAEKDLVQEAHRHPISRVLETCPGLGPIRVAQLTPIVVSPARFRTKRQFRSYCGLGIVMRSTSDWVRTKNGGWARADVQKTRGLNLNHNHVLKHVFKGAATTVIMQLKTEPLHQNYQRMLAAGTKPNLAKLTLARKLAAIALSMWKSGEEYDSTKHCKQDS

SEQ ID NO: 329770 - protein, 360 aa, unidentified
MDIAEGTTGRFVIGGVDTHKDLHVAAVVDDHDRLLGSQSFPTTRHGYKQMLAWMRSFGPVQRVGVEATGTYGAGLLSYLQKASVEVLEVTTPDKGDRRKRGKNDDLDAQNAAHAAFTGRRTVTPKSRDGMIEALRVLKACRKTAVAARRVALQMIHNTVVCAPDDLRDQLRKLTRMELIRTLAAWRPDMTDFRNVVSAYRITLRSLARRYLELHDEIGDLDGMIGAIVDDLAPDLVAQNCIGHESAAQLLLTAGDNSERLHSEASFAALCGVNPVPASSGKTTRHRLNRGGDRAANSALHIIAIGRLRTEPRTKAYVAKRIAEGHSKLEAIRCVKRYIAREVFSLISQRRREINQLPVAA

SEQ ID NO: 329771 - protein, 370 aa, unidentified
MTSTPPPLAFAATIGLDWADKKHDLWIQAAAGGKPEHLVIPQTPEALHEWVAQVRARFVNERIAIAIETSRGAVISALGAYDFIVLFPINPGMLCSYREAFCVSGAKDDRTDAMLLEEYLRLHAVKLRRLEPDTELTRKLAALVENRRGLVDERTRLVNHKALEERLQAIEKAQPLTKDPALIEPAVLKAQALAGLLKVLHQSIELMETRIEQTTDAHPDAAIFRSFPAAGPTMTPRLLVAFGTNRDRFASAQEAQQFYGIAPVKKQSGQSKVIHMRHRCPKFGRQTFHENASHAVRKEGWTKSCYERQRARKKGHHAAVRSVAFKLMRIYFSCWKHQKCYDANLYEKALEKHGSPLASLLKNPAPAVGE

SEQ ID NO: 329772 - protein, 333 aa, unidentified
MNVAGIDVSYKELVVVFSVDGKARKAKTFDNTSPGHVMLIKSLSKLKGEVHVCLEATGIYHFDLAVALSRAEDIKVMVINPKAAHNFAKVLMKRSKTDAIDAEILAIYCERMPFVTWDRPADENIIIRAIARRIAALNKIKAQTKNQYHALNATQETPDLVIEHTEELITLLEKQIETLRGSALEVIQNHNELSEAYNLMISITGIAQASAIQILAELMVLPKNLSARQWVAFAGLDPRQFESGSSVMKKPRISKAGNKYIRQALYMPALVATRFDPNIKGYYVHMVDDNGLKKMQAICAVMRKILHAIHGMLKANKEFDGTRFYVLPVEANS

SEQ ID NO: 329773 - protein, 405 aa, unidentified
MPYILALDVSMGHSYSVLYKDDTCLFEDEIEHTQRGFHALLEEIQHLPERPLIVFEATGIYSRPVEKFFQDHHFPYCLLNPLEAKKQMEESTLRSWKTDKSDAHRLAQTHLKNQRQPKEVQSNFYLEMRDLARFYQEIEKKITRLRMDLHNCLQLTFPELEQFFSNRLTPYALTLIRLFPHPDFVLASTRTKIKNKLINETRKKISANRAEQKADQIIHYAQCAYPAVEKDSIHCQKTIYYAELLQDLLEQKEALATQMIKKAEGSPCFLLYQTFPGIGALTAALLLGELGDITRFKTHKQLNAFVGIDIRRYQSGKYTGQDRINKRGNPKARKIIFFTIRNMIRQQRAAPNHIVDYYYKLKKQPIPKKEKVATVACMNKLLKCMHAMVRAHTEYDYAYAVSVDH

SEQ ID NO: 329774 - protein, 442 aa, unidentified
MATKLVNPNAAGIDVASNEHVVAVREDKSKDSVRTFKGFTRDLHQLAKWLLSCKVETIAMESTGVYWFDLYTILLDYGFEVYLVNAHHVKNVPGRKSDVSDARWLQQLHTFGLLRASFQPDNLTRSLRNHVRQRKNIVQQMSRQTQHMQKAFDQMNIKLNNVIRDLNGATGTKIITAILEGERDPKKLAQHRDRRIKASEQTLIKSLEGNWREEQVFNLQLAYDHYIFLQQQLKQCDAESEKIIQKMTSGNSPKSRTKKIQKSKNNPDFDVAQYLHAALGVDVTQIYGIKEVTALTIFSETGANLKEKFPTEKQFLSWVNVVPNNKITGGKVISSKVKKKKNVAGQAFRDGASALWRAKNPIGDYLRRKKAKSGAKKAVVATARKIAAIYYKMVTEKVEFNPLELTKGKEQYLQKRLKQLEMAKEQTQMLLSDFQQQNSLVI

SEQ ID NO: 329775 - protein, 342 aa, unidentified
MNHYAGIDVSLECSSGCVVDASGKILREARVASAPEALIAWLRSSGFEFERIGLEAGPLSQWLFAGMREAGLAVELLETRHVRKAFEAMPVKSDRNDARGIAQLMRLGWFRPVHCKSMSAQETRSLLTARKLVQSKLHDVENSLRGILRGFGLKVGKTTGQKFAGRIEELVTGHPHLQMIAKALLAVRAVLRTEFAAFEKQTRRMVRSDMQARLLTSIPAVGPIVALTYASAIDDPARFKSSKQAGAHFGLTPKKHQSGETDYTGRISKIGDASVRTALYEAANVMLTKPVKGCSQLKSWAMRIAKRAGMSKAKVALARRLAVIMHRMLADGTPFNAAAAAV

SEQ ID NO: 329776 - protein, 452 aa, unidentified
MPGRKKSGRSSGRLSTINPDAAGIDVGSTFHVVAVPGDRDDKPVRTFRTFSGDLHRLADWLEETGIKTVAMESTGVYWIPVFEILEARGFEVLLVNARDVKNVPGRKTDVNDAQWLQQLHQHGLLRGSFRPRDGVVRLRAYLRHRERMVDYAAAHIQHMQKALMQMNVQLHHVVSDITGVTGMRIIRAIVSGIQAPETLAEFRDVRCAASEETIREALTGNYRPEHVFALRQALELYDFHQVKIAECDTEIEAVLHTLNEERTTPEQPLPSVRHAKGRNEPGFDARPALYTLLGGDLTQIHGFGPYTVLRLVAECGDDMRKWPTAKHFTSWLCLAPGNKISGGRLLSSKTRRSSNRAAALLRIAAVNVGKTQTALGAFYRRLAARTGKAKAVTATARKLAILFYKALLFGMTYVDSGASYYEERYRQRVIQNLHRRARDLGFTLVADSAANG

SEQ ID NO: 329777 - protein, 323 aa, unidentified
MNDKDGINNEAQCFVGLDVSKAWIDAHSLPDAQIGRFENNEQGLEQCLAWVQAQPACLCVAEATGGFETAVASLLASAGIPIAVVNAKHVRDFAKAFGILAKTDRVDARVLALFAQKRRPPLRPLPDETQRQFINLVDRRRQLVAMRAQEQTRLGLAKGLSRESLKAHIEWLSTAIADLDRELTVTVRSSELWLVKSKLLASVPGVGKVTLCTLLARLPELGQLDRAAIAALAGVAPFNCDSGQHRGRRRIWGGRADVRCALYMAVISAIRCNPVIKAFYQRLVGAGKPKKLAITACMRKLLTILNCMLRTNTTWNPELLSNI

SEQ ID NO: 329778 - protein, 403 aa, unidentified
MVFVGIDWAEAHHDVCVLDEEGHVLAKRRVPDGLEGVGRLHALVAEHAEDPASVVVGIETDRGLLVGSLVAAGYQVYAINPLASSRYRDRHATSGAKSDPGDARVLADVVRTDRHQHRPLAGDSNLAEAVQILARAHQGLVWTRQRQVNQLRNALREFYPGALSAFDDLDSADAVAILERAPTPIRGRALSQAKIISALRHGGRERSLEAKAAQIQAQLRLPQLEAPALLAEAYGHSVAATVAIIKQLNLQVAALEQELAASFEMHPDAEIYLSLPGLGVVLGARAMAEFGDDRTRFLHPKARKSYAGTAPITRASGTRKVVLARVARNRRLADACYQWAFSALTRSEGARHRYDVLRARGQTHHQALRALGNRLVGILHGCLTNREAYSEHLAWSAHVEVAA

SEQ ID NO: 329779 - protein, 358 aa, unidentified
MSVYVGIDVHRKRSQVAVVSEDGKVQLNKNVVNGSEPMLRLIGDLPPGTPVAFEAAFGWGWLAELLEDYGFEAHLVHPLRCKAIASARLKNDKVDAAILAQLLRADLLPEAWIAPPAVRQLRALLRHRAGLVRLRTQQQNRIHAVVADFGYDRSGSYLSGPGRGWLAGLELPAVSREIVTDALAVIDGLAPLTNRIDIELRQHAKTDPRVKTLTTLPGVGQFTALVMLAEIGDISRFGSARKLASWAGLTPTVRGSDLTVRHGHISKQGSAWLRWVMNQAAQTAKRSPEFSATYAAIAQRRGKKIATIAISRKLLTRAWHLLATAQAPGPAAPDASTAPQHTPDREGHQAPGELALAA

SEQ ID NO: 329780 - protein, 348 aa, unidentified
MIIIGVDYHPEFQQIALLDQDTGELQEKRLSHPGEAEKFYRALAVSQKVRVGMEASGHARWFERLLGELQFELWIGDAAAIQSQRGRKQKTDRQDAEHILKLMLKDDFPRIWVPSGENRDLRQLLWHRHRMVQARTRIMNQLQAVAINEGLRCKKRLWRTGRQQLALLRLAPWASRRRHDLLELLDRLNPTIAELSQAIEQEAAKCAEARRLMTHPGVGALTALAFVLIIGDTERFQCGKQVASYLGLVPLEKSSGNRRRLGHITKQGNSLLRFLLVEAAQVTVRSLPEWRNKYFHLAMRRGRKIAKVAMARKLAIQLFWMMRKGWDYEQVRKFGPHAGQPENRRGVQ

SEQ ID NO: 329781 - protein, 445 aa, unidentified
MFIQSQDDSHCCYSFFIKVVILLMKLKYSICCGLDVHKNVIVATIVTTNKDGISEYLQKSFSTINSDIQRFHNWLIENNCYHVCMESTGKYWIPIFNYLENDIDVCLTHPKYVKAIKGKKTDKKDSKWIADLYKFDLVRCSFIPPKDFRQLRELSRYRFKLVCMKSSEKNRIQNCMTISNVGIASVLSDPFGKTATEIISYLLEHTADSMDEKAVRKLIKKGAKSKSDEIIEAIKGYTIETDQAKKLELARGHLEYLDDMITQTEVELYVRIKPYYEFVEFVSTMPGMTELSSTIVLAETGVDMDIFDDAKHLCSWCGLSPANNESAGKKKSVRIAKAGDYLKPMMVQCALAAIKSKKQPYFAIKYGRIKKRRGHKKAIIAIARMMMVCIYHMVSEKKPFTPTDYEELMDPQNHVESVVLNENNVFAYLESLGYDSSKLVKRNDN

SEQ ID NO: 329782 - protein, 419 aa, unidentified
MSFKILKNNCCGLDVHKTWIYACIGITDSFKRTEYKQARFSSFTKGLQELCLWLAKYNCIDVCMESTGKYWIPVFNVLEKNNIFVTLSHPKYTKPQKGNKTDRKDAKWICDLYMCGMVKPSFIPPADIRQLRDLVRYRFKLTCMITGEKNRAHNCLTVSNLKLDDVFSDIFGKSSRSITEQILQHPEETFDVTPFVDGRCKTPIEEIQAAIDGAISHEQAVKLRQCLNHIDELEMHKAEIEREIFRLSQKYESVLDLIRTIPGFDKNPLTAIQVLSEIGADMSVFPTAKNLVSWAGCCPRNDQSSRKIKSTRISRAGSYFKPVLVQIANALIKSKKHPEFTTRYRRIKARRGHKKAIIAICRMILTAIWHILTDLKPYTPEGFLESRPVNKEKVLTISQALNLIKQRGYIIKDDVGPVT

SEQ ID NO: 329783 - protein, 338 aa, unidentified
MGVYAGIDLHSSNNYIGIMDQDYKRLFGRRQPNELNNVLKVLEPFKADLEGVIVESTYNWYWLVDGLQEHGYTVHLANPSAIKQYEGIKHTDDRWDSFWLAHMKHLNILPEGYIYPKEQRPVRDLLRRRLFFVRHRTANILSLQSTITRNLGIKMSSNEIKKLDMDDACDLFDSSNLVFMAQNNISTIKHLGKIIKGIEKQVKSQVQLRKEFVMLVTIPGIGTILGLTIMLEVGDIGRFSKVGNYSSYCRCVSSKRLSNGKKKGENNKKNGNKYLAWAFVEAAHFARRYIPKAQRFYQQKMAKANGALATKALGNKLARASYFIMRDQVPFDEDMLFK

SEQ ID NO: 329784 - protein, 422 aa, unidentified
MKNTAARKLKQVPEGYLIIGIDPHKKKHAAVAITQDLTIHDRFKIDNTREGLEFLLQRVKTEMVKSGCRGIMFAIETGGHYWRNIAYYLDERGIPFRFINQYTLKRRREGKDLNKRKNDYRDSEVAAQLLCTGEFVESGIPQGVYAELRTAHNAYRRLVKERTRITNLVKGLLDSLFPEFVHVFKDPCALTALSVLSTCSTPGIIAGMTEGQFIAVIEEQHHGRRLMRKKLGQLRNLAKTSIGIEAGARSLSIEISFLVEKLKLIKGHIQTIERTLIKLVDTSEEGKYLLSIRGLHYIAVAGLLAELGCFKSYRSAKQMIKMAGSNPTESESGGKRRSRTPMSKQGRPVLRYCAWTSVIPMLRFNPDFRAWAKERRERPAHANPLNGREVVGAALNRLLRLSFALVKNQTYYRSPQLVEVTE

SEQ ID NO: 329785 - protein, 341 aa, unidentified
MDQYVGLDVSLKQTWISVRQNRKRIWRGKCLSHPRAVADAIRQHAPNAVLVVFETGALATWFHHALTAEGLPAVCIDARHAKAALDTAPNKTDANDADGLALLAEAGFFREVRVKSWEAMPVRTLVGGRAQLIAISNDLSNQIRGIMKTFGLVVPKGGGRSFETNVRALLEGQAALAGSVLPLLEAWRAVRVQTAKLDRQLVAVARKSPACRLLMTVPGVGTITALSDTTMIEDPANFANSRAVGAFVGLTTRSYQSGEVDYDGHISRRGDKHVRALLYEAATVVLTRVRSDSALRRWGLKLKEKVGFKRAAVAVARKLAVILHALWRDGRVFDPAFGAPA

SEQ ID NO: 329786 - protein, 335 aa, unidentified
MKVFYLGVDVSKKELDLCLRSNGKDILYDVIPNDLSSIKSWLTRTFEKFFLSEDSLVVCAEHTGQYTYPLVCATKSIGVYLCLEDAAKIKYCHGIPRGKNDKIDACRIAMYAERYNDCLQPYTASELIIQKLKNLSTERSMLVADRAKYQSQLKDQVDYMEHSIYIAKCNRVEGIINTFTDYIAQIDLEIKELINQAPVIAHQMDLLMSVDGVGERVALKMIMETDAFTSFTDPRKFCCHAGVVPFVYVSGSSQRSKNRVSNRADKSIKHLLHMAALSVSQVKNSPLKKYYDRKVEEGKNKMSVLNAVRAKLVTIMFAVIRTDAFFSRNYQNSLA

SEQ ID NO: 329787 - protein, 309 aa, unidentified
MSQEKYIGMDVHQATISVAVMDGRGKLMMECVLETKASTVVEFIRGLQGTLAVTLEEGTSAAWLHDLLKPGVSRLVVCDPRKNALLKDGNKSDRMDARKLAELLRTHQLHSVYHGEHGVRTLKELGRSYLSITQDVTRVMNRIKALYRSWAIPCSGSAVYAPRHRAEWLAKIVEPGVRMRAQRLYQQLDGLQPVRLEAGRELLGESPKHPAVKLLRQIPSIGPIRSALLVGLLQTPHRFRTKRQLWAYSGFAVETQDSGEYRCVRGKLQRNRERITVRGLSNNHNNDLKNLFKGAAISASTRPGPFRDF

SEQ ID NO: 329788 - protein, 407 aa, unidentified
METPFAITIGLDVGKSEHHACALDPTGAKVFDKPLPQDEAKLRTLFTTLLTHGRVLLVVDQPNTIGALPVAVARDTGCDVAYLPGLAMRKAADLYPGRAKTDARDAFIIADTARTMPHTLRQVDRDSETLSALKVLAGFDEDLAHECTRALNRLRSLLTQIHPALERALAGTTLSSDLALSLLIKYTGPTGLTTAGKTRVLRYARSHHHRNPTPLIDNIFTALNEQTVIVPATSAVERIIPRIAAQVVELKTQRATVAHEVEAMLADFPLAEVLMSMPGIGIKTAAQILLAIGDGSGFPSAGHLAAYAGIAPITRRSGSSIRGEFPSRAGNKRLKNALFYSAWIASTRDPASKTYYQRKRAEGKRHNAAIICLARRRCNVIYAMLRDGTHYQPPITTHTPDPAPIAA

SEQ ID NO: 329789 - protein, 445 aa, unidentified
MIHRTIGIDLAIRGDHVAQIFDDGRPFGRAIRFRHDPASLNLFVTQALAELGEEGRIQAIMEPTGMSWFPVAHRLADAGVQVCRVKGKRVKALRRYLSEHAKTDLADAQVLAAIPRFGGPKLDPVHIPAARSHALQRLTKQRSRLQDDVSAAKRRLLDLIRWASPHLERVLPDLGTRLSLNVLQHWLAPEATLKARRSTLRKFIADHASGNHPHSGPFVETLIDGLLSAARQASDLHRHHVDFVELQAEVTLEIDIVLNKMTVIGTLERRIAALYAELDPKALLASIPGIGRRLAPALLGVLHTVQRFPSERHMRGFCGLFPRRSDSGGTEKPRQSITQGGNDRAKRALILAADTARRIDPELAEIYWRLMTAKGHHHMQALCAVANRLANRIFSVLRRGQPYILREPGGAPITIDQAKAIIAERYTVPEATRAGRRVNRTQVTA

SEQ ID NO: 329790 - protein, 311 aa, unidentified
MPYANRFVGIDISKSSFDLCILPDEEHATFANTDEGIGAFLALLGRFKGIERLILEPTGGYERAVEASLLAARMPVAKINAKQVRQFARACGQLSKTDRIDAFILADYGRRLETRLLDPRSPAQSLLKELVQRYRQLAHMIVQEKNRREKLTGKTKVLIEESLRFLSDQRQAVTEDMQLCIESDPDLAKKAEVLMSLKGIGLKTACFLLADLPELGTLTKGQIAKLVGVAPLNRDSGLMRGKRMISGGRRQIRDALYIAALPAIRFDPTMKGFYTRLKTNGKPSKVALVAVMRKMIIILNARLRATVPTPS

SEQ ID NO: 329791 - protein, 421 aa, unidentified
MSEDNLSQYSAYIGLDWADTKHDVCVQSAKSEEREFSVVKHNPAALDEWIKELRKRFGGMIAVAVELSKGPIVSVLQRYDFIVIFPINPSTLAKYREAFQPSGAKDDPTDAELALDLLVRHPHRFKPLQPQGAEIRTLATLVEHRRQQVNDKIRVTNRLRATFKEYYPHILEWFDHIDTPLFCAFFRRWPTLLQVKRARAATLRKFFHEQHMYREAVIERRITAIKSSLPLTEDEAIIVPFRLNAEVLVAQLELALEAVDRFDKEIKMVASKHPDYELFKSFPGAGSSLAPRLLVAFGEQRDRFGSAADIQMYAGIAPVTERSGRKHWVHWRWQCPTFLRQTFVEWAAQTINKSYWAGQFYYQQREKGLTYQAACRSLAFKWIRIAYRCWQTGAKYDESKYLKALERRGSPLVAQRSAKIA

SEQ ID NO: 329792 - protein, 376 aa, unidentified
MNSVAVVPLDIHKKFSKAVEMGEGGEVLGEARVSHAGRDEMKKYFSRFPAGTDVVMEATFNWPWIADAAEEAGLRPHLAHPMRAREMAKGMAKSDRKDAIFLGKLWLAGDIFPESYLAPPEVRRMRGLFRLRLTLVSMRTALKNAIHGQLHRQGILISECSDLFGKSGLAILEKLPMKEHERWQLDTKLSVLGDIGLYVKEMEQKIRRELKTDPRAQLLMSLPGVGEITAYSMLAEIGEIERFHNSRALASYAGLLPLDNESAEKDFGKRTGAHCNRFLRWAMIEAVTGAVTASGRMKSLYMRVKNRNKDKPQKARIAVARELIELSHLLLTRKVKYEEKRPPRPGSKEAGDETRPNRASQSALCARSPQASQAAL

SEQ ID NO: 329793 - protein, 426 aa, unidentified
MSEIEAFQQEPGFAAFVGIDWADQKHVWCLQAAGAAQRESGELEHTPEAVEAWVGQLCQRFANRPIAVAVEQVKGALVFMLSKYEPLHLFPVPSAMAANLREALYPSGAKDDPRDADLLLELLLQHRDKLRRLSPDSEATRRIQNLVEERRNLVDEKTAQTNRLTNHLKIYFPQMLDWFERLDTELVCALLERWPTLEELQKVPSARLRAFFLKHRCRDQELIDRRLVGIRQTIPAIRDRAVIEAKSAVVKVSAQLIRSLVRGIADLDRKIEEAAAAHPDFFIFDSLPGAGAALAPRLLAAFGSQRERYGSAREVQSYSGIAPVTVRSGKKKWVHFRWACPKFLRQSFHEWAGHSIAHSEWARIYYQQQRSKGKEHHAAVRSLAFKWIRIVFRCWKDGVAYDESKYLAALAKRSSSLSAVVVGKTL

SEQ ID NO: 329794 - protein, 328 aa, unidentified
MEDQYIGIDLHKAFFQACAVDRDGRRLWEARWPRSDEGVAELRRRCTRGTVLAVEASTPVWHFADAVVDAVGRLVVVDPFKTKLKAGFAAKTDRLDARRLADALRRDSVVGIYVPSREVREWRELCRGRHALVQTRTAMVNQLRALLLRHGLVDRRALARCGDDTWLEAVELPPRARASLRALRQVLLVTRTEVRRAEGVIRALAAADPLARALQELRGIGPILAMMLRAEIGDMGRFKTGAQLASYAGLVPRVEASAGRARYGRITRRGSPWLRWALVEAAVHGPTRSDRVGKWGRRLALRKGALKARVALARVLAEEVHRHWLAAV

SEQ ID NO: 329795 - protein, 360 aa, unidentified
MPMYQLGIDVSKNTLDLCLLREGIKGRIKTRKLKNTADAAKVVAEWLKKQSCELGEVHIIMEATGVYHEPLAYGLHFAGARISLANPHRTREFARGMNILTKNDKVDAWMLACYGSLKEPEAWTPPPESVRYLRALLRRRDALVADSTREKNRLEKSVFTDSPDAVRASIENMLQELSNEIEHLDVLIQEHIETHPELNQDFRLLTSIKSVGYLLGLNMLAILKSHSFESAEQAAAFLGVVPVERRSGTSVKGKPKLSKIGPPEIRTKLYLAALCGLRFNPAMNRPGFPGEYFICELRLPDHYFRWKHNKLFLLLPEEYGPAFPAIVDCYTSPPTLVWPVPLLSGFSSSYGVLPPLCKDH

SEQ ID NO: 329796 - protein, 290 aa, unidentified
MKKNSIARLQVSKSQIRRMATKQRLTVGLDLGDLFSRYCVLNETGEKASEGALPTTKAGLDSMFANMAPCRIAIEVGTHSPWISRQLTALGHEVIVANPRKLKLITESLKKNDRMDAEQLARLARVDPQLLAPIRHRGPEAQGDLAIIRARAGLVDCRTELINMARGLAKPMGERLKKCDADYVKESLADGLSEAAQVVIRPLLKSVEGINQQIEAYDKQIEEIEKRYPETKVLKQVNGVGTLIALTFILTLEDAERFQHSRDVGPYLGLTRKLRDSGFSQPELGIKERL

SEQ ID NO: 329797 - protein, 345 aa, unidentified
MMVTLGTDAHKRSHTIVAVDTAGAEIGSVTVPATTDGHLRAVQWAAQYTKRQWAIEDCRALSRRLEADLLGLGERVVRVPPKMMARARSTARQAGKSDPIDALAVGRAALREPDLPVAQLDGPSREVRLLVDYRETLVHQRTGFQNQLRWRLHELEPGFDPPAGSLNRYCTLDAIDELITTHDSMVADLARRETARIRELTAEINQLERDITRRVTDLAPSLLAIPGCGALTAAKLIGEAADITRFKTRDAYAMWAGVAPIPVWSANPNRFRLNRGGNRQTNAALHRIAITQARIHPDAQAFIKRRIETGSTKREALRLLKRKLANVVYRTLLTDTQTTPLAQAA

SEQ ID NO: 329798 - protein, 343 aa, unidentified
MKEVSTIGLDLAKTVFQVHGVDGVGKTVIRRQLRRGQVLPFFKRLPPCLVGMEACATSHYWAREITALGHEVRMMPARYVKPYVKRNKNDAADAEAICEAVTRPTMRFVPIKTPDQQSVLMLHRTRELFVRQRIMLVNALRAHLAEFGIVAGVGRNGLEKLLEVIADDGDERVPAEARGCLVALRDQLVLAKQQILDADRRILAWHRSSELSRRLDDIPGVGPLIATALVASIPDPQAFRSGRDMSAWIGLVPKQSSTGGKERLGHISKAGNRYLRKLLVVGALSVIRRAKQTGSTRRPWLAALMARRSTKVAAIALANKIARIAWAMMACGTRYREPLSQAA

SEQ ID NO: 329799 - protein, 321 aa, unidentified
MQSNVFIGVDVAKDHVVVAWHDARAPTRSITNARRELGTWLDSLPPKCCLGVESTGRYHELLVGLACARGMRVYLLNPRALHHYAKALHRGNKTDRLDAELIARYVAAEHLRLRPYTPPTASEYQLLTLQRRRAKLVSIRHSLRQSMRDVPDLSEHVQVTLRSFENLINAIDQVVAQLIEREPERRDLAQRLRSLPGFGPLNSHHYATLLPRIDAPNADACVAYTGLDLRARDSGRFRGQRKLTKHGPSETRRLIYLAAQAAARSNPHWNALYRQLLDKGRTPTQAIVILARKLLRIAYHLYRHGGSYDPVRFAQNAGLAT

SEQ ID NO: 329800 - protein, 483 aa, unidentified
MAAKNKDPKTDTDGKSAGAAPEHSGDGAEVAEDRVQVVERAAAIDVAKGSGMVCTRVPGSRPDRRRQKVWRVEATCGEVTALMDHLRCEGIQRLVLESTSDYWRIWHYLAEAAGLEVWLVNARDVKHLPGRGKSDRLDCVWHCKLNERGMLRRSFVPPEPVRDLRALTRTRARLAQDQARHQARVEKILEDALLKISVVISDLFGASGRRFLDALVAGERSPRALAALGDSRLKATRQQLEGALTGRFRDIHAFEIKTHLRLIDAINEEIAHLDEAIEQQLAKVPRTAPCCTACGLAGGGHAPGCPGEDTKVLGLAGRLDEITGIGAVNARVVIAELGTDPSQFPTPGHAAAWARLTSRSRQSGETAKPGRTGKGNRYIRGALGQAAMTAAKTDTRLGALYRRIARKRGKQKAIVAVSRVICEIAWILICDPGARFKELGPDYYHSPRSRARQTRDKIREIERLNPGKKVILAPTDAEADTAA

SEQ ID NO: 329801 - protein, 318 aa, unidentified
MPQKTRFVGLDVAKSKVDACIRSEGLRLSAPSTPEGRAGLVAWVRANRVGRAVMEASGGYERGWAEALRAAGVEVRIVDPKRVRHFAKAAGRLAKNDPIDADTIAWFAEAFPDRQAQPHDPARDEIDRLVAARTALKDAEDRIKQQGEHRPPAVVAKALAAIAKTIRAELRKVEGAIAAKIKANPGFARRAEIIASVPGLAAQTAAGVIAWLPELGHVTNQAAAALIGAAPYDDDSGGRKGQRHIKGGRRKLRNLLYMPVMGAATRHNPMLKAHYQRLRARGKEAKVALIACMRKLIVILNTMLARDQTWNPPVRAAR

SEQ ID NO: 329802 - protein, 411 aa, unidentified
METIFERVGALDVHKAQVNACVRLPGPDGQREPDVVEFQTTVQGLMALHDWLSAHRVTHVAMEATGVYWQPVWHILEEDFELTLCNARHVKNVPGRKTDVCDAQWLCQLMEAGLLRGSFVPPKPQRRLRTLTRYRKTQIAERQREANRLHKALEDNGIKLDCVASDILGASGRAMLDALVAGTTDPEVLADLAKGKLHAKIPALKEALEGRFEAHHALVVGAILAHLDFLDEQISRLSEAIEEQLGPFGQAGTELASTITGVARRTAEVMVAEIGTDMTVFPTARHLASWAGRCPGNDQSAGKRRSGRTRKGSKWLGIALEEAALAATRSKGTYLQAQYQRLKPRLGHGRALGAVKHSILIAYWHMFTNGETYRELGGDFFQRRDPERHTKRLVARLQALGHHVTLQPAAA

SEQ ID NO: 329803 - protein, 312 aa, unidentified
METKFVGIDVSKSVLDFDCLPVSATRQFTNDAEGIAALVNLLKDSGVDRIVIEATGGYETAVGSALAVAGLPVVVVNPKQVRDFAKAMGHFAKTDRLDAKVLALFGERIKPPLRKLPDEAQRALADVLGRRSQLVVMRAQEKARLAMVTTVARKSVEQHIAWLDKCIAKLDVDLGDRLRKSPVWCSKATLLDSVPGVGNVTTFSLLAQLPELGTLNRQKIAALVGLAPFSDDSGKRKGVRYIRGGRADVRCALYMATLTAIKHNPPIKAMYDRLIKVGKPFKLAMTACMRKLLTILNAMLKTNQTWKIQPSS

SEQ ID NO: 329804 - protein, 339 aa, unidentified
MKLYVGADLHANNIFVAVIDKKGKRVEQKKLPNDLPVILEYLKPCQKEIVGIVVESTFNWYWLVDGLMGTGYKVHLANPSAIQQYSGLKHVDDKHDAFWLAQMLRLEILPEGYIYPKEERPIRDLLRKRRHLVKRRTSLLVSLQNIISRNCGIQFRANEMKLLKDDRVSPLLEGNEDLALAGKASKETIDQLTRQIHRIETSLVQRVELKESYRYLLTLPGVGKILALTIMLETGPIVRFAQVGDYASYCRKVPSRWTSNEKTKGKGNLKNGNKYLAWAFSEAAEFARRYDEQARAYYTRKMRKTNFMVAHSALAHKLSRAAYYLMKDQVPFMPDKLFS

SEQ ID NO: 329805 - protein, 342 aa, unidentified
MSRYLGVDLHRNCFTVCVQQENGRQTMSEWKLERLGGFVSRLRPTDAVAVEVTGNTRLFYDAVAPHVARIVVVNPRQFEVIRKSTKKTDVHDARALALFLSKDMLPEVRMKDAEHAALASLAQTRDTLVKSRTALKNKVNNLLSARGINLARESLGSEKGLRAVLGMRFGGTVDVELRVLVEQIRGLNGSIAELEQAMAEQGPKLPGYENLKSIKGIGDVGASVLLSVIGDVRDFPNEGKLAAYFGIVPRVHNSNETEHSGRITKHGSKLGRTVLIQCALIAKRYSPYLQRYYKRIQARRGTGKAIVALARKFLGIIYLTLKDNLVWEDFPNGLIRDGEATA

SEQ ID NO: 329806 - protein, 423 aa, unidentified
MDILYERVAGLDVHKDTVVACVRIVADGKTKRECRTFTTTTEQLAELRAWLEECRCTHVAMEATGVYWMPVFRILGEGQFELTVANAAHIKNVPGRKTDMNDAMWIADLLACGLIKASFVPLEEMQELRALTRTRKQLVREQTRHVQRIEKTLAEANIKLDSVISDIMGASGRRIIEAMIAGVRQPRKLADLASKQIKATPKELYDALHGRLTDHHRFLLELHLRQWDGLDDTIRKIDQEIDRRIGCMDSGAGANQVPFRTLIELVYTVPGVSTVAAPAILSEIGCDMGRFPTAGHLVAWAGLCPGQNESAGKRKSSRLRKGAPWLKTMLVQCAWAAKRKKDSYYRAQFFHLQSRRGPQKAICAVAASILTAIYHILKDGTEHHDLGAGYFDRRPIEVKASRLVTRLKKLGFTVQLQPTVEAA

SEQ ID NO: 329807 - protein, 386 aa, unidentified
MMTMTRTTEFTAMAAASSNRLLVAFELGERAWKLGFTTGLGQRPRVRQVAAGATDRVLEEIARAKRRLKLAADVPVISCYEAGRDGLWLHRWLLAQGVRNQVIDSSSIEVNRRARRAKTDRLDLAGLLNLLARYVLGDQRVWRVVRVPSVEEEDARQLHRSWESLQQDRSRLMCRIEGLLVSQGVRLRITDTFLQQLEAVRLWDGTPLSPGVQERIRRVWTQLELLNQQRDEIEATRAALVPDHDTMTGRYARALPTLRGIGPVGTWVLATEIFGWRVIRNRRELGALVGLVPAPYQSGETARDQGITRAGNKHVRRLMVQLAWSWVHYQPESALTQWYQRRFGSGSKRLRRIGIVALARKLLIALWRYVEHGEIPDGAIVQRHAA

SEQ ID NO: 329808 - protein, 350 aa, unidentified
MQIVGALDVHRRQITFLTLELASGESRRGRISPAAREPFRAWLEQFVGMQAEFALEGTTGWRFIVEEIERAGHLARLADPAETAGRRGRKRRAKTDDSDCALQLRLLLAGELPEAWIPPAHVLELRTRVRLRKTLIDQRTAWLQRLQAQLFHQGVTAGIKPRTLAGRQELATVDVSPAGRDVIELCSRMLDQLDREIGPIDRALGSFARRQPGCRALTEHLYGVGAVTATAILAELGDARRFRSSDDAVRHSGLDITVWQSDQKRAAGHLSHQGPELLRWALFEAAQCAARRSSPDHSYYLQVANRLDHNRACLSVARKLCRRAHHILRELGDAALAPPNAAKTIVGAAA

SEQ ID NO: 329809 - protein, 338 aa, unidentified
MNIVFPGIDLAKNVFQLCGLNQAGKPVYTKRTGRKELLQTLANIPACLIGIEASTGAFYWQREFEKLGHKVKVISPQYVKPFVRGQKNDGNDAQAIAVALMQPTMQFVPPKSPEQQDIQALHRARQRIVNHRTATVCQIRGLLLDRGIPIGSAVSRARRAIPLILEDAENGLSSRMRRTIAELYDLFNDPERRIHFFDKEIETVFRQSEACQRIAKVKGIGPETATAVVAAIGKGTEFKNGRHFAAWLGLVPRQHSSGDRQVLMNMTKKGDKHLRTLFIHGARAVVRVATNNNDGHMNQWVNQLKERRGFNKTTVAVANKNARIIWSMLRNETEYQVV

SEQ ID NO: 329810 - protein, 336 aa, unidentified
MISCGLDIADKTFTASCLTINPGALLDFKLVFYAQTFEQNVEGWEKLIKLFAAHHITPADAWIIMEATGVYSEKIAHYLYECGFAVYVEPPQKVKKAFQEREKSDPVDSRQIAEYGCRFFDKLHQWRPPDEIVEQIQTLLTARELFSKVQTACKNARKSLQRKQRSFEQIENFHSGIVKECQKNIHAIEEEIKSLIKQNPRLQQIVSDLLTFKSLGFVVIIYLLIATDGFREIEYRKLASYIGVCPFPYESGTSVKRGKHADGAGPANLRKNLYLASMRMMRTHPELKQYYERKLSEKKSGKLALNNLSNKILRIVCGMILSGKPYMKHYRSSQPE

SEQ ID NO: 329811 - protein, 420 aa, unidentified
MQVTQSSEIAAFVGLDWADQKHVISLQQASTDQVQRLALDHTPEALQNWIQTLRDQFKGQPVAIAVEQKRGALIYALMHVDFLHLYPVNPQTLSQFRKAFYPSGAKDDPVDADLLREILMTHRQRLRVWVPDDELTRSIQLLTEDRRGLVDARTVLTNQLTAALKSYFPQALDWIGDLHTVRACAFLQRWPSLQQFQLSTSSSVRKFYKAQGYRGEDRLEQWVSNIKQALPLTQDRAVVLAGSMKIQALVPQILMLTQSIQRYDQQIAEFFDQHDDSTLFGSFPGAGPSLAPRLLAAFGSDRGRFDCAAEMQHLSGIAPVTEKSGTAIWIHWRLACSKFLRQTFHEFAGQSIIKSEWARAYYEQQKQRGKSHHAALRSLAFKWIRIIFRCWKDGKPYDEAHYSASLQRRKAHPSDSPATS

SEQ ID NO: 329812 - protein, 329 aa, unidentified
MTNAAVEHDASSLQFVGVDMAKKAFVWGVHGTSQTHSCPNEESGFQALLDGLRGQRIELIVIEATGGLERALAGFLLRHGMPVAVVNPRAAREFARSMGHLAKTDAIDALALAHYAQTLAAKTDQAGVRFAPPSEQVQALQALVSRRAQLLGMRTAEKNRLGAAIRVLRPSIQAVIKTLEREIAKLDKNIDAQVHEHFKAQVKRFEDIKGVGITTCATMLAFMPELGGVANARAAKLAGLAPLNQDSGKARGKRHVWGGRSIVRSTLHMAMLSAVRYNPVIKAFYDRLIAAGKPKKVALTACSHKLLRILNAMARSGKPWDSQLHGVSP

SEQ ID NO: 329813 - protein, 521 aa, unidentified
MSRSRSNRSAKTRKAFLLQKPTGAFTPRVQAVGPEHFGIVAIDCAKARSRYLLADFYGRTLLEPTTLAHTAGDFHNAIARIRQGVQQHDLRDLVVAIERTGEYHQPVQRAFRQAHFETRLVHPFTAKQYRQPADPGNKTDDTDLAAIFRATTQGFGLSQPTWPDTYVTLQLLRRHRRDLVFKNTILCCQIREILHAAMPGYAEGFDRLWEAPTALMLARLTTSAQAVLQAGREGLHQLAAAADIPCPRGTLDKILAWAQQAPPGHDQTLILRDILNALDDDRRTKDQHILALERRLAHLVCATPYVLLLRIPGLNIVSIADVAGELGPINLYLNANAITGRAGLMPCRYQSDRVDCPNGPLQRRGHRRLRAVLMQAAANLALYNNHFKARAQLWKHAGKDPRWIRVKVAKIFSRLLFASVAGRQLFPHPCCQPRHYILDKLLTFHQEHRTPPEQIRQDLEAVVDFLPASARADEAQPLQGLLDQQAKRRRGPQPLASLIPLVLARLGRTAVQSTDSESAGP

SEQ ID NO: 329814 - protein, 520 aa, unidentified
MISSESDIRRHCIFSLQPALSVTAMKAFSLAHMAHSGNTEFSSLPEAPARTAGQVHAHCARFRSPYAAQDKPSVLGSTNPDRNGGDIMIKINYMSTLFVGIDVSSKSNVVCAMDFDQNKYISSSFGNNQPGADDLADMLADCMQQHKNLDTIVIALESTSVYSVHISNFLSTAEVLMPYKPLVFCVNPTATANYRRSYIGMEKTDPTDAFLIADFARVGRIKNLNPWRGAQFIALKRLTRHRMHLSECLTREKTYMVSNMYLKFSELQLLDDENQPFSNIHGATSSAVLTEFLSPQEIIDLSEEELLKFLAAKSKNRISDLSKTSELLRKAARDSYRLDKCMYEPLNISLASSFNCIHTFQKELKLVDHAIENCINGMTPNALIILKSIPGVGPLLASGIISEIGDITAFHSSDALAKYAGLYWLKNDSGNFVSEDNQLSRAGNAYLRYYLGEAANSVRRYIPEYREFYEKKYAEVTKHQHKRALALTSRKFVRLVFGLLVKNQLYTGEQLDAEPNIVSN

SEQ ID NO: 329815 - protein, 315 aa, unidentified
MEQPATSPSFVGSDVSKDRLDVHVRPSGRTSAAARDGKGLEQLTNELRDLTPALIVLEATGGFEITVAAALASAGLPLAVVNPRQIRDFARATGRLAKTDSLDAQIIALFAERVRPEPRPIADADSQALAELVARRRQVVEMIGMETNRFRQARNPRVQRTIKATLKTLEAQLAELDREINDTVRGSPIWRAADDLLTSVPGVGDVTSRTLIADLPELGQLDRRRIAALVGVAPVNRDSGQMRGRRTIAGGRTDVRNALYMATLSATRWNPVISQHYKSLVERGRPKKVALVACMRRLLGILNAIIRTGTPWQNA

SEQ ID NO: 329816 - protein, 340 aa, unidentified
MTITTIGLDLAKSVFQAHGIDESGTTVLVKKLHRKQMLPFFSKLPPCLIAVEACGTAHYWARTLAAMGHEVRLIPPSYVKAYVKRGKSDALDAEAICEAVQRPTMRFVPVKTIEQQGILMTHRARSLLVRQRTMLANALRAHLAELGHVANPGISNLAKLAEQVMADTNALPSYARAALEILIRQIMVVSAEIAELDQQLATWHTESEASRRLAAIPGLGIITATAIAATVTDAEQFSSGRQFAAWLGLTPQQHSTGGKTRLGGISKQGDRYLRRLLVVGATAVMRHVKDKPTPMADWIRTLSEKKPFRLVSVALANKLARIAWVVLTRKEAYHPYANLT

SEQ ID NO: 329817 - protein, 377 aa, unidentified
MKIKAYLGLDVHKNSIVVAVAKADGSEPFSYGKWGGSNLSAERGLLKLLKSLDLGKEEISIVYEAGPSGFVLARRLLQLGYECIIVGPSEVPSKAGERVKTDKRDARKLARFHRAGELTAIHIPEARDEAVRDLCRARSDASQALARSKQQLGMFLLRNGFRYEGKSNWTQAHMNYLRQLRMPHPAQQLVVEEYIMEVDAGVARVDRIEQHMKDLLPSWERQPYVRALMAFRGFQEVAAMTEISELGDLSRFSHPRQLMGYLGLVSNEHSSGEKRRQGGITKTGNGHARWMLIECASHYSHAPRVSPNLSARQAGQSQEVKAIAWRAQNRLNYRFKKLSARSLHRNKVVVAVARELCGFIWELYQQVTKEITAKVAA

SEQ ID NO: 329818 - protein, 340 aa, unidentified
MSQNKTNSDNINIIYAGVDVAKLTLELNLGEVNYSLANETKDHRRIMKLLAEAEKAQPGSKVHVIVEATGGYEAKLVRALQEAGRLVSVIQPSRVRHFAYAKNQRAKTDRIDAPILSQFGQAIRPTPTEAPSLAQSRLSELVDRRAQLVQSHSAELNRAGHYIDRFLCRQSRQLLALIDRQIKACDKAIAAQIAADEGMKTRAKRVQEVPGVGPVVAAVLQAAMPELGTLSDTEAAALAGLAPYNYDSGPRQGSRRIWGGRAQVRCALYMAAMSGVRHDPILKNFYLRLRAAGKKPMLALTAAMRKQIVLLNRLLKNPDFKLAARTKTSSAAQAQHVCTN

SEQ ID NO: 329819 - protein, 412 aa, unidentified
MRVMVERSAGLDVHQASVVACVLTGRSDGRLRKAVRSFGTTTAELVALRDWLKAEAVTHVGMESTGIYWRPVYAVLEGQFELIVGNARHIRNVPGRKTDVKDAEWLAELVCHGLIRPSFVPPKPLRELRDLLRYRRKLVEDAAAERNRLQKLLETANIKLASVASDVLGVSGQAILRALIAGTASPAEMAELARGRLRRKRPELALALDGRVEEHHRFLLAMQLRRVEVAEQDVGLIDARVAEKLVPYAVEMALLMQIPGVDWVVAAVLIAEIGTDMSVFVSAYHLAAWAGVCPGNNESAGKRRHGPARKGNVHLRTILVGAAICASRAKGTYLRDKYYRLKARRGALRAALAIAHKILVAAYHMLSQRVPYRELGASYLDHIDQTRTATNLKRRLERLGYVVSLQPKELAA

SEQ ID NO: 329820 - protein, 315 aa, unidentified
MASICEKRVTIGVDPHPGSHTATAVSRLGEVLGSITVSNSAAGQEKLREWAEQHRYRCWAIEGAGNRFVEPLVTELLNDGEQVYSIPPSMTAQYRSRRGRKKDDEVDAENAAKALLANPGISHYLPTGYEQRLKELTRSYQRLSHQLKASRMASKAIGDDLISQVTLKVVRALEDALATLKREIEKTVRKVAPELLEIRGVGPIVASVVLAEAGRITRFANRDHFVAFAGCAPIRWESGAHQTVRVNPGGNRRLNWAAHIIVISRLRIDTNTKAYRDRKLAEGKTQRQVIRLLKTYACRELYKNLKRRQLSAVGA

SEQ ID NO: 329821 - protein, 359 aa, unidentified
MKIVGCDFHPSWQQIAVFDPETGELTEQKLVNGDGEAERFYRQLEAPALVGIEACGNSQWFIELLEQLGHLVWVGDAAQIRASYVRKQKTDRRDAGHILKLLMESRFPRLWTPTAEQRDLRQLLIHRHKLVEIRTRVKNGLQHLALNRGLQKKSSLWSVRGRACLEKLPLTGWTARRREDLLKLLAELDRHVAELDEAVGRAAEEHSQARLLMTQPGVGPITSLAFVLTIGDVGRFKHSNQVASYLGLIPREHSSGGKQRLGSISKQGNRFMRQLLVESVQTVNRLDEGFRKEYAARCHHKAKGVAKVAAARKLAVRLYWMLRQNVGYPEIALIESSSRVPLTGGSHVATLNEHSRIQQ

SEQ ID NO: 329822 - protein, 314 aa, unidentified
MSKKEIFVGIDVSKNSLDVAVLPDVQAWSTANNETDIPLLVERLGQLAPTLIVLEATGGLEVLVASALGAARLPVVIVNPRQARDFAKAMGILAKTDGIDCRVLALFGEKLRPEPRPLKDEQLQELNTLLTRRSQLVVMHTAEKNRLSSSPNSIRKDIQQHIDWLEKRIKDMNNTLGQRIKESPLWREKDLLLRSVPGVGPVLSISLVTGLPELGNLNHKKISVLVGVAPLNCDSGTYKGKRKIWGGRASIRSALYMGTLSAIRHNPVIKAFHARLIAAGKANKVAITACMHKLLTILNAMIKNSTPWNPQMSN

SEQ ID NO: 329823 - protein, 523 aa, unidentified
MATVVSTRKTSPVRKESSAFRYSAGELAALVRQVGVERFAFVCFDPAKHRSRWRMADFLGNPLLVPASVEHTAGPLQAAVASVRRTMQQNGIQVVWVIVERTGQYHLPVQRAFAEAGFETRILHPCATSQYRSAVSPDVKTDDIDLYAQHLASVAGFGLVELPLDETYRRLRLMARHRRDLVKKSSTLCSQIREHLHLVMPGYAQCFEDLWLCPGAVPIARHTGTPQAVLDLGLAKLARKLKEDGVRIQERTIERVIAWARQAAPPAPDAAMHQRIWTALDDDRLAKRREIQGLERDLASTLVCTPYVLLMAFPGINVVLAAELAGEMGPITHYGNPNAISGRAGLFPRRYQSDTVDLANGRLARRANRRLRSALMRIADSLVMNNHYFRSQAELKRKQKVDERDIRVRVAKKFTRLAYAVLAGQQVLRHDCCKPGDSILLKLSEFHRLHHTDTKQVLIDLQAVVDQLPKKAYTQEAKSLSERLATETSRSRGPSPLGALLPAVLAKLTAKPTEESSEAQASR

SEQ ID NO: 329824 - protein, 370 aa, unidentified
MSQSSTLYVGLDVHKDSIAVAYVAKDHDAQVISFGTIGTRHADIDQLTRRLQSKAKRLVFVYEAGPCGYWLYRYLCKKGYDCWVVAPSLIPKKPGDRVKTDRRDALQLARLMRSGDLTPVYVPKVEDEAIRDLCRAREDALRDLKAAKFRLKAFLLRHDIRYTGQATWNPAHLRWLSEVVCPTPAQQIVFQEYVRAVNEHTERLQRLEQELHEHVQTWRLHPVVEALQALRGVQFTVAVTTVAELGDLTRFDNPRQLMAYLGLTPSESSSGPRRRQGAITKTGNSHARRALVEGAWAYRYPAKVSRHLQLRLEQQPTVIQDISWKAQVRLCKRYRQLLARGKNANQIVVAIARELVGFMWAIAREVPVTP

SEQ ID NO: 329825 - protein, 387 aa, unidentified
MPQPNDLSRSLVALDQNSTIIAVVELSQSSWLVAGVLPGVERQPCKKLEPNPEGLLVLLHRWRDEAVRAGRTITRIALAFEAGRDGFWLARWLEARGVEAHVIHSSSVAVSREHRRAKTDRLDTELLKRGFLGWLRGERGHCSMARVPTIAEEDAKRPNRERECLVGERTRVVNRIKSTLARLGIRNFKPTLRKAAERLASVHTPEGIPLPPNTLAELQRDMARLGFVVSQIRQIEDARQKRLEQQPETGSHPMVRLLARIVGVGVETADLLVHEVLSRPMRDRRAVARYAGLTGSPDESGAQRREQGLARAGNARVRRGMIQLAWRFLMFQKESALAMWYRARTADSRRGTRKTMIVALARKLIIALWRFVTTGETLEGVILRPAG

SEQ ID NO: 329826 - protein, 345 aa, unidentified
MKTFFIGIDVSKEKLDATLIRYESESDSEQQLAYTTVENNPKGFRSLVSWSKKNAGRGVKTDTMLFCCETTGGYDRALCDWLYDNGLNIWRESALQIKRSMGLRKGKDDKADSEMIAYYALRFRSQATLYKPLDGNMRSLRDLFLYRQSLVADRQAKMVSSKEKQHISSKSKVDNFIYRDAQKSIDIMTKSIKECERRMLEIIKEDEEMYRNYLHLISCKGVGLITSVMLIIYTDNFKSWNAKKMASYCGIAPFYESSGSSVFHKANTSGYSNRRLKGILTQAARSAITHNPTLRQYYLRMKAQGKPYGVILNNVNNKLVHILFSLVLHDCDFELDHEAKRALRA

SEQ ID NO: 329827 - protein, 416 aa, unidentified
MGNRREKACGADIHKNKIVATILSLAGTKNQAEFGTTLPELSRFKAWLIDNGCDVVAMESTGTYWIPVYSVLENCIEVIVANPYMIKHIPGKKTDLTDSEWIAELCLKDLIVPSRIFPEEDRVFRSLTRAREGLVKIRTQLKNRIHKDLSSSHIKLSSVVTDIFGKSGTHILRGLLDGRSIDEIIEGIPSRRIKKKADEIKASIENNLYPSQIFLIESSLDLMGCVQDKIDRIDMDLKRKISTRQKDLKIAMSIPGIEFTSAATILAEIGNYRNFSSPEQLASYFGLVPFVNQSADKLHNGCITKHGSKHLRWIMVQVAHAASKKIGSKLRKFYLRVRARKGANVAIVALARKILCILYHLLINQEMYEEQGVAKRSRPARVDRLSPPRKLTAQEMIDILLKMGYELTKIDRGACG

SEQ ID NO: 329828 - protein, 386 aa, unidentified
MTDKTLQTHDTQPVRLLVALELSLKTWRLAMAVAGAPKKRFKTIAGGDYVALGQAIEECKTKCGLDVAAPVVFCYEAGRDGFYPYRQLTAAGHTVWVIDSASIEVSRRKRRAKSDGIDADKLLGLLQRYVGGETTALRVVRVPAVAVEDLRILPRERETLLKERQRLRNRIEAALFGQGYRELPKTAKRLAAWLQERTDVGDYLKARLDREVARLALVEAQLREVEARQAEVIQTETGTAAASEVLRIAQALQGLVGIGLVGAWVLACELFGWRDFHNRREMGGALGLTPTPYSSGEDPREQGISKAGNRRARSMLIELAWLWLRYQPDSALSQWYRTRFASGGKRPRRVGIVALARRLAVALWRYVKTGAVPEGAKLKPVSVAAN

SEQ ID NO: 329829 - protein, 457 aa, unidentified
MQQPVEVAVDEQEQIVERVAAVDVAKASGMVCLRVPHERIPGRRVTKLWQVGSTTAALLELGDHLRCERVQRVVLESTSDYWRPFYYPLEAAGLTVWLVNAAQAKNVPGRPKTDKIDAVWLAKLAERSMVSPSLVPTEPMRRVRDLARARFDLVEDRTRVKQRIEKLLEDALIKISAVLTDVLGVSGRAMIEALIAGQRSPQALAELATGRARTRRAALEQALHGRFTDHHAQLAQMLLGQLDELTARITRVSVLLDAAISALPEPTPTDAGQTGRVGQTDPNPSATTPARAEYNTAVARLRAVPGGGPDSVRAVLGEIGLDMSVFGTAGRLCSWAKVAPRTVQSGRKHGRARTSKGNPYLKSALAQIATGAAKTDTFLGERYRRLIKRMPKAKALVALQRSILVIFFHLLADPTTEFTDLGSDFSTKRIDRARRANHLPRQLHALGYQVQLTEATA

SEQ ID NO: 329830 - protein, 381 aa, unidentified
MKRLRFVGLDVHAETIAVAAAEPGGEVRSLGVIPNRADTIRKLMKRLGPVEQLRACYEAGPTGYVLYWQLTEMGVKCEVVAPTLVPVKAGDKVKTDRRDAEKLARCYRAGDLTPVWVPNAEHEALRDLVRARLAAKRDQLRHRHRLQKFLLRHGRRPPEKVKSWTEAHLKWVRDAVHFEQPAQEATLSDYLNEVERARERIQRLEHAIDEAIVTMPERMRAVANALQALRGIAKVSAVTVVAELGEISRFEKPKQLMGYAGIVSRENSSGERERRGAITKTGNAHLRRIVIEAAWSYRHRPAKGPELRKRQEGQSEEVKAIAWKAQHRLHARYRKLAAMGKVKQKVVTAVARELLGFIWAIGVEVERKTSATTSSKGRLAA

SEQ ID NO: 329831 - protein, 388 aa, unidentified
MEQVIIGVDPHKLSATIEVVDKHEKLLGSGRFTTDRAGYAAMRKYASTWPERVWAVEGSNGAGRPLAQRLLEDGQQVVDVPAKLAARVRLFDTGHNRKTDAHDAHAVAVVAVRTKNLRVLQLDGELEALRMLTDRREALTRRRVQTVDRLQALLAELLPGQAKRDITTGQARAMLAGVRPRDIAGKTRRRIAAEELAELVAVETKIKKATAELKEIVIARGSHLMDLHGVGPVVAARVLADTGDVTRFADRNRFASWTGTAPLDASSGEQNRHRLSRAGNRRMNHMIHIAAISQIRLDTEGRTYYRRKRAEGKKPLKAIRCLKRRISDAIYRQLLDDLEQATGPTDGTGPGGHCGATLKSSAVDLPPHIDTSDQPLPGPAGKTLRPTG

SEQ ID NO: 329832 - protein, 411 aa, unidentified
MNTNAITAVGIDVSKGKSMVAARCPGGVVVLSPFCVKHDAKGLQTLVEELKNLDGEVRIIMEHTGMYWRPIALALQKAGFFVSIINAMLIHDFSGNSIRKIKTDKADSLKIANYGLTFWTDLRPYSAEDETRQMLKTQSRQYERTTNSSVILRNGLISMLDQTFPNANKFFIASPRTASGHFKWVDFVRRFWHKDSVASVSLASFADTFQKWCKRSGYRFSYEDAEKIHHAARNAVATLPRNDSTKILITQAVDSLNAIYDALQIMRNEMYRLASMLPEFDIVMKMDGAGKITGPQLMAEIGDVRRFTHKGALVAFAGVDAPPFQSGTFDSKSRHVSKKGSPHLRRVLFEIVSMIFVQGNLENPVYCFMDKKRAEGKHFYVYTVAGAAKFLRIYYARVNEYLLSMEPQAAS

SEQ ID NO: 329833 - protein, 387 aa, unidentified
MPEQFDSHNAMAAFDHDSTLVVALELSGKSWQAGAVVPGVARRPRRRLEPRDIAGLLKAIERWKAEAAGASREVRRVALTYEAGRDGFWIARDLLARGIEVQIMHPASIPVARPGRRVKTDRIDLDMLLRTFLAWLRGEPRVCSMVRIPSEAEEEMRRPGRERERLVGERIQLENRIENLLCLHGVADFRPRLKKAAERLDELRSFAGAPLPAQTMAELRRLMARHRLLSEQLREIEAERDRVARVAHPDGAERMIQHLAQIVGLGLETATLLVREMFCRPFRDRRAVAGFAGLTGTPFQSGGMAREQGIGKNGNPRVRRIMVQLAWRWLRFQPQSALAQWFAARTDGAKGRIRTVMIVALARKLLVALWRYAGTGEVPAGARIAAA

SEQ ID NO: 329834 - protein, 328 aa, unidentified
MCTLGIDVSKNKIDLCLLTAGPGGKKKHKVLTNEPAVARKVVDWLNAQKCVPESVTVVLEATGIYHENLAYGLHEAGVSVCMANPCRVREFAHGMDILNRNDAVDAFVLACYGELKSPAVWVPPSPEVRKLRALLRQRDALREDVQRTVNRLEKANSTSTPQEVIRSLERTKSWLNEELARIEKLITDHTDNDPGLKADLDLLKSIKGVKEQVGREMLALLKDGMFKSASQVAAYLGLTPVEKTSGSSVRGRPHMSKTGPSGVRAKLYVAALTASRWNKQAKAIYERLVAKGKAKKAALGAVMRKLVHLCFGVLKTRLPWDENYVATA

SEQ ID NO: 329835 - protein, 343 aa, unidentified
MYIGLDVDKKLSYYSMVDGEGTEMKRGRFPTTCKGLDEFASKLPEGAKVAIEASTSGIFAYEYLDERGIEVHLAHPVYVKPFAKKHVKTDKVDAGVLAQLLRMDYLPESYVPGKEIRDQRVMIRHHASLVRLRTSVKNRVHALLAIEGIQTSEFSDLFGKRRMEFLRGVKLREVRRKALDNYLEVLKVLKERIEEMEDILKERAKITDEAKWLMSIPGIGYHNALLMQSELGEIERFSNPKSMVSYSGLAPKVEQSGDYTRYGHINKHSNGFLRWAFIQSARAAVRSSKPNRFQKIYNKIKARRGEKVAIVATARHLAESVYWVLTRKEYYKENKAIRASYFS

SEQ ID NO: 329836 - protein, 340 aa, unidentified
MYPFYLGIDLHLKRSYVVLMDSTGKVVDERKLSNLNIETYLKTKVPHETYAVLEATRNWAFMYDLLSEHVTRVELAHPKEVKAIATAAVKTDRIDAKVLAHLARTNFLPTAYAAPQETRDLRLYIRHREWLIRHRTQAKNRIHAILASYNRMSSVKDLFGVQGRVDLNVMLPELRPAAQRVIRDNLTLIDQLNAQITQLEADLILSDEEENTIRLLKTMPGVGRITALTILAEIGDVHRFHSPKSLCHWVGLTPRVSGSDQIVRHGRITKQGSPYLRSAMTRAATVASRSSKRWYHIHEKMLPRCGRVGAKVAVARRMLTVIYYMLKRQEPYLENYSADR

SEQ ID NO: 329837 - protein, 389 aa, unidentified
MNYNTQNAKIASITEETLIVGIDVGSEMHYARAFDWRNYEYSKKPLEFSNTEAGFLTLKAWMEDIAERHGKTAVIPGMEPTGHYWFCLAAWMISEGISVVQVNPYAVKQTKEVEDNSQLKDDSKDPKLIANLVKDGNFGMPYLPEGLYAELRRLSMFRDQLNEDRVRNINRLHREMKIHFPEYREALGKIDGAFTLELLKKAPFPQDIASLGADGIRQIWHDAKFRGRGYGRAEEIVEYAKASVGVNSGTDAAGEAVRWFVAKIMELNSELDTVERAIREKCREIPYAENILEISGIGENILSGILAEMGDISRFDNVKEIQKLSGLSLVASSSGKHKGETRISYRGRKRLRYWLFQAAKSAVSHSPEFKELHMYYTTRKENPLRRCSR

SEQ ID NO: 329838 - protein, 410 aa, unidentified
MKMAGIDVHKKVLMVIVVDTNTPEEKPVRRRFATMPSELQRFRIWLEEQGVEEAVMESTAQYWRSVWFELEPHMRLHLAQAFSNRAPRGRKHDFKDAERLVRRLMADELILSFVPSGEQRIWRSMTRMKLQLTRDRVRLQNQIECLLEEMRIKLSIVVSNLLGASGLRILHALASGETDPKKLAQRGGERLQCTEEQLVDALTGRVQPVHGEMLGLQLERLQLIDEQMTRLNSMIAAAMKSHQDAVIRLAEVPGLGVDSAQQIIAEVGAQASTFASAAELTSWVGTCPGKDESAEQNHSSRSAKGNKYLRRVLNQAAHAAVAKKGSHFQAVFRRLLPRLGYQSAIWAVAHRLCRLVWKILHQGVRFIEQGTEVGPREKKKRAQMLARALRKLGYEVTITFINQLAPKPAV

SEQ ID NO: 329839 - protein, 357 aa, unidentified
MTHPSVTKASSLFFGLDVGDRVTHVCCVDGERVVVERLRFPTTADGVRKVFASRPRAKIVLEVGSQSPWMSELLRSFGHDVIVADARRVAQLARAGRKTDRRDAETLARLLQGMPELLGAVHHRGRQGQADLAVIRARDLLVRTRTSLVQHVRGTLKAAGLRALSCSAEAFHKKTRAFVPEALEQALGPILDQLAELEVRIRHFDREIERIAKERYPAAARLRQVCGVGSLTSLAFVLSVDDPARFKRSRTIGSWIGLCPRVQASGDSDPQLSISKAGCSYLRRLLVQSAHYILGPFGKDGDLRRFGLRLCERGGKAARRRAAVAVARKLAVLLHRLWTGSEPYEPLRNSLRASAAT

SEQ ID NO: 329840 - protein, 368 aa, unidentified
MLYLGIDQHARQITISLRDEHGDVVQARQVSTQPEKVHAFSQKLTRERLHGGESFVAVLEVCGFNDWLIRMLHEYRCHKVILIQPEERKLRKTDRRDAAALSELLWVNRDRLLQGKPVRGLRQVDIASNTDQESRRLTTLRKDAGQARTRLVNQIRHILRRHNLQWQMPTKRFPTKAAIAWLKQLALPEIDRLEMDHLLADLEQVQGRRQELEQVIARRCGVSAEAMLLASMPGVSYFTAVALACRVGRVERFPRAHSLANYWGLTPGCRNSGERNQRLGSITKAGSSMARWLLAEVTIKVLRRDARLREWFKRLKRRRGASIARVAVMRKLATVIWHMLSRRMTYAACRAAGEAGTKARQEQGCGRE

SEQ ID NO: 329841 - protein, 519 aa, unidentified
MSEEEVPALGFEPVGQFLPSARFKSGNNMVHRHRISTRLMIPGTSLFTLYRKGGVMNNYYLGVDVSKGYADFVMLDDKKQPIEENFQLDDTFEGHCCLYETLCTFCEDHPECTIYAAVESTGGYENNWFNALVKFQGTLNLRTARLNPLGVNANSKAALKRNITDKISAQNVAEYMIAHPEKVSYQHHDHLASLRKQWGFINMLTKQSTQLFNQLEPLLYSANPELLAYCKNGVPGWVLKLLLRYPTASDLSKARAVSVSRIPYISSARAQDLIIIANRSVASATDKITAQLIMETVKQILHLKKIIASQIDLMAKHCSVPEVDLLKSFIGIKDYSAIGLILEIQAAERFLSVKKLASFFGLHPVYKISGDGVGRFRMSKKGRKEPRKILFMVTLTAIRSNPLIRGIYLEHTQRGMEKMAAIGLCMHKTLRIIYGMLKHNMAFDPEIDRKNREKSYQSRTRVNKDKTRRYQDFDSKAPISRRQNSKRKEQKQSHSDNLTKSGIITSAPTITLTDIGDCV

SEQ ID NO: 329842 - protein, 413 aa, unidentified
MRRVIGMDIHRTFAEVVFWEEGRLRHHGRVDMTRSGLEGFGRSLEGNEEIVVEATGNTMSVVRVLSPFAARVIVANPMQVKAIAHARIKTDKIDAGVLAQLQASGFLPEVWVPDERTERLRRLVARRSQVVRHRTRVKNEVHAILQAHLVPKCPHADLFNKRGRDWLSRQEVPDDERTAITRHVREIDRLADDLADLDGDIAKDTVDDADVQRLLTIAGVNAVVAAGIVAAIGDISRFSEPQKLVSYFGLNPRVRQSGLGLAQYGRISKHGRSHARGLLVEAAWAASKAPGPLRAFFLRIRNRRGHQVAAVATARKLVVLIWHLLIKKQDYLWLRPSLVAAKRRQLELKAGAPSEKGKGRRGAAYAYNLKDLRTREREGSERAEKAYEQMVRHWRTQGTRPKGRTDAKSEERQ

SEQ ID NO: 329843 - protein, 342 aa, unidentified
MEQVTIVGLDLAKRVFQVHGATADGGIAIRKKLSRGQVLAFFADLPPCVVAMEACATAHYWAREIGALGHNVRLVPPAYVKPFVKRQKNDAADAEAIAEAASRPTMRFVEPKSPQQQARAMVFRTRDLFVRQRTQTINALRAHLAEHGLIAPQGMSNLANIRRFIDEAAAEVEPLVVETAHTYLEQIDDLSSRILKLEATLKQEAARTDASSRMMTMPGVGPITAMAIEAFAPSLCVFRRSRDFAAWLGLVPRQHSTGGKQVLGRTSKMGQRDIRRLLIIGAMSVIRWATRKGTTPGTWLHSILLRKPRKVAAIALANKMARTLWAMETRKVDYRDPRLTAA

SEQ ID NO: 329844 - protein, 381 aa, unidentified
MPSMQLRRDDVIVGVDTHKDNHVAVAIDGFGGLLGDIVVPTTIAGFEELLAFCLAFVGSAGRLIGFGVEGTGSYGVGLARYLRNHGHDVHEIARPARAAERRLAGKNDTIDAEHAARQLLAGHGLSTPKTADGAVETIRLVKIAYDGAVQARTTAMITLKATLATGSEALRAELETLTDHKLILACAALEGPTPLPPVRRGAPAVVVPGDPDVAMRHVLSSMAKRWLALHEEAKAHAASLKALTAAAAPQLVEAVGVGYDTAAQMLITAGDNANRIKSEAAFAKMCGACPIPAGSGKTNSRHRLYRGGNRQANAALYRVVIVRMRWHQPTIDYVARRTAEGMSKREIIRCLKRYLARELFRLLPAPDAIAKPVNGELEIAA

SEQ ID NO: 329845 - protein, 412 aa, unidentified
MKNIKEVRLLISVGVDVSKGKSTVCILKPYGEVIMSPNDYEHTLSDLKKLADQMDSFEDEIHVIMEATGNYHFPIATYLKKRDYDVRIINPLEMKRYRCQGIRNPKTDSIDAFMIAQYGIDFWFRPFQDYVVGDERIELKTLGMQYFKTMKTRQDRYLVLESVIDRALPGIGGVLNGYDKSTGKDKKSDFVYDFYHAKKITVYSENRFCDRYESWSTKKGYRYSEKEARQLYSIAKDSIPTLPSSENTKLMVQDAVKILREVDAALHDILTRMNEIAKCLPEYTTVMDMKGVGVSIGPRLIAEIGDPRRFHSAKALIAFAGIDAPPYQSGKFTGTERHMSKRGSRVMRKIGFELMDTINKHQKLYAGDPVCEYFLAKRAEGKKYRVAMFAAYNKFLRIYHSRVSTVLNENVK

SEQ ID NO: 329846 - protein, 406 aa, unidentified
MQVYLGIDWSENQHDAIFQNEAGAQVLGMCIPHSLEGFEKLEDARRQLGVSAAECVVGLETAHNLLVDFLWSQGYEQLYVLPPNQVKSNQGRRRQSGARDDPVDADLIAEIVRTDRHRLYPWHPGSSLLQQMRAKVGEVRFLTQEIVRLTNRLRAVLLRYYPAAVQVFSSLDTQIALAFLQAYPHPQAAAQLDWATFQQFAHQQHYPQPHKLMTCFTRLHHPYPLATEATRLAYQDEAVLLAGVLTHLVKGKSCQLRQLQQLYEQHPDRAIFDSLPAAGTLLSAGLLVKFGEDRQRFPKPELVQALAGTCPVTRQSGKTRRVHFRKACDTEFRFLAVTWARGTVNESLWATDYYLRILPHCRSEQHAYRCLANRWLQVLWRLWYDHVEYDEAYKLKRQAERRLPRR

SEQ ID NO: 329847 - protein, 362 aa, unidentified
MRIIGCDLHARQQAVAMLDTKTGEVVNITLKHEGNNVREFYSTLPRPVRVGIEATGSMQWFVNLMEELGIECLVGHPAEIRAAEPRKQKHDRRDADLILKLLVENRFPAIWLPSKELQDLRSLLRHRHQWVRMRTRVQNALQSIALAHGLRRGSSLWSQAGQHTIASLPLAPHTAYRRSELQAMYEKFEVEIEKLNQRVEEQACERPGARLLMTHPGVGPVTALATEVFLGDPARFADSKALASYVGMIPREYSSGERQRLGGLSKQGNPLLRFLWGEAGAHAVRRDPELKRFYRRKLIQKGFGKASVAVARKLGIRLWIMLRDQIEYNEFCRRGQKQQKSSDACAGMPETRYGAKSHRPVD

SEQ ID NO: 329848 - protein, 348 aa, unidentified
MRFYTKQHKYYCGIDLHARSMYICILDKEGKTVLHKNRKATPEAFLRAIAPYREDVVVAVECMFVWYWLADLCAKEKIPFVLGHALYMKAIHGGKSKHDRIDSHKIAVLLRGGTLPVAYVYPRKMRSTRDLLRRRNYLMRKRSELLAHIQNTNSQYNLPELEKKIALKANREGVADHFPDPSVRKSIEVDLELLDFYDRLLGDLERYIEKSAKGHNVHSWYLLRSIPGVGRILSLVLLYEIHDIRRFPRVQDFVSYCRLVKCPRESAGKKFGAKNSKVGNVHLKWAFSEAACFFIRVNEQAQHYHSRLVSKHGKGKALSIFAHKIGRAVYFMLKRKEPFNMDTFFAHA

SEQ ID NO: 329849 - protein, 385 aa, unidentified
MQKRHDDSKACLTAFVQDNTVIVIIEMSLRSWLVAGMIPGIDREPLKKIAADPEVLLRLLYRWRDEAIKAGKEITRIAVAYETGRDGFWLARWLRDRGIDAHVIHATSVAISREHRRAKTDRIDTAMLRRGFLGWLRGERGHCSMAVVPTIAEEDAKRPHRERESLVKERTRTINQMKAILTQFGVRNFKTASRKAAEKIDDVRTPEGVPLPPNAGAALRRQIEHFRLINGQIKTIEKTRLQRLRQQPTDKFNAMVFLLVRIIGLGIETAEQLVHEILSRKLRDRKAVARYSGLTGSPDESGARRREKGLSRSGNGRVRKILIQLSWRMLQFQPDSSLVRWFKDRTANSQRSRKPMIVAFARKLIIALWRYVNTGVTPEGFKLAK

SEQ ID NO: 329850 - protein, 376 aa, unidentified
MTAKGPVLFIGLDVHNDSIAVSLAPSAAAEVRRYGIIGGEHDDVLKLARKLQAAHPGTVLRFCYEAGPRGFALCRCLRSHGLECILVCPSKVPRKPGERVKTDRRDADDLARLYRAGELTGIYVPEPEDEAMRDLIRARFQVGKQQHRARQQLKMYLLRHNLRYGGQSSWTPAHLRYLAKIKMPFPVQQIVFQEMLEVISEAAARLERYDLEIERAVPGWRWAPAVRALMSLRGMALLHAATLVAELGDFNRFEHPGQLMGYLGLVPSEHTTGHDRQQGGITKMGNAPARRALVEAAWQYRAPARLSPHLKKRQEGLPKAITDIAWEAQRRLHHRYIHLTRVGKKKSQVAVTAVARELAGFVWAIARQVPPRPAQA

SEQ ID NO: 329851 - protein, 404 aa, unidentified
MPTYFVGIDVSKFKHTCCIIDGDGEIIKKSFDFSNSKEGFDSLIEIFKSIDQSESSFQIVMEATGHYHECLFRYLVANNYLAQIKNPVVIARFKQSEYLDKAKTDNLDALLIAQYASKHPFSPSMLKSYNIERIRRISRAKYFLYQNKERTINHLHRYLDESFPELIPFLRKREDIKRYQGRNFFDSKTTLWFVENFPSAKKFSNARSETAEKLKRMSKGAFSLIKFNELRNIAKNSIGVSFQETEEIIIQLVQELRNIQERNNKLDEFLVPLIDETSPNLLTVPGIGYRLAGLLISEIGDASQFPSADKIIKFAGLDVRVYQSGTIEKHGAIRKRGSPLLRYALFQAAEKARIHCPEIAEFYSKKKSEGKHPICALTHTARKILRIVWALLKTGQNYSQSISD

SEQ ID NO: 329852 - protein, 386 aa, unidentified
MPQLNDLSRSLIILERDATLIAVIEMSQSSWLVAGIVPGVERSPLKKLAVDESALLKLLNRWREEAEKAGHRIERIAIAFEAGRDGFWLARWLGARDIEAHVIHASSVAVSREHRRAKTDRLDTELLKRAFLGWLCGERDHCKMVAIPTLAQEDAKRPNRERESLVGEQSRIVNRMKAALARLGIRGFNPKLKKAVERLDGLRTPEGEPIPPNTLAELKHDMERRRLVRSQIRDIEGTRLERLEQAPGDGPHVMVRLLARVIGVGVETADMLVQEVLSRNLRDRRAVARYGGLTGSPDESGKKRREKGLARSGNARVRRGMIQLAWRFLMFQKDSALAHWFYARTKNAPQTRKTMIVALARKLLIALWRLVREGAIPEGIVLRPAL

SEQ ID NO: 329853 - protein, 344 aa, unidentified
MEPMYYIGLDVHKRKISYCVKDSGGKVHAEGSLAATRLDLDRWMKTLPQPWSAAMEATMFTGWIYDHLKPHAAALKVAHPLMLRAIAAAKKKNDRIDASKICDCLRCDFLPECYMASTAIRERRRTLRYRNLLVRQMVQMKNKIGMLLMEAGVSYNKQRLHKAGYFRELLASNPDIDAGLGSLLRLCRETVVRLQKTESALVRSLERDSSLTDRVERLMTIPAVGPITALTWALEVGDVQRFSSIKKAISYCGLCGAEKSSGNTVQRTPLSKQRNKHLQTTLIEAAKMAPRNSAELAMLYDKEKQKGNANRATLAVARKLVAYLMAVDRGHRNFQVVETSTIAA

SEQ ID NO: 329854 - protein, 402 aa, unidentified
MAYCGGLDWGSAEHGICIIEHDSGKIIARFPVPNDAAGIADLMRRLARLAPPADLPIAIERPSGLIVDALVAADHPVVPIHPNVVKASRPRYRAAGGKSDRGDPYLLADLLRTDGHRFRRLMPCSDEIKALRALVRGRDALVAQRLVLANQLRALLDSFWPGAVAIFADIDSPIALAFMQRYPTPDSAARLGEKRIKAFMAQHRYCGRRSASELLARLRRAPPCLAGDSEADAKGELVRAWAAVLTVLVAQIAELASRIEHTIGELPDGKIVTSFPRAGRICAAQILAELGDVRERFQAEDQLAAEAGVCPVTHQSGKSRGVVFRWACNHRLRAAITCFADNSRHSSPWAADIYQRARGRGCDHPHAVRILARAWVRVLWRAWQDRTLYDPARHRSSRASAV

SEQ ID NO: 329855 - protein, 337 aa, unidentified
MNYCGIDLHSNNCVVIVSDESDRIVYRKRLPNELTQIAAALEAYRHELAGVVVESTYNWYWLVDGLMDSGYRVHLAHPAAIRKYNGLKHSGDFADAAYLAQLLRLGLLPEGYVYPREERGARDLARKRMQLVRYRTAQILSIEGILMRQTGSRITGEAVKRLTADQVNEFAFTPDVTLAMEANRAVSQALAQQIEALEKRLMERVSLRAEYRLLKTVPGIGDTLATTIMLETGSIRRFAHVGNFSSYCRCVDSLRESNGKKKGEGNTRNGNKYLAWAFVEAANFAMRYCPQARSFYDRKKSRTNRVLAIKALAHKLARACYHMLRDQKPFDVHLCFG

SEQ ID NO: 329856 - protein, 347 aa, unidentified
MNFYTLPHKHYCGVDLHSRMMYLCIVGRDGAVLLHRNLPCNRDRFLLAIAPYREDLVVAVECVYSWYWLADLCAKEGIPFVLGHALYMRLIHGAKAKSDRVDSEKTAVLLRGGLMPRAYAYPADMRATRDLMRRRLLFVRQRGSLLAHIQITHHQYNVDPPGKRITYRSNREGLGEGFEDSSVRHSIAADLALADHYEVTIGELELAVLRQARIHDPNALALLTSVPGIGKVLALTILYEIHDISRFPSVRDFASYSRLVKCERRSAGKSLGTAGNKIGNAYLKWAFSEAAVLFIAKSEQGRTVLNRLERKYGKPKALSVLAHKLGRAVYYMLARKQAFDPQRFATS

SEQ ID NO: 329857 - protein, 340 aa, unidentified
MGEYIGLDVSLKETAISIRRGGKRVWRGKCLSDPATIAALIRKHAPAAERVVFETGPLSVWFYHALIAEGVPAICIDARHAKAALDMAANKTDANDADGLAHLAEVGFYREVRVKGFDSMLSRTLVGARTKLVRATLDVANQIRGLMKTFGLIVPRGIGGKFEANVRSLLADHVDLARIILPLLEAWRSLRTQATELGRQLLAEARRSQQCQLLMSIPGVGAITATAYLTAVEDPANFSRSRSVGAWLGLTTRRYQSGEVDYDGHISRRGDSHVRSLLYEAAVVILTRSHADSDLRSWGTRLREKVGFKRAAVAVARKLAVVMHAMLRSGELFTRTAAAA

SEQ ID NO: 329858 - protein, 416 aa, unidentified
MGKQRDNACGADIHKNKIVATILSQSGTKIQADFGTTLPELLKFKAWLINNDCRLMAMESTGTYWIPIYSVLEGSIEIIVANPYMVKHIPGKKTDLVDSDWLAELCLKDLIVPSRIFPKEDRVLRSLTRSREGLVKIRTRLKNKIHRDLSSSHIKLSSVVTDIFGKSGTHILRGLLDNRSIDEIIESIPSRRVKKNADKIKESIENNLDSSQIFLIESSLDLMSSIQGNINRIDADLRKRISTRLNDLKIAMSIPGIEFTSAVTILAEVGDYKDFGSPEQLASYFGIVPFVNQSADKLRTGCITKHGSKHLRWIMVQVAHAASKKIGSRLRKFYLKVKARRGANVAIVALARKILCILHHLLINQEMYEEPGVMKRTRPVRFDQSSSQKEFTAQEMIDILQRSGYEIRKIDRGAFG

SEQ ID NO: 329859 - protein, 393 aa, unidentified
MQRDTKEVLAELVGKLKAKLDPTKVAATSAGEKHQRGELRPNLDRLTVGVDLGDQWSHYCILGLEGERLAEGQLRTTQEDLATFFQGLNEARVVVEVGTHSAWVQEVIRGCGHEVLVANPRLMDGSKRRKRKNDRIDANKLARLGRVDPESLYPIQHRSREVRQDLVMLRARDALVAARTEIINTTRGLVKSMGTRLPKCSSRSFAQKGEEAVAVEMREALLPLVRLAATLSADIKEYDKKIEELGREKYGHTALLRQVKGVGPITALAYVLTLENPQRFTKSRDVGPYLGLVPKQEDSGESQPQLGISKAGDTMVRKLLVGSAQYILGPFGPDTDLRRYGLRLCERGGKNAKKRAAVAVARKLAVLLHRLWVSGEVYEPLHYAMSAPIVAAA

SEQ ID NO: 329860 - protein, 385 aa, unidentified
MEVLYQSCAGIDVHQANIVVCILHGPLTSTRPKREMATFDTTTKGLRACHDFLSQFHVEAVGMESTGVYWRPVWHALCDDFELILAQPAHMKAIPGQKTDKKDAHWIAKLTRIGLLPRSFVPDETIQELRELTRQRKHYVESRNRETNRIHKFLQSGGIKLTTYIEDIMGLSGRNLLQLLVDGTPITPRIVHQSVYTSLKKKVPQLLEALDDYFSDHHRFMLKQSLEIYDFYQKQIELLEERMNVYLSQYEKHVEILDSIPGIDVITASVIISEVGVDMSQFPTFGHLASWAGLCPGNNESAGKKRSTKIRHGNSYLKKCLCQAAFAVKRQKGSPLAERYYQIQSRRGSQKATIALAHQLLKIAYILLKEQMTYPEFLAQKKKDY

SEQ ID NO: 329861 - protein, 345 aa, unidentified
MGPMYYIGLDVHKQKISYCVKDISGKIYAEGWIPATRFDLDRWMKTLPQPWSAAMEATMFSGWIYDHLKPQAAELKVAHPLMLRAIAAAKKKNDRIDANKICDCLRCDFLPECYMAPTVIRERRRTLRYRNLLVRQMVQMKIKISTLLMEAGVSYNKQKLHKAGYFRELLASNPDINEGLGSLLRVCRETVVRLQRTESALVRSLERDSLLMDRVERLMTIPAVGPITALTWALEVGEVQRFSSIKKAISYCGLCGAEKSSGSTVQRTPLSKQRNKHLQTTLIEAAKLAPRNSAELAMLYDKEKQKGNANRATLAVARKLVAYLMAVDRGQRNFQVVETSNCIAA

SEQ ID NO: 329862 - protein, 351 aa, unidentified
MDQFAGLDVSVKDTSVCIVDETGKIVREVKVASEPDALLTVLKNRTYHFKRIGLEAGPLSQWLYSALAEAELPVVCVETRHMQAVLKAQINKTDRNDARGIAQMMRVGLYRPVHVKTLRSQKLRMLLTHRKLMLSKAIAIENDLRGTLRNFGLKVGMVGTVKFEARIKELIENLPDLAVLVEPLLVVRRVLREQISILHRRLLVIVRDDAVCRRLMTVPGVGPVVALTYRATVDVPARFRNSKAVGAVFGLTPSKYQSGEINRTGAISKCGDEMMRVMLYEAAQVMLTRTNKWSWLKAWAMKIARHRGMRKAIVALARRLAVILHRIWVDGTDFRWTRKVAAACVVKDQMR

SEQ ID NO: 329863 - protein, 356 aa, unidentified
MSHDIKYIGMDVHKEAIVIAVLNESGKLVMESVIETKASSILEFLHGLRGELHVTWEEGTWAAWLYDLLQPRVQHIVVCNPRRNALLKEGSKSDKVDAQKLADLLRTGMLRPVYHGENGLRTLRELGRSYQTISKDLARVMNRLKALYRGWGIPCAGTQVYAARCREEWLSKIPQAGVRRRAELLYQQLDGLQILRRNVRPEFLAESRKHKAAKLLRQIPCIGPIRAARLIGLMQTPHRFRSKRQLWTYSGLGIETHDSAQYRFVRGQLQRSKKPQQVRGLNRNHNHEMKEIFKSAATRASCGTGPFHDFYTGLLAKGMKPEMARLTLARKIAAITLTLWKKEERFDVEQLKTQAA

SEQ ID NO: 329864 - protein, 312 aa, unidentified
MEKLSYGGIDVSKDRLDVVVLPEERFFSVSNDAAGWAELVARIRPLAVSAIGIEPSGGYERGIIRALLAAGLSVRRINPNKLRQFARARGVLAKNDRLDARLIAEYVAIMPTRVVQRDEAVEKLAEVVTMRRQLRDEHVTVENQAAHIEDAMLRRLNKRRLARLEADTRLLDKRLAEMVATNAALAQRYELLTSMPGVGPVLAFTLIALLPELGQMSRKQIAALVGLAPYDFDSGKLRGHRSIYGGRMPVRNVLYMAALSGCRHNPALKAFHKRLAAADKKSKVVIVAVMRKMITTLNAMLRDNVEWQPKSA

SEQ ID NO: 329865 - protein, 356 aa, unidentified
MYQVKTLDFTGQSIFCGIDIHKKNWSVCLRNEERELKIFSQNPEPGILAHFLNRFYPGANISIAYEAGFCGYWPQQVFATEGLSCKIIHPPDIPQPDKSRRYKTDRIDCRKLALELSKGFLNSIYIPRQSTIESRSLVRTRQQLVKDQTRYKNRILSFLNFFGIDVPEGYKKSTHFSKRFICWLEQLPLASSSKAALQVKISVLKSIREQLVAINRKLRALAESQEYKHLIRLLLSIPGIGIQSALILATELEDITRFKNFDHLAGYAGFKPDVYSTGEKNVIKGITHQCNTLVRETLVECAWMVIGRDPALTQAYYEYKKRMHYNKAILRIAKKLLNRVRYVLLKNQEYQIGIVA

SEQ ID NO: 329866 - protein, 425 aa, unidentified
MAVPIDCADEHVRSFSALTHGLHEVADWLQACGIQTVAMEATGVYWVPLYEILEERGIEVCLVNAHHVHNVPGRKSDVLDCQWLQQLHSYGLLRASFRPSADFVALRTYLRHRESLLRSNARFIQQMQKSMTLMNIKLDRVVTDVAGDTSMRIIRDIVAGQRDPVLLARHRDPRCKASEAELADSLRGEYRADLLFTLRHGLELYDAHQQRLVECDVEIQNLVDAIAVNMPAVEPPRTATKVRRDRRRDPKLNVHASLHRIAGGVDLYQVAGIAEITAVQLIAEIGTDMTAWPTAKHFASWTTLAPGCRITGGKRYRPKRPHSAHRVAQILRMAAVSAGRTQSAIGAFYRRLSARIGKAKAIVATAAKLARIIYALLKNGTRFEETGADAYEQHYRDRVLRNLKRKAHALGFDLVEKPALAESVS

SEQ ID NO: 329867 - protein, 400 aa, unidentified
MSGLKGGFDSFVGIDVSKDKFDACGITRDETKLFQFSTTMDRKGFEKLKGHLAAVSISSVLIGMESTATYHVNLFSYLVSEGYKVLLINPLLISNYVKMQLRKTKTDKKDAVVIAQFLLTNGDPLVQRAPPSLISDLRDLSRQRESLVDEMTALKINIKRLLNITFPELEHMTLVFTKSMLKLLQQYPSAFALRIADLVQLSQMLIADSYGHKREAFAAELMKAACSSVGTNSSAKEIILKQQVTLLLHLEEALQEITGILIEMSRKLMEEDINILTSIKGIGNKTAANFLIEMGGDINQYDGSGKIIAMAGLDPAVYQSGKHEGKGRITKRGNRHLRRIIWMMATKVIHYSDIFKVYYLKRRKEGLPYKMAVLATAHKLIRVIYAMLTQRTTFCPQVNS

SEQ ID NO: 329868 - protein, 344 aa, unidentified
MEHFAGLDVSVKETSVCIVDDTGKIVREVKVASEPEALLAVLKNPAYHFKRVGLEAGPLSQWLFSALAEAGLPVICVETRHMRAVLKAQINKTDRNDARGMAQMMRVGLYRPVHVKTLRSQKLRMLLTHRKLLQSKAIAIDNDLRGTLRNFGLKVGMVGTVRFEARIRELVESLPDLAALIEPLLIVRRTLREQFCILHRRLLAIVRDDEVCRRLMTAPGVGPVVSLTYRATVDVPARFRKSKSVGAVFGLTCAKYQSGEVDWDGRISRCGDEMMRVMLYEAAQSMMRSKKWSWLKAWAMQIARRCGMKKAIVALARRLAVIMHRMWVDGTEFRWTREQSAVAA

SEQ ID NO: 329869 - protein, 403 aa, unidentified
MYSSFVGIDIGKWNHQAAFLEVSGKETARSLAFQNTSEGFQSLLDSLAPFDKGQTVIGLEATGHYWLALFSFLVDNGWTVKVINPMQSDALRKMNIRKAKTDRKDCVVIADVLRFGRYTETVLPDEDLLQLRELSRCRVAHVELLGDLKRRVLGILDRVFPEFATCFSTVFGAAPTELLQECTDPEELADYDIDKLIKLLEKESRGRHSREKAEELKAKASRSVGTRFGRDALKFELKMLLEQLDFIKGQVKELDKFLKKLMKNHELIYTIPGISVTLGSAILGEIGDVKRFGTPQQLQAFAGMDPSVTQSGNFQGTQAKMSKRGSPYLRRAVYLAANAARRFDPVFKDFYDRMIARGKHPKQALAAVGTKLLRVIHAVMTSQKPYNPQKLLTPAARISQLNP

SEQ ID NO: 329870 - protein, 318 aa, unidentified
MEAIVVGIDVSKDKLDIALRPSGEVFSVSRDAAGLDVLISRLAAFSLAAVAVEATGGFETVVAASLASAGLPVVVVNPVQVRAFANALGKRAKTDPIDARVIAHFVEATKPEIRPLPDDATQLLADLVARRRQIIQMMVAERQRQKRLVAKHLQKSLARLIKALEKELAALDQDIDDAIRGTPAWREKEDLLASVPGVGPTIARTLMAELPELGTLDRKKIAALAGLAPWTRQSGRWKGKSFIGGGRSCVRAALFMGALVAARYNPVLKAFKERLIAAGKPKLVAIIAIARKLLTILNAMVRDNKPWQDFEQKELAHA

SEQ ID NO: 329871 - protein, 343 aa, unidentified
MENDTRIGVDVAKSVFEIAVSDRPGHVVRRERLSRTAFVEFFANHPAATVVMEACGSAHYWGRRIEELGHRVILLPPHHVRPYVQGNKTDRTDAKGILEASRNHDIRPVPVKTVAQQVLTSLHRLRSAWMTERTARLNTLRGLLRELGVFIPVGAREVVPAVWAVLEHADSDLPDALRPHFAEACHEIRAIEARIKEVEVRLEAMGKDLPVVGYLRTIPGIGLLTATALLAFIGDIHRFPSGRHLASYLGLTPREFSSGLKRHLGRISKRGDGYLRTLLIHGARSVLLHARTKQPDRLREWAHKLSQTHVHNKAAVAVANKMARIVWVVWSRLRPFAEIPKAA

SEQ ID NO: 329872 - protein, 413 aa, unidentified
MQRLFRVCAGIDVHKRSIYVCLLRAPAEVALAGEVRTFGTTTHELLGLLDWLTQEQCESVAMESTGVYWKPVFNVLEGALQVVLANAQHVKGLPGRKTDVQDCEWLAELHLHGLVKPSFIPTPDIRELRELVRTRTTLTRDRARHVNRIAKVLEDANLKLGSVASDILGVSGRAMLDAIVAGQTDAAELAALAVGRLRSKKTELQQALQGFIKPHHRLLIQTHLKLIDAFDASLAALTTQIEECLRPFAATRKRLDEITGIGPEVATVFISELGADMTRWPTPAHAASWAGLCPGHHESAGKHTSGRTRHGNRWIKQAFAQAGWAASRAAGTYMQAHFRRLCSRRGAKKAVMAVAHSQFIRCVLLSASGGECYQDLGGDYFDRRNEQHVTQRLVNRLQALGYRVTLQPLEPPA

SEQ ID NO: 329873 - protein, 369 aa, unidentified
MTDLTLFVGLDVHKKTIAVAVIEGVAGAAVRFYGTIANTPETVRTLCRKLSRDGQQLYFCYEAGPCGYGVQRRLTRLGHRCDVVAPALIPRKVGDRVKTDRRDAMMLAQTLRAGQLTAVWVPDEAHEAMRDLVRLRAQAMRDLRKARQQLLSFLLRHGRNSPYGHWTKMHRRWLGELVFAHPAQHLALEEMLQRIERAEALCDRLKQAILELVPQWSLAPVVQAIQALRGVSLIVAAAIVAEVGCFGRFESPRALMAYLGLNPSEHSSGATVRRGAITKTGNTLARTCLVEAAWTYRFPPRVSQIIRDRLKEVPEPIRAVAWKAQVRLSARYRKLSAAGKPGPKVVVAIARELVGFIWAIARMVEPKFA

SEQ ID NO: 329874 - protein, 389 aa, unidentified
MVTLKAHILPHPDLQPPGCRGSGKRLFDKALPNDENKLRSLISDLKQHGQILLVVDQPATIGALPVAVARSEGVLVGYLPGLAMRRIADLHAGEAKTDARDAAIIAEAARTLPHALRTLKLADEQIAELSMLCGFDDDLAAQTTQASNRIRGLLTQIHPALERVLGPRLEHPAVLDLLQRYPSPEKLASLGEKKLAAQLCKLAPRLGKRLAADIAQALAEQTVVVPGTNAAAVVLPRLALQLITLRKQRDEVALEVEQRVLAHPLYPVLTSMPGVGVRTAARLLTEVACRAFASAAHLAAYAGLAPVTRRSGSSIRGEHPSRRGNKALKRALFLSAFAALRDPLSRAYYTRKMSQGKRHNQALIALARRRCDVLFAMMRDGTFYTPQGS

SEQ ID NO: 329875 - protein, 366 aa, unidentified
MKKLSTAAASGIEKSQRLTIGLDLGDRTSHYCVLDESGRILTESKTATSPHAMKAVFGAMPRGCRIALETGMHSPWVSRVLSGVGHEVIVAHARNVRLIGESRRKDDRLDAQTLARLARIDPQLLCPVKHRSAKAQADLTVIRARAGLVRARTALVNTARGLAKSYGERLRGCNVRNMNPEKAEALSPELQTALQPLLAALEALSDRIREYNEQIEKLAQDSYSQVELLKQVKGVGTLIALTFLLTLEDPHRFRKSRDVGCYLGLQPGRRNSGQSEPQMHISKEGDPYLRTLLVQGAQHILGPFGPDSDLRRWGLKLAERGGRNAKKRAIIATARKLAVLLHHLWISGDVYEPLHNSSRVTAAAAA

SEQ ID NO: 329876 - protein, 315 aa, unidentified
MTRLSPFVGVDVAKADLVVAIRPTGERWVVANDDAGVTQLVRRLRRLAPALVVLEATGGYERAAVAALAAARVAVVVANPRQVRDFARATGQLAKTDAIDADTLALFAERIRPEPRPVPDDAARTLDGLLTRRRQVLDMLGAERNRLTHALPAIRRDITQHIRWLERRVDDVDQDLDRTIRSSPVWRAQENLLRSTPGVGPVVSRTLIGDLPELGALTRKQIAALVGVAPLARDSGTLTGRRLVWGGRAPVRAALYMAALVASRHNPAIQTFYQRLLRAGKPKKLALTACARKLLTILNAMMRTQTPWRPTPQLT

SEQ ID NO: 329877 - protein, 340 aa, unidentified
MNHYAGIDVSLEASSVCVIDGSGKIVREAKVASEPAALIAWFGSLGLSLTRIGLEAGPLSQWLYAALRDAGFAVELLETRHVRNAFKIMPVKTDRKDARGIAELMRLGWFRPVHCKSMEAQETRAMLTARKLVQKMLHEVEMSLRGILRGFGLKVGKVTPTQFEARIEQLVAGHPSLEVIAASMLAVRATLRREFNGFERRLRTLARSDTRARLLMSTPGVGTIVALTYAAAIDDPSRFKSSKTVGAHFGLTPSRYQSGETDRSGRISKTGDGSVRAALYESAHIILTKPIKGCTNLKSWAMRIARRAGLNKAKVALARKLAVIMHRMLADGTTFTTQSA

SEQ ID NO: 329878 - protein, 346 aa, unidentified
MRIIGCDYHPSWQQISWVDTLTGETEEKKLDHASGEAEKFYRQLPEPAVIGMESTGNCQWFVEMATTAGHEVWIGDAAKIRASEVRQQKNDRRDAALILKLLLEGRFPRIWTPSGEEKDLRQLLIHRHKLVRIRVQVKNELQHLAMNQGVTRAGKLWSKAGEKVLSELPLKPWASRRRQDLFKIREMLNGQIDLLDQAVVQAAQNNEKARLLMTQPGVGPITSMAFVLTMGDVSRFPRGKQVASYLGLIPREYSSGGHQRFGPISKQGNGFLRMLLVEAAQVAVRCDPQMRQEYLHRCHQKAKGIAKVAAARKLAIRLYWMLRTNRGYPEVVRVESSPRVPVVGAS

SEQ ID NO: 329879 - protein, 443 aa, unidentified
MSIPEAPGSHPGPTSEPDFAAFVGLDWADQKHCWKLVAAGSTDFTQGEVKNTPEDLQAWAAGLYARFEGRPVAVGLEQSRGAVVFQLSKFPHLVLYPVHPTTAAKYRQAFFPSGSKNDPVDTSLLLELVLHHRDRLRRLDPDTAETRLLQMLTEHRRKLVDEKTRLSNQLTAWLKTYFPQVLAWIDDIDSPLGCAWLQRWPTLQELQRAHPGTLRQFFQQHNCRSAQRIQQRLDAIYQATPAVTDRALLQAGASITASLVALLKVLLETIAKADQEIEQVASQHPEAPLFAGLPGAGPALRPRLIGAFGTQRHRYTSASQLESYSGIAPVTEQSGHSQWVHFRRACPKFLRQTFHEFAAHSIAKSVWARAYYQAQIDKQKGHHAAVRALAFKWIRVLFRCWQNRTPYDEEIYLRALEKHNSPLATGCKWKTVGGFKKFSAEKA

SEQ ID NO: 329880 - protein, 342 aa, unidentified
MDIVVLGIDLGKNVCSLAGLDGQGQVVLRRRMKREMVAGFARRWPSCVVAMEACCGAHHLGRKLAAQGHEVRLMSPEYVRPYVKAQKNDDRDAEAIAEAATRPTMRFVEVKSAAQSDMQSLHRARERLVAERTALINHLRAVLLERGITVPQGRRKLEKELPGIISDETLSLSPRIRQLVSDLREEWQVLDDRIAVFDTEFVSQARMDEATRRLTTVPGIGSINATALVAAVGDGKAFARGRDMAAWLGLVPRQMTTGGKPKLLGISKRGNRYLRKNLIHGARAVLPGLAGRDTPLGKWVRGLLARAHKNTVVVALANKLARIAWAVLAHGRSFDAAHAVAA

SEQ ID NO: 329881 - protein, 353 aa, unidentified
MTEIMMIGIDLGKKTFQLCAVDVDGKELWNQAMSAEKARRRLGELPPALVVMEACGGAHYWAGEFAGMGHAVSLLHPRHVTPFVTGPHKSDARDARGITVAARQPDTRRIAPKPRDARELQGLLRLHHGLVRQRTASINRFRGLLREHGYRLAKGRPRGLRGFPAALEALAREAGELFIEVMGEELAALKALHERTEELKRRIGRVARDDWMCRLVMTIPGIGPLTAVALVAAIPDARVFETARSLPAWVGLVPRQNGTGGKVRLGSITKHGDGYLRRNLVQGAKSLIWATTGKAADAHPRCRLRRWILAHHATMHLNALAVAVANRMARYACAVMKRGEAYDHDPLGEWRPS

SEQ ID NO: 329882 - protein, 430 aa, unidentified
MSKSNFLSVGIDVGSAFSFMSIVHPDGTLIGKPFKIIHKDVDSLERALLAIRKAEESYSLKSQTFLESTGIYHFPLFCFLIESGFDAFVINPLITHSIRNMGIRKVKNDKLDSIGIAKLGLSPDLSVSVMPEKLVLELRALTRNYYSLTDIRASYVNQLKTQLHTVFPQFLSVFCDVTGKTSMMILESYPTPDKLLRAHRESLIAKIAKVSRKGVKAATEKYEKLICAAKSAKVFGCKLESVFFNIQTTLTLIKGMDAATASVMDRIGALVKENRSEKFIYQIEWLDSIPGIGFLSAVTIMCEIGDFSVFKSPKQLFAYFGMDPEVKQSGKFNATQVHMSKRGSRIARRAIFAAALASIRKKRNGEAINPYLYDFYQKKASSKPKMVALGAVMHKINNYIFAVLRDETVFSLRSPEEHCNAYWAPVALTA

SEQ ID NO: 329883 - protein, 461 aa, unidentified
MSKKRPAVKQKGSAQGKVDWKALDIVHPDAAGIDVGGGEHWVAISPDRDPEPVRRFGCFTADLREMARWLVEKGVRSVAMQSTGVYWMPVFEVLEQHGLEVYLVNAQHTKNVPGRKSDVQECQWLLKLHAFGLLNNSFQPTDEIRIARTLWRHRGNLVAEASSAIQRMQKALIEMNVQLSSVLSDISGVSGMSMIGAILDGERDPWALAALVQSGVKATTEDIAKSLEGNWREELLFVLRQEVELYRIYQEKIDDCDLQLRKHLESFGSVVDLKTQPIGPKPKGKRGSRNAPQFDLRTELYRITGIDWAQVNGIDVLTAQTVIAECGADLSAFASEKNFASWLGLCPTNEQSGGRILKRRTRKVVNRAATALRNAATTLLRSESYLGAQYRRLRTRLGAPKAITAMARKLACLFYRLIKHGQQYVDKGNEYYETKYREQQIRSLSKRAQKLGLQLVIPKPA

SEQ ID NO: 329884 - protein, 360 aa, unidentified
MKVTTVGLDLAKSVFQVHGINAAGHREFNRQLRRGLVVETFARLEPCVVAMESCAGANHWARRLQALGHQVRLIAPQYVKPFVKTNKNDAADAQAICIAALQPEMRFVSPKNTEQQGVMALHAMRSGAMKARNAIANRLRGLLAEFGVIVPQGIGHVYKRVPEALEDASNELPGFLRVALQAEYEQLRLQEQHLQAMHSMLQRWERESVACRAVERIPGIGILGASALVASMGDVNAYANGRQVSAWTGIVPKQHSSGGKQRLLGISKRGDAYLRTLLIHGARSVIAAVKRRLNAGLDPARLSRTERWLLDLVNRRNANVAAVALANKNVRTAWAILAHGKPYEAEHVSINPRSRAAVPA

SEQ ID NO: 329885 - protein, 346 aa, unidentified
MLYVGLDLSRQRLDVHVLDEEGRTVEVLAVHPDADALRTLANRILRHGQEVSAVIESMTGSRFVHDTLERFGWDVMIADAVKAKGVAPLAAKTDKIDAHVLAELGRRDLVPEIWLPDPAVRAERERARFRLHLVHHRSALKCRIHATLMTFGHTVPVTDLFGTSGRALLAGLALPEPWATTLATSLAMVDELDQRIDECGRELARLGADHPYIPLLLTVPGVGPLLAYTIASEIGDIARFASPKKLTRYTGLCPIVRQSGNRDFRGPLAKNGPKYLRWALVEAATHAARHPHYRDRYERNKKRLGRGRGAKVARIDIARQLAEAIWHVLTKNEPFAPVGPAILLVA

SEQ ID NO: 329886 - protein, 313 aa, unidentified
MDKETFIGVDMAKASFEFVAYGDDRHFNLRNDEDGIRQAIKQMEKLSPQLIVLEATGGFELPLVAALSMAELPVVVINPRQVRNFAKATGHLAKTDAIDAEVLAHYGAVVKPSVRSIPDAEMIMLKEIVGRRQQLVSILVAERNRLGAAHNHVVKEGIQLHIDWLKQQLDDTDAELQKQIEKSPVWQAKDDLLRTVPGIGPATSAILLANLPELGTLNRHQIAALAGVAPFNRDSGIMRGKRSVWGGRARVKKALYMATIVAVRWNANIKVFYQRLCASGKAKKIALVACMRKLLIILNTMLKNNTSWRCAAA

SEQ ID NO: 329887 - protein, 372 aa, unidentified
MEQPITWVGIDDDKMNLTVAVATGSEAPQVRRIPNEDGVLRRWVRRLVRTAHQGEIRMCYEAGPNGFALKRRLEAMGPVAVEVMAPTLTPRRSGRKVKTDPLDARQLLSLYRSGELVPVAIPEATSESARDLVRTYHRVSEELLRKRNHVLKFLVRRGRIYRTGVHWTGLHRRWLRSQTFEAWTDTTSFEELVTGLRELEDRRLRLRQALKRLAQEEAYALGVATLRCFHGIDTEMALTLVTEIFDIRRFRHPRDLMSYFGQTPSVHQSGTKDVRGPITKAGNRYARWALGQIAHQFRHRPHVGTKLRQRREGQPPWAVAIADRAHQRLHRRHWALILRGMPSAKAFTAVSRELTAFVWEALTEVQRRSTAA

SEQ ID NO: 329888 - protein, 347 aa, unidentified
MNYIGCDCHISTLDCAVVNERGQETKKQKMNTGVKGLVEFVKSIPKPRKIIIEEGTLASWLLEVCTAYGEELIITDPKTNRWIGRAGQKNDTIDASKLAQLARGGYIKEIYHPIGHRRRFRELVMSYHDTVKSQTRIKNKLKAKFRQNGIKCSGETVYSVKYREEWQKRLPQEKVVEVMVVGLWQQLDQVHEVQEELLNHIRKQSRQYSEIKRFKHIPGIGTVHAATISAIVETPHRFANKKKLWMYAGLGLAEKASGEKVYSRNLTRSYNRLLKSALKQAAEAAISARDNQFRRQYLRLTLEKGIPSHRAKLTVARSILATAYGIWKSGEEYDPTIDKKRTESDNT

SEQ ID NO: 329889 - protein, 354 aa, unidentified
MERYLGIDVHLQSCTIAVVSNTGKRLKSMVVETNGQALVEAVRLIPGRRHICIEEGTQSAWLVEILGPHSEEIVVSVPMRERGQPKSDKRDAWKLAEELRTGAIRIRVYKPPVHLGGLRCAMRGDLATSEDIVRAKNRLKAVFRSRGIPTDASVYNPKRRSRWIAQLPRPQQQLAELLGQELDLLEPLQLQAKKWLVTEAKAHRICRILATAPGMGRTRTAQLVAVVGTPHRFRTRRQFWSYCGLAVVTRSTADWSRREDSWVRAQVNQTRGLTRRRNALLKTVFKGAATTVIRQLPQDPLHQHYERMTRSGIKPTLAKLTLARRIAATVLSMWKNEEVYDRKRHAVLTDGDDK

SEQ ID NO: 329890 - protein, 328 aa, unidentified
MTEEVFAGIDLHGNNVMIGIVDERGRRLKHQKLGCDLKAIASFLEPWKLQLKSVAVESTYNWYWLVDGLRALNYPTKLANPAGIEQYSGIKHADDENDAFFLADLQRLNILPTGYIYDPILRPVRDLLRRRLGLVRQRTARLLSFKSLYARTTGQAMSLSRLKAMEPNETKTLYQHPANCLIALLQKEHMEKLSQSIELIEKSVLAQARELPCYQKLLGLPGVGRILGMTVTMEVGEISRFQRPGQFASYCRAVDSRRLSNQKKKGENNRKCGNKYLAWAFVEAANFARQHHDHCRRWFDRKAARTSKVIATKALACKLAKAAWYLMS

SEQ ID NO: 329891 - protein, 407 aa, unidentified
MTSMDRTQYNFVGIDLHKMNHVAILCNCFGEPIKTFTIKNSPNYFPKFLENVLKASKDKAVIFGLEDVNFYGRSLAKFLIDQNQQVKEVNSAWTKKRRNAGINKSKTDKNDAHLICKNLINELDSMPTANPVDFYMAVRQTLTSRNHYIQMITSLKNSIHNMLIHHYANYTDFFKDFESRTARGFFIKYPSPDLLQGVSQESLQKYLKEFNRSAPKDLSAKILKAVEKNGWMDTGYQEERNMLIKTHLENMENLIGTVKDLESKLEVLVGQSDYPLKSIPGIDTVLAATLIASIGDINRFSNSGKLAKLAGIAPYEHSSGQSVKKYSNKLGNRELHKAFYAMTLTHIRKEANPIMYEYYQKKIAEGRKKKQAMVCVMRRLVNIVYSVMKHKRPYEQPTRCQDEQNSA

SEQ ID NO: 329892 - protein, 410 aa, unidentified
MTKIIVAQNAPVLVAIDIAKARHEVLIAIPDKKRRRRLTVLNELADFNRLATALKEYGRPVRVAFEATGNYHRALAYYLATAGFEIKLVSSVALARTREALNNSWDKNDPKDAQVILHMMEIGNEQYYHDPLVCGTNDIQELSKTHDIVSKSKTELWHRVLTHYLPLYFPEADRFHRSSRSDWFFAFLERYPSPHFITAMGKDAFTTDAWDVIGRKVAKERLLADIYETAKSSVGLPVAPDSDAISMFRLVLGEGRSLIAQRNQIEDRAVALLKDLPDYQLLTSIPGIGPINALTILAEAGDLRRFGHHRQFLKFCGMDLATIQSGTFRGQTKLSKYGNARLRRTLWMAGQVAILQRTNSFRDKFERYIAKDRQNTHLRRKAYTAIAAKMARTVHGIIKHGEPYRPFFEG

SEQ ID NO: 329893 - protein, 530 aa, unidentified
MSSNISTNRRNRRRSNSKSKACTRQNLQKPNGVIGPRVKAVGGEHFAIVCVDPAKHRSELIMADYFGNLLIEPRTVEHGAAGFKLAVELIRQTQQQHNIQDTIVVVERTGNYYLPPKRAFANAGFETRVVHPFATKQYRLPADPGIKTDETDLYAQHRAAVAGFGLCEFELESPYRELQLRARHRRNLVENATAIACQLREHLHLAMPGYANLFERLFDHQTAMAIARRCDSPTKLIELGQAGLSQHLREKNVRHQIRTIDKVLAWASQAAREEIQDGPMHHAIWTDLHDLYQYFQQQIAALEGELAHGLVQTPYVRLLAIPGINAVSAAELAAEMGPISRYANANAITGRCGLYPSRHQSDQTDRDSGPIIRQTNRRLRCVLMRIADNLACHCAYYRGQAQVDDAHGVDKRASRVKIAKRFSRLALACVAGDQPMRHPCFQQPDSILEKLRHFHLAHQTPLDRLLADLEAAVEQLPYNTRNREAEIVADVLRKQADRRRGVTAIGDLLPAVLARLGITTTTENENGDRS

SEQ ID NO: 329894 - protein, 474 aa, unidentified
MSKGSGMTRGDRRRNARRERLRGLLPRDGAVIGIDLGDEKQAIAVVDHDVRVLARKTVRVKAFRLGEALDWAVGQARVRMFGHVTVACEPTGPRWLQVQRLCAERGLPLVCIQPLVSHIAREQQDYTTHKSDESDCVMIARLAIELHCYLPEELDEAWAQLRQLGRRRAQLITSATASVQRVRDFLSVAWPVAPEACKHPFESVTWLAAMQVVTSRCGGQPEKLAATGLAEFTALVRQAVAGWGGQRPAGRVCRAVFAATASTEGVVVSHRRALLRRCSDELGDLQRIRAQLRAVEADMTVVLGELGLSRLADIPGLTAVGAAAILAETGDPRRYDSSSSLVKHAGLSPSGNASGAFEGQAHISRRGRPGLRLTVWRAIWPLLIHNPVMAAKYQAMTQAADAGAAAQAQPGTGSRQASAAAAARAQRAKARVACAAALLRWIYSMVVHDTGWDPDVASGAASCQHAPRYQAEAA

SEQ ID NO: 329895 - protein, 430 aa, unidentified
MKSNTQNAKIEAITEKTLVLGIDVGSETHYARAFDYRGIEYSKKPFKFSNTEVGFATFKEWILDLKERHEKDKVVPGMEPTGHYWFNLGKFLQDNEMKPVLVNPHHVKKSKELDDNNPTKNDRKDPKVIAGLIREGRYMIPYLPDGVYADLRTASNIRFQLQAELTRIQNRISRWFNIYFPEYKTVYGKPDAKSGMLILKAAPLPEDILTLGIDGVNQIWRDAKLRAVGKARAKTLIKAAEHSIGSKEGTMSARMEIRMLLEDYESQNMRLQEVMVLIEELVKEIPMAEKLLEIKGVGIRTVSGFLAEVGDISRFNNPKELQKLAGLALVENSSGKHKGKTTISRRGRKRLRYLLFEVAMSLVAKNPEFRELHNYYTTRRLNPLKKMQSLMAIAAKLIRVFYAMLTKGVDYDPKKMVSDIKRPAVYIQAA

SEQ ID NO: 329896 - protein, 343 aa, unidentified
MKLIRVGVDLAKNVFQVHGVDRNEKAVWRRKLMRENWLKELLGAVEPGCEIGMESCGGAHHWARRLQAHGFKVKMIAPQFVKPYVKSNKNDANDAEAICEAMSRPHMRFVAVKTVEQQDIQAVHRIRAELTKQRTAKSNQIRGLVAEYGLVAPKELVQLRRALPCWLEDAENGLSERFRRLLNGLWGDLRSLDERMTELDREIAVIARNDPVAKRLQQLRGVGPIIATALVAAVGNGEQFANGRQMSAAFGLTPRQHSSGGKERLLGISKRGDAYLRVLLIHGARSVIRYSKDKDDRLSQWVTRLAARSHPNVAVVALANKTTRMAWAMLKNGTDYQPAMVGS

SEQ ID NO: 329897 - protein, 385 aa, unidentified
MRGQTVIPMDYEGVAGLDVDKRSISVTFTNHQGFLKSLRMPYSVEHLLNHVRKHFPRQKVAFAYEAGPTGYGLYDGLVAQAYRCLIASPAMIPKAPGQRVKTNRLDSRGLSENLRGGQLKSIQVPSAVYRELRHLTQLRDTFVSAMVAMKQRIKSLLLLEGIEFPPAPAGSQWSVLVKDHLRKLPCSTTVRFKLDQLLDSLAFNEQQVVKTTKEIRRFCQHEPELGQCIKYLRTLPGIGGIVASQLVARIGDWRELRNIRQLAGFLGLVPTEHSTGDRTERGSITHTGDPRLRSKLIQASWSAIRQDGELREFFRSVCKTHPRPLASRVAIVAVARKLSVRISVVLMNQRAYEVRKPVHSAPLTQEETGPQGTPRRQAEPGANNS

SEQ ID NO: 329898 - protein, 338 aa, unidentified
MKLYCGIDLHSNNSLISVINERDEVIYEKRLPNDMNTLLNALRPYQDSLHGVVVESTFNWYWLVDGLLAAGLDVRLANTFALKQYQGLKYTDDKTDARHLAHMLRLGILPDGYIYPFEMRCVRDALRRRLLLVRQRVTQHLSLQSLIARHTGKRLTGPQVKKLDGDALDALLTHPAARLTAGIAHDMMKTLGEAIERIERNVAAYCQPTPGYEIITGITGIGPIIGQSILLETGPIDRFPTARDYASYARCVPSQKISNGKKKGEGNRKNGNRYLEYAFMEAAHYAAIWEPRIKRYYQRKAQRSHKMIAKKAVASKLAKACYYMLMRKEPFAIDRAFA

SEQ ID NO: 329899 - protein, 461 aa, unidentified
MVAPAAWPLARTALRRLAPLLWADQNLNRIMWRSWLVCFGFGLEMTTHHEVRSFLPIPSAPISTYQHPGLELFMNPNTNAKAKTKNPNTNASSTNPANSTGQSRLFVGIDIAADTATAAWITSNSQMGTGTGTQAHSQSTTPTKPLTFDQTPAGFALLMNKLRASGVAAQDSLVVLEATSTYWIVLASTLHEAGYQVSVVNPAQAHHFAKALLKRAKTDKLDALTLAALAQALQPPPWTPPPVIYHELQQRLALRDSLLNMRGQVRNQLHALQHNLVVIPSVHAQMQELIQSLEEQIHRVEAELKTVIQNDAEWGQAIARLQSIKGIGLLTASWLVVSTLNFSSCPNVSSLCSYMGLAPMPRQSGSSVRGRASIGHSGKGRGRRALYMATLSAARYNPPIRAFYQRLRAAGKPEKVARCAAARKMLVIAWAIAKQGTKFDPTYQPQPASAAQPKLAAAGRS

SEQ ID NO: 329900 - protein, 342 aa, unidentified
MAIVAGFDVHRAQITFDALDTDTGEVSRGRIDATPTAVARWTQRFDGCEIDVAVEACTGWLFVCDALVAAGAVPHLAEPVETRALRGRKRRAKTDREDARWLCELLADGRLPEAWIPPEHVRQWRSRARLRHTLIGERTQWMQRIQATLFHHGIGGTPDKLRTRTGRAYLEGLQLPDDARERIAIALAMVDAIDAQIAPLERDLRQLARRQTGCKALMGLYGMGELTSLVTLCELGDVQRLSASRKAVRMAGIDIGVHRSDRRSRVGKLNRQGSPQLRWALYEAALAACRPSSPDHADYLALKARGLSHTRASLTIARKLARRSFHVLRELGPNAVEPIPTR

SEQ ID NO: 329901 - protein, 349 aa, unidentified
MFALGPESPCLSKAGGPAMIVSNGWLGFVLVCKAEALMLDTRTYVGVDVSKDHLDVAFPDRAKVWRTGNDREGISALGRKLAGLDAPQLVCEATGGYTRQLQRDLAHRQIAFSCINPRQIREFARATGRLAKTDSLDARAIAAFAAAVRPAVRVVPDAQTRLLGQLVARRRQVVDMLGAEHNRRRLIESPALQRRLDAHIRWLERALQELDGDIDTTIRSSPLWCATEDLLRSVPGIGPITASTLIADLPELGHLDRRKIAALVGVAPMNPDSATLRGRRMIAGGRAAVRHVLYMATLAAIRHNPIIAAFYQRFVTAGRPGKVAVTAAMRKLLVILNAILRDQRPWHPA

SEQ ID NO: 329902 - protein, 462 aa, unidentified
MKHVDQWWDDTVVAHPPLWVETTMGIDWGESKNAYAVVGYGGHLLAEGSVEETPEGLEELLSVLRRFAHPQEPDRLAPVAIETPRRLLVSALQQAGVDVVPLNPKSVKKNREVRTARNGTKSDPTDARLIADTLRTNPQWYRTTHSPTEQARAITVLNRARDEAVIAAVRQANHIRSVLAEYHPNAVSAFSSEEMSKSLAPYWVLLDALTPAEAARLRVDGIVTRMQKPGGKRNAKGLEKTVAPRIRAAFKRPYLQYPPLVEAAFAANVRRDLEVLRAAVEHRVDLDKRLQTALEAHPYWDLLGPATGLGPVGLGGLVAELGDDPERFRTVDNLAAFAGSAPVLSESGKRGSTRRRDVKGNRLHKAMWHWGEGAYLHHPGAGYYYWTLRSKGSEHPHAIRKVMNKLLRGLLHCIKSGEVWDDNLVWRTVATPEQVKELADEVRASKRKGGKNTRPEPLPRAS

SEQ ID NO: 329903 - protein, 359 aa, unidentified
MEEYIGCDAHKEFSVFVTMNERGEYGAAQRVGHNRQQMREYLSSLAAGSRIALEASGCYYWLVEEMEQAGHQPQLADPRIAKQRMEGRSKTDQKDARGLAMLLHNGTLPRVWIPPAQLRDQRELLRWRMYLASLRTGLKNRIHGTLLRYNLRSAASDLFGVAGRQQLAQLLEQLPQYTRGSVEEQLVSLDFILLQIQGCEQALEGMLEDNIERDLLKTLPGVGRILSAVIALEIGDVKRFGGAEQLVSYAGLVPTLHQSAKKRRMGQCPSDANQYLRWALVEAANVVVMNQKAWSGRHVVQLYQRVRANTKRHGKAVVAVARHLGEAAYWILSKQEGYRAPQHRVASSFVEARVNAACA

SEQ ID NO: 329904 - protein, 378 aa, unidentified
MNRIIKIGMDVHTTNYTLCIFEPSFEHDGTVHCITQVKPEVKNIIHIIEIFKKKHENEELNIVCGYEAGCLGYSLYHELKEKGIECVILAPTTMKTEKGGRKLKNDYRDAKMIAECLAYGRYSAVHVPTELDNSVKEFIRMRDDIKENLKSIKQQIIAFLTRNGKQFEGKSYWTRKHIDWINTVSFSEPLLQDTLNEYMIEYNHLCDRVEILDRQIEEISLKEEYVEKVQQLQCLIGIKTHTALSLIVETSDFNRFKKGNMYSAYLGLIPGDDSSGGHENKLGITKAGNSHLRRLLVEAAQGYTRGRVGFKSKDLKARQEKCGSEVVAYADRANERLRRKYYRMTLRGKKFNVAKTAIARELACFVWGIMTDHIDLCN

SEQ ID NO: 329905 - protein, 395 aa, unidentified
MKTVCGLDVHKGMILMCILKENGEKIIRKFTTLTVDIESIRDVMQEHGVQDVGLESTGVYWIPVWRILQGHFDLKLINPWFIKQLPGRKTDVKDSEWIATVIQKNLVRGSYVPGRHIQELRQFGRRYVRLCEQSTRIEQEIDRQLHRCNIQITNYATKIGSASVIKVVKAIIAGETTAAMLEKHVHGRIKNKHKEEITASLTGVISKTDRFIFSQNILEYELILAQQEECLKEMSSYCEKYFIKELQLLCTIPGIQKLSAMIIIAELGVDLRTFVTAAALTGWAGLRPRNDESAGKIKSKKITKGNKYLRRILVQCAWAASRQKNGWLKTKFEQLCVRKSSKKALIAISRKLLVIIWNVLSKQEPYKEFIPKIDPQQKQKKIDYHKKIIQQLETV

SEQ ID NO: 329906 - protein, 320 aa, unidentified
MNNSTVLGIDVSKEELVIFNSSSSQIVKVANSVPGLNKLLSSLDQDKSDVVVAIESTGDYSYLAMKFFLKAGFTVKLLNPIVTKKAISSTVRGKKTDKSDAVAIAEMVQLGQGRVISERDLDLTNKALIRTERKLISLRSDLKRIKNSLQMKTRNGVNLSQAVSEINDLILEVDQKAKNIWKLTENKEPDRQEQIIDSHVGCGTKLSKIISEEAGDIKRFPSSSQFKAYVGIDPKIIQSGKMDIKGKMTKRGNPTLRHSIYLASFVASRHDPDLKAYYEKKRNEGKAHTHAVCAVARKMCERIYSTVIHDRLYEPIRSTT

SEQ ID NO: 329907 - protein, 385 aa, unidentified
MQQTIRPENAQRSTHPTLYLAFELSNQEWKLGFTVGLGQHARQRKITAGDTAALTQEIALAKQRFGLPADAPVVSCYEAGRDGFWLHRFLENEHITNLVVDSASIEVSRRGKQVKTDRLDVEKLLSMLLRYHGGEARVWSVVHVPSLAAEDHRQLHRQLLALKEERTRYVNRIKGLLVGQGIHLAVDAEFLTRLPQLRLWDGSALPEGLRTRLQREFTCWQFVHRQILELEAERRGILRNSQEACIEQVRQLLRLKGIGDAKRSAWLYVMEFFGWRDFQNRREIGALAGLTPTPFQSGADDHEQGISKAGNTLIRAMAIEIAWGWLRHQPDSELSQWYQERFGAGSTRLHKIGIVALARKLLMALWHYLESGEPPPGAVLKPATA

SEQ ID NO: 329908 - protein, 344 aa, unidentified
MKFTRCGLDIAKQIFQVHGVNEHGVVKGRKTLPRAKVLEFFAQVPPCLIGIEACGGAHYWARELSKLGHTVKLMATQYVAAYRKRGKNDANDAEAICEAVGRPNMRFVAIKSVEQQAVLMVHRARTLTMANRIAQVNQIRGLLGEFGLVVPTGVARLRRELPSILEDAENGLPVLGREVLSGLLEQLREADMRISAYDRQIRVLAEASEPARRLMRVESIGPQTATALVATLGDPHVFKNGRGFAAWLGITPRQHSSGGKERLGQITRQGDSYLRTLLVHGARAYLRVVDKKTDAKSVWVQRLKQRRHVNVAAVALAAKHARIAWAILAHGTEYRPAGPQTAVA

SEQ ID NO: 329909 - protein, 401 aa, unidentified
MVKVRERIWVGIDVGKASHHACAVDETGKVVFSQQTQNGQAAIEALIARAGKAGSEVSWALDMTSGTAGLLLALLWQTGQPVRYVPGRLVNRMAGAFAGEGKTDAKDAKTIAETARLRTDLVTVTAADPIVADLQVLTAQREDLMGDWVRGVNRLRALLASIFPSLERAFDYSSRSPLILLTGFQTPGSLRDTGADGVAAYLTEHGAWPKGIPAMADKALDAAGEQTMALPTEKVTAPLIARLAADLLDLDRRIKDLDKQLTDRFEEHGHAKTITSIPGFGPILGAQFLADTGGDLPRAFGTPGRLAAYAGLAPVPRDSGRVKGNLHRPKRYHRGLRRVFYLAAFSSIRVEGPSKTFYQRKRSEGKLHTQALIALARRLVDVIWALIRDRREFQPTVAVAA

SEQ ID NO: 329910 - protein, 361 aa, unidentified
MKKPAHHLIAEVPRKRAKVELTIGIDLGDVWSHYCTLNQQGEVIDRGRFRTTPKAIDTWFTDVPHARVAMEAGVHSIWISEQLEQLGHEVIVANVRELRAISHSDRKSDDVDAEKLARYARLDPKILRPISHRTVEQQQALTLIRARELLVRLRTASINAVRGLTKACGHRMPASSTKCFAQRGQAAMPPGLKLALDPILTQIAEMTLKIKQYDKDIQRLTQTEYVETQAMMTIHGIGHITALTFVLTLGDKGRFRCSRDVGCYLGLRPKRSQSGERDPQLGITKAGNAYLRSLLIECANHILRPHGRDSALRQWGLHLAARGGKQAKNKSVVAVARKLAVLLHHLWITQQPYVPFFQQAA

SEQ ID NO: 329911 - protein, 337 aa, unidentified
MTHVGVDLHERFCYMTAVDAMGRSLKAGPVDNRPAALRRWLRGLPGPIEVAVEACSFWPAFHDAIAEQVGAIHLVHPQRVKAIASAKLKNDRVDAATLAHLLRCNLLPEAWKADAVTRERRQQVRLRISLGQHRAALKNQVHAVLHQHGKRAPVSDTFGRKGRAWLEKISLPPQAREAVDTYTGLLDQVGQHIQRQEQRLKELASQDQRVQWLASIPGIGVYSAMILLSEIGDVRRFSSAKALYSYAGLVPWVRESAGHCHRGPISRCGSPRLRWVMVEAAHTALRCSPAARRYFERLRKRKHPHVARVALARKLLAAAYALLRDGVCFDESIFAAV

SEQ ID NO: 329912 - protein, 429 aa, unidentified
MSYRIAGIDVHKKMLAVVVTDVEIDSEYQFERRRFSSNPEQLRSLAAWLLEQEAEEVVMESTAQYWKPVWEALERYWKPMCETREGARRKSGTLHLAQALSNRGRRGRKRDFPDAERLVKRLVAQELTLSFVPDTEQRLWRTVTRKKYQLRCDRIRLQNQLESLLEEAHIKLSSLVSDLLGLSARRMLKAIAEGETNPATVAALADERLRATPQQLCDALGACTELNAVYRRLLKMALEELRLIDEQIGQLDQEMASLLSQHQDAVQRLAEVPGLGVDSAQQIIAEVGPTAATFPSEKCLSSWVGACPGDDETAGVNYSHRSPKGNRHMRRLLNQAANAAARTKGSIFEIVYRRSVPRLGHNQSIGAIAHRQCRLIWLILHQGVRYEERGPAVTKRSKQLRTWKMIRQLRNLGYRIEPPNPQPSQALAQ

SEQ ID NO: 329913 - protein, 429 aa, unidentified
MPYRIAGIDVHKKMLAVVVSNVEVDGDFHFERRVFGSNPEQLRSLAAWLLEQEVEEAAMESTAQYWRPVWGALERYWKPICEKREGAKRRSGTLHLAQAQSNRGRRGRKRDFADAERLVKRLVARELILSFVPDAEQRLWRTVTRKKYQLTCDRVRLQNQLESLLEEVHIKLSSLVTDLLGASARRMLKALAEGETNPATLAALADQRLRATPEQLCDALGACTDLKPVYRRLLKMVLEQLQFLEQQISQLDQETASLLSQHQDAVERLAAVPGLGVDSAHQIIAEVGPTAATFPSEKCLSSWVGACPGDEESAGVNYSRRSPKGNRHMRRLLNQTANAAVRTKGSIFEIVYRRSVPRLGHNQAIGAIAHRQCRLIWLILHQGIRYEERGPAVTKQSKQKRTARMIRQLRSLGYRIESPNPQPGQAQAQ

SEQ ID NO: 329914 - protein, 406 aa, unidentified
MASIDRTKYLFVGVDLHKKTHVAVLCNCFGDVMKQFKITNAPNHFPDFLEDLKKHAEGKDIIFGLEDVNFYGRSLAKFLIANGYIVKEVNSSYTKKKRNKGTNRNKTDELDAKAICINLIMEYDAHPVANPQDIYLAIKQTLSTRNNYVKMAANMKLSLHNLLIHHYPNYTDFFKDLESKTARGFFYTYPSCEMVANVSTEELTKTLQQYNKSVPKTKAQEILNAIAANGWVDNGYQEERNQSIRSYIQSIEHLEAEIAALEKQLDRLIDETGYPLKTIHGVDTVLAATFIANIGDINRFKHHSQLAKLAGIAPIEHSSGELQNRYSNKLGNRELNKAFYSLALTQIRQGINPLMYEYYQKKIKEGRKKKQAMVYVARRLVSIVFSIMKNKTPYRQPTVTVEAVGA

SEQ ID NO: 329915 - protein, 347 aa, unidentified
MDHIGMDAGMVRSHICELTDTGEIVEREIRTERKRLQEVFGGRPRARILIEASTESEWIACCLEECGHEVIVADPNFAPMYAHRSRRIKTDRRDAHALAEACRLGAYRPAHRTSPPQRDARALLGIREVLVRTRTRWIVHTRALLRRDGLRLAPGRAENFVARVHDLALSPQLAARIAPVVALLRPLNEQIAKLDAQVAIRAREDERAQRLMTAPGVGPVTAVAFVATVDRVVRFRDAHQLESYIGLVPREWSSSEIQRKGSITKAGNTRMRWLLVEAAWCILRRKKKPETTLLREWADRIALRRGSHVAAVALARRLAGILYAMWRDGTEYDPAQIGRRDHIRKVA

SEQ ID NO: 329916 - protein, 323 aa, unidentified
MFTLGIDISKDSFHVELSVNEKLRHRKFSNRKEGFAELRAWLSKHKVTQVHACLEATGPYSEALALYLHGQDHIVSIVNPAQIKAFGQSELLRNKDDRPDAGLIRRFCEQQRPARWTPPPVHLRELQALTRHLENLHETRQQQQNRLEATSTKSVIKSLRKLVTHLDAEILRTEQQIAAHIDSHPDLKEQCQLLESIPGIGQRTAAKLLAEIEGISQYKSARQVAAYAGLTPKNNRSGTLRGRTRLSKTGNSRVRKALYLPAIVATRHNPIVSAFCCRLAQRGKTKMQIVGAAMRKLIHIAFGVLKSGKMFDPNHELVLKPVS

SEQ ID NO: 329917 - protein, 318 aa, unidentified
MQEGAVDSDPEAIASFVRSRAPGTVRIGIETGPTTTWLWTELNRLGLPVICIDARHAKAVLKMQINKSDRNDAAGIARIMQTGWFKEVRVKDLDSHAVKALLASRALLVKIKRDLENQIRGLLKNFGLVIGRGKFNVFAVRAAELIENRPELIAAVRPLLEARKAIEQQVDDLDRKVHKLARHDVQVRRFMTVPGVGPITALCFKATIDDPTRFKRSRSVGAYLGLTTRRHASGEIDWSGRISKCGDAMLRMYLFEAAGVLLTRVPKWSGLKAWGAKLTKRNGLRKAKVAVARKLAVILHRMWIDGTEFNWLTKKAAA

SEQ ID NO: 329918 - protein, 348 aa, unidentified
MYYAGIDYHKRYSVVSIQNGQGQIVQEDRVDHAYPEGFRRLFRECPEPVSVVYESTVNWSWLYEILKPLRNVSSVTLANPFKVRLIAEAQIKTDKISARALATLLRLNVVPACHIPNQKTRRRKEVLRQRSYWVKMRTAVRCRVHQIVGRQHNLSMPQATDLFGRKGRAALDKALLPEPEDSLLEQNLNVLDALDEEIGDDEKLIRKAGKADHATKLLSSIPGIALILANVIATETDGIGRFRDSPHYTSYSGLSPTVHSSGGKTRTGRMVPQCNRWLKWAYVEAAWVAVGCSPYFGGLYRHHRSRGKQANTAITIVARRMCHIAYQLLTEDRMYEEHPFSPAALVKG

SEQ ID NO: 329919 - protein, 428 aa, unidentified
MNTNETPVGTADQYAAFIAIDWADQQHVFSLQVAGQTKKETGTLEQKPEVIGPWIAQLRARFGGRAIAIGVEQSRGALLHALLGYDFLVLYPIHSTTVAKFREAFKSSGAKSDPLDTDQILLILTKHLALLKPLRPDTVATRLLARLTQDRRKVVDLRTTHIQALLAGLKEYFPQAIELFNGNVTSRLSADFLKKWPDLPAFQAAKPAVLKKFYYGHNVRTPEVIEKMLQLAATAQPLTTDPAIVESGRQLSRLHSQVIQTLNASIAEYDERIAAVFASHPEAKIFTGLPGAGAALAPRLLAFFGTDRTRFATASNVQCFSGIAPVTKSSGRSKVVHFRLACPKFARQTFHEFARLSVAQCQWAANFVEYHTGRGKKYQAVIRALAFKWIRILTQCWKNRTPYDEQKYLADLKKRGSIFATLHLEKKS

SEQ ID NO: 329920 - protein, 347 aa, unidentified
MKFYTKQHQFYCGIDLHARSMYLCILDSKNRVKLHKDIKTSPDALMKAIEPYRNDLIIAVECMFSWYWVADFCEDNNIPFILGHALYMKAIHGGKAKNDKIDSHKIASLAKGGTFPMAFVYPRDMRSTRDLMRRRMHLMRKRAELLSHIHNTNTQYNYDPLGKNLRYKSNRKLVDGRFSDPSVQKSVDLDVQLINFYDDQLRGIEYYIRKHAKINDYESYMLLNSVPGIGKIISLVILYEIYDIKRFSRVQDFASYARLVKCKAQSAGKSYGTSGAKIGNAHLKWAFSEAAVLFLRGNPRAKAYVDKMAKKHNTGKALSILAHKLGRAVYFILKRKKAFNMDQFLPA

SEQ ID NO: 329921 - protein, 391 aa, unidentified
MICVGIDVSKDKHDCCIFSSDAQLLLKPFSVPNNRDGFDSLYSAVRSFENDPDKVKVGLEATGHYSFNILGYLLEKGIHCFVFNPLHTNLYRKSLTLRKTKTDKVDSKIIAKMLLSEVDLKPYSKTLYHNEQLKSLSRYRFSKIRERGNLKQQLARLVNILFPELENLVPSLHLSSVYALLEEFPGASYVAKAHITRLSNLLCASSKGHYKKDKAVEIRNAASSSVGSVMPAKSLELKHTIQLIRILSEEIDEIESQIQEIMEKIQSPITSIPGLGFRMAAMILSEIGDFSKFDSPDKILAFAGISPSTYQSGKLDNAYAHMEKRGSRYLRYALYNAAIYVCHWDKTFSVYLQKKRAEGKHYYVALSHAIKKLVRVIYRLQLTGEPYRPAV

SEQ ID NO: 329922 - protein, 322 aa, unidentified
MEPTIVGIDIAKKKFDVALLLGEKTKSGAFHNTPAGFATFARWLTTRHGVERIHACMEATGTYGEELALYLYRAGHVVSVVNPAKIKGFAQSELSRTKTDKADAALIARFCRAMKPEAWQPPAPEVKKLQALVRRLEELSGMLTQERNRLATADEVVRPSIEGVILVLQERIKHLRQLISDHIDQNPKLRANRDLLQSIPGIGPTTSAIILAEFGDVERFGDARHMASFCGLTPRHRQSGSSVRGKSRLSKTGSSRIRKALYMPALVAMKHNPVVAALRERLKGYGKCNMVIVGAAMRKLVHIIFGVLKNGRPFDPAVAIAA

SEQ ID NO: 329923 - protein, 347 aa, unidentified
MDHVGLDLGKRESQIAILAEDGELINMRIRTERRRLVEMFGRRPKARILMEASTESEWVARCLEDLGHEVIVADPNYAPMYAQRTRRVKTDRRDAHALAHACRAGSYRPAHRTSTERRDLRARLAVREAVVRTRAAWITRIQSLVRREGCRFRTGAPETFPTRVEELALPPALMTVIAPLVELLGPINKQIAVLDEELERIVAADEVARHLTTVPGVGPVTATAYVATVDDVTRFRGAHQVEAYLGLVPSEWSSSEVQRRGHITKAGNSRMRWLLVQAAWCILRRRKRPQTAALRDWAERIAGRRGRSIAVVALARRLAGILFAIWRDGTVYDATKVRGPLPARRAA

SEQ ID NO: 329924 - protein, 341 aa, unidentified
MGIVTVGIDLAKNVFALHGVDQSGKAVFIKPKVVRGQLLEMVAQLPPCLIGMEACSGAHHWAREFCRFGHTVKLMAPKFVAPYRMSGKRGKNDAADAAAICEAVTRPNMRFVPVKDVDQQAILCLHRTRQGFIEERTALYNRLRGLISEFGIVLPQKVERLRREIGAHLEELPGWANRCVGDLLAYADRLNERIEEYDRAIAEAARQDARSRQLMQLPGIGPTTASALVASLGGGHDFKNGRQLAAWVGLVPGQYSSGGKARLGRITKAGDAYLRSLLVMGARSVIAGLGEKQDRFSRWARSLVERRGYWKAAVAIAAKNLRLSWAVMKYGDDFRLTAALA

SEQ ID NO: 329925 - protein, 346 aa, unidentified
MKQITTIGLDLAKQVFQVHAAATDGSPIFNRKLRRAEVLRLFDKTPACLVGMEACGSAHYWAREITALGHEVRLIPPVYVKPFVKRGKTDAADAEAISEAVTRKTMRFVPVKSADQQAAAVVLKTRALLVNQRTQVINALRAHLSEFGIIAAAGTTKVAGLIAIVCDETDLRLPKAARFSLMEIASQIETLKTQIEKLEQAIVATVRRDDDARRLVTIPGVGAITAASVRALVPDPGGFKSGRHFAAWLGLTPKPHSSGGKERLGRISKMGNPALRSLLVVGATAVLRHARDNPNASRWITALLARRPYKVVAVALANKMARIIWALLVKGGRYQENGASNQLATA

SEQ ID NO: 329926 - protein, 326 aa, unidentified
MEHELHYIGIDTAKEKLDVDVLRPDGRHRTKKFANTTKGHDELVSWLKGHKIDHAHICIEATGAYMEPVAECLYDAGYIVSVINPALGKAFAQSEGLRNKTDTVDARMLAEFCRQKRPAAWEAPHPLERALRALVVRHQALTDMHTQELNRTETAREVQRPSIDAHLLWLEAELKRLEKQIKDLTDDDPDMKHRRKLLESIPGIGEKTSAVLLAYIGLKDRFAHARQFAAFAGLTPRRYESGSSVRGASRMSKAGHVSLRRALYMPAMVATSKTEWGRAFRDRLAANGKKGKVILGAMMRKLAQVAYGVLKSGVPFDASRHNPVAA

SEQ ID NO: 329927 - protein, 354 aa, unidentified
MYYAGIDLHRNDVVIAIEDQQGVGDKPRRFPSREPGAIVGYLAAHRPFQAVVEASCGYRWLYDLLTPLGTVVLAHPRRLRAIVDGRAKTDKLDAALLARLLRADLIPRAYVPPVAYAQLRDLTRARARLVRHEVEAKNELHALLARRNIHPPFKTPFGKRWTKWVAQTPLGVVEQAVRAELLRRLEHYAAERERLDQVLAELAPSFPEVEALLCLRGVGLYTALLLVAEIGEPQRFADGRQVAAYAGLTARVNQSGGHCYHGHITRQGSSWLRWALVQVAMKILPGDPALQAFYTRLRKRSSAKIARVAVARKLAAICWLRLMRWHYAAGIEERDFVSCAVMGGSGPVLGTGGR

SEQ ID NO: 329928 - protein, 407 aa, unidentified
MDQISFPQIVDRGCGLDVHKETIVATIRGSGLEEETRTFGTFTEDLELFRDWLKDHSVTHIAMESTGVYWKPVFNILEKHFEILLVNARHIKYVPGHKTDKKDSAWIAKLLLSGLLKGSFIPPQSNRELRDLYRYKRKLVSQTVAERNRLQKILEDANIKLASVVSDVFGVSGQAIINALIEGEKDPVTLASLAKGSLRKKQPQLQAALRGNLTAHHQFMLKTIRKSLSNIEEIIVDVDNQIEQYLQQFRQEVELLQTIPGVARETATCLIAEVGTDMSVFPDQKHLSSWAGMCPGNNESAGKKKSERTTKGNKTLKTALTEAAWAASHHKDCYLQRKYYSLIGRRGKKRALIAVGHKILCAAYFILKYKTPYQEPNDTELAEKRKQALIRRSIQRLHELGVDLRLN

SEQ ID NO: 329929 - protein, 363 aa, unidentified
MTVVGIDAHKNWHTLVAVDDVGKRLAVLTVEARAVGHRQILTWLEQFDGVAVAVEDCRHLTRRLEADLLNAGHQVVRVHTRLMAGMRRSGREPGKSDPIDAEAVARVALREDGLPTAELPGASREIKLLTDHRRTLVARRTAMQSKVRWFLHEIDPDLHIPARALRRYQLLDDLQERIACRDGVVAEIARDLLDDIRSLTRRINDIERRLATLVRAGHPSLLEVPGLGVLGAAMIVGETAGARRFRSRHAFARFNGTAPIPVWSGNTVRVRLSRGGNRTINTALHMAAVTQLRLGGQGAAYYAKLITTGKTRTEALRLLRRRISDRVFAAMSTDELVTKTTPPATAAATATPRAGAVDLGRAA

SEQ ID NO: 329930 - protein, 325 aa, unidentified
MKYLGVDVARDSLEVADVLGSQGRAFSNTQAGIQGLLRWLSRSFPEEDLQLVVEPTSTYHHPLIHALVARQFAYTLINPAHTSAFARVQGKRAKTDRVDARLLASLGESQQPEPSSPPEETQEGLKALRRHVEWLEKELQAARNRLDTASFSPWTPQTVLDSLERTIQQLEKEAQQVREAMATQQQQHPEWTRQVNLLTSIPGVGERTATLLLTEMPPVASCPSARSWVAFCGLNPEPRQSGKGHYSRLSRVGTARVRAGLYLPAVSALRWNPAVRALGDRLRQRGKMGRVRIVAAMHKLLRLCFGVLKSGRPFDYSLHQATLPT

SEQ ID NO: 329931 - protein, 347 aa, unidentified
MEYFAGLDVSLETVNVCIVNAAGDILLEKKIAAEPAAIVHLLKSFGSPFKRIGLEAGPTSSWLYGELRAAGYGAICLECRHVKAGLSAMRNKTDRNDARGIAQLVRLGWFRQVHVKSEEAQRTRMLLVNRQQLLTKALDIENSVRGSLKVFGLRIGVVARRGFEARVLELVADDPIVLAVTKPMLRVRRALLEEFERLDRLCQQLARRDPVCRRLMTVPGVGVVVALTYRTGVDAPERFSKSRDVGAHFGLTPKRYSSGQTDYDGRISRCGDEMVRTALYQAANVLLHHGRWSSLRSWAMRIAKRGSVKGAKVALARRLAVVMHRMWTDGTDFRWSDTSRMTAPTAA

SEQ ID NO: 329932 - protein, 428 aa, unidentified
MDQVNRNRLEEFRQLRKEVRHSGEHLIVGIDIAKDRHHAFFGTATGKTLLRRLVFSNDHEGFRRLLDHAEALGAQHGLKKVVYGMEPTANYHKPLGEYLIGLGRTVVLVSGVTVKRNRESLDGRWDKHDVKDSANVADLISQGKCLYYEYPSAELRGLRGLLSLKRRLKKQEQGYRVRIRNHLIAQYYPEMDRDYEQLGAEGLSVVRWCLPASEIAQLDVEPFMERVTSRRIRREKRRRLEAVWEKAGESIGCDGVPGLEHEAKVMVEGLRQIREMIKETEDKIEELCKQFPEYRYVLTIPGFGPDVSSKVLGAIGDPNRFQNGKQVLKMGGLDLSADRSGKDSDKAIPQISKRGKADLRYALYQAALIASTKNREFMRYYTERLRGRDREKGIQMKMRVKLSAKMLLIAWTLMKKKEAFNPAYLDAE

SEQ ID NO: 329933 - protein, 312 aa, unidentified
MDAFIVGVDVSKDRLDIAVRPGGEAFAVARTGSGIDELIERLKSRSVRLIAIEATGGFETVVAAGLAGANLPVVVVNPAQVRAFAQALGKRAKTDPIDAAVIAHFAEATNPQLRQLPDATTRLLADLVARRRQIVEMIAAESQRARRVTAPRLIKSIARLRKALEKELSELDEDISDHVRGSPAWAEKEDLLASVPGVGPTIARTLIAELPELGSLDRRQIAALAGLAPWTRQSGQWRGKSFIGGGRASVRRVLFMGALVAARFNPELRQFRERLVAAGKPKLVAIIAVARKLLTILNAILRDRKPWQPKAA

SEQ ID NO: 329934 - protein, 412 aa, unidentified
MLFIGDDWAEGHHDVVAQDDAGKTLARRRLPEGTDGIARFHEMVASCLGEDAEPDPAGVIVVIETDRGPWVKALAAAGYRVYPANPKQAARHKETIANSGKKDDFFDAGALADMGRTRRHQLRELAADSDIAEAVKIAARAHQKLVWERTRHLLRMRSALREYFPAALEAYADLTLTGPDALELLGRAPDPDSAARLTVTQITAALKRAGRRGDLPQRARDIQATLRAPHLPQPAVIAGAYAASVQAGAAVIRALNEQCKIMETKVSELFRRHPDAGLYLSQPGIGDITGARVLGEFGDAPGRYATAKARKNYAGTSPLTIQSGKKKTVHARYIRNRHLIDALHAQALSALTASRGARAYYDELRAHDAGHDDALRRVASRLVGILHGCVKTGREYDESTAWSHRAQSPQAA

SEQ ID NO: 329935 - protein, 491 aa, unidentified
MGQRGKRKPAPADRSVPVEIADAEHELVIERAAAIDVAKAAGKVCVRLPGKSGRRFSRVWDVSARTGAITELAEQLVQLDVEKVTVESTSDYWRIWYYLLEDQGLDVQLVNARDVKNVPGRPKTDKLDAVWLAKLTEKGLLRPSFVPPAPIRRLRDYTRLREDLTRERSRYWQRLEKLLEDAAIKVSAVASTLDTLSTRDMIEALIAGERDPRRLAELARGRMKTKRSELIAALDGRFDDHHAELARLLLGQIDSLTAQIATLTARIEQLIAAMNEPDHDSDDHDASGTAAPQATNPASPGDQTTAPGPGATTAISAETDTATVIECRRLTAVERLDEITGVGQRAAQTIIAEVGLDMTRFPTPEHLVSWAKLCPRSIQSGPISRGGKTGKGNPYLKGALGEAAAAAARSNTFLGERYRRIVKRRGKLKALVAVARSILVIVWQLLSDPTARFHDLGPDYHTSRAVTERKVRNHIAQLTAMGFHVTLQPAA

SEQ ID NO: 329936 - protein, 434 aa, unidentified
MQDVEDEPLFTERVAGLDIAKAEVEVTIRVPSDTGTGRRQQETRAFGTTRRELLALADWLRCWGVTKIGMEGTGDYWKPVFFVLESRGFDCDLYNAAQVKALPGRPKTDRADSIWLAKITERGMISSSFVPPEPIRVLRTHTRYRRHLTQARTAEKQRVEKLLEDGHLKLSSVISDIHGVSGRDMLNGLAAGQRDPRALAQLARGTMRGKIRRLEEALECSFFTDQHAAVLAMTLVTIDHYTAQIEALTARIEKLAEPYLQQVRQLDEIDGVGTICAQDIIAEIGADMTVFPTASHLVSWARWSPQVKQSAGKRKGSNAAGRGNPYLSAALGEVSISAGRTQSFLGARYRRLAKRMPKKKALVATGNSVLTIMHVLLADPGARYTDLGADYYEQRMHVRRQARNHVRSLERLGYKVTIQASTTGPDDQPLTAAG

SEQ ID NO: 329937 - protein, 407 aa, unidentified
MSYELHNVVGIDVSKGKSTIAVMRPFGEIVISPFEVTHTSSDLKVLADTLNKLDGKTRVVMEYTGKYYQPIARYLYESGLYVSVVHAKIIHDFANNSIRRIKTDKADAVKIANYGLSNWDVLPSYTKEDDTRLVLKTLNRQYNHLMNQYVVARNVLISIADQTCPGLNEVFTNPRKADGRIKWAEVYRRFWHCEYITGFSRNKFISLYNNWCVKNGFRGSDEKASELYLLAKECVPTLPKTEYTKKIVEQAASELISLSDAMASVHREMLSIAKTLPEYPAVLSINGIGETLGPQLMAEIGDVRRFSKRSNITAFAGVDAPPFQSGKFDSKSRRISKRGSCELRKQLFQVVRIIVQLNLYDDPVYQFVMRKKAEGKPYYVYMVAGCNKLLRIYYARVKEYLAAENAN

SEQ ID NO: 329938 - protein, 326 aa, unidentified
MTNESLNYLCVGIDVAKASLELAVDDKSATVSFANDTQGIAALQAHLKHLPVALVLLEATGGLEKPCAYALALAGVDVIVINPRQSHAFAKAMGYLAKTDRIDAWALSHFARTLHDSAKREKLLLKMPTPEQHELDALVRRRSQLVDIRVAESNRLQQTQHPASAKSIKQVIHMLDKQISKLDGDIGGRLQTHFAHQLKLLAGLKGVARNTQAVLMGAVPELGQLNRRGISKLIGVAPLNRDSGEMRGKRIVWGGRADVRAALYMATLSAVRYNPVIKSFYERLRAAGKPAKVALVACMRKLLTIINAIIKSGTPWQPTYPHKEHA

SEQ ID NO: 329939 - protein, 388 aa, unidentified
MYYVGIDVSKFKHTCFIASNSGEVIKDSFDFDNSTIGFTDFKSVIDSLDSDQIKIGFESTGHYSANLVQFLINNDFEFFQLDPRKVKSFSQSLSSRKTKTDKIDAGVIARFLMTVDSKANTPLYYHISFLKSLSRHVYRLQKYISKSKVELVNLLDLAFPEFFKFFSSIYGKTPLCILEKTNSLRSISNMSESRFDSLRRLSRGRFNYSKFLKLKYAASHSVGINQDFYWSLIHALVKRINFLSDEKDAMEKVISNTMSAFSSPILTIPGISYLTSAAIISEIGDINRFSNYRSLIAYAGLDNSVSQSGTSFRIGKISKRGSVYLRTALYRASVSVIMKSKLIYSYYFKKKSQGKHGTLALTNVSRKLLRIIYHLLKTNSSFNDNLVI

SEQ ID NO: 329940 - protein, 355 aa, unidentified
MSQEKYIGMDVHQATISVAVMDARGKLIMECLLETKAATILEFIQGLRGTLALTFEEGTSAAWLHDLLKPHVSRLVVCDPRKNALLKDGNKSDRVDARKLAELLRTNQVKPVYHGKHGTRALKELGRSYLTITKDVTRVMNRIKAVYRSWAIPCAGTSVYTPRHRAEWLAKLVEPGVRIRAEHLYQQLDSLEPVRLEARRELLLESRKHAAVKLLRQIPSIGPIRAALLVALLQTPHRFRTKRQLWAYSGFAVEIHDSGEYRSVRGKLQRNRERITVRGLNDNHNKDVKSLFKSAAISASTRPGPLHDFYVTRVERGMRPTMARLTLARKIAAITLTMWKKGVSFDPKQLQRQAA

SEQ ID NO: 329941 - protein, 391 aa, unidentified
MIYVGIDVAKDKHDCFITNSDGEILFKAFSIANNLDGFNELYQKIASVMDDVTKVKVGLEATGHYSYNLLGYLIDKGLPTYVINPLHTNLYRKSLSLRQTKTDKVDARTIASMLMSDVNLKSYSDISYHNEELKSLTRYRFDKVKERAKLKTSVSRLVCILFPELEKLVPTLHMASVYAMLSEFPGAKQAANAHLTRLINLLSESSKGHYGKETAITFRDAARASIGSNMPAKSLELKHTIKLIQELDSEIDEIENEIKIIMDKINSPILSIPGISYRMGAMIIAEIGDFSRFDSPDKILAYAGFSPSTYQSGQLDGAYAHMEKRGSRYLRYALYNATKYVCHWDPTFAAYLAKKRAEGKHYNVAISHAAKKLVRVIYHLEKTKQQYIKAA

SEQ ID NO: 329942 - protein, 388 aa, unidentified
MQDVADQSVAPTTIGADLCAIFVSLELSRSTWLATSLSPGRGEKMSKHSVSAGDIAALLARFSELRRKACTRTGKSFPIVVIQEAGLDGFWIHRVLLSEGIESHVVDAASIATSRRRRRAKTDRIDGETLLRALLAHKRGEPRVCSMVRAPTPEDEDRRRICRERKVLIMERVQHVNRIKGLLFSQGASGYEPLRRDRRARLEALQTGDGRRLPQHLKAQVCRELDRLELLLEQIKAVEAERDALLDAEQTKASAPPPMLLGVHGVGPEFASVLWSEGLSRHFDNRRQVAAYAGLAPTPWQSGSVNREQGISQSGNRRLRTTMIQVAWLWLRHQPRSALTLWFKDRMERNGGRRRKTTIVALARKLLVALWKYVTAGVVIEGAMIRAA

SEQ ID NO: 329943 - protein, 353 aa, unidentified
MLAEMVDHVVGVDPDRDWITAAVVDSATTGMVATARFAAKGSGYREAMAWADEYSTDTERAWAVEGTSSYGRGIAAALANSGEWVIEFDRATEKAAKDGAKTDILDAVRAARETLGRDKWAVPRVHDGIREALRVHVVARDSAVHARTAAINELKAFVVTAPDHLRDQLRGLKRRSLVKRCAGFRHSENQPIDEQCTRAAMRAVARRIIQLTDEIKTHEKTLRALVAEAAPQLLGEFGIGPITAAALYVAWSHPGRCRTEAAYARLAGVAPIPANSGQTQERHRLNRGGDRQLNTALHTVAVTRIRAHPPTQDYKQRRLAEGKTDREIRRCIKRYIARRVFRLLENPPLEEAA

SEQ ID NO: 329944 - protein, 476 aa, unidentified
MNSKTKRANNQVNSVMNVQEQREMVEKANRILSEMKSFTWRDLETQGKFSKNDKLSFISDDMLILGCDIGSETHYVRAIDTRGRELSRKALAFDNNAEGFQKAHDWAVQLAAASDKKQIVLGLEPTGHYWFCLAAWMVSNGISVVQVNPYAVKQTKELEDNSQQKDDRKDPKLIANLVKDGNYGMPYLPEKVYAELRRLSMFREQLTEDRNRSMNRLHREMKIYFPEYKDAFGKIDGAFCMAVLKEAPFPEDILKLGGEGIREIWHQAKLRGRGYSRAAEIVKYAETSIGLKDGTAAGREAVRWFAEKIMELDEELAEVENKLNEKCREIPHAENVLEIPGIGGKILSGILAEMGDISRFDDAKELQKLSGLGLVSCSSGKHKGETRISHRGRKRLRYWLFQAARSAVAHGEEYKWIHAHYTTRAGNALQKMQSLIVIACKLLRVIYTMLKTGKPYDPEKLLKDIRYPENVQTAAA

SEQ ID NO: 329945 - protein, 427 aa, unidentified
MPYRIAGIDVHKKILAVVVSDVEIDQEYQFARRMFGSNPEQLRSLAAWLVEQEVEEVVMESTAQYWRPVWEALERYWKPLRQKREGASRRSGKLHLAQAQSNRGPRGRKRDFPDAERLVKRLVARELTLSFVPDAEQRLCRTVTRRKYQLTRDHVRVQNQVESLLEVAHIKLSSLVSDLLGASARRMLTALAEGETNPATLAALADRRLRATSEQLCDALGACADLKPVYRRLLKMMLEQLQFLEQQIGQLDQEMATLLNQHQGAVERLAEVPGLGVDSAQQIIAEVGPTAATFPSEKHLSSWVGACPGDDESAGVNYSHRSPKGNRNMRRVLNQAANAAAKAKGSVFEIVYRRLVPRLGHNQTIGAIVHRQCRLIWLILHQGARYQERGPDVNKRSRQQRTARMIRELRKLGYSVNLATSQADNPA

SEQ ID NO: 329946 - protein, 342 aa, unidentified
MHIASIGIDLGKTTFHLVALDEHGKIVIKKKFSRKQLLGYTANLQPALVGIEACSGAHFIGAALRDQGHEARLIPAQFVKPFLKSNKNDFLDAEAIAEAVARKNMRFVPIKTDDQLDLQALHRVRDRLVHRRTALINQIRGFLLERGITFAKGPANLRNQMPALLEDANQSLTPRMRYLLDHLWQEWKCLNSGIEHVSDEIDAIACQDAACQRLRQIPGVGPLVATATVAAIGNGAAFRKGREFAAWLGLIPRQHSTGGKARLLGISKRGNIYLRRMFIHGARALLLRVKYDTGRLGEWAHQLELRAPRNKVIVAVANKLARIAWAVLATGNEYRNTAVTAA

SEQ ID NO: 329947 - protein, 348 aa, unidentified
MYKVDPQADARSKHPAHSKLGGCTMEVYILGIDVAKAKFDVALLLGERVAHHQFPNNANGFAVLKGWLRKRGVTQLHACMEATGRYWEALAAYLHQAGYTASVVNPRQVKSFAESELQRQKTDRVDAGVIARFCRAANPAAWTPPPAELRQLQELVRRLAALKRMQTQEKNRLSNPGISPLVQEGIERHLAYLDEQIKEVERTISKHIDGHPQLKEQRDLVTSIPGIGETTAALLLGELGDLSSYTSARQVAAHAGLTPKHFQSGSSIRGKPRLSKIGNVHLRKGLYMCAVVAKHHNPIIKAFCERLLAAGKPTMLVIAAAMRKLLTIAFAVLKSQTPFNPNHQPCFA

SEQ ID NO: 329948 - protein, 337 aa, unidentified
MMYGGIDLHSNNSVIAIIDDADRVVAQKRLPNDITKIIGFLARWQDQLAGVVVESIYNWYWLVDGLQDAGMQVHLANTAAIKQYEGLKHSGDETDAQHLAHLLRLGILPTGTILPREHRALRDLARKRMQLVQSCTAHVLAVENIMARQLGGRITSNQIKRLTDDTIDSLPLAADVGLAIKANVAVIATLQSQIEVLEKRLQERVKPRPQYGLLTSVPGIGQTLATVILLETGPIDRFADVGNFASYARCVDSVHTSNRRKKGEGNVKNGNTYLAWAFVEAANFARRFCPEAKRFHERKKARTNNIVATKALAHKLARASYHILKEGKPFEATRCFA

SEQ ID NO: 329949 - protein, 338 aa, unidentified
MAIVMGLDQHRAQITAEWIDTDTGELGRARISPALRGDVRRFVKRFAGQPLEVALEATTGWRFVVEELHVVGAEVHLAEPAETAARRGNKKRAKTDRADARHLRELLMIGRLPESWIPPEHLLDLRARVRLRHTLVDQRGEWQQRIQAVLYHHGFPQRNGLLTGENRAWLEALALPPSAREQVRIALQIIDSLDAQSAPITRELRLYARRQLGCRALMKHYGIGELTAVTILAELGDARRFSSSRHAVRYAGLDITVHQSDQRRAAGHLSRQGPPALRWALFEAAEAARRPGSPDRGYYDQAAERLGGNRACLALARKLLKRSFHTLRELGDEGLQPA

SEQ ID NO: 329950 - protein, 410 aa, unidentified
MIKENYIYVGIDLHKETHTAVMIDCYNQKLGEITFPNRPADFPKLVAKVKKCNTDGKTIVFGLENAYGYGRALAVWLIDKGYLVKDVNTAISHRQAKHRGAMYRKSDSDDAEAIALATLNMLDKLPDAYPNDAYWSLGQLVHRRDNIMKQRTRLVNQLHEQLCIAYPSYKQFFNDISRPTALYFWEHYPSRKYLKGKSVEDLRTELVPVSHKRCSTKNCEKILDAVASDKVKNNAYQDARDMVTLSIVSDLQHYDSQLAEVDKMLEQMYKMLGCTLTTIPGVNVITAVKILAEIGDIKRFSNANKLAQFAGIAPLHLSSSGKGKDVATKQGNRRLQATIYFLAIQMVQVSSKGTPRNSVVRAYYEKRKAEGKTSQQALICISRRLISIIYGMLKNGTEYRMPVVESAGEK

SEQ ID NO: 329951 - protein, 400 aa, unidentified
MRNNAFVPSDYDVFSGLDVDKRSISATFNNQQGHIRSLRMPNSVEHLVNHVRKHFPDQKVAFVYEAGPTGYGLYDGLVAQGYRCLIASPSMIPKAPGQRVKTNRLDSVGLAENLRGGQLKSIHVPSPVYRELRHLTQLRDTFVSAMVGMKQRIKSLLLLEGIEFPPAPAGSQWSIVVKHKLRKLPCSCTVRFKLDQLLDSLEFNEKQVVKTTQQMRRFCQNDPELSRCMGYVMSVSGIGRIVASQLLARIGDWRELKNVRQLGGFLGLVPTEHSTGDRTDRGSITQTGDGRLRSKLIQASWSAIRQDAELRESFASVCKTHARHIAPRVAIVAVARKLSVRISVVLMKQRPYVVREKVHSAPLTQEETSPQGTTRRKPEPGETKLLTVRPLRQRSRGLVP

SEQ ID NO: 329952 - protein, 406 aa, unidentified
MTIMEVVVAQQVWAGVDAGKFEHHVVVIDGEGQRLLSRRLVNDETALLELIDTVTALADGGETTWATNLNHGGAALLIAALITREQQLLYIPDRTVYHASAGYRGDGKTDAKDAAIIADQARMRRDLQPLRPGDELAVELRILISRRTDLVADRTRAINRLRAQLLEYFPALERAFDYGHSKAALVLLTGYQTPDALRRIGAARLGAWLRKRKAYNANAIAATAIEAANAQHILVPGQQVAAAVVARLAKEVMALDTEISDTESMIEDRFRRHRHAEIIVSMPGFGVLLGAEFLAATGGDMAAFDSVDRLAGVSGLAPVPRDSGRVRSNLRRPRRYDRRLLRACYLAAQIAVRTDPISRAYYDRKRTEGKTHTQAVIALARRRLNVMWAMLRDHAAYQPATTATAA

SEQ ID NO: 329953 - protein, 307 aa, unidentified
MPRNVIGVDIAKHWIDTYSLESGKACRIEMISKSLKAFAAGCTDALVVFEASGGYERPLAEALAAAGIAYARINPRQAREFARATGRLAKTDQVDACVLAVMGRALELSPTPPPDPARTRLAALVARREDLVDQAAREANRLKQASDAFVRADIASLIRVLKGRIAKVEAEITAQIASDETLAATEQRLRSAPGIGPVTAASLLARLPELGRVSRGAIANLAGLAPHACDSGQMRGQRHIWGGRKQVRKSLYQAAFIATRFDPALKALRARLEAAGKPFKVVIIAVARILLTQLNAIVREQRNYVPG

SEQ ID NO: 329954 - protein, 353 aa, unidentified
MHQSTTIVPSITIGLDLGDRVTHGCVLDADASVLERFRFPTTRAGLKKALSDRTVCRVALEVGTHSPWMSRDLAQMGHEVLVANARRVQSITQSTRKNDEADAEQLARLARSDPKLLHPIQHRGESVQRNRALLAVRRKLVSSRTSICAQAHGLAKAIGEPLPRARPESFVKNVRPVEDRFPGLGELVGVVEVLDAKIAAIDQKIVKLCKEVYPETELIRQVPGVGPITSLTYVLTLEDPAHFATSRRVGSYLGMRPKQRDSGQYKSQLPISKEGDRELRGLLIQCSQWILSRGPDSDLKRAGLRRIARGGAAAKKKAIVAVARKLSVVLHHLWQTGSVYEPLHHHHGQPQPA

SEQ ID NO: 329955 - protein, 451 aa, unidentified
MALLDRTVRIVLTSLLNVWWNSQWLLYLTLKGVLTIKVVYQTCCGIDVHKSFLVATIIKTTSGVDPSYQKKRFSTFNNSILQFKNWLIENQCRDVCMESTGKYWGPVFNLLEDEMNVTIANPKWVKAVKGNKDDTKDSKWIGDLFRLGLVQGSYIPCKPIRILREFTRYRYKLTSCRTSEKNRYQNALTVCNVALDSVVSDIFGKSATSVIDYLIEQSGNSINHEEIASRLLRSLKKKSDSVIESIEGYQMTAPQKYRMRLVRAHLDYITSTINDIDTMLDSLIAPYENAVQLLCTIPGVDRNSAITVISEIGTDMTPFSNSKRLCCWAGLTPGSNESAGKKKSVRITRAGVYLKPALVQVAHAAVKSDKSPYYKQKYERIMKRRGKKRAIIAIDRMILTAIYQMLSTGEAWNPTDLYKTDMPEPLKEKQKEKAIKQAKKLLIREGILSES

SEQ ID NO: 329956 - protein, 326 aa, unidentified
MTKVINLSGIDISKDSFDASLVYNGVISVKKYAYDEVGMQAYLNGLPASVHCIMESTGVYHLRLSYFLHRHGVSLSIVNPLSVKRFSQALMLRTKTDKSDCCLLLEYGKRFELPLWQPSESHFIELQQLLNFQEQLLQEKGAISNQLESLNYYVVESHFVQEKQKERLSRINELLEEVDRNMLSLVKEHESQTFELLTQIPGIGKKTAIVLISVTRGMKKFESSKQLCSYLGLSPRIYESGSSVRGKARICKMGMGLARKLLYMCALSAKRSNKSCRQFYQRLLENGKCKKLALIAVANKLLRQAFSIVKNKKMYDDEFLNEKLAY

SEQ ID NO: 329957 - protein, 402 aa, unidentified
MTTGQVWAGVDVGKEHHWVCVVDDTGAVVLSRKVVNDEQPIRELVAEIDRLANEVSWTIDLTTAYATLLLMVLVGAGEPVRYLAGRSVWQASVTYRGGEAKTDAKDARVIADQSRMRGAELPVLHPDDDLITELRMLTSHRADLVADRTRTINRLRQQLVAVCPALERAAQLTQDRGWVVLLSRYQRPKAIRNSGVSRLTKVLADAGVRNAASIAQAAVVAAKAQTVRLPGEEVAAQLVAQLAREVTALDDRIKATDADIEGRFRRHPLAEVITSLPGIGFRLGAEFLAAVSDPSRIGSADQLAAWAGLAPVPRDSGKHTGRLHTPKRYSRRLRRVMYMSALTAIRCDPKSRAYYQSKRDEGKQSIQATICLARRRTNVLYALIRDNRTWQPDSPPITESAA

SEQ ID NO: 329958 - protein, 345 aa, unidentified
MSSIPGLQVVGVDLHLHRSVIARIDEFGNELGWVRIDNDPKALVAECRKAGKGAPVAIEATYGWYWAVDALLKAKFDVHLAHPYGMKALRKRKRVKTDPKDAYELATLLRLGSLPEAYISPPELRELRELVRHRQKLVKLQTAVKAGVRALLAKHNIRIPGRDLNGGKAIAVLDDLQLPGTYATRLASQRRLLMVLADEIAIVEADLARRLKDHPGYTRLLSIGGVGPTLAAIFVAEIGDVGRFKDAAALCCWAGITPRHYASDKTVRRGHVSKEGNALVRWAAVEAVQRNCEPSIRAVRDGIIARRGKDARNTAKVAAGRVMLEAVYYLLRDGHSRRLHPAVAA

SEQ ID NO: 329959 - protein, 380 aa, unidentified
MALTIVETHAITGGVDTHADMHVAAALDPIGGLLGVREFPATAAGYGRLLSWLGGFGTVCLVGIEGTGSYGAGLARHITAAGVRVVEVDRSDRQDRRRQGKSDPLDAVSAARAAQSGRARGASKGRDGAVEAIRALMVAKRSAAGERTQTINQARALVLTGPDDLRARFTGHTAAALVAGLASLRPRPGSTVGYATRIALRELGRRAEFLDGQLERPGELIVPLVTARAPGLLALYGIGPNTAALLLIAAGDHPGRLRSEAAWAHLCGSAPIPASSGKTVRHRLNPGGDRQASHALWRIVFTRLGSHPATRAYAERRTQEGKSKAEIIRCLKALRRPRGLPPPPPACGLTLNLRGRPDPIFGCRIRAGLRTIRRPSPGST

SEQ ID NO: 329960 - protein, 369 aa, unidentified
MADRITYVGLDVHKEGIVVAVAEGGLRGEVREYGRIANTAAALDRLMRKLSGEGVGLRFCYEAGPCGYGIQRHLSAPGHECVVVAPSLIPKRAGDRVKTDRRDAASLARLHRAGELTAVWVPDAGHEAMRDLVRARLDAVHALRRARQQLSGFLLRQGCHYGRPAWTKLHRRWLAGLKFAQAVHHLVLEDYIAAVEAAEGRRDRLTAQIEAMLPDWTLAPVVAALQTMRGMALVNAATLIAELGELARFANPRQLMAYLGLVPSEHSSGPSVKRGGLTKAGNSAARRLLIEASWCYRFPARVSRELLLRQEEQPKPIREIAWKAQLRLCARYRKLARSGKPANVVTAAIARELAGFIWAIARRVPPVAG

SEQ ID NO: 329961 - protein, 358 aa, unidentified
MTAPYHYHIGVDYHKSYSHLVVQDSAGKTLRSGRVKNDRQSLGSFLERYRENSHAVIEATRNWMVMYDWLDDICDDVVLAHPLKVKAIADAKIKTDKIDATVLAHLLRADLVPEAWAPTEKARDLRVALRERMFYVRLRTMVKNRVVTVFDRYPEQTAQLKKLGDLFSKTGLQQLATLNVSAIDRIQIDRGLEFIGDIDGRIKQAEATIKAMTKTNGNVKLLKTIPGIGEFFARLIDAEIDDIDRFRNPKKLAAYAGLVPSTYSSGGKTYHGKIIKQGNKWLRWAFVEAVAPAVAADSQLRAQYEHLKRNSTNNKARVAIARQLLTIAFQILRDQRPYERRGVVGEEGASATISRLSR

SEQ ID NO: 329962 - protein, 348 aa, unidentified
MRFYTKQHKFYCGIDLHARSMYLCILDQKGKTMLHRNFKASPEAFLRAIKPFGDGLVVAVECMFVWYWLADLCAQQNIPFVLGHALYMKAIHGGKTKNDKIDSKKIATLLRGGTLPVAYVYPRTMRSTRDLLRRRNHLMRKRSELLAHIQNTNSQYNLPDFAKKLAYKANRDGVPEHFPDPCVQKSVEVDLQLLDFYDRLLTELELYIVRKAKGHNSRTFYLLRSIPGVGKILSLILLYEIHTINRFPRVQDFVSYCRLVKCPRESGGKKSGSKNSKIGNAHLKWAFSEAACLFLRGNEQAQLYHERLVSKHGKGKALSILAHKLGRAVYFMLKRKEPFNMDVFFARA

SEQ ID NO: 329963 - protein, 374 aa, unidentified
MRDHIEAFVAFDTSKLRNAVAIAEAGRTGEIRFLGEIDNDGAATGKLVRKLAARYERLTFCYEAGPTGYGLYRQIEGLGYDCMVVAPSLIPKKPGARVKTNRRDALSLAKQLRAGELTAVWVPDRRHEAMRDLTRGREAAVEDLRSKRQQVSSFLLRQGLHFTGKKTWTKAHMSWLASQKLEYAEQRIAFEEMLLAIRQAQERIERLEQAIRAAVPDWSLAEVVTGLMAMRGIDLIAATAFLAEIGDLSRFQTARELMAYLGLVPSEDSTGDTVRRGPITKAGNRRARRILVECSWSYRHPPRVGKKKQEKVAAAPRAVREIAWKAQCRLSARYRALTRKGKLATVAVTAVARELAGFIWAINREIAAPRPVAM

SEQ ID NO: 329964 - protein, 370 aa, unidentified
MHETITSYVGLDIHKDSVAIAIAPPGRGAPQFIGTTASNLAQVCKVLTRQKCVRSRTLVVYEAGPCGYGWARYLNAQGWRCEVISPAHIAHSAASKAIKTDRRDALLLARESRAGNLTPVVLPDSRDEAMRDLSRAREDALAARLRARQQLKSMMLRHGRYYQSNTWSEAHQRELATVRFDYPAQQIAFDEYRQMVTEAHERLERITEALREQCAEWRMRPVVDALMCLRGFDFIAAITIVAELGDLTRFPHPRALMAYLGLVPSEHSSGNTRRQGAITRTGNRHARRILVESAWTYRYAARVGRDLQVRQQRQPKLVRDIAWKAQLRLTQRFRRLNLCRKMKMTKVCVAIARELCGFIWDLARHVKVPA

SEQ ID NO: 329965 - protein, 352 aa, unidentified
MTDQRLVVAGVDAHTDEHHAAVVDVQGRSLGAAAFPTTGEGYGRLISWLRRQGTIDRVGVESTGAYAAGLVRALLAEGIRVVEVNQPHPHARQRLGKSDPIDAELAARAALSGTVTAVPKRTSGIVEAIRQLAVVRAGALKARTAALQQLDDLIITTPEQLRSELRRGRTLKARAALCLRLRPDIERLAEPAQAAKLALRSLASRVDQLDQEIRELDQQLEKLVAAAAPRTLQLFGVGTQGASQLLVTAGHNIDRLKGEAAFAKICGAAPIPASSGRTTRHRLDYGGDRQANRALHMIAVCRLRHCERTRAYAAKRTADGLNRREILRCLKRYIARQTYHTLRADLEALNST

SEQ ID NO: 329966 - protein, 395 aa, unidentified
MKYILSFDIAKGKSVYCLIDNNKNIIIKPTSINHIKNEFDNLLYRVKDFLPLTVVMESTSIYHLPIENYFRYKGIETIVINPKLVKQFKDTLNKSKTDKIDCFKIARCYLGTTDTLYQKNDEYFMFNPLARQYWSLIEGQTRLKNRYKQLIEIVFPEFNQIFDDLYNDLALNFIHDFPHPDLFINRRNNYLMNYLKDKNGTTQAFRFKNKVIKMKQIASNSLCYVTLDSLNVSNLVQTIEMIQNHKIELSKIKNQLINSLKNTKLFKIINSIPGFGDFSTALFLSEVGDISRFDNPYQLISFIGIDSVIKQSGASIYYGSISKTGNKFARTILFNVITTLLQTSAHYNPNNSVYLFFRKKQSEGKHHYKCIIACETKLCKIIYKLCSSDCFYLDK

SEQ ID NO: 329967 - protein, 400 aa, unidentified
MKGPIVSIDVSNGNSHFQCFTQRGTKMGKVHRISHTVEGFNCLKSKIEELEKKTNEEVAAVYEATGVYTKPLERFLEKNEIKQYSISPLQSAKQRKTEIHNKKTDKKDPESIAEVYYIKELRENEKEADLYHELRTANRVYEDCLVHLRKYKVTFQSHLSIVFPGYMKLFQDGYSQISLQLLEMYPHPDRLKNKQPEKVAKKLNKQTDHSFEVCLKTAEKAIEFANKTYPGCDKEDAWVAVLVDDIHHLQDTMEEAEAKLDKIIELAKATPYYSIILSIDGIGPNLASRIIAEFGDISKFKTRGAMVAYVGNDPNRAESGDIEGYHLSISKKGNKRLRCILYLAVTCSIRSRKENPINAFYQKKRQQSTPLKSKAAKVACITKLIRTIHGMCKTGTVFTS

SEQ ID NO: 329968 - protein, 402 aa, unidentified
MNCVGIDVSKGKSMIAVMRPFGEVVVSPFEVRHTANELSELPGLLKSLDGETRVVMESTGNYHAPVAWLLHDAGLYVSVVNAMLVHDYGNNSLRRAKTDKKDAVKLANYGLDHWLTLPRYIPEEDTRLMLKICYRQYQQYSKVQTMLKNNLISLLDTTFPDANRLFTSPPRADGSEKWVDFVATFWHCECVCGRSEKAFTTQYQKWCRKHGYNFSEDKALDIYASACRHFGVIPKTDTAKLLVEQAISQLQTTSSALAALKQEMQSLAASLPEYPVVMGMFGVGPTLGPQLLAEIGDVRRFHSKKALVAFAGIDAPPYQSGQIDVRSRSISKRGSASLRRTLFLVMSVILQCAPIDEPVYQFMDKKRSEGKPYRVYMMASANKFLRIYYASVKAYLESLEHD

SEQ ID NO: 329969 - protein, 404 aa, unidentified
MYNAVGIDVSKGKSTVTVLQPGGTVIRKPFDVSHTSQNLNELSSYLESLDGDTKIVMECTGRYHEPILKALSEAGLFVSVVNPHLIKNFGSNTLRKVKSDPADARKIARYTLDNWAELRQYSSMDNTRTQLKTLNSQFSFFMKQKVAAKANLIALLDNTYPGVNKLFDSPAREDGSEKWVDYAYSFWHVDCVRGIGLKAFTERYQAFCKRHHYNFQADKPEKLFNSSKELVAVFPKEKTYKLLLQQSIQQLNLASGHVERLRREMNELASTLPEYNTVMGIYGVGKTYGPQLIAEIGDVSRFTHREALTAFAGVDPGVDESGQHKSKSNRASKVGSARLRKTLFQIMTTLLQNAPEDDPVYRFLDKKRSQGKPYYVYMTAGANKFLRIYYGKVKECLRNLEQES

SEQ ID NO: 329970 - protein, 352 aa, unidentified
MQKIGMDLGMKQSDICELDDAGKVVTQATIPTTRAAIKRWFGRRKSAEVCLEAGGSSPWVDRLLRELGHDVIVVNPRRVKLIAESTLKTDKIDAEILARVLRGDRTLLRPVQHRGEETQRMRAQLRAREVLVKSRTACINSVRGILRSFGYKLPTGSTEKFAERFDVAALPDELKMIVAPLAETVRSLSAQIKSFDEWVEEAASRYPEVAPFKKIDGVGTLSALAYVLCIEDPARFPESRRVGAYIGLRPRLRQSCGDPRMGRINKEGDGGVRRLLVQCAQGVLRSRAPSELREFGLRLKEKKGRNVAVVAVARKLAVLMHRLWTTGEEYDPHFEQHRRERLAQANTATAAV

SEQ ID NO: 329971 - protein, 396 aa, unidentified
MYFLGIDIGKNNHMASLIGEDGKPVFRAFSFSNTTDGGESLLAKLASYSVAPHELEIGLEATGHYWLAVYSFLRDKSYMLHVINPIQTDGWRKGVEIRKRKTDVIDSMLIADLVRYGDFIEARLPEEAVLSLKNLSRFRIYLVDSIGDLKRKVICVLDQVFPEYQNVFSNVFGKTSKEILLQFSSPAELESISADTLAELLAVLSRKKLGLEKAEELNRAASTSFGVTFCRDSFTFQLRMLIEQIKYIESQVKDTEAEIQAIMSKLCSPITTVPGVGKTLGAVILGEIGSIQRFDHASKLVAFAGIDASVNQSGEFEGTNNRMSKRGSPYLRRALYQASLIAVVGKNPDPVLAAFYHRKLAEGKHHSTCIGAVSRKLCYIIYAVLMENRPYEVRNP

SEQ ID NO: 329972 - protein, 372 aa, unidentified
MEHHTEAFVGIDTSKLRNAVAIADSGRGGEVRYLGEVPATEAAIQKLVAKLAAKYRHLTFCYEAGPTGYGLYRLLKSLSHECLVVAPSLIPKKAGDRVKTNRRDAVSLAKLLRAGELTAVWVPDERHEAMRDLSRARQAVKKDLQGKRQQISSLMLRLGRIYPGKTTWGPAHMRWLISQKLEHREQRIAFEELLEGIRQESERVERLEGAIREVVPEWSLAEVVAALQAMRGIDLIAAVGVLAEIGDLSRFQNPRELMGYLGLVPTENSTGNKVKRGGITKAGNGRARRILVEAAWSYRYPPRVSRDKQPKVEAAPRRAREIAWKAQTRLCGRFRSLERKGKRRTVIATAIARELSAFIWAINRELMAHRQA

SEQ ID NO: 329973 - protein, 348 aa, unidentified
MVILGVDSHKRTHTVVAVDANGRKLAEKTVAAISAGHLELVRWAGRFADRRWALEDCRHLSRRLSTDLLCAGEAVVRVPPKLMAGARRSSREPGKSDPIDALAVARAALREDLPVATLDGPEREVRLLVDHREDLVAERTRAQNRLRWHLHELDPGTEPPARALDRAVVLTALEARLAGQPGTVARIARELVGRIRELTTTINALEREIGRLVADLAPSLLALTGCGPLTAAKLVGETAGIGRFRSSAAFARHNGSAPLPVWSGNTERHRLSRTGNRQLNVALHRIAITQLQHEGPGRTYLEHRRAMGNTKTEAIRALRRRISDEVFRRMRHDEAARVAGTSRLAAAA

SEQ ID NO: 329974 - protein, 421 aa, unidentified
MQGNAGGKRLHAELALEGRAAVPLAVGIDVAKETHWAAIKVAETGQVLASHAVDNTPQAIADLITEVRAAEAGHGPATVGIDILGGIAALAGAMLLAEGLTVVHVPGLAVNRARRATRGGEHKSDPKDAAVIADQVRVRDDLRVVEPAREIDVELRLLAGRRSEIVADQTRRAQRIRDLLVSVFPGLERHVDVTTLTGLHLLTRYVTPAEIRRAGKARLTAHLRRAGRVRDTTIDALASAAIAAAQAQRIAVPGEAVAASLIRGLAAEALAGRDQLAVLDKQIAEVLARHPDAALIRSLPGMGATLTAEFLAITSGAGRFADGDHLAAAAGLAPVLKQSGKVRYLQRATTGDKALKRVFYQSAFIAISCDPASKTYYRRKRAEGKTHHQAVLALARRRVNVLHAMLRNQTPYQPGHVSAAA

SEQ ID NO: 329975 - protein, 326 aa, unidentified
MSNILGIDVSKDKLDLVLLNEKGKFHKVISNDPAGFKTLDQWLISRHIDRVHVCLEATGQYGDEVSEYLYERGHDVSVVNPTRIKRYGESKLHRNKTDKADADLIAEFCLKEKPALWEPLNPDLKHLRALVRRLTDLQANYRQEGNRLTSGEKDDWVIRDISVHLEYLKASMEATEAEIQNFTNQTPGLKAKQELLVSIPGVGKKTSARLLAEIGEINRFENAPQLAAYAGLNPKGFSSGSSVHKKTRISKQGRSELRACLYMPAIVAMTHNPVVRALKELLQKKQLPTMAIIAACMRKLLHIVYGVLKSQMPFDPDYDRQFNFSS

SEQ ID NO: 329976 - protein, 350 aa, unidentified
MMIIGCDLHTRYQQIAMLDTETGELGERRLEHESGEARAFYAALSGGVRVGIEATGHTHWFEAMLAELGHELWIGDAAKIRASVVRKQKTDARDAAHLLGLLRQDRFPKIWRPSPAERDLRQLVWHRQKLVWMRGAVKNQLHALAMGEGVCRKKKLFTAKGRKELEGLALGPWASYRRQELLRMFDELAAATAQLDAAVEQAAKSQPLAVRLMTHPGVGPVTSLAFVLIIGPVARFEHSKQVVSYLGLNPQEHSSGGKQRLGSISKQGNPMMRSLLVEAGHTAARFDPALKRMYQRLKFRRGASVAKVAVARKLAVRMYWMLRSTADYAQLVRMQGSPWATLVENSPSLG

SEQ ID NO: 329977 - protein, 408 aa, unidentified
MKALHRRCAGLDVHQQEIVACRRIVAGRKVQTEVGRFPTTTQGLLELADWLEDGKVTHVAMEATGVYWKPVWHVLHGRFTLILANAAHIRNVPGRKSDVNDATWIAELLAHGLIRASFVPPQPIQELRDLTRTRKELTREIVRHTQRIHAVLEEANIKLASVITDIVGFSGRRMLKAIVAGETDARRLAELGSSRLAAPREALVAALDGRIRDHHRFLIGQHLKTIEQIETTIGEFDARIEAALAPFRDAVERLKGVPGISWTAAQIVIAEIGVDMSQFPSADHLISWAGLCPRLDESAGKRRSTRVRKGATWLKPVLVQSALAAGRKKNSSFKTRYHALKGRVGPKKAAVAVAANLLRVVYHMLKDGTCYQDLGEGYRRPHNPARAAANLANRIRALGYQVDISRAA

SEQ ID NO: 329978 - protein, 368 aa, unidentified
MSHLTIGAVSSDANNRQSAVVTPLALVIKLGIDVHAKDYVVVRQVDEAVSQPAQRFNLEGLLGFVRRQVAVAQSVHSCYEAGPFGYVLHRQLSALGVHNLVVRPRDWSTYGERVKTDQRDASALCSCLDRHLAGNQGALAVVRVPSEAEEQARAIARQRQSLVRERVRLTLQGKSAALLRGHQLRGEWWRVSTLSKLAPDLTPELLTLLQPWQQVILLLDTQVQALTEQLEQAAPPELPCGLGSMTWEILSREVGDWHRFRNRRQVASYTGLCPGEHSSGASRQQGSITRHGNPRLRHLLIEAVWRLLRYNPEYRGIAKWRDQFTAVRVTQARKKKIVVAIARQLAVDLWRLGTGRTTPAALGLQTPS

SEQ ID NO: 329979 - protein, 312 aa, unidentified
MSIVASQVGIDVSLDWLDVSIDSGKAFRKPNTADGVRSLIQRLPAGSVIHLESSGGYERIPRSLLRKAGFEVRTHDPLKVKRQAQVEGRRGKTDALDARHLSNSGNLLKAQPEKSEARESLCDLSRTIQELKKAATQMTGRAARPGLATHAKNALKAAAAGLSLQAAKLEKEFVKMVKASPLADRYRLALSVQGVGPCLARVATSELPDRVHESTNAQLSSYAGIAPIDDNSGKKKAKARIRPGNAKLKAALYMPAMACVSRYEWAKDLYGRLRAKGRTHQQAIVAVMRRLLIRILDVVKRETPWVAKPNPS

SEQ ID NO: 329980 - protein, 348 aa, unidentified
MEILYVGVDMGKKNSQVYGFTEHGEVVVETRLQTLELEGWESLFGELSRRYEVHVAYEACPHYEWLHEVLSRYCGRVVMVNPADFAVISKSQKKTDKYDAQKLAEGVRRGDLPEVYVPPAQSRADRRLVSFVHCHSRQMSSKKTRLRSVLLSYRLECPCSDISSAKARRWFEREAVPRMDEQGQMMVRMLLDELALMEKHRTELDTQVEKRLPHYGRDAAVLRSVPGFGALTVLALISAIVDIGRFEKAKELCAYFGACGRVYQSGNTLRLGPITKRGNKTVRWLLSQALCQLHRMDARARKRYQKKKKTKRTGIARGAQVNWLVRIVFQLLKKKESYRMPQRAKKVA

SEQ ID NO: 329981 - protein, 321 aa, unidentified
MENQEVKFEQIIKCGCGIDVHKETAVATIRRSDSEFETRTFDTFTSSLTLLREWCKAEGVTHVAMESTGIYWKPVFNVLEEDFEIILVNARHVKNVPGHKTDKKDSRWISKLLLSGLLNGSFIPPQDIRELRDLVRFKKKKVAQMASDKNRIIKILEDANIKLSSVVTDVSGASASKIINDIIDGKTDVDGLMKHIHGKIQTDRKTIRLALEGRITKHHRFMLNLIRESIEEQQKIIDKIDAQIDEAAKDYSVEVDLLQSIPGIGKDSAITIISEIGVDMSRFPNEQHLSSWAGMSPGSNESAGKKKAPEPPMETNTSKQP

SEQ ID NO: 329982 - protein, 314 aa, unidentified
MTIVEQAYVGIDIAKDKFEVAILGQKLVTQVVNNKKGIAKFTKQMLELNPQMIVVEATGGYEEALVLAMYAAGLPVALVSPQRVRQYAKARGLLAKTDSLDAQNLAEYGKNIQPRLFVAKSEEGRHLSALLGRRRQLEDMHKAEKNRLRTAHAEMKSSLQTVIACLEGEVERLDEEIRVFMKEHADFKAQEKLLRSAKSIGPVTAATLLADLPELGKLDRKQIAALVGVAPMNQDSGKKRGYRKTKGGRLEVRSVLYMSALSAIRYNPVIKAQYDQLVKRGKEKKVAITACMRKMLTILNAMMRDQQPFRYSAA

SEQ ID NO: 329983 - protein, 363 aa, unidentified
MITQPKQSGKPGEPQEGGAGMATMIGIDPHKATHTAVAVDDDEVVLGECTVRASSVQVQRLREWAAGFEPREWAVESANGLGYLVAQQLIAAGETVLDVPPMLASRVRVLGSGRSQKNDPNDARSIAIAALRSDRLARVRPDDHARVLRMLAKRHRDLARAKNQACCRLHAILLELVPGGARLRMYTVARANTIIDRVGPVDAVGRQRVVIARELVSDIARYEALLAASKKRIATAVAASGTSLTTISGLGPICAAMILGYTGDIDRFATRAHYASYNATAPIEASSGLKARHRLNPRGNRQLNWAIHMVAIGQLRHDTAGRVYYQRKIAEGKTSKEAIRALKRRLSDVIYRHLVADARHTTH

SEQ ID NO: 329984 - protein, 340 aa, unidentified
MNHYAGMDVSLEYASVCVIDATGKIVREGKVLSEPEALLAWFGALGVSLTRIGLEAGPLSQWLYAGLRQADLAVELLETRHVRNAFKIMPVKTDRKDAHGIAELMRLGWFRPVHCKSIEAQETRALLTARKLLQKMLHETEMSLRGLLRNFGLKVGKVSPLQFEARIRDLVEGHPSLQAIAASLLEARATLRREFAALQKRLHTIARNDTRARLLMSTPGVGTLVALTYASAIDDPGRFKSSKTVGAHFGLTPSRHQSGETDRSGRISRIGDASVRASLYEAAHIILTKPLKGVTALKSWAMRIAKRAGMKKAKVALARKLAVILHRMLANGTTFANKTA

SEQ ID NO: 329985 - protein, 329 aa, unidentified
MKRTWFIGIDISKKTLDVVIYDKENRKADKHFKIANEVEGFKELLKLLKKEGVGLKQAFICLEYCGVYGLEIGLFLDGRVDFNFCSPLHIKRSLGLTRGKNDKLDAYKIARFCYLFRDELSPSSMPTANMLLLKSLMSERNRVVKSAKIEKQVLKEHSVQLDSKSIKRMKKRLKGLNADIDIIEKEILEIIRLKPKLEESYNLLISITGIGLVNAVIMILTTNNFEGITNARSFACYCGVAPFEYSSGTSIRGKTRVSHLANKTVKAHLTNAARSAVVHDPELRIYYKRKREEGKAHGTVLNAVKFKIITRAFSVIKRGTPYVKLRAAG

SEQ ID NO: 329986 - protein, 335 aa, unidentified
MKRYRFFIGVDVSKLTLDFALMQDVNLLFHRKIDNDHEAITSFIKDLKLIEGFKISNAVFGMEQTGIYSNRLLNILQKLKADIVHEDSNHIKNSLGNLRGKNDKMDAIRIASYLIKSRNHIRLWKGKRNVLQELASLATLRNRLSVTMRTLKVPLKEDKLFIDSQRSYQNSQLCVNTIKAIEKDIQALDTRIKEVWSSDERVKHLMDLIISIPCIGEMTALQIIITTNEFQTISSPKQFASYAGVAPFPYQSGTSLMGKTRVSHMANKKVKKLLHTCAVLSIRFVPEIKDYYIRKTQAEGKHRMLVLNAIRSKLILRVFACIKRNQPYVKEYLPA

SEQ ID NO: 329987 - protein, 346 aa, unidentified
MKKISTVLTFENEIFNEQKLTIGVDLGDRWSFYCILDEAGKIILEQKVLTTPEAMKKTFGKIPRSLIAMETGTHSPWVSRLLTELGHEVIVAHAQKVQLITKSNRKDDRHDARTLARLARIDRELLGPVQHRSAKAQIHLTVIRARAELVSARTALVNAARGLVKSYGERLPKCGTQQVSRELGAGLSAELRDVLEPLLKEIESLNERIKEYDERMEKIAKEVYPEVSLLQQVKGVGTQIALTYVLTIEDPYRFRKSREVGCFLGLKPGRRDSGESKPQKGISKAGDRYLRTMMVQGAHYILGPFGADSDLRRWGLKLAERGGKMPRSERWLPWRESWRYCYIGCG

SEQ ID NO: 329988 - protein, 389 aa, unidentified
MEARTVSTLPPVAADHDPIRCLVAIELSKKSWIVAVNSPLSDKIGRHTLEACDWKGLLERIERIRMRVARELNRPVEVISCYEAGYDGFWLHRLLEAHGVRNYVIDAASLHVDRRARRAKTDHIDVAQLLRSLMAYLRGDPKVWSVVRVPSVAEEDDRRLHRERHRLIAERVQHVNRIKGLCAVHGIYDYEPLRSNRMLRLEQLRTGDGRELPRRLKAEIVRELERLELVLQMIETIEKERDAIASARQTSPHTNAKKIQELAKIKGIGAETATVLVGEVFYRRFDNRQQLASYVGLTPSHFQSGSMSRDQGISKAGNPKARTTMVELAWFWLCHQHDSSLSVWFRERVGAAKGRIRRITIVAVARKLLIALWRYLETGLVPTGAVVKG

SEQ ID NO: 329989 - protein, 346 aa, unidentified
MRCSTTVGVDLAKNVIQISVVNGRGKELSNRALTRKKFAEFLGKQKPSLVAFESCATAHYWARAAKRHGHEARIIPAKSVAPFRQGHKTDSNDALAVAEAARRPNIKEAPMKTTEQQGLQAIHRSRELLIQESTALSNHLRGILLEFGVAIPQGFASLLRTLPEVLEDGENELPDLYRPTLHRMHTRLLELREDIDAMTEEVARLVKEHPVCNKLTALEGIGPIGALLLYATMGSGKAFSGSREFAAYLGLAPRQFSSGGKTNIIGLSKKVGNSRLRSVLILGARAYTYRMKEPKGSKDKWLRAVVERNGVSRAAIALANKNVRTAWAMVTQGTEYQRRPRLEMAA

SEQ ID NO: 329990 - protein, 369 aa, unidentified
MADRITYVGLDVHKDSIVVAVAAGGLRGEVREYGRIANTSTALDRLLRKLGGDGMRLRFCYEAGPCGYGIQRRLSTRGHECVVVAPSLIPKRAGDRVKTDRRDAASLARLHRAGELTAVWVPDVGHEAMRDLVRARLDAVHSLRRARQQLSGFLLRHGCHYGRPAWTRLHRRWLAGLKFEQAVHHIVLEDYIAAVEAAEARRNRLTAQIEAMLPDWTLAPVVAALQTMRGMALVNAASLIAELGDLSRFANPRQLMAYLGLVPSEHSSGSSVKRGGITKAGNAAARRLLIEAAWSYRFPARLSRELLLRQESQPRLIRDIAWKGQVRLCARYRRLARTGKPANIVTTAIARELAGFVWAIARQVTVTTD

SEQ ID NO: 329991 - protein, 381 aa, unidentified
MEKACGLDVHKDSVFACILDEQGKKILEKRFGTLTPELTALRDTLVSQGCGHVAMESTSIYWMPVWHVLESDFSLKLANPYFIKQLPGRKSDVKDAHWIAECLQKDLIKGSFVPEGVLQEMRQLSRQCFRLTKSRVRVEQQMDNQLQRCNIRLSNYVSNQGNNVSLRKIIEAIIQGERDPSKLVRLVHGRTKNRHGHQLITHSLDGVLGQTDIEMLKQCMEQLDLLEKQQAACLNHLEELADNYFAREISLLCTIPGIQKYSAMCILSEIGNDMEVFGKASHLVGWAGLRPRNDESAGKIQSRKTLHGNKYLRKMLVQVTWSATRSNKTFLGKKYNQLSKRMKSQKAALAITRKILVIIFNVLQTGQPFDENRNLQAVKPD

SEQ ID NO: 329992 - protein, 331 aa, unidentified
MHYSHYIGVDISKNTLDAVIYAAEMRRSDTKHLTNDKTGLKELVAWAKAAGAKPNDMLICAEHTGVYGNELQLFCEKKGIALCLESPLQIKRSMGLVRGKDDQIDAIRIAQYAYDHKDKLKLFHRPSGNIITLANLLRERRLYVRQKATLMAQQAEIGSYETATSRNRRESLIDRHAAAVRSVEKQMMEIIKGDKALKKTYDLISSVVGIGPITAIDTIVYTNNFQNFETPRQYASFIGVAPFDHTSGTSVNGRTRVSQFCRKQQKVSITMAARSAIVNDPWMKNYYHRKMKEKGEQRNQHGVVLNAVKFKLVLRMFSVVKSGTPYKVMKY

SEQ ID NO: 329993 - protein, 417 aa, unidentified
MQTLVERGCGLDVHQATVVACVLIVRNDGKVQKQLRTFDTTTRELLKLREWLLSEGCTHVAMESTGVYWKPVYAILEGELEIVVANAQHIKKVPGRKTDVKDAKWIADLLCHGLLRSSFVPPPAIRELRDLTRYRRKLVESRSAERNRLLKLLETANIKLASVASDVFGVSGVFMLQALVEGKATPREMAELAKRKLRKKIPELELALEGKIEEHHRFLLKLQLDRLRAVEEDLVKLEQRIQEKLEPHAAQLVLLQEIPGVDWTLAAVIIAELGVDMNVFQSVSQLASWAGVCPGNNESAGKRKSSRIPKGNVYLKTALVEAANAAAKAKGTYLRDKFYRLKARRGYKRATVAVAHKILVAIYHMLSQNVPYNDLGDLYLDKLNKHHLTRNLIHRLERLGYSVTLTPRNQETAAIAA

SEQ ID NO: 329994 - protein, 403 aa, unidentified
MQESVNSELLVSVDVGCYRHAVAIGLSDGGVLDEFEIDHDRDGFARFFDRISRHEQTHGLPVSVAMEGYNGHARPLDRLVQARNYRLFNINNLKLARFKEIFPAAAKTDALDARKGLELFQLRRHLPMAKEVLQEVGPTPVVNEQLKRLTRRRRRMVNERGRVVNAMQSDLRTVCPGLLAMTKDVSQVWFINLLTSIKRNVRELAGKRASSLLKVRGVGTVMLARIQSWQKQACFSDEAEWVSAMILQDARRIKELNEVIKALDMQIESLATHSEQATLFRSVPGFGNICSAELAGEIGTVERFAKEASLALYLGMAPLDNASGTYHGSKTPRQVNRHAKAAMMTAVDRHRKCVPESQAYYEKKRLEGKAHNQAIRSLGRHLCRVLFRMLEHDKPYEIRRPKA

SEQ ID NO: 329995 - protein, 365 aa, unidentified
MVNHIFVGIDLGDKNSVARIAVNRDKTERLGFVNDRRGRARLFEEVKRRAEKTGEAKIVMAYEASACGFILRDEAEAQGIQCWVVAPTKMEKSVEQRKHKNDDRDADDLVEKLRGHVLAGNRLPTVWIPDRQMRDDREIMRTRVELVEKQTRLKTQIQMLIKRHGLEKPSGCGAGWTIRYRRWLEALTESDALGGGVRTALMSLLRELTFMEAEIERIEKPIQELAAQSRHKPIIDELTQEHGVGLMTAMVYRTEIGYAGRFGRGRHVGKFVGLTPTSHESGQQNDHKGHISRQGPPRLRKMLCQASWVHVQHDPQAKRFYQQLVSRNPKKKKIAIVAIMRRLAVRLWHRMRQAELRMIDLAPVN

SEQ ID NO: 329996 - protein, 462 aa, unidentified
MKLYLGGDVSKGYADWVILSEKKQTVLENFQLDDTYAGHCKLYSALETYFGKHLGLEMYAAVESTGGYENNWYNTLKSYQKVFNLKVVRINPLGVNYNRRASMKRNVTDAISAVSIAEYMINHPENIAYDQDEKWKTLCRHWNFVEMQKQQRVQTINQLETILYSANPTLMRYKKGDLPNWLLELIIQCPTADKLAKAKPERLAKIPYLSLVRAKELVTEANQNIASATDRNAEILVTQIALQIKSFDQNIKSQMQLIERDLICPEIELLKSFKGISTISAIGLMLEIKTIDRFPTVKGFSCYFGLHPKFKQSGDKIIGVRMSKQGSKNMRKILFNIAKGAITYNPLITEVYEKKISHGMSKMAAIGVCMHKILRIIYGMLKNKQAYNPLIDKQNYERSKEKQQDKLQQENTNIDKSRRYQEFDVKAPISRKQTKKRREHDLSQCEINSQSPGSTCSSETKL

SEQ ID NO: 329997 - protein, 470 aa, unidentified
MTASPGGCRMHVDGGVANGVSGLLIQTHLGLKCRPRHLRHPAGQPGWCRLRGSVNRRDPRMTIISSTEGVPMSKSAHLELRVGIDVGCHSHNVAIGLSSGEILDEFSVSHNPEGFRLFFSRVEKQEKKHGCPVSVAMEGFNGYARPLDTLVRARNYRLFNVNNLKLARFKEIFPSAAKTDDIDARKCLKLFQLRDHLPTAKDVLQEVAATPEENDILKRLTRRRRRLVNERARVLNNMQTDLQAVCPGLLEITADAANLWFLRFLTSTDSLIKLARLQRTTLLKISGIGTKYARLIQEWQKQAHFSHEAELVGEMIQEDACRILELSDKIKVLEAKFEDIASRSVIAQTLSTIPGFGTVSKLELAGEIGTIDRFKDEASLALYLGMAALDNSSGKKKGTKDPKHVNTRAKAAMMIAVDRHRKCIPESQRYYEKKRSEGKRHNQAIRALGRHLCRVIFKMLKHEKGYEIRN

SEQ ID NO: 329998 - protein, 367 aa, unidentified
MSCPSLRPSSPVRDEREASHERTPAQQGVLGIDTHKYTHVAVLLDGLGRHRGQLQVPATDAGAAQLLAWSHAHGPLVAGVEGTGSYGYQLTRALQAAGVEVLEVNRPDRANRRRKGKSDPVDAEAAARAVLNGQATAVPKDREGAVEALRALSMARKSAVKATTQASNQIKALLVGSPQALRDDLVVRSLLQLATRCAQLPGPGGLQVALRSLGRRWLLLHEEILTLDTEIRRLVRTTVPALLDRCGIGIHSAAQLIITAGGNPTRLHSDAAFAALCGVSPVQASSGLRQRHRLNRGGVRDANNALWTIANNRLIHDPRSRAYADKRTARGDTRKDTLRMLKRYIAREVFGLITTALAPPQRLAAAA

SEQ ID NO: 329999 - protein, 342 aa, unidentified
MREKRSIGIDLHRRRFTCCIRLENGRNCLSEWSLEQLPRFTQKLRRTDEVAVEVTGNTRLFYEAVAPFVARVVVVDPHQFRVISHSVKKTDPHDARNLALYLAKGLLPEVRMKEKEQAEVASLTQTRDRLVKLRTALKNKVNNLLSARGIELDKESLSSEKGLTWVLEQKIEPLAHLELDIIVEQIRSLNRSIARLERVIDEAGKKLEGHRNLTSIKGIGSLGASILLSVIGNVNDFAHEGKLAAYFGIVPRVQDSNETEHRGRITKRGSKLGRTALVQCALIAKRYSPYLHRYYERIRARRGTGKAIIALARKFLSIIYHTLKNNWIFEDFPNFVLAEAKT

SEQ ID NO: 330000 - protein, 381 aa, unidentified
MEQKQTPLEKDLTTKFPVLYVAFELGNSTWKMACSDGRKVRHVTVTARDLGQVERALLRAQDHFAMAEGCFTVSCYEAGRDGFWLHRYLQSRGIDNVVVDSASLEVDRRLRRAKTDRIDAGKLLRMLIRYHGGEKQLWRIVRVPSRADEDARHLHRELEGLKRERTRHRNRIHGILMQQGLRLPNPGKKRFLKDLEALRTWDGHQLPVGMKARLVRTYQQLRLVEDQISALATEKREQLKQMDNAKMRQVAQLLRLPGIGPVSSWAFVMEFFGWRQFRNRREVAALAGLTPTPYDSGRKLREQGISKAGNRRIRTLAIEIAWAWLRYQPRSKLSQWFSERFAGGGTRMRRIGIVALARRLLVDLWRFLEYGVVPEGALLTT

SEQ ID NO: 330001 - protein, 489 aa, unidentified
MKSQPSKRARKDKKQGKEASNNPTLVKWNEMNRKQRREMMRKVQSEDLSLQVVHPHAAGIDIGNESHYVAVPPSRDPQPVRCFGCTTAELKKMAEWLTQCGIRTVAMQSTGVYWIAVYDILEEAGMEVYLVNARETKNLPGRKTDVQEGQWLMKLHTYGLLRHSLRPSQEIRTLRTYWRQRHDLVRSTGRHIQRMQKALTQMNIQLANVISDISGVTGQTILKAILDGQRDPRELAAYRDCRVEASEEEIVQALEGNWQEDQLFVLRQEQAGYEFCQKQITECDQQLAQYLARLEDQTQGATLPEETRKGRRKKKKGNPQFNLREELFRMTGTDLTQIDGIDVMTAMTVVSEVGWDMSKWKTENHFVSWLKLSPDNKISGGKVIGKGRMPTNNRATTVLRMAATTLRESDSYLGAQFRRFRTRLGPPVATKAMAAKLARLVYRMLRYGMKYVNQGAEFYEAQHRKQQVIHLKRKAAQLGLEIIEVAAAA

SEQ ID NO: 330002 - protein, 387 aa, unidentified
MPQPNDLSRSLVALDQDSTIIAVVEMSQSSWLVAGVLPGIERQPRKKLEPNAERLLGLLHRWRDEAVRAGKKITRIALAFEAGRDGFWLARWLRARGVEAHVIHPSSVAVSREHRRAKTDRLDTELLKRGFLGWLRGERGHCSMARVPTIAEEDAKRPNRERECLVGERTRIVNRMKATLARLGIRNFKLTLRQTAERLATVHIPEGMPLPPNVSAELQRDMARLRFVVSQIREIEEARQKRLEQEPETGSHAMVQLLARVVGVGIETADMLVHEVLSRPMRDRKAVARYAGLTGSPDESGAKRREQGLARAGNARVRRGMIQLAWRFLRFQKQSALALWYQARTADSRPGTRKTMIVALARKLLIALWRLVTTGETLEGVILRPAG

SEQ ID NO: 330003 - protein, 358 aa, unidentified
MADKVTVAAVVGGVDTHKDLHVAAVVDQNNKVLGTQYFATTRQGYRLMLAWMTSFGALKRIGVECTGTYGSGLLRYLQNAGLEVLEVTAPDRMERRKRGKSDTIDAECVAHAAFSGIRTVTPKTRNGMIESLRVLKTCRKTAISARRVALQIIHSNIISAPDDLREQLRNMTRMQLIRTLGSWRPDASEYRNVTNVYRISLKSLARRYLELHDEIADLDVMIAAIVDELAPELIKRNAIGYESASQLLITAGDNPQRLRSESGFAALCGVSPVPVSSGKMNRYRLNRGGDRAANSALHIIAIGRLRTDDKTKEYVARRVAEGHTKMEAIRCLKRYISREVYTLLRNQNRQVNSIPIMA

SEQ ID NO: 330004 - protein, 324 aa, unidentified
MERYIGLDVHAASCTAAIMDARGKRLGAHVIETNGESLVKFLATQPGKAKLCMEEGTQSEWLYQVLSPHVVEILVIRVGETSGPPGQKNDERDAYDLADRHRRDALPSTVWKDAGKLTTLRQLVKVHASIVRDTVRTQNRIKALYRSRGVNATGSSVYTNKGRKKWLELLSANSLASMSLLYAQYDQLSEVRERAHKDLVAESHRHPIAEVLETCPGLGEIRAAQIIAVVMTPDRFRTRQQFWSYCGLGIVMRSSSDWVQMSDGRWARAQVQQARGLSASRTTRCSRWSSRARRRASSCSTERRCSLRTTSGWSPPERNRISRR

SEQ ID NO: 330005 - protein, 427 aa, unidentified
MKEQSRTIVGIDWSADSHTCYDLQTDKSFKIKDSVEGYEKLLKNYPEAVFVIEEANNRIGDYLLINNREVYVLPPCRSKEARKYHFSSGTKSDGLDAKAIALTFKEHPSYCLKARYSKVGVKITKLVTAYNIVSKMHSQQCNRLYSLLLRYFPEYLHIMDKQYRSDTSLRILSVCPTITELKKVSNEELRKILNKENYRMTSILKNKLDRIRSEGISWEDTSCEGKLILLLVNTLLSLRKGLEVLKKEMEKTLKNSPYRIILSIPGVKAVIGSYIVKAYLTHDFKSYQEIQKYAGTAPLLFQSGRKSIMLMRKKCDNDLKGMIHMAAFASLKTCGWARNYYRRKRKEGKTYGHALRALGNILLKIAFSMLSKMKEYDETLFLNAKGIKTTQLNDTSFSETFPYPEYSQDAQLSLAATKDVVDNLIVT

SEQ ID NO: 330006 - protein, 363 aa, unidentified
MKNYIFVGCDSHEKTLVNKIAHNDGPLETKRFSARRAGRQKLIENLRERSRQAGGAQVVVAYEASSHGVILCDELRAAGFLCHVLAPTKIERSIKQKRNKNDDRDAERLLDIVRGHYLAATKMPAVWVADLQTRDDREPVRARQDLSEKQTTVKTQVQMLLKRQGIEKPEGVGTSWTKRYRLWLEALSAEGPAIQSGMRQTLKSLLRQLQFLEHEIVQMDQAMRELANTPRRKPIVDELMKEKGVGLATAMKYVTDIGDFKRFNRGRQIGAFFGLVPSTAESGENNDRKGHITREGSPSARKVLCQATWSRVQHDKQERDVYRRLVARNPKKKKIALVACMRRLAVRLWHIGFQAQLKMEAAG

SEQ ID NO: 330007 - protein, 338 aa, unidentified
MVYGAIDLHMRYSQIRVIDESGAVLRDQRVVTCRERLVTVFEGLGPLRVLLETGTESEWVAQTLEAAGHTVIVADPNYAPMYGELHRRVKTDRRDVTALAEANRRGWYRAAHRTSAAQRSTRQVLRARRQIVQMRSGAVALIRSLVKQDGYRLRSGSAERVPARLTQLPLPAALRAILAPLVRMIETATTEIATLDQQLASRAAADPVVQRLQTVPGVGLVVALTFRAQVDDVRRFRHAGQVSAAIGLVPREDSSAERRQRGHITKVGPRELRSLLVQAAWACWRSKASATLRAWVEQVAARRGRRIAVVALARRLSRLLYALWRDGTSFDVKKLAAA

SEQ ID NO: 330008 - protein, 394 aa, unidentified
MIYAGVDIAKMDHVIGAVDERGAEMCRPMPFKNTEAGLERAVAWLEGLAESPSDVVVGMEATGHYWMACYSFLVARGYSVAVINPMQVKAVRKLKGLDKVKNDRVDAGLIAEALRIGRYDETRLATDEVASLRSLSRYLQSLRGMIAELKTQCICLMDAHFPEYAGIFSDMFGAGSRAVLSKSPLPFELARRRSDSLARDIAEASRRGGKSAGYAAEIKAAAKSSIGVRLGQEAASFQVKSLIRQIEFADSECAKVEARVRELLDEVEPLVLTIPGVSYVTGAQIVSEIGDVSRFRNAPALVSYAGLNSSVSQSGQFDSGGGPITKHGSPYLRRALWLAANRARQCDPGLRAFYDKKRAEGKPHRVAVTAVARKLCHIVFAVMRDQVPYDPDRE

SEQ ID NO: 330009 - protein, 343 aa, unidentified
MDHFAGLDVSVKETSVCIVDDTGKIVREVKVASEPEALLAVLKNPAYHFKRIGLEAGPLSQWLFSALAEAELPVVCVETRHMQAVLKAQINKTDRNDARGIAQMMRVGLYRPVHVKTLRSQKLRMLLTHRKLLQSKAIAIENDLRGTLRNFGLKVGMVGTVKFEARIKELVENLPDLAVLVEPLLIVRRALREQIVVLHRRLLAIVRDDEVCRRLMTTPGVGPVVALTYRATVDIPARFRKSKAVGAVFGLTCSKYQSGEIDRSGRISRCGDEMMRVMLYEAAQSIMWSKKWSWLKAWAMQIARRRGMKKAIVALARRLAVIMHRIWVDGTEFRWTREQAATA

SEQ ID NO: 330010 - protein, 320 aa, unidentified
MMAQVDNVVAGIDVAKDKVDACLRSIAERPVLPSTAEGRRQLIAWLRKHKVAKAVMEASGGYEKEWAKALRKAGIEVWVVDPKRVRNFALSAGRMAKNDKIDADTIAWFAETFKERPSEIHDADQEELKGLVKARLGLVNMRARLFQSDHGATGLAQKANARILKQLDGEIAKLEAAICAKVKSTPELAERAEIIASVPGLGEVSAANLVAGMPELGRVSGKAAAALVGVAPYDEDSGKRRGDRHVKAGRRWVRNAIYMPCVGAATLNNSVLKAYYRRLIARGKEPKVAIVACMRKLIVILNTMLTRRQKWDPCCAIAVS

SEQ ID NO: 330011 - protein, 352 aa, unidentified
MTVTIVETRAPARAITGGVDTHAGAHVAAALDPVGGLLGVQEFPATPAGYAQLLGWLGGFGAVCLVGIEGTGSYGAGLARYITAAGVRVVEVDRADRQDRRRAGKSDPLDAVSAARAAQSGRAAGAPKGRDGAVEAIRALMVAKRTARSERTQTINQARALVVTGPDDLRIRFATHAPADLVAELASLRPRPGAMVGYATRIALRELGRRAQFLDRQLERLDAFIVPLVTARAPGLLALYGVGPDTAALLLITAGDHPGRLRSEAAWAHLCATAPIPASSGKVTRHRLNPGGDRQANHALYRIVITRMSSHPPTRAYVARRGKEGLSKKEIIRCLKRYVAREVYPHLRAPAG

SEQ ID NO: 330012 - protein, 452 aa, unidentified
MSRKKTRLQAVTEAPQMRPGAAGIDISPEVIYVAVDPQKDGRPVRSFGTFTGELYHIANWLKACGTRTVAMESTGVYWIPLFQVLEERGLEVFLVNARHYKNVPGRKTDVCDSAWLQYLHAVGLLQGSFRPTQEVCAIRTVLRHRGGLVQAASEEIQHMQKSLDQMNVQIHRVLSDLTGVSGLAIIDAILAGERDAHQLAGLRDGRVRASEETILAALEGDYRAEHLFTLRQSLESYRHYQKLIEECDRQIREMLDQFENRADGQEPPVARKKMRTSTDEELRREFHRVLGVDLTAIPGMNVGTVQILLGEVGPDLSRFRSAGSFASWLGLCPDNRITGGKVLSSKTRKVENRLAGALRMAAESLCRDQSYLGQFYRRMKSALKGGAPEAITAAAHKLARIAYTLITRQQEYDESRFEAAEKRNADKQRQRIIKQARKWGLVLVPETPVPVV

SEQ ID NO: 330013 - protein, 348 aa, unidentified
MSQSEQYVGLDVSLKETSICVIDDADKIVWRGQVDSRPEAIAPAVKQHAPHAVRIGLESGQLSSWLFHELKEAGLPVICVDARHAVCQESLKVNKTDANDALGLAQIMRVGWYREVTVKGLDCQAERALLVARTQIVSQITTLKNCVRGILKTFGRVLPKGLRSQFSDRVRAAIDGHPVLGAIIEPTLQVLEATRAQLLVYDKAVIQRARSDDTARLLMSAPGVGVVVALAYITGVEDPARFKRSSSVAAYFGMTPRRYQSGEVDHAGRISKCGDGMVRGLLFEAAKVLLSRSTRPSALKTWGEALSKRIGAKKATMAVARKLAVILHRMWTTGTTFQWNAEAASPAI

SEQ ID NO: 330014 - protein, 356 aa, unidentified
MSYDVKYIGMDVHKEAIVIAVLNEGGKLVMESVIETRASSILQFLHGLRGELHVTWEEGTWAAWLYDLLQPQVQHIVVCNPRRNALLKEGSKSDKVDAHKLADLLRTGMLRPVYHGENGLRTLRELGRSYQTISKDLTRVMNRLKALYRGWGIPCAGTQVYAARCREEWLSKIPQAGVRRRAELLYQQLDGLQILRRNVRAEFLAESRKHKAAKLLRQIPCIGPIRAARLIGLMQTPHRFRSKRQLWTYSGLGIETHDSAQYRFVSGHVQRSKKPQQVRGLNRNHNHEMKEIFKSAATRASCGRGPFHDFYAGLLAKGMKPEMARLTLARKIAAITLTLWKKEERFDVEQLKTQAA

SEQ ID NO: 330015 - protein, 331 aa, unidentified
MIENYVGIDVSKLSFDVFVRENSAHKQFKNESVGFELFTQWLKKQVGHSLNTVLICFEHTGLYSLPLAMFLETGHIPFAMIPALEIKRSLGITRGKNDLVDSKRIAEFAYRFSDKISTTKLPAADIRKIHSLLTLRDRLMTSMKGYTVSRNEMLRVMQKEDIPELFSSYESAITSLQDEIGKLEQAIKAIIKGNEQLRSTFELITTIKGIGFIIASFLIVYTYNFTRFVNWRKFACYSGIAPFEYQSGTSVHGKTQVSSIANQQVKRMLHLAAMTAIHFDTELREYYIRRQADGKSKMAIINIIRNKLVARVFAVVKRGTPFVDMKRYAAR

SEQ ID NO: 330016 - protein, 346 aa, unidentified
MEKITVVGLDLAKQIMQVHGIDAAGRVVLRKAVRRERLLALLAQLPRCVVGMEACSGAHHWARELRQLGHEPRLMAAEFVRPFRKSLAAKNDANDAEAVCTAVVQPNMRFVSIKGVEQQALLSLHRIRQGLIEERTATINRLRGVVAEFGVVVPQSATALQRALPAMLADAERLPALLQRSVQVLREHLHDLDARIAEFDRAIAQHAKSSPPAQRLGALSGVGPLTASAVVATVGNAHDYRNGRQFAAWLGLVPCQYSSGGKRKLGSITRRGDAYLRALLIQGARSTLQAALRRAPTRHDRLSAWIVQLARRVGYHKTLVAIANKHARIIWVLLAREQTLNLARAR

SEQ ID NO: 330017 - protein, 386 aa, unidentified
MKDETFVPREYDVFAGLDVDKKSIAATFSSPQGFIRSLHMPYSIDYLLNHVRKHFGDQKVAFVYEAGPTGYGLYDGLVAQGYRCLVAAPSMIPRAPGQRVKTNRLDSRGLSESLRGGQLKSIHVPSPIYRELRHLTQLRDTVVREAAAHKQRIKALLLLEGIGFPSATAGRQWTLRVKAQLRKLRCSRTVRFKLDQLLDSLEFCEKQVVSSTKEIRRFCKEDVELFQSIEYLMSIPGIGWIVASQLLARMGDWREIDNVRQLGSFLGLVPTENSTGDSVDRGSITRAGDGRLRSKMIQAAWSAIRQDGELREFYRSVCQRNPRGKGARIAIVAVARKLSTRIYAVLKKQRPYIVRKQVHSAPLTQEETSPQGTTRRCAEPGETDNS

SEQ ID NO: 330018 - protein, 403 aa, unidentified
MVFLGIDWAEAHHDVCLLDEQGKLLGKRRVLDGLEGVRQLHELVAEQAPEPEQVVVGIETDRGLLVQSLVATGYQVYAINPLAVSRYRERHSTSGAKSDPADAKLLADLVRTDRHNHRPLSVDSELAEAVKVLARTHQNLIWSRQRQLNQLRSLLREFYPAALEAFAGDLASADAIAVLERAPTPHQGRSISQGQLVSALRKAGRERNLVVKAAQIQACLRRPQLEAAARLTQAYGRSVTALVRLVRQLNQELASLEQELSASFELHPDAEIYLSLPGLGKVLGARVMAEFGDDRTRFQSPKARKNFAGTSPITKSSGKHKAVLRRFACNHRLLDACYFWAFASLRRSPGAKDYYRRLRARRQSHKQALRALANRLVGILDGCLRHCQLYREKVAWPLLEAAA

SEQ ID NO: 330019 - protein, 398 aa, unidentified
MTRKNTLKSLPTDTEFRVVGLDLAKSDVSVAAIPVDDNTPSLVDRMTYADLLDWAGKISPTLFAMEPCNGYSLLCLQLENLGHEIKVISGSTVSMWINTHLSGQKIDLNDAIALARLDVSDAELTPIRHKSITEIRIQTVQAVRQQLMSQRSKSIVSFKALAQQWGIPCAAGHRNLKKLRESIEAKVDLITRPVANAMLFLLDAVKSLDRQIGQLNQTLQELVMSDERGRLLQSVLGVGTQISARVITVVGNVERFNSPRSLVAYVGVAPRNFITGHKNLTKKKHGNCPDLSHKGQGKISRRGDKLLRSLFIQGAACLYMQFCKDQLPECQLKRWILKQLASQKPYGKLIVSLAAKLIRIVWAVLTYGEKFNIQKAGRTRSMWSEMALETPLNKEVPA

SEQ ID NO: 330020 - protein, 436 aa, unidentified
MRGCRCSMIMGFTKPIEHSNLITKEGDLMNPLYVGIDVSSKSNVVYFMLPNGDKHSNFSVANSHDGSTQLVKRICSALTSESLDTVSIGLEATSVYGDNLVYFLREDASLASFNRKIHVLNPKQVNKFKESYNDLPKNDWIDSFVIADCLRFGRINKEVYIGDYHYKALQNLTRARYFAVCNLTKEKQRFMNVLFKKYSTMTQEKVFSDTFSTTALAVYDEFESAEALAYMDLQELTAFIIEKGKNRFPDPDAVAKAIQKAARSSYRLPKTVNDSVNQVLSISITSMKALESQIKEFDKAIAAQMKLLPNVLISIPGIGPVYSAGIMAEIGDINRFDNQAALAKYAGLAWTQHQSGNFEAQNTRLIHSGNRFFKYYLCEAAFSLVRCDKEYSNFYHLKYKEVNKYQHKRALALTARKFVRLVFTLLKDNRLYRPAE

SEQ ID NO: 330021 - protein, 346 aa, unidentified
MTIVEDRPVITGGVDTHADVHVAAALDRIGGLLGVRQFPATAAGYADLLEWLGEFGTVDLVGVEGTGSYGAGLARYMAGAGVRVVEVDRADRQDRHRQGKSDPLDAISAARAAQSGRASGAPKGRDGAVEAIRALMVAKRSARHERTQAINQARALILTGPDELRTRFARHSPAALAAAIAALRPRPGDVPGYATRIALRELGRRVQFLDAQLERLDELIIPLVTARAPGLLSLHGVGPDTAALLLVAAGDHPERLRSESSWAHLCGAAPIPASSGKTSRHRLNRGGNREANSALWRIVITRLKSHPATRAYAERRSKEGLSKKEIIRCLKRYVAREVYRQLRDGA

SEQ ID NO: 330022 - protein, 436 aa, unidentified
MKMKALQTKRHFVDGKVIIGIDPSKKKFQAIVLDPKGIPLGNSFTFQSTYQGFNVELWKRLDLIIQKPSPEKVVFAIEVSVNFWQKLSYFLAHRGFTVILVSPMTTKYERKRISRNFSRTDPRDALLVANAGRQGYYHLYREFPPESEALHRLAITYDKLKKQFVTAKQRLLSQTELIFPEFIDVMDLDTDSARYLLSMAMTPQDFKTRIDLKEASKMATLSRQHYGHQTVFDLKKSAEKSIGLPMDGSAYIAERLTMNVWLQHILVLRIQMNQILDEMVRLTKLTPWYDILTSVKGISDVSASRFIAENRNLAELPHFKKIQAFAGMSLRISESGEYSGNRHITHIGNHRLRAVLYKMTEETKNHVPEVRIRFLKRQMKHKWYRENVVACSSNLLKLITALIKENRPYHEDPDKIKELKKLEKKYEQYLLEKQAA

SEQ ID NO: 330023 - protein, 342 aa, unidentified
MDHFAGLDVSVKDTSVCIVDGTGKIVREVKVASEPDALLAVLRNPAYRFKRIGLEAGPLSQWLFSALAEVDLPAICVETRHMRAVLKAQINKTDRNDARGIAQMMRVGLYRPVHVKTLRSQKLRMLLTHRKLLQSKAIAIENDLRATLRNFGLKVGMVGTVKFEVRIKELVENLPDLILLVEPLLVVRRVLREQLDLLHRRLLAIVRDDAVCRRLMTTPGVGPVVALTYRATVDVPARFRKSKSVGAVFGLTCSKYQSGEIDRNGRISRCGDEMMRVMLYEAAQSMLRSKKWSWLKAWAMQIARRRGMKKAIVALARRLAVIMHRIWVDGTEFRWTREAAAA

SEQ ID NO: 330024 - protein, 349 aa, unidentified
MTYFAGLDVSLEETAICVVDGTGRIAKEARAASEPAALIAALSKIDVSLERIGLEACSLTAWLHDELRAAGWPAICIETRQANAAMKTMPNKTDRNDARALAQIMRTGWYRQVHVKSRQCRLWRSLLVARRTVLNEMRSIENVVRAVLREAGVKLGTPSRAAFAGRVRELAGNDVALRPLVEPLLAILATMLEQLAGLTKQILAIARDEEVCRRLMGVPGVGPITALAFRATVDRPERFRRSRDVGAHLGLTPARYQSGETGIQGKVSRCGDELARTALYEAAHTLLVRSKKWSSLRAWGMKVAKHRGMARARVAVARKLAVVLHRMWSDRAEFRFGKEPGASAGLAAA

SEQ ID NO: 330025 - protein, 344 aa, unidentified
MDNMIIGVDLAKSIFQVHGALMATGEIQFRKKLTREQFRMFMSKLAPSMVIFEACGSANYWAGQMEAMGHQAKLIAPQFVRPFVKRHKKNDAADADAIIVAARQPEMRFVMPKTVDQQARAALFRGRERLIRQRTEDVNALRAILYEHGHVFPIGMWQLKRMQNLVEADTRDLPAIVREECRDLLAQIAEKTARITLRDKNLKELAAQSQTARRLQTLPGVGPLTALAVEAFGPDMSQFKRGRDFAAWLGLVPRQHSSGGKERLGRISKAGQADIRRLLIIGAMSRIIGRARHKIPAESWIGRMLERKPKMLVGIALANKMARQIWAMLTKKEDYRDPALAVTA

SEQ ID NO: 330026 - protein, 351 aa, unidentified
MDTIGLDLHQRESQLCICDEDGTITERRIVTSRERFTAVLGDRPRTKILLEASTESEWVARHLESLGHEVLVADPNYAPMYATRSRRTKTDRRDARTLMDACQTGAYRLAHRLSEPRRHVRAELAVRDALVRTRTRYVALAKTLVRRDGLRVASSESHLVAQRISALSLSPALAAELQPLFTLLVPLNEQIAAADGRIARLTATDPLVARLATAPAIGPVTASAVVATVDDITRFRSAHQFEAYLGLVPGERSSGEKRHVGPITKAGNSRVRWLLVEAAWRLLRTKSVEAAALRAWAHRVAGRRGKKIAVVALARRLAGVLYAMWRDGVPYDARRIRGPRIAAAEVTTRAG

SEQ ID NO: 330027 - protein, 393 aa, unidentified
MIGGIDSHKDTIHVAVITGLGVDVVDREFTTTQAGYHEAIDWLRTQDCLDVVGVEGTSSYGLGVTTALREAGARVIEVNRTRVAERRRKGKSDRLDAYRAARGVLSGEASTIAKSDTIEALRAVHNARKSAVKAKRVAWQQISATLINAPAPLRDRYRGLAEDKAVQQLIAARPARGTEPAVAGIMVALKVLARRHRALSAEIDELGDHLAETTTAINPGLAALQGVGPVVAAQLLITAGDNSDRLRSEASFAALCGTAPVQVSSGRVTRHRLSRGGDRQANAALHHIVTNRLRHDPRTRDYRDARLANGSTKAAAMRALKRAVAREVFRALHGCCPVPDYSDLRPARQARHLTLAAVAAELNVWPSALSQLELGQRVDNDLVARYRNWLTAA

SEQ ID NO: 330028 - protein, 331 aa, unidentified
MFENYVAVDWAMSNMAIARMTTKSSKITTIDVPSSISDLKAYLKNLQGSICLTFEETTSAHWLYSELREMVDKVVVCDPYRNKLLSEGAKTDKIDAEKLVKLLRADLLKEVFHSGDKFIEIRKIVSGYEDLVKAGVRLKNQKSALFRSQHKCKEEKELDCSSSMFVLEGLNKQIDSYEEEKKRYIKEFVKLENKYSEIRRVRDIPGMGYILAIKTVARIVDARRFKDRNHFLSYCGLVKLDKMSGGRSYGQRNPRYCRTMKSIFKIATLTSYDGDNQFAKYYSYLINDKKIPAHNARNATARKIASVVYGVMKSNINYDPYMYRNKDVIVL

SEQ ID NO: 330029 - protein, 379 aa, unidentified
MTQATRKRQDSAEEKTLYVALELSKKSWKLAFSDGSARRPRVVAVPARDWECFEAEVAKAKERLGLAIEVPVRSCYEAGRDGFWIHRVLLHRGIDNIVVDPASIEVSRRSRRAKTDRLDALKVVAQLIRHHRGERVWSVVRVPDVPDEDARHLHRDLDVLKAERRAHRMRIQSLLFTHGVDQKVGRRFLEALPRLCQWDGQPLPTSMQARLVREHQRLQAVEEQIRELEKERKTLLANSQTRPVEQAKLMAQLCGIGTTSSWVFVMEFFGWRQFANRREVAAAAGLTPTPHQSGDTSTNQGISKAGNPRVRTMMVEIAWSWLRHQPDSKLSKWFWERFGKGSARQRRVGIVALARRLLIDLWRLLEFGVVPEGARFKTV

SEQ ID NO: 330030 - protein, 399 aa, unidentified
MTESALIVAGADTHLDTIHVAAITTTGATLGDKEFPTTGAGYAAAIAFLMTLGHIVRIGVEGTASYGAGFTRALTAAGIEVVEVTRAVKSTRRLKGKSDPLDAYSAARTVLAGEGLATPKDDATTGLRALHIARRSAVKHRTAVINQIKAMLISAPDAVREKYRGLTTLKLIEAIARCRPDTLADTWAQSLLTAAKMLAQRVQFLETQAETLQTQIDALVAKANPGLRAAYGVGPDTAAQLLITAGANPHRLHSEAAFAALCGTAPVPASSGKTNRHRLSRGGDRAANNALHRIALVRMSSHQSTKDYVQRQLAKGHNKMEILRKLKRAIAREVFKLLTRQIAVPEYNDLRPARQSKNITVTAAANHFGVWPTVISRIERGLQRDDALADQYRSWLQAA

SEQ ID NO: 330031 - protein, 307 aa, unidentified
MFVGIDVAKDRLDVHVRPAGEAFTVARDGEGIEDLVGRLSKMAPALIVLEATGGFETIVAAGLGAADLPVAVVNPRQIRDFARATARLAKTDTLDAAVIAHFAEAVNPPARPLADEQSRLLGELMARRRQLTEMIGAESNRRRMLTVRRTLKTVDRVLATLKAQLEQIDDDIDTAVRGTPAWREAEDLLISVPGIGPRIARTLIAELPELGRLGRREIASLTGVAPFNRDSGTLRGRRTIAGGRPVVRAALYMSILVSIRHKLPLALTYHRLRAAGKPAKVAIVACMRKLVTILNAILRDRKPWANA

SEQ ID NO: 330032 - protein, 347 aa, unidentified
MRFYTGQHQYYCGIDLHARTMYLCILKHEGGEVVLHRNLRCEPDAFLRAVAPFRDDLVVGIECIFCWYWLADLCTRENIPFVLGHALYMKAIHGGKAKNDKIDSHKIAVLLRAGAIPVAYVYPRGMRATRDLLRRRLFFVRKRSELFSHIRTTFHQLNLPAPTGQLRYACNRAGLVEAIPDSMVRTSIEADLAMAGRLDEVIRTLKRTILSQARIEDPLTLQLLQTIPGVGPILALTLLYELHDIARFARVQDFLSYARLVKSQKASAGKVLGTSGSKIGNAHLKWAFSEAAVLFLHKNPPGQKLLNRLRSKHGKGKALSILAARLGRASYYMLRRTTAFDMDRFMN

SEQ ID NO: 330033 - protein, 341 aa, unidentified
MEVKLIGLDIAKRVFQVHGVDEAGEALLVKRLRRDAMIPFFAALPATTVAMEACATAHYWARELMALGHEVRLLPPRYVKSYVWRNKTDAADAAAICAASRDPRIHPVPVKTADQQALLALHRVRELLVRQRTTLGNALRAHLAEFGIVAPQGQAGLGRLREAVAGSDALGIPAVAVPALEALVVQWTSLNDRVRELERAILRQHRADEASRRLATIPGIGPITATALVATIGDARNFKTGRHLAAWLGLTPREYASGLKRRQGAISKRGDAYLRRLLTLGAQSWLRHHKTGQRGGDPWLTALQQRRPTPVAATALANKTARIAWAVMSREETYRPRQAAS

SEQ ID NO: 330034 - protein, 337 aa, unidentified
MSYLGVDLHPTRFTVCYRTAHGKERVVSYGTDRMEAFRKTLRRRDTVAVEATGNTAWFIEQIRHRVRKVIAVDPNQFAVIRKSVKKTDLHDAKALAFFLSKDMLPEARMKKKTHTQLHSLAATRDKLVKQRTALVNKIHNVLNRHGLKWKKETLTTEKGLRAVMTLAWDPIVRVELEVLTEQIRFLGQSIKRLDRDLSEHGKALKGHANLRSIKGIGDRSATVLLSVIGNVKDFANEDKLAAYFGIVPRVRDSNQTVRHGRITKHGSTPARTTLVQCTLCAKRYSPYLRRYYERIKRSRGSGKAIIATARKFLGIIYKTLTHDWIFEDFPTFTIAKT

SEQ ID NO: 330035 - protein, 388 aa, unidentified
MHVYVGVDIVKELHYAAIMDSDGVVSKPFSFENNDKGFNLLLSHLAPYDKESILIGFESTAHYQENLAYFLKSLGYRTAEINPLQTAALRKANIRNTKTDSVDARLICLALMNHHIQGDQRDSARLDDLYQLCKMRMDTMKKRTTCKIQLVAIMDRIFPELASFFDNNLHTNTIYRLIESFPLPSQIKKTRIDILTKLLHKASKGHFKKEKAQKLKDLADISVGIPSDIFAFQAQQLVHQIEFYTDQIQTIEERINTNPDVMSSPLMTIPGIGTFCVACILSAIKNINDFGAPCKILAYAGLDPVIRQSGKFTASHTRMSKRGNSLLRYALVWSAGNVVKNNHTFAEYYRHKTEDQGKSHYQALGHCAKKLVKSIYHMLKYNESFNLD

SEQ ID NO: 330036 - protein, 407 aa, unidentified
MRYYIGVDWADAEDAVWVANEAGDKVLSRRIAHTVAARSEWARWLRERQAEGVELWAAIERPHGRIVDFLLDHGVVVYAINPKSLDRARDRFRVGGSISDPFDAKVLALFLRSDHAQLRPLRPSSEAAQELKGLTRDYRRQVHLQTRLRNQLIATLKEYYPRALELCDDLTAQWAQAFLAHYPTPAAAATLTEAAWQAFAKTHRLGTARTAALWQTLQQPQLPLPAHVVRTKARLLQALLRQLAPTLATVAEYRQAIDDFFATMPAVDIARSLPVGKSGTTVPTIWAELGDHVDRWNSFRQLQGYAGTVPETQRSGNGLLIKFRYACNPVLRDVMHQFAFLSLSHSLWARTYYDRYRARNHTHHEALRALGAKWLKIIFVMWKRNVPYSETHHLATMACQHLRQPAA

SEQ ID NO: 330037 - protein, 475 aa, unidentified
MNIKGTKKKNQVVTANIFEQQELLKKSEVIKENLTASTWRELETNGKFDKNKKLSFISDDMLILGCDVGSETHYVRAIDTRGRELSKSAYSFNNNQEGFRSAKEWAVRIAAEHDKGQIVLGLEPTGHYWFCLATWMIANGISVVQVNPYAVKQTKEVEDNSQLKDDRKDPKLIANLVKDGNFGMPYLPEKIYAELRRLSMFRDQLNEDRIRTINRMHREMKIYFPEYKEALGKVDGAFSLELLKEAPFPDELTALGEEGIRQIWHAAKLRGRGYSRAREILQYAKASVGIKDGSIASKTAVKWFVQKIMELDVELAVIENQINQKCQEIPHTGNVLEISGIGENTLSGILAEMGDISRFDDVKEIQKLSGLGLVACSSGKHKGETKISHRGRKRLRYWLFQAAKSAVAHAEEFKELHMYYTTRADNPLKKMQSLIVIACKLLRIIYTILNTGTFYDPKKMLMDIRRPEKKEAIVA

SEQ ID NO: 330038 - protein, 404 aa, unidentified
MKRQCVGVDIANQDFKVALAKKGADDSLSCTTSKRFANTKTGFNQLVRWATSEMDKDVPVIFLMEATGVYHEELAHHLHRIGKQVHVVLPNKFKHFAASLNVKSKTDAMDAKLLARFGVEREHRLWSPTESIIMQMRHLSRYRVQLQEQRTAISNILHSKDHSHAVPTDVKRSTKKIIAVLDKEIEKLSKEMENVVKSDPEIASKVNKLCTIPGCAITTVAAIVAETNGFKEFDSAKQLTSYAGYDIVHNESGTSVLSKTRISKKGNRYAMRCTPAMSASKYVTEFNALKERIKDRTKIPMKAQVAIQRKLLILMYTLWNNDSEYEKDHQKEWRSPSYRKCPKATSFGSLKVTENKSTEHLHVNTVPAPVQSRGALDLRSAIADRHPTPNCAGSAIGDPALSIK

SEQ ID NO: 330039 - protein, 310 aa, unidentified
MKYYIGCDAHKKYSVFAGVSEAGEIIPAQRVEHDREKYSSFLKGLPPASDIAIESVGNWYWLIDEMEKAGHIPTLVNAGKAKLMMGNINKTDKLDAKGLAVLSINGTLPAVWIPPRELRDQRELARMRIFLVHIRTSLKNRIHATFAKYAITFEEVSDLFGVRGRNLIEKRLAELPPETRDSVKEQLKLLDQLQRQISMVEEHIRQIVKITPEMQLLMSIPGIGPILAILIALEIGNVARFGDGAHLASYCGAVPRVKSSGGKTYYGKTRPDVNHYLKWGLTEAANVIVLTQHRMTGHHVVTLYRRISPE

SEQ ID NO: 330040 - protein, 364 aa, unidentified
MVEDRRTVGVGLDVHKSSVRLAAVSSGELLGEVSLPYDHEAVERELGAWPDARVCYEAGPTGFGLYRHLVAAGVDCVVVAPGLVPSKPGDRVKTDKRDARRLAALHAGGLLTAIFVPSPEQEALRDLVRAREDARLDRMRARHRLGKFILRHDRRMPTTCWGVTRRAWLGRQAFELPGQQQAFDDYLFAVDQVDRRIEGLEAELSRLAKDGPHRELIARLRCIRGIDTLTALGLAAEVGDFTRFRTAAQFMGFVGLVPSERSSGESRRQGSITRAGSAHARRLLVESAWHARRRPTVGYELGRRHRGQDPAVLERAWRCQQRLHRRWQRMAGRGKPSQKIVVACARELAGFVWAIATDQPMRTR

SEQ ID NO: 330041 - protein, 372 aa, unidentified
MGKHRLAFVAFDSAKDKHAVAIADDGRDGEVRYLGEIDNSPDAVRKLVAKLTRQYERLHFCYEAGPTGYGLHRQLTELGHVCDVIAPTMIPKRSGDRVKTNRRDSVTLVKLLRAGELRAIWVPDGVHEAVRDLTRARETAMVDLKTKRQQLLSFLLRHGRSFPGGKHWTKMHERWLAKQTFTHPAQQIVFQDQLEAITTAQARLAALEQQLREIVPSWTMAPVVAAYQALRGVSFLVAITFAAEVGDVRRFATPQQLMAFLGLVPSERTTGDTVRRGSITKTGNHRARRVLIEGAWTYRFSARVGETLRTRLKDLPLSVRAIAWKAQLRLCARYRRLIARGKKTPVATTAIARELAAFLWAIAQQVAPRTGV

SEQ ID NO: 330042 - protein, 418 aa, unidentified
MVEDVHWFIGIDWATQSHRAVLLDAEGSQVGEREFSHGGAGLTELCDWLLQKTGAAPEQIAVAIEMPHGPVVEMLLEHGFAVFAINPKQLDRFRDRFTAAGAKDDSRDALVLGDSLRTDRKAFRKLATDNPTVIELREWSRITDELQQERTRLANRLRQQLWRYYPQMAELTDDVGDEWFLALWHKVPTPAAAAKVTEKAVARILKDHRIRRLDAATVLQTLRKTALFVAPGTTEAACVHIRSLVARMRLVNQQIKEACNALDSLCAQLGAPDEESPSGQSHEQCDVTILRSWPGIGRIVLATLLTEAAQALQARDYHALRALAGVAPVTRQSGKKRLVSRRLACNRRLQTAVHHWSRVAIQHDAAARRCYDALRQRGRGHARALRSVGDRLLSALCATLKRQVLYDANRRSPQPATP

SEQ ID NO: 330043 - protein, 415 aa, unidentified
MEDLGLRALYRRVAGIDVHRMLHVVTVLIEQGDGSMQRHTREFGGFRRDCRALAAWLSGLGVELVVMESTGIYWKSVHAHLENAGICAWVVNAHLIKHVPGRKTDMADSEWLAVLARFGLVRASFIPPKDLRELRLVSRYRRKLSAMCASEVNRLHKILDDGGIKLGGVVSDINGVSARAMVSALIEGKSVEHMLGLARGKLKQRREDLGASLEGDLSARHLFVLGHIHAHIETLQREIIDIDRYLLAAMQPYAWAHQLLQTIPGVDEIAAALILIEIGDDMARFGCAERLACWAALSPGNNESAGKRKSGRTRHGNSIIRFILCECANAARMTKSTLASKYRSLMARKSHKKAIVAVAHKMIRLIFLMLSRRQPYIDQAIDYAAMSAKKNAPRWIKQLKTIGRWPSPEPAAASH

SEQ ID NO: 330044 - protein, 369 aa, unidentified
MDKGTTHVALDDSKRKIVAGILRPEATQPELRELPNDPHHIRRVVERLKREGPVVMCYEAGVSGYDLYRQIAALGVPCQVMAPALTPRRPGQHIKTDRRDAAKLVRLFRAGELTPIHVPDEAEEGVRDLLRCRDDVRRDVLRWRHRVLKLLARHGRSYQAGKNWSQRHWRWIREQQFAVPALQRAVEASLFALEQALARLAALDHEILALAEREPYRTPVGWLRCFRGIATLSAMILVAEIADFQRFRGPRELMAYLGLVPSEYSSGDRERRGALTKAGNSHARRVLIEAAWHYRHRPTAGGALGRRSAGQPARIISQAWRAQQRLHRRYRHLVGHGKRSPVAVAAVARELVGFIWAAMTGQDSREHAA

SEQ ID NO: 330045 - protein, 321 aa, unidentified
MERSAQLNFGVDVGKHELVIASSVDQRVTKIANRPDAIWRWLGTLPADCRVGMEATGIYHQQLADLAHAAGHQVYVVNPRAVAVYLKSLRSRGKTDILDARGIARYVQNEADEHPLYTPPSATQRSVQTLLHRRHQVVKQRAALRMSCQSLDESLRAPFEPLLIAFDQCVREIDSQLRQRVRADEQLLAQATRLRSIPGVGPLISTALALRLSRHPYRNSDALVAALGMDPRPHQSGVSEAPRHLSKQGNGEERRLIYMAAVSACRCALWRKRFDQLIARGLPSTAAHCIIARKLLRIAFAINKNCQLYRTEVLGDDCRAT

SEQ ID NO: 330046 - protein, 342 aa, unidentified
MEHYAGIDVSLECSSVCVVDANGKIVREAKVASEPQALIAWVGSLGFGLERIGLEAGPLSQWLFAGMKRASLAVELLETRHVRKAFEAMPVKSDRNDARGIAQLMRLGWFRPVHCKSMSAQETRSLLTARKLVQSKLHDVENSLRGILRGFGLKVGKTTGQKFAGRIEELVAGHPHLQTIAKALLAVRAVLRAEFAAFEKQTRRMVRSDMQARLLTSIPAVGPIVALTYASAIDDPARFKSSKQAGAHFGLTPKKHQSGETNYTGRISKIGDASVRTALYEAANVMLTKPVKGGSQLKSWAMRIKRRAGTNKAKVALARRLAVIMHRMLADGAPFNAAAAAT

SEQ ID NO: 330047 - protein, 421 aa, unidentified
MASDVSWFNICTWGGKVMDLAPLYRCVAALDVHQAKLTVCILREEADGELRVELREFGGFKRDRREMARWVASFAPESVVMESTGIYWKSPYEALERAGLRALVVNARHVSQVPGRKTDLADAQWLAILARSGLLRGGFVPPANFRHLRLVSRQMQKLTGILASEKNRIHKVLTDGGIRLGVVVSDLHGKSGRAMVKALVAGESAQSLLGYADPRLKASEEDLLDALDGDLSAEHRLVLRQLLDHIGYLEQHIAALRQALVAGLAPQQGLLQALQTIPGLDETGAAMLVVEIGDDMQAFGSPEKLASWAGVCPGNHESAGKRKTGKQRKGNPYVRRILCEAAHAASRTRCALAEKFKGLLVRRGRKRAIFALAHKLLKTVFVLIDRGDYYRDAGVDYEAMSVERNAPRWIKMLRKYRYIPA

SEQ ID NO: 330048 - protein, 348 aa, unidentified
MMLIGCDYHPSWQQICWLDTATGETEEKKLEHASGEAERFYRQQPAPVLIGMESTGNCQWFVELAATLGHDLWIGDAAKIRASDVRAQKHDRRDAELILKLLLEGRFPRIWTPSGEEKDLRQLLMHRYKLVMLRARVKNELQHLAMNQGITKKRKLWSKAGEKVLRELPLAPWAGQRRKDLFRIREMLNGQIDLLDQAVVEIAEKNEKARLLMTQPGVGPITSLAFVLTMGDVSRFQRGKQVASYLGLIPREYSSGGHQRFGSISKQGNRFMRMLLVEAAQGAVRCDPGFRNEYVHRCHRKPKGVAKVAAARKLAIRLYWMLRTNTGYPEVVRVESSSRVPLVVRHGG

SEQ ID NO: 330049 - protein, 408 aa, unidentified
MVEPRRVVYGGVDTHKEFHVAAVVDDVGRILGTDTFPATRAGYRRLLGWLDRHGQVAKVGVEGTGCYGMGLARFLATKAVDVVEVNRPNRQLRRRRGKNDTVDAEAAARATLNGEAAAVPKAADGIVEAIRVTRIVFCSTRNARTRVSNQIRDLLVTAPDQLRQALEHLDTAGRVERAARFRCAGDQTDPAEATKVALRTLARQHQTLSADLDTLRAQLDELTKAANPALRQAIGVGADVASMLLVVAGDNPERLTSDAAFAALCGASPVEASSGKHVSHRLNKGGNRDGNHALWRIAMVRLTCHQPTKDYAARRQAQGKSQRFIIRCLKRSIAREIHHLLLHPQPDSTGRDLRQTRRHLGYTQAHVAEILGCDQTRISEIENNRRCAHELTTRYRAWLDTHNATCAA

SEQ ID NO: 330050 - protein, 408 aa, unidentified
MQECATIYAGVDTHKDFHVLVILDGLGRPVSSGSFSASEEGYKRLAKEIGDPSGCLAVGMEGTTSYGAGLCSYLMRSGCAVFEVLRPKKEKRRIGEGKTDSIDAERAARAVAAGKGIVPKSHNGWVGGLRALTVARSIHVGAMTGVANAVGSLLVSAPEQVRAKYGPLKGAGPCRKLGACRPSAEDDVAGPLLASLKALARTWLGLNETAGQLEGAMRRIIEANAPALLQVKGCGTVNAAELAIAAGDNPERIPNEAKFASICGVSPIPAPGGKTDRHRLNRGGNRRANKALHMIAVSRMSGDERTLAYMAKRKSDGKTKREAMRCLKRFIAREVYSALRHPMRLKYAQGEDLAAMRKSLGLTQQQIARELGVPNARLSEIERDVCPHEEIRREYDRYLNAKKGLDSL

SEQ ID NO: 330051 - protein, 442 aa, unidentified
MDFYEKHPKMKYLFVGCDTHKLTHTASIINVFNEKLATLTFNNDKAGYNSLYKMVGKHTAETGLTAVYGLEDTKHLGYGLASFLLNKGCIVKNVNSNLTHVERKKFPTITKNDELDSLCIAKVLLDELDTLPNAESDEIYWTLKQLIKMRRAIVHNNVEYKNKLHSQLLHHYSNYHQMFYRVDGVTALEMWETYPSPNMILDSGIDTFTAFILKASRGKLGASKAGQIFELIKEYDVHNRIYQEERNCIIQMLVRSIKENDKRLADIDKEVIAVYDRIGKTLHTFPGLNKISGAQILAEIGNINRFANNSKLARYSGIAPVDCSSGNSEKAFKSDFGNRELNGLIYNLACRSLTAGKNKDKPNYPIFLEYYYRKRNDGKTKHQSIICIMRRIINIIFFMLKHDKEYFSPAELEEKSLLAFQERQRQEQEKQKKKERHQKRTG

SEQ ID NO: 330052 - protein, 430 aa, unidentified
MKSNTQNAKIEAITEKTLVLGIDVGSEMHYARAFDYRGIEYSKKPFKFSNTEAGFVTFKEWILDLKERHEKDKVIPGMEPTGHYWFNLGKFLQDNEMKPVLVNPHHVKKSKELDDNNPTKNDRKDPKVIAGLVREGRYMIPYLPDGVYADLRTASNIRFQLQAELTRIQNRISRWFNIYFPEYKTVYGKPDAKSGMLILKAAPLPEDILTLGIDGVNQIWRDAKLRAVGKARAKTLIEAAEHSVGSKEGAVSARMEIRMLLEDYESRNTRLQEVMVLIEELVRKIPMAEKLLEIKGVGIRTVSGFLAEVGDISRFNNPKELQKLAGLALVENSLGKHKGETTISRRGRKRLIYLLFEVAMSLVSKNQEFRELHNYYTTRRLNPLKKMQSLMAIAAKLIRVFYAILTKGVDYDPKKMVSDIKRPAVYLQAA

SEQ ID NO: 330053 - protein, 465 aa, unidentified
MARPAKKTPTPAPDALAAIHSNAAGMDIGSDEIVVAVPADRDSTPVRAFATFTADLHALVAWLIACGIDTVAMESTGVYWIPIYELLEQYGIRPCLVNARHAKTVPGRKSDWNDAQWLQKLHCWGLLRASFRPDGEITALRTLVRYRAELIRHRAPHVLHMQQALQQMNIQLERVLSNIMGHTGQAILRAIVAGTRDPMALAKHRNPGCKATAETIVKALTGTWKAEVVFVLEQSLILYDAYTAQVVRCDTQIEGYLKTMESRTDDPAAPLPDLPPHKANARSRNAPAFNARAQYARVLGVDLAAVTGLSASTVQTIISEIGTDMSRFPTVKQFCSWLGLVPRNDISGGKVLRSRTQKVVNRASQAFRQAAQSVIRTDTLLGAYYRSMRARKGPQQAAVATAHKLARIVYHLLKYGEAYEAEQAAAYEQQRQARELRHLTKRATSLGYTLIPGSTLSGVEGMGPG

SEQ ID NO: 330054 - protein, 379 aa, unidentified
MKIITQNEKNLYVGIDVHKDTYSLCCFDFQRNELSDEITIRATTKGVIKYLEAIRKKHREEVLFACGYEAGPTGYGLCRGLQKAGYGCVVMAPTTMSNPDGKRRIKTDRIDARAISRILAYKSYSQVHLPSEEIEALKEYTRARYAKKRMLKKAKQELLSFLLRNGKTYPESGNYWTEKFFNWIKTVQFSKKWMQEAFNEYLAEVYSLKAKIERMDMKIREIAGLEIIKDKVDKLVCFSGIDVSTAVETVVEINDFTRFATAAQFVSYLGLCPGQDSSGKRKTMLPLTKAGNCRVRTLLCESAKAIKRTNPYGQKSGRILERQKNASPEIVAYADKATKRIRTKMKNLEECGKNYNVSSAAGARELACFVWGMMNGKIA

SEQ ID NO: 330055 - protein, 409 aa, unidentified
MFFYIGIDLSDKFLDSCITNSFGDVISRNRFDFDDRGFSAFLCELQEHEVSSENCAIGLENPRSRLVDFLIQREFAVLLTNPKSIARYRESRIASKAKSDQADAQLIADYIREHHKSLRRISIPDQTIRELSILLEDRDRLVQQKVRFSNQLTSTLKEYFPQALDMFSCIANKSALEFLRKVDTFAQLKSLSTADIEQLLRDCQINRKDSKENFHNVMKKPVSQVSQAVIRAKVRLKNAILTHLILLTEQIDDYEKQIQQVMDETPHGDLFRSLPGSDYILAGKLLVLYSSRNFRSANEVQSLCGTVPYTVRSGQSKAVRFRKGCSKFGRKTFHQLAFSSLRGCQWAKKRLSQKRKEGKGLHHSLRCLANSWVKVTFAMWRDKTPYDESKYLVSVASHIINQPASVLGG

SEQ ID NO: 330056 - protein, 427 aa, unidentified
MDFTQNERLKQINEQTLIIGIDIAKHKHVARAIDDRGIDLSKRLVFPNTLEGFKLLLEWAKQLSAQTSRPNLMIGMEPTGHYWINLAYFLKSQSERPVVVNPMKVKKSKELDDDSPTKNDTKDAKVIAQVMRAGRYHEPILPEGLYAELREGVKLYDIIQEDLSSIKAQIHNALDRYFPEFLTVFKKWDGKTALYLLKCGYLPDDIQQKTEDELLKEVKTKVTKNIGIARMRHLKKAAASSIGLTVGLRMAREELRYLVDQYELLNGRLEALKGELEELVRMVPGADSMMAIKGVGPMTVVGFFAEIGDLSNYRDPRQIIKLAGLNLMINQSGKHKGQTTITKRGRRRLRTILYQVARPLAFHNKGFKALHNYYKHRRNNPLKGKQSYVALGRKLIKILFVMGTRKCAFSEERMLRDIPHITDVQAA

SEQ ID NO: 330057 - protein, 352 aa, unidentified
MKGMALTIVEKSAVTGGVDTHADEHVAAALNHIGGLLGTKSFPTTPPGYARLLAWLRSFGTVAVVGVEGTGSYGAGLSRHLSAAGVRVVEVDRSDRQDRHRSGKSDPLDAESAARAALAGKAKGTPRGRDGTVEAIRALMVAKRSARGERTRSINQARSLVVTGPDDLRARFERHSTDALATELAVLRPRPGDTVGYATRIALRELGRRAEYLAAQIDYLDRLLLPLIELQAPSLLEMYGAGPHVAAILVIAAGDHPDRLRSEAAWAHLCGAAPIPANSGKTTGRFRLNPGGDRQANHALWRIVFTRLGSHQPTQLYVERRLKEGKTKTEIIRCLKRYVAREVYHHLLRTAD

SEQ ID NO: 330058 - protein, 352 aa, unidentified
MYYVGLDLHRKYITGCALDSQGAVVATERRLPPVRETVLGWLAPVGQPAAVALEATLYWAWLHDRLTAAGYQVAVAHPQQVKLICHARCKTDPVDARKLADLLRTDLLPAIWIPDAETRARRTLLRGRAWVVRTRTRVKARIQAYLAAENERVPVSDLFSRGGRAWLVTVALPPAVRQQVDRLLALVAQLDVAIAEQDRAVRELARATPEAERLQTIPGIGPFGALLLLAEIGTIARFGSSHELAAYAGLVPSTRSSGGKTAHGSVGPAGSAWLKWLFVEAVQTLKRQPGPVRQHYERLLRAKGKQKATVAAARKLCCYVYWMMKEGRSYDDWLRQRQQREVRPIQAVASVA

SEQ ID NO: 330059 - protein, 457 aa, unidentified
MKDYYLGADVSKGYSDFMLLDAKKRRIEEDFQLDDTFEGHQKLYHILSSLCDQHSDAQIYAAVESTGGYENNWFEALVKFQSSLPLKTARLNPCGVRNNSKAGLERNITDPISAENVAKYMIEHPENVRYQQHDPFCSLRKQWSFIKMLSKQKTQLLNQLESNLYGANPEILGHCKNGVPKWVISLLLRFPTAAKLAKAKKFSLASIPYVTEQKAKALIQSAKKSVASAGDQITAQIIKATVKQIQQLTQTIEAQEKILTKMCSIPQVQLLKTFPGIGDISAIGLILEIGSVERFATAKKLSSYFGLHPIFKISGDGKGGFHMSKIGRIVPRQILYMVAMVAIQCNPLIQEIYLKHTEKGMKKKAALGVCMHKICRIIYGMLKHNKPFDPNVDRKNRKKSLKNKTKIRKNKTRRYQSFDSKAPISARQGKKRKERKQSQSDNIANNGIIKASVPVSV

SEQ ID NO: 330060 - protein, 314 aa, unidentified
MSDSSSYVGIDVSKQWLDVHVTPGAEAFRVGNTHDGVKELSGRLARVAPSLVVLESTGKFEAMCAASLSSAGLPVVVVNARHVRDFARATGRLAKTDALDAGVIAQFAAAVKPELRPLRDAGLRGFDEMLVRRRQIVNMLTAEKNRLKITFTALVRREIKNHIAYLERRLEKADGALADAIEASPVWRVTEELLRSVPGVGEVTARTLIAELPELGRLTRREIASLIGVAPINRDSGMMRGRRTVWGGRRSVRNVLYMAALAATRCHPELRAFYQRLVAAGKPKKVALVAAMRKLIIELNAVLARGSAWEPIMP

SEQ ID NO: 330061 - protein, 411 aa, unidentified
MEVLVERQSALDVHKAQVTACVRVPGEGGDRRELIEQFATTVPGLLALADWLRAHGVGHVVMEATGDYWKPVWHLLEEDFELMLVNARHVKQVPGRKTDVGDAAWLCRLAEAGLLTASFVPPKPIRDLRLLTRYRRTQIAERKREAQRLHKALEDTGIKLDCVATDILGKSGRAMLDALVSGTTDAEVLADLALGKLRKKIPALRDALQGRFEPLHALLIGSILAHLDFLDEHIAGLSEAIEEQIAPFAPARDLLTSIPGVGKRTAEIIIAEIGTDMTCFPTAGHLASWAGQCPGNDQSAGKRRSGRTRKGSKNLNLALKDAAMAALRTNDTYLQALYRRKRTALGHGRAIGAVKHSMICAIWHMLSTGQLYDDLGGDYYARRNPQRQTKRLVAQLQRLGHTVTLQEANAA

SEQ ID NO: 330062 - protein, 329 aa, unidentified
MEKVIIGIDISARTLDICKKEDTKKDFFTISNSIFEIKKIFKSLKKYSQVTIAMENTGRYNWYIYEALKDFSYTIFVINPLHLKRSQGLVRGKNDKIDSERIADFASKNQESLKSWKPDSESIEKVKFLFSERNSKVKLKASLLKQQSNYKLMQSKLAKELLKMNKEEIALLEKHIAILEKDIENVIASHQDLKKKSELLKTVPGIGKVLCWMMLIKTGNFEEITEPRKLACYSGVVPFDHQSGTSIRYKPKLSFYADKSLKSILHMAAMSAIRLENDLREYYLRKVAEGKNKMLVLNNVRNKIIHRAFAVINKQKPYEKKYINNLVTS

SEQ ID NO: 330063 - protein, 331 aa, unidentified
MEQRKTIIGIDVSKKTLDIFIKTLDVYLQISNNAEGFKKLLALLKTSKLKLEDCFFVLEYTGGYEYRLVQFCQSKQISYVRISGLAIKRSMGLVRGKNDKIDARRIADYGDEKQSKLEAETASLDGIVRLKRLLSQRDVFVSDRKAHQNRYQEIQYMMDLPEKDSMLKRYKKIADELQKLIDKTEDEIRKLIKANDAFQFNFDLITSIKGIGEVNGWTMIAYTENFTSFDNARQFGAYIGVVPYPYSSGTSIKGKSRTSKMANQHIKALLDMAARAAINHDRESTLYYERRIAAGKHHMAVMNEIKFKLVRIMFAVVKKQEPYVDKYKNAA

SEQ ID NO: 330064 - protein, 329 aa, unidentified
MNEHSQGREAVKAARLNAGIDVSKATLDVAVGTRSERFGNDAQGMESLAALLHAQDVDIVVLEATGGYEAAAAAALQAAGLTVAVVNPRQARDFAKAMGVLAKTDKVDAKVLAAFADVIAKHEKRQTFLREVPDEQRLHLAALVTRRRQLLDMRGAEANRLAMAHKVTRKSMAAVIKTIDKLISELDRDIDTHIREHFRDLAKVLNSAKGVGPVTTSTLAAQLPELGQLDRRAIATLVGIAPLACDSGKKKGQRHVWGGRSQVRAVLYMAALAAARSNPVIRTFYQRMLAAGKPKKVALVACMRKLLTILNAMARDGTPWNPALHAINP

SEQ ID NO: 330065 - protein, 347 aa, unidentified
MANTCLNPVKYCVGIDISKDEMAVCFSQTDGQQRITIKGSRKFSNNLRGWKSLETWISRFRKNAEVPLVLVVEATGVYYEGFAYHFKVQGYTLHVVLPNKSKHFAKSLNIKTKNDNVDAALLARMGLERNLPTWKGMSHNMQKIKQLSRQRAALQQMRTRVSNQLHAHTHGHAPQKSIVQGMHQHLKFLDKQIKSLEAELNQSAANDPEIKQRLDNICTIKGIGIMTALTVVAETNGFDLIENKSQLVSYAGYDVVENQSGISLKGKTRISKKGNSHIRSALYFPALCAAKYEPKLQNIYQRILEKNPRVKMIGAVAVQRKLLVLIYTLYKKNEPYEPNFEVTSKAA

SEQ ID NO: 330066 - protein, 387 aa, unidentified
MAQVNDLSRSLTAFDPISTLVVVVEMSKASWLVSGAVPGVERQPLKKLEPDATALLGLIERWRNEAVRAGRPISRIALAYEAGRDGFWLARWLIARGIEAHVIHSASVAVSRERKRAKTDRLDAAMLMRVFLGWLRGERGHCGMVAIPTMEEEDARRPSRERECLVNERSRITNRMKSALARLGVRGFKPHLRKAPERLAGLRTAEGTGLPTNIIEEFRRDMARLALVREQISSIERTRAERLERAPDTGPHAMVRLLARVIGIGIETADMLVREILSRKLRDRRAVARYAGLTGSPDESGLKRREKGLAKAGNARVRRGLIQLAWRFLMFQKDSALARWYRTRTEGPSGARKTTMIVALARKLLIALWRLVTTGEVPDGVELRPAL

SEQ ID NO: 330067 - protein, 320 aa, unidentified
MSDRFAVGIDADSRTLVVAYYGTKGCARIANSASAITKWLSALPARSRIGVEATNRYHELVVQAAQKAGHAVFVLNPRDIKHYAKGVACRGKTDAGDAQVIARYIAKEADNLHEHVARSPAQERLHVLLQQRDSLVRNKATLHLSLGTDAADSAIFGRIFSGLKEAIAMLDREIQRLCRSGEQSDLYRRIMTIPGIGPTVAAFVTHHITRWPLASSDAWVACTGLDPRPNESGARIGRRRLSKRGNAGLRQILYMAAMGLTRSKGGKPLYLAIRERGHSSTASFNILARKLARIAWGVFKSGRDFDPAMLKVGQACFQQA

SEQ ID NO: 330068 - protein, 402 aa, unidentified
MNAVGIDVSKGKSMVAIMRPFGEIVSAPFEIKHTASDINSLVELINSVEGESRIVMEHTGRYYEVLAHQLSEANLFVSAINPKLIKDFDNDSLRKVKSDKADAVKIARYTLDKWQNLKQYNVMDELRNQLKTMNRQFGFYIKHKTAMKNNLIGILDQTYPGVNTYFDSPARSDGSQKWVDFASTYWHVDCVRKMSQNAFIDHYQNWCKRKKYNFSQSKAEEIYGKAKELVPVLPKDAITKLIIKQAVDQLISVSTTVESLRTLMNETASKLPEYPVVMAMKGVGTSLGPQLMAEIGDVSRFTHKSAITAFAGVDPGVNESGSYEQKSVPTSKRGSSDLRKTLFQVMDVLIKTHPQDDPVYQFLDKKRAQGKPYYVYMTAGANKFLRIYYGRVKEYLSSLPES

SEQ ID NO: 330069 - protein, 402 aa, unidentified
MIYVGIDVAKDKHDCCILGLDTEELFQVFTVPNNSDGYGELFHKIESVSKDKSQIKIGLEATGHYSYNILGSLLDHGYHTFVINPLHTNLYRKGQSLRKTKTDKVDARSIAEMLVTDKTLKPYTGTSYHSEELKSLTRYRFELVKERAKLKTSVSRLVNILFPELEPLVPTLHINSVYRLLQELPGAHFIASSNLTHLKALLADASKGRYGREKAIVIRETAKSSIGSLMPAKSMELRQTIRRIDTLTSDIKEIEQSIQKIMDECGSPITTIPGIKYRMGAMILAEIGDFTRFSNADQVLAYAGLSPSTYQSGQLISSYAHMEKRGSKYLRYALFNAAKYASAWDERFRLYLSKKRAEGKHYYVAISHVIKKLVRTIFRMEITHTSYQPLFYSKNLNLMLDY

SEQ ID NO: 330070 - protein, 332 aa, unidentified
MENCIGIDVSKASINVHISKNGQDLQVDNSVKGFRSLHSKLKKIYKKEIEDNVFIFEPTGSYSETLRKYCYQQKIKCFIINPKQFSNYAKALGVEVKNDIEDARVLSKALHIAKEGQVKIPVYDEDVERIKELMAYYKFTTKQTTQQKNHLESLTSKEGDAFAIRELKKSIKDSKAKEQRIIEQIQMIIDSNAKYKNDYENIISIMGIGQIGAISLLHLFLKYPEANQRQITSLTGLNPIYKQSGTSVQSGYRISKSGAKTYRGTLFMAAMSAIRYDANFKAFYERLKANGKQTTQAQIAVMRKLIITAHSLYKNNRKYDVNFNTTEEKKVA

SEQ ID NO: 330071 - protein, 344 aa, unidentified
MEVAIGVDPSKSTLAVAAVDPLGRVLGTGEFSNDPRGHKALFRWARERGPDRVIGIECSLSFGATLSRLLLQSGEDVREVPTTLTHRQRGRRASQGKSDMVDSVAIARIVASGEVLPSAHRLEVLTDLRALVEYRDQLVRARTQVANRTHADLMNVLPGYERRVPNLRAKAHRATARSLLRGDRSVRAELGRKRLDELSRLEREIAAMDRRIEATVRKTGTSLTSIPGVGPFIAAKILGEVGDPSRVRSKPAFAVLSGTAPLSASSGQVQRHRLNRGGNRQLNWALHYIALVQCRIMPEAQAYMARQREAGKSHKEAMRCLKRHLSNVVYRHLVADARRAELAA

SEQ ID NO: 330072 - protein, 344 aa, unidentified
MIWIGLDVHKGYSRMGMFDPASGAIQDLGTVRNEPSMLEETLSELASPKTVVLEAGRSSYYMAGVLEAMAEQVWIVDPGEVRRLQRTIAKTDRRDAAALAWWAGKGVLTPQWRPDAALLDLRELTRGKTVLTRLSTQVRTMMRMLLARHGWECPHRDLLGERGQVWLDEVELEGHAGRMLAALREILVVIQAKADAFECLVEQESSTHPVAQRLRTIPGIGPFLSLALAAEIGDINRFPSPPHLRGYSGLVPAVHQSGQKDTRGPLTKVGNAWLRYAAVLATQRMAQMRHPDPKLKHVFLSVAFRHGRNPGKIAAARRLLDLIYHLLKAEEDYQPPIPRMARVN

SEQ ID NO: 330073 - protein, 389 aa, unidentified
MSKQRNKVVSLPVIEPDAAGIDVGATEIFVAVPNDRAPEPIRCFPTFTVDLERLADWLQQCQIRTVAMESTGVYWIPLFQILEKRKIDVRLVNAHHVKNVPGRKTDVSDCQWIQHLHFVGLLRGSFRPDDEICALRSLWRHRDNLIQLATLHLQHMQKALDQMNLQLHHVISDLAGTTGLAIMDAILAGERNPQKLAQLRNRHIQASEETIMKSLVGDYRKEHLFTLRQSLKSYRHYQELIQEVDLQVKQMLQCLPSKTAVGEKPPKGEKIRRTPWRNEPPQLRNDLYRAFGVDLTEVPGINSLTAQMLLTEIGPNLSRFPTAAAFCSWLRLCPNPKISGGQVLSSRTQPTKNRVALALRMATQGLHRSDSFLGDYFRRMKARMGAPRP

SEQ ID NO: 330074 - protein, 348 aa, unidentified
MVVLGSDSHKHTHTVVAVDDNGRQLSQLTVKATPEGHLALLRWADSFEDRLWALEDCRHLSRRLESDLIKAGERVVRVPPKLMAQVRRSARTRGKSDPIDALAVARAALREPDLPFAQLDGVEREIRLLVDHREDLVGERTRMQNRLLWHLHELEPGWQVPSSALSRAKGLDQAEERLARHKGPVAAIASELVARCRDLTQRINELEREITRLVAPLAPALLAVQGCGALTAAKIVGETAGVTRFRSKDAYARHNGTAPIPVWSGNTERHRLNRGGNRQLNAALHRIAVTQLRGGPGRDYLERRITAGATKTEALRSLRRRLSDTVYRCLLQDHRAQQHIPAGLRAAA

SEQ ID NO: 330075 - protein, 382 aa, unidentified
MSAYAGRQVVGIDLHRRRSVIVRTTVSGEVLESVQILNDVERLTSVMERAGEDPEVVLEATYGWYWAVDALQAAGAHVHLAHPLGVKAFEYRRVKNDVRDATDLADLLRMGRLPEAWISPPATRELRELVRHRAKLVGLRSHCKAEIHAVLAKCGIQVLMSDLFSVAGNQLLDRFPLSGPYAARVQSLRRLIEDLEEEIDLFERLTRGRLVADPGYTALQQLPGIGPILAAVFLAEVGDITRFHTAAQLACWTGLTPKHHESDTHVHRGRITKQGSRLVRWAAVESVKRLGPTTVVGAYKARVADRRGKNVGTVAAARKQTEFVFYALRDHHVRALHPRSARRWVDRGAHHRARHENPSIGRSRVVQVMTPVQVHGEVDASD

SEQ ID NO: 330076 - protein, 339 aa, unidentified
MAILFVGIDLAKNVFAVHGVDEYGKAVLVRPAVQRAKLHELVASLPVCTIGMEACSGAHHWARLFRQHGHTVRLMAPKFVSPYRMSGARGKNDAADAAAICEAVQRPNMHFVPVKSEDEQARLCVHRVRQGFVEQRTATINRLRGLLSEFGIVLPQKAAIVRRQATAHLEDLPGWANTAVGDSLSEVHRLDERLAEYDRHVSHMAANDERSRRLMQLHGVGCTTASALVSTIGDAHDFRNGRQLAAWLGLVPGQYSSGGKARLGSITKAGDRYLRTLLVLGAKSVLAAAKSKDDRLSRWALALQVRRGYWRAIVAIAAKNARMAWAVLAKGESFRPILI

SEQ ID NO: 330077 - protein, 340 aa, unidentified
MEKRYIGIDLHRNRFTCCIRLESERTYVTEWELEHLGKFVKKLRPTDEIAVEITGNTRLFFDAVAARVARVVVVNTNQFKVICESVKKTDPHDARALALFLSKDMLPEVRMKDKEHGQLASLTQTRDTLVKLRTALKNKVNNILSARGLNLAKEALSSEKKLAEVLELPFDDIVRIELRVIVEQIRSLNRSIAELEKTIGEEGSKLEGHKGLSSIKGIGKITGAILLNVIGDVNDFADEGHLASYFGIVPRVSNSNETQHSGRIHKRGTKLGRTALVQSALIAANYSPYLKRFYEQVKARRGAGKAIIALARKFLGIIYRTLKNKWVFEDFPNFVLAEKA

SEQ ID NO: 330078 - protein, 347 aa, unidentified
MFVGIDVHKDTHTAVGISPYGEKLFEITVGNYKKDFETLEEKVKEHSSVLSPYIGLEDVRGYGERLAGYLYEKYPVYHVPSILVDKQRQNATHPEKSDSLDALGVAKVMIQSVDTLLPYTISQESEKAKQLKEISIDREDLVIERTRLKNQVHTFLYRIYNTEYANKYKDPFSLKALKFWSEAKPVCNIYLLKTMKRKVRRLLDIHVEVSELEKDMEQLLNGNYTIQTASGCGVVLASTIVGEIGDINRFTSPGALSKYAGCSPRERSSGKKVRHVKSRSGNRRLNCAFHRMALSQISRMGNDRAKAYFKRKISEGKSKSQALVCLRRQTVNIVWMMLKHKTTYRNA

SEQ ID NO: 330079 - protein, 412 aa, unidentified
MDVIHPRCAGLDISKKDAKVCVRIVGSGRRRATETVTTWGSTTNQILALREHLVAEQVTCVVMEATGDYWKPFYYLLEDLDGVEVMLVNAREAKNLPGRKTDVSDATWLAQLGAHGLVRASFVPPQPIRELRDLTRTRTAITRERSREVQRLEKLLEDAGIKLSSVATDIVGVSGRAMLQALAAGERDPAALADLARKRLRTKTPQLIEALTGRFTEHHAFLVRMHLGLIDQHTAAINALAERIEVVIEPFRGFCDLISSIPGIGTTTAQVITAETGADMTRFPTAGHLASWAGVCPGHHESAGRTKSTHTRPGNPYLKAVLGTAAMNAARNKDSYLGARYRRLAARRGKGKAVVAIQHTILVTIWSMAHTGALYDDLGADYYTPIQPLRTKRHAIRQLQDLGYTVTLQPAS

SEQ ID NO: 330080 - protein, 347 aa, unidentified
MTIVEATRAVTGGVDTHLDIHVAAALDGVGALLGTAAFPTTTAGYQALLLWLESHGGVTKVGVEGTGSYGAGLSKFLARAGINVVEVNRPNREERRRSGKSDPLDAIEAARAALGGKAKSIAKSKDGPVEAVRALLVAKRSARTARTSALIQMRELLVTGPDQLRSRLRGLSISALTCEAARLRPARHGDPVLIATKAALSSLAHRVQELDGELAALDRRIEALLMRYCPDLLGLFGVGPDTAAALVVCAGDNPERLHSEAAWARLCGVAPIPTGSGQTSGRVRLHCGGDRQANAALWRIAMVRIAHHPETTAYYHRKLREGRSKQDIVRLLKRYIAREVYRYLPRS

SEQ ID NO: 330081 - protein, 412 aa, unidentified
MEGETVIAGVDTHKDVHVLCLLDGLGRKIWSGSFGADPEGYDRLAEAIGDPGSCMVVGVEGTASYGAGLTRRLVELGYNVVEVLRPKRDKVRPGEGKSDPLDAERAARKAASGRGCSVPKSQDGWVEAVRQLYVARRLAVATSTSCVACAKSMLTTAPSALRERFRGRERPKDLMPLLARGRKAGDALEESVLASLRSVAAVWKEARSQVESLDERIRALLEANAPALLGVEGCGTTTAAALVVAAGDNPGRLKGEAAFSMMCGASPIPASSGKTDRHRLNRGGNRQANWALYEIAIKRMAYDERTRRYVARRTSEGKSRREAVRCLKRYIAREVYHVLMDPNPDGAAPEGPELAKMRRAMRVTQKKAAAELGLSAATLGHLERGKRRSTKLERRYYELLCELERTLPQTAS

SEQ ID NO: 330082 - protein, 350 aa, unidentified
MWYAGIDWADQHHDALIIDEKGRQVATLRIDHTPQGLARLNTFLEQIIGSQPKEHMACIIETTHGLLIAHLLEAGWPVYPVNPRTVDRRRSASGAKTDTIDAYLLAKTGRADLADLHRLTPDSEKIAELKLLTRDQEALIQMQTRLVNQLTACLKTYYPVVLDLFSKLQQKSTLLFLQTYPTPQQAMAASREHIQDVLKQARHPHPAAGAATIFERLHQPHLQADAVITRSKARLMLVLVSQLMPLIEQMAQYDKEIGTLFLTHPDHEIFESLPRAGKRLAPRLLAEIGDDRRRYQDASSLQALAGTSPVLFQSGMYSKAHRRLGCIKPLRNALQQFAWQTTQTEPWATD

SEQ ID NO: 330083 - protein, 344 aa, unidentified
MFAGIDSHKRTLAVAVVDDAGRQIDVDEFANDRKGHTRLATWLANHQPNRVGVEGSGHLGRAASAFLVDVGFDVREVPCEHTVRERRRRAGGGKSDPIDALAIARVTAREANLVPARCKDDSAEELRILSDYRRQLITERIRLVNRIHADLVIVVPGYKDKVPVLTRPTHVRAARRLLHGKSGFRVELIRRRLDRVAVIDRDAAELKARLEQLVTATGSTLMALPGVGAVTAARILGETGDVRRFRDHNAYASANGTAPIPASSGATIRHRVNRGGNRLLNEAIHTVALVQNRGVGPGKAYIDQRRANGKSYREAMRSLKRRLSDVIYRTLLADIQRQQAAAIP

SEQ ID NO: 330084 - protein, 400 aa, unidentified
MIDTSTIDVFLGLDVGKGEHHATAVTPAGKKAFDKRLPNTEPKLRELFAKLQAKHGTVLVVVDQPASIGALPLAVARDMGCPVAYLPGLTMRRIADLYPGEAKTDARDAFIIADAARAMPHTLRAIDGRDETIAELEMIVGFDDDLAGEATRVANRLHGLLTQIHPSLERVLGPRLQHPAVLTLLERFGSPAQIRKAGRRRLVTLLRLKAPRMAERLVEDIFAALDEQTVVVPGTEAAALIVPSLAGSLTAVLDQRKLLAGRIEELLEAHPLSKVLISMPGVGVRTGARILIEVGDGSTFPTAGHLAAYAGLAPATRSSGSSIRGEQPSRRGNKQLKRAFFLSAFAALGDPASRAYYDKKISQGKHHTQALLCLARRRADVLFAMLRDGTFYEPQPIRAT

SEQ ID NO: 330085 - protein, 483 aa, unidentified
MKPKQKEKPKKATCRPTQGNWQQLNRKQRREMTRKIQSEDLSLEVVHPDAAGIDIGNESHYVAVPPTRDSRPVRRFGCTTAEVKEMAVWLKQCAIRTITLQSTGVYWIAVYDILEEAGLEVYLVNARETKNLPGRKSDVQESQWLMKLHTYGLLRNSFRPSQEVRTMRTYWRQRDDLVRTAGRHIQRIQKAMTQMNIQLANVLSDVSGMTGQAIIKAILTGERDPHTLAALRDWRVKASEEEIARSLEGNWQEDQLFVLKQEQDSYEFCQKQIAQCDQLLQHYLQQQEDRSQGASLPEEKRRERLRKKKKGNAPQFDLRTELFRMTGVDLTQIDAIDVTTAMTILTEAGADMSKWKTESHFVSWLRLCPDNRISGDKIIGKGRLPTKNRASIALRMAASTLRLSNTYLGAQFRRLRTKLGAPVAIKAMAAKLARLVYRMLRYGMQFVDQGAEFYETQNRNLQINYLKSKAAKLGLQIMEAPAA

SEQ ID NO: 330086 - protein, 345 aa, unidentified
MKIVGCDLHTRYQQIAMLDQETGELVERRLEHESGEAKAFYAALAKPVRVGIEATGHTRWFERMLAEQGHELWIGDAAQIRASVVRKQKTDARDAAHVLELLLSERFPRIWRPSMEERDLRQLVWHRQKLVWMRNAVGNQLHALAMGEGVCRKKKLFTKKGRAELQSLGLGLWASYRRQELLTMLDQLDQSLEQLDQAVAEQAEQNAAAQLLMTHPGVGPVTSLAFVLTLGPVQRFERSKQVVSYLGLNPREHSSGGRQRLGAISKQGNPMMRSLLVEAGHTAARLDGELKQDYQRLKLRRGSGVAKVAIARKLAVRMYWMLRTPASYAQLVRMQGSPRGTLVGQ

SEQ ID NO: 330087 - protein, 344 aa, unidentified
MTKSNVISLDLAKNVIQVCRISKDGELISNKAMSPLKLKQLLANATQSIVAMEGCGSCHYWARLAQSFGHEARIISPKKVKAFLQGHKTDANDAFAIAIAATQWGMVFSQIKNEEQQSLQTLEKSRQFLEKELTALGNHIRAYCYEYGITTAKGKKALREKITAILGSADPVLPRSLLNTLQLLWDRYQLTATQLNEAEKHKAALVRQLEPCQRLLGLEGVGDVCASLLYASIGNGCEFKNGRQASVYIDLTPKQHSSGGKTYLRGIDKYGGDKALRAALYQGALSIICRLPDEPTTVKQAWLIALVKRAGIKRACIALANKTVRTAWALLATGKEYEPVLLMK

SEQ ID NO: 330088 - protein, 311 aa, unidentified
METVYAGIDVSKAMIDVAITGEKEVQSFSNNEVGVMELVSYLKIKSPVLTIAEATGGLEKLLAGYLTEAGLQLAIVNPKRVRDFAKAKGKLAKTDNIDAHIMAEFALDIKPIVRPLADKDTEEIKAIMVRRHQVREMITAERNRLYLSNIAVKPSIEEHIEWMKNQLKDIDKNLEDQIKKSPIWKEKDALLRSVPGVGKITSITLMGSLPELGRLNRKEIASLVGVAPVNRDSGTMRGRRTILGGRARVRTRLYMAALSATKYNPVIKEYYNHLLKLGKAKKVALTACMRKLLTILNAMVKNNQKWQCKTI

SEQ ID NO: 330089 - protein, 423 aa, unidentified
MEVMHERVAGLDVHKAMIVACVRIMAGGKISRECRTFETSTAGLEALLGWLTQSGCTHVAMEATGVYWKPVWNILSDGEFELIVANAAHIKNVPGRKTDVNDAMWIADLVACGLIKASFVPEQEIQELRSLLRARKQLTREQTSHIQRIQKTLEEANIKLDSVISDILGVSGRRMIEAMIAGVRSPLRLAELADRRLKVSPKALYDALHGRLTDHHRFMLELYLGQHDALSGAIARLDQAVEALIARMDEEVAAGQATFLSLIMLLCTIPGVSILSATVILSEIGRDMSRFATAGHLLAWAGLCPGQNESAGKRKSSRLRKGAPWLKTMLVQCAWAASRRKDSYYKAQFNRLRSKRGPKKAICAVAASMLTAIYHMLKDGTLHQDLGADHFDRRSTEVKAKRLVAQLTKLGFQVELQPLPKAA

SEQ ID NO: 330090 - protein, 318 aa, unidentified
MKDKESITYVGIDIAKEKLDLAIPTQPLLTLKNNPQGIQEIVKKIQSLQQVTHVVLEPTGTYGRDLTIALQAAGIAVCSVNPFHARAFARSMGKLAKTDKIDAFMLAQFGTQRHPRVMSPYNKEIEDLRALHDYRQQLVVLKTATSNRLESAPLIMQSFLKKDLAAVVKKIASIEKMIKGFLVAHADLQKKAQSLQAFHGVGSTTAAMFLSHVPELGNVNDKEIAAIVGVAPYNCDSGKYRGSRTIRGGRHEVRSILYMAALSAVRSTKSPWNALYLRLVGKGKAKKVAIVAVMRRLLIQLNHEMKKLNFPLDPQHCC

SEQ ID NO: 330091 - protein, 407 aa, unidentified
MYCLSFDIAKGKSVVGLFNGQLEPLIVPYEIHHVKEEFVALASKLDINQTEIILESTSMYHYPVVSFFKNLGYVVIILNPIISREHKRNLRKTKTDLIDCVNLAAIYFEKKFNLQKKHLPIYHQLQSISRHIFTLNESMVRYKNRYHQLLELIFPLYEYTLKNEVKFKSDHMALLKAFPHPELLIHQRVDRLATVLASTHKRMDRRFLKTAQRIKDLAKMTLYSVSQDDVVVDEFVELSNLILDLDDKITHHQNHLIDLAQTRPDFYKLVSIFGISPYMAALLVAELKDLSSYRTVKQLTAACGLDPTIIQSGKSVDYHGHISKRGNKHARKALFNTVSAIIRISSKVNPQNPILVYYRKKRSENKHHYASVIACTTKLLRIIFTLCKNDLTYLSQYNQNHSVTPIV

SEQ ID NO: 330092 - protein, 329 aa, unidentified
MGTPTVQSECNAKCWVGIDVSKDWIDVVVLVEENKVQQVRCDRSAEELAGLAQTLLPYRPQGIVLEATGGLEGAVIAALAGAGLRVMRMNPKRVRDFARAHGLLAKTDALDAYALALFGARMQPPLRAWPEVERQQLAAWVGRQQQLTVERASERTRLKQASEPALRKSVERVIAFLGKEIARLEKQLTAWVAASETWSEQAALLRTAPGVGGKTALRLLAQLPELGHVNRRQIAALVGVAPFAADSGKWRGRRSIRGGRAGVRAILYLASWTAVRKAGPLQTFYSRLVAAGKPKQLALIAVMRKLLLALNEMMRTRQPWRPANAAVLA

SEQ ID NO: 330093 - protein, 326 aa, unidentified
MKKLIIGIDISKDTLDYCILEGIDRSIVSRGVIVNDKKSILKWIKKLGDNDCSVSMEHTGNYGALLAFLLTQEGVCFYMVNPLDVKMSMGVQRGKTDAVDAYRIAMFTISNAHRLKPYCLPTEKLRKLKVLVSSRERYVKISVQLKNSLRADLILGKTLNMKDVVKEGKKHISSINKTINTLEKQMLEIIRSSRELKESYDKIKRVIGVGPITATKCIVETDNFLSFKSARKFSCYCGLAPFPYQSGSSIKGRTRTHHLRNKSLKSILFNAAGSAIQHDPQLKRYYARKLDEGKHKLTVLNAVANKLVLRIFAVVNREEPFVKLSA

SEQ ID NO: 330094 - protein, 429 aa, unidentified
MTRISAGVDVSKNRSTVCIMDQDGKFIMRPFLVWHSTEELDFLADTLKRLNGEVRVIMESTSVYQYPIALQLKERGLFVSIVNAYEMKQFANIDFRGGKTDKKDSRTIASYGISYWDKLVEWQIPKDTYFNLDLLNRTYMNAKKHRQIILQELQHYIDCAMPGMDKELHSLNLSTKKDFMLDFVEKFWHRDEIVNMTEAEFTEVFTAWAKKKGYRPVEGKAAKIYAIAKSCIPYYPANPTVKTILQCIVDKLSGVNRTLVTIVTQMIEEAKKLPEYQIVREMPGVGDPLAARFFGSAGDIRRFKNSKALVAYAGIDSPPDESGDFSSTHRHITKKGSKVFRDTGYEIMMALRAQKRTWEKVRKNPDVYDYMLRKEAEGKPRKVAKIAALNKFLRIVYARIKELYDNMALAERAKTKTRSKTRAKTKVTA

SEQ ID NO: 330095 - protein, 382 aa, unidentified
MDIIHACCAGLDVHKKTVVACIRSVGADGTVSSEVRTFGTMTAELLALSDWLAAHGVGPVAMESTGVYWKPIFNLLEGSFPVKLVNAHHIKQVPGRKTDVKDAEWIAQLLQYGLLSSSFIPPPEIRNLRDLTRQRTQIVRDRATVANRIQKVLEDANIKLSSVASDVLGASGRAMIRALIDGQDDPDELAGLAKRRLRGKIPELKKALHGRVTEHHRFLLRALLEQIEFLEGLIARFDAQIEEAMAPWDETAGRLQAIPGLGEKAAEVILAEVGPDMTPFPTAGHLSSWAGLCPGNDQTAGRQRNGKTTKGSQWLRTTLVQVAWVASRTKETIFSACYHRWAKRMGKKKALVAVAHKILVVVYHVLKNRADYRENWKPANVA

SEQ ID NO: 330096 - protein, 342 aa, unidentified
MDVKGKVVNVGIDVNKVSWEVTAMVEGAIVFSGACCSNYETLRLLLKRYAGATLRVAYEAGCFGFWLHDPLSAEGIECLVVPPSLIPTEAGNKVKTDRIDSQKLARLLEGNLLKKVHVFSPEERADRQLVRTRRIISNHRTAVMCQTKSLLLFPGVDLGEESSGPWSAIFVQRLRELDLGPSELNRALRAMLDLYDYLTQEKVRLTQEVAERGQQPRYAHRVNLLTSIPGVGRLSAMEILVELQDVGRFRRADELAAYLGLTPSQHSSGERTRMGHITHTGNGRVRAVLVESSWFLIAKDASMRAKYEKIRAIVAVARLLSMRIRRMLLDGTVYRIEQRPAA

SEQ ID NO: 330097 - protein, 402 aa, unidentified
MTYDYVIGMDVGKYFHHACVLDIDGTQVLSKRINQNEKSLRALFSAFSAHDHKVLVVVDQPNNIGRLTVAVAQELGIDVRYLPGLAMRQLSRIHAGNAKTDIRDAYIIAHAAKNLPESLRSVDRVEEAFLQLKVLNGIDEDLARSYTRLINQIRSALVGCYPQFEQALRGQIIHRKWVLHLLARYGGPTKIKRLGKAKAAAFARRYKARNPEPVLDAIFAAISEQTVAIAGAHYAEMGVAMSAKDALLKLEHRTQIEQEVIELINDIPHTQILLSMPGIGPKTAAQILMTAGDMTDFPTAGHLASYAGLSPRTNQSGTSIMSNSLNRAGNKKLKNALWQSSFASIRFHECSRQFYERKRREGKRHNAAVVALARRRLNVLYAMMRNHEHYHDPAPSQEDLAA

SEQ ID NO: 330098 - protein, 325 aa, unidentified
MNKEIALGIDIAKEKFDVRLEVNGKAKKRQFSNSQDGFEKLAAWLKQLGVEDVHACMEATGTYGEALAEYLYHLGQKVSVVNPARIKGHAQSQMKRHKTDELDAEVIRHFCETQEPEAWEPVKEEIKILRSLVRRRDDLVLMRTQETNRLQSGELVEGVRSSVEQMLGHLEKQIAELEHQIEEHIDQHPDLKHQTELITSIPGIGQRTAIKLVAELKDIGEYTDARSLAASVGVTPSQHKSGSSVNGASHISKVGNSTLRGAMWWPAVSAMQHNPIIRDFVKTLRKAKKHNFAIIIAVIRKLLHLVYGVVKNDSPFDPNWATTKA

SEQ ID NO: 330099 - protein, 292 aa, unidentified
MAKTDFDELMSVGIDIGKDVFHLVGFDHDGQLVLRKKIKRLALMPTFEHLPRCIVGIEACLSAHFVSRTLREMGFEPRIIPAIYVKPFNKGQKNDYNDAEAIAEAALRPNLKTVSEKTQDQLDLQALHRVRSRLVSRRTAAMNQIRAFLIEQGITVRRSVSALRNSLEAILDNRSGEMSLRMRRLILGLQRDWIWLDKRIEMTTAEIKEVSETEPGCQRLMTIPGIGPLISTAMVAAVGEGEAYDRGRGFAAWLGLVPRQSSTGGRTILWGASQNGAVVICACSLCKPHRSS

SEQ ID NO: 330100 - protein, 269 aa, unidentified
MHATTVAVDLAKSVFQLAVADGQWRVVETQRLTRTQFERWFLNREVDLVIMEACGSAHHWGRWLNSLGIEVRLLPAQYVRAYVKRNKTDAADAAALLEAARASDMRPVRVKSVEQQALQGMHRIRSLWMGTRTSRINALRGFCREFGIAIPVGARTGIEAISRVLADPNTAVPDLIRGTARLLVEEIRLLEARVAQLERELASLAKLSPACTTLLSIPGIGLLTATALVAATSGDVSHFKDARHFSSWFGLTPKEYSSGNSRYLGGCRT

SEQ ID NO: 330101 - protein, 427 aa, unidentified
MDKKQNDRIASITESTLVIGCDIGSSIHYGRAFNFRGIELSGKPFSFTNDTEGFESLKTWIEGIKTRNGLTGIVVGFEPTGHYWFNLGSYLKSLGIRMVMVNPAHVKRTKEFDDNTQDKNDRKDPKVIAKLVIEGRFTEIYIPEGDYAECRNASFLRSQIIKDIISDKNSLRRWISIHFPEYMSVYRVFTAKSGLLILKTVPFPDEIAALGVEGINQIWRAGKIRAVGMKKATALFEAAKGSVGTTQGRSAERLYIRILIEDLERKQEHLEQVTEQLEELCERMPEAKHMLSIPGIGIGTVTGFLGETGELSRFSNPRQIQKLAGLSLVECSSGKHQGQTRISHRGRKRLRHLLFDASLMLVANNPEFKALHLHYTTRKENPLKKKQSIIVISCKLIRVLYSLATQKADYSPGKLVADIRRPEAAVS

SEQ ID NO: 330102 - protein, 342 aa, unidentified
MSIVTVGIDLAKNVFAVHGVDASGKPALVRPSVARDKLLELIASLPPCLIGMEACSGAHHWAREFAKHGHSVRLMAPKFVAPYRLSGKRGKNDAADAAAICEAVTRPQMRFVPLKSADQQGQLMVHRARQGFIEQRTATLNRIRGLLSELGIVLPLKAATVRRQALQHLEDLPGWANTVIGDLLSEVSHLDERIAQYDRHIALMARHSTQAQHLMQLAGIGETTATAIVSTVGNGHDFVCGRSFSAWLGLVPGQYSSGGKQRLGRITKAGDAYLRSLLVMGARVVLAAAMNSKAPKQDPLSRWARALAERRGYWRAVVAIAAKNARLCWAVLQRGDNFKIPA

SEQ ID NO: 330103 - protein, 420 aa, unidentified
MRNAGIHANSLLEVRRMYNAVGIDVSKSKSTVAVLQPGGTVIRKPFDVSHTSQNLNELADYLSSLDGTTKIVMECTGRYHEPMVKALSEAGLFVSIVNPHLIKNFGNNSLRKVKSDPADARKIARYTLDNWTELRQYSGMDNTRTQLKTLNSQFSFFMKQKVSAKANLIALLDNTYPGVNKLFESPTREDGSEKWVDYAYSFWHADCVRKIGLKAFTERYMSFCKKHHYIFQQDKPEKLFNASKELVAVFPKEKTYKLLIQQSIQQLNLASEHVERLRREMNELASTLPEYSTVMGIYGVGKTYGPQLIAEIGDVSRFTHREALTAFAGVDPGVDESDQHKSKSNRASKVGSARLRKTLFQIMTTLLQNAPEDDPVYRFLNKKRSQGKPYYVYMTAGANKFLRIYYGKVKECLWNLEQTE

SEQ ID NO: 330104 - protein, 350 aa, unidentified
MKTRTTEQRIKIIGIDLAKSSFQIHAVAKNGIKISNKKMSRNKLKSYMSNLPVCLVAMEACGSAHYWARLFRSYGHKVKLIAPQFVKPFVKSNKNDAVDAEAICEAVQRPNMRFVAVKNIGQQDIQSLHRMRSLAVSRRTAQINQIRGLLLEYGIDIPKGRCHVREQLPCILENAENRLTDLFRTLLSDLYEELVHLDERIEEYEKKIKLIAQTNEQARRILTIPGIGPIVSTALIAAIGDINMFKNGRELAAWLGLVPRQSSTGGKPRLLGISKRGDSYLRALLIHGARSILQHAEKKTDRTNCWISRLAQRRNKNIAAVAMANKITRTAFALLKHKQDYRLSTAPVSA

SEQ ID NO: 330105 - protein, 420 aa, unidentified
MKPSPEAEFTAFIGIDWADSKHDICLQAADSAQREFDRFAHRVDRIEQWACAMRQRFGGRIAVALELSKGPLVYALQKYDFFVLFPINPSMLAKYREAFKPSRAKDDPTDAQLALDLLLHHRDRLNPLQPQSAQMRMLLYLVEQRRRLVADKTRFTNRLGHALKQYFPQALDWFDQTDTPLFCDFLTRWPTLAQVKRARKASLEAFFQAHNVRFAKLVEERISAIKTATALTEDVAVITAYQLQALVLVDQLRVTLQAIARFDAQIATIAPTLPDYALFRALPGAGPSLAPRLLVAFGEQRERFAGADELQKYSGVAPVTERSGNKRWVHWRWQCPTFLRQTFVEWAAQTINKSFWAGAYYRRQRDQGSSHQTALRALAFKWLRIVYRCWQTRTPYDESTYLNALKRRGSPLLKAIGATT

SEQ ID NO: 330106 - protein, 461 aa, unidentified
MNRERSKKKQKRAGQGGAVPSLNCIEPNAAGIDVGATEIFVAVPQDRDLSPVRSFETFTQDLHRLKEWLQQCRITTVAMESTGVYWIPLFQILEEAGLEVCLVNAQHVKHVPGRKSDVIDCQWLQYLHSVGLLRASFRPEDRVCVIRSLLRHRDSLVQMAAAHVQHMQKALTQMNVQIHHVLSDITGQSGLAILDAMVAGERNPLVLAQLRHSRVQASEEEVVKSLVGDYRREHLFTLRQSLEAYRYYQRLITGCDAEIEQQLQNFDGHLPPDAPALPPERYPHPQRKNEFRFDMRSELYRIFGVDLTAIPSINALTGYTLLAEVGTDWSKFRNLQAFASWACFCPQNKKSGGKVLSAKTRRSANRVNRALRLAAQTLERSTSYLGIFYRKMCARLGRPAGITATAHKLARIIFHMVTTRRAYDETIFAAEEQRQRKHLESSLRRKAAKLGYQLIPLPQTA

SEQ ID NO: 330107 - protein, 367 aa, unidentified
MGKPRVVPDEDHEVVYERVAAVDVAKASGVVCLRAPDPARPGRFTSRIWDHVPATRAAIEAVGRELLAHRVQMVTLESTSDYWRIWYYVLEDIGLAVQLVSAWQAKNLKGRPKTDRLDAMWLARLTQAGMLRPSFVPPAAIRRVRDFTRARQDLVAERTRCLQRVEKLLEDAMIKVTSVARDRLKAKSVVAMVQALIAGERDPRALADLARGPLRGKRDALAEALDGMFDSHHGVIAKSLLDQVAFLDQRITLMEDQATAALAAVPESWGVDPCGEAGPAAGTGPGSPVLAAAHRLAEIPGISVWLAIVIIAEIGLNMSVFPTPAHLVSWLGLCRSAAQSGTRRGKGKPKKGNSYARAAAGQAAARA

SEQ ID NO: 330108 - protein, 395 aa, unidentified
MRHILSFDIAKGKSVYCFIDELRNVIIDATLIEHKKDEFDLLFNKVKNYSNLIVIMESTSIYHLPVETYFRSKGIDTIVMNPKLVKQFKDTLNKSKTDKLDCFKIARCFLGTIDNFYQKQDEYFMYNPLARQYWSLVEGQTRLKNRYRQLIDIVFPEFALIFNDLYDDLALNFIHDFPHPVLFVNRRIDYLMNYLKEKNGTTHAYRFKNKVLKMKELASNSLCFVAFDSYQVQNLVQVIEMIQYHKSEINKIKNQLINEMKDKKLFKIINSIPGFGEFSTALFLAEVGDITRFDNKYQFISFIGIDSVTSQSGVSAYHGPISKTGCKFGRTILFNIVTTILQISAHTDKTNPIYLFFRKKQSEGKHHYKCIIACETKLCKIIYKLCSSNCLYTKK

SEQ ID NO: 330109 - protein, 457 aa, unidentified
MSEGTAQPPFSRLCPRLLRKHSAWLIRHIPLTQKFHPQPLAPAKMADWVHAHYARVRSPYAAQDKPFASGFTNPYRNGGDIMLKINYMSTLFVGIDVSSKSNSVYAMDFEENKYLSTSFGNNQPGADELVNRIAACMQKHKNLDTLLIVLESTSVYSVHISNFLASSEVLMPYKPYVFCVNPKATANYRKSYIGMEKTDPTDAYLIADFARVGRTKKLEPWRGGQFIALKRLTRHRMHLSECITREKTYMVSNLYLKFSELQLLEGDDKPFGNLYGATSSAILTEFLSPQEIIDMPEEDLLAFLAQRSRNRICDLSKTSELLRKAARDSYRLDKCMYEPLNISLASSFNCIQAYQKEIRLIEQAIEKCIKGMNPNALIILQSIPGIGPVWASGILSEIGDISAFHSSDALAKYAGLYWPKGDSGDFISEDNQMSKAGNPYLRHYFWRSGKQHQEAHP

SEQ ID NO: 330110 - protein, 412 aa, unidentified
MEAMVERACGLDVHQRTVVACVLVGAAGARASKEVRTFGTTVRELELLREWLSERGVTHVGMESTGVYWKPVYAVLEGSFELIVGNAHHISRVPGRKTDVRDAEWIADLVRHGLVAKSFVPPKDIRELRELTRFRHALVRTRADERNRLLKLLETANIKLSSVATNVFGKSGMAMLRAIARGEQSPEVLASLARGLLRKKHGALQEALHGRIGEHHRLLLNVQIGRLDALESDVKVLDDAIAQRMAPYASQQRALEEIPGIGAVSARAIVAEIGADMSAFPDEHHLAAWIGICPGNHESAGKRMAGTSRKGNALLRGMLVEAALAGVRTKGSYFRAKYFRLKSRCGAKRAIVAVAHKIAIAIYRLLADGTVYRDLGEGYLDALHKTRTTKHLVRRLETLGFHVQLQPTSAGA

SEQ ID NO: 330111 - protein, 349 aa, unidentified
MISIGMDVHVRNSFLHAVDANGATCWRGRCPNRFRDLAEVLGEFEGEHVRLSLESTTNSRAIHRLVHQAAAHMGVDLEAQVLNARKLRIIAQSVTKNDRLDAAVLADLTRADLRLPTCYLPDDEEFTLREHLRARDDLVTLRTRIKNRIHAVLHRRGLLVPSGMDLFTAHGHAFLAELELDDAGRDILNRYLATMERFDAVIAESTAALRALARRPRWCKPMALLTTMPGIGLITALTILAELGDRTRFRGRSAVANYAGLVPVVRSSNRTHHYGHITKRGSKHLRKVLVEAAWMAQSRVPQYQALFERVAKGRGKKIAIVAVARRMLEDAWVMLKKDEAFRMTPSDAG

SEQ ID NO: 330112 - protein, 499 aa, unidentified
MAPCPANRRLVVRGRIEECSSTGHGLCHLSINKSNDITMAKKAKKVKSAKGAELRIVNPDAAGIDIADGIMQVCIPADRSKDNNRAFGAYTSDLHAISAWLRECGIKTVAMESTGVYWIPLFCRLQEDGLDVVLTNARDVKNITERKTDESDAEWLMLLHQYGLLKASFQPHNDAKRMRTLTRHRDTLSREASSMVLRMQKAMQQMNIKLTLVLSDITGKSGIRIIEAILAGERDPKKLAELADIQRKTPKEEIAKALEGNWEEDLMFVLRQNYDTFKHYCTQLGECDAELEKLMENYRAEVAKVEDTSYSPAKKRRDYKKTRHTVSFDVERKAYEMWGVNVFEIPGISHLTALELMSELGHDFTRKFPSSKQFCCWCNISPNTKISGGKRISSHVPHRRNNVGLIFRSIASSLANAKNQLGNFYRRIRSRAGGKAAVIATAHKVAEIFFAMVANQTTYNPERVGIDEKVLLEKRITRYKRELERITGTHIEIGNACVP

SEQ ID NO: 330113 - protein, 338 aa, unidentified
MKVYAGIDLHSSNNYIGIINEEDQRLYQKRLPNRLEHILEALEPFKESMEGIVVESTYNWYWLVDGLQDHGYKVHLANPSAIKQYEGLKHTDDKWDSFWLAHIKRLNILPEGYIYPKEERPVRDLLRRRLLFVRHRTSHILSLQSSITRNLGYKMSGREIKKLERGDAGKLFDDPFLVLAASNNISAIQFLKTRIAEIEKEVKSHIQLKPEFKYLLTVPGIGNILGLTIMLEVGDISRFLKVGNYSSYCRCVKSERISNSKKKGQGNRKNGNKYLSWAYVEAANFFRRYCPKANAFYQHKKAKKNGVVAIKALSNKLARASYYIMKDKVPYDANKMFR

SEQ ID NO: 330114 - protein, 351 aa, unidentified
MSHSPVPALASIGVDIGKEVFHLVGFDPQGAIVLRRKIKRAAFEREFEKLPPSIVGMEACLSAHFVSRALRKFGHEPRIIPAIYVKPFVKGQKNDYNDAEAIAEAALRPNLRLVSEKTQAQLDLQALHRVRARLVSRRTATINQIRSFLIEQGITVRSGPRALRISLEPILRQRADEMSPRMKSLLSGLHDDWVWLDKRIDAVSGEIDAISKQDIDCRRLMTVPGIGPVISSAVVAAVGSGEAFARGRDFGAWLGLVPKQFSTGGRSILGAITKRGSRYLRMLFVQAARVIMMRRKLWPQFSFGAWLEQAAARMNRFKLAIALANKLARIAWSVLRRNQAFDANREAVPAI

SEQ ID NO: 330115 - protein, 390 aa, unidentified
MIYVGIDVAKDKHDCCILGPDTEELFQVFTIRNNSDGYGELFHKIESVSKDKSQIKIGLEATGHYSYNILGSLLDHGYHTFVINPLHTNLYRKGQSLRKTKTDKVDARSIAEMLVTDKTLKPYTGTSYHSEELKSLTRYRFELVKERAKLKTSVSRLVNILFPELESLVPTLHMNSVYRLLQELPGAYFIASSNLTHLKALLADASKGHYGREKAIEIRETAKSSIGSLMPAKSMELRQTIRRIDTLTSDIKEVEQSIQKIMDECGSPITTIPGIKYRMGAMILAEIGDFARFSNADQVLAYAGLSPSTYQSGQLISSYARMEKRGSKYLRYALFNAAIYASVWDERFRLYLSKKRAEGKHYYVAISHVIKKLVRTIFRMEITHTSYQPL

SEQ ID NO: 330116 - protein, 325 aa, unidentified
MDNFYFIGVDVSKKKLDFCVLFEGKVLREEQVSNHQQAVARLIGELKNDLEMDNEQFLICAEHTGQYTFPLVCACKSVECKLWLENPSQIKYSSGMQRGKNDKVDAKRIAIYASRFGDKVKYYDRPTEEIERLKQLERERALYVTDLAKYKGQMYDQKDFMPAALYRKKTKRMKGLIQELQAAIDAITAEMEVLARQMELLMSIDGVGKVVALNVIIETEAFSRFDNPRKFCCHAGVAPFSYTSGSSQHSKNKVSHRANKNIKKLLHMAAVSVTHRKEGELKAYYMRKVEEGKNKMSVINALRAKIVARMFAVIKRNEVYTPIYS

SEQ ID NO: 330117 - protein, 346 aa, unidentified
MKYFAGLDVSLEETAICVVDENGRIVKEGRAPSEPEALLETLRKVALPLERVGLEACSLSAWLHDGLRSAGLAAFCIETRQANAAMKTMPNKTDRNDARALAQIMRTGWYRQVHVKSQQCRLWRALLVARRTVLNEMRTIENVVRSLLREAGVKLGRPSRAAFADRVRELIGGDKAVMALVEPLLAIVATMLREFGRLTKQVLDIARNERVCRQLMSAPGVGPITALAFRATIDQPGRFRRSRDVGAHLGLTPARYQSGETDIQGKISRCGDELARTALYEAAHSLLVLSKKWSSLRAWGMNVAKRRGMAKARVAVARKLAVILHRMWRDATEFRFDKAAGGSASA

SEQ ID NO: 330118 - protein, 418 aa, unidentified
MKTHQQLTCFAGFDWAKDHHDVVIVDPQGAVIDQFRIEHSVAGWQFWKQKVAAHPNMGVAIETSFGAVVEYLLESGVTVYPVNPLCAKRYRERKCASGNKTDLHDAWALADALRLDGHTWRPLTEQDPIIAQLRVLCRDEVALIEERTALVNQLQQALREYYPTALEAFDDWTAPSAWAFVEAFPTAGELVAAGKRKWDKFLHSHKLFRPQTYEDRIAAFQRADQWVANPPLVAAKSLYAVARCRQLRVLQAQLNLYRGRIEALFATHPDHAMFGSLPGAGPKLAPRLLAEIGSDRALYGDAGSLQCVAGTAPVSFQSGLIHKVRIRRSCNLNLRAAMYLFADHSRKGCVWAAVYYAAQIQRGKSHAQALRCLGQRWLKIIWKMWQTNTCYDPDLHARNQTAHGSWVLNFQLPTKAKP

SEQ ID NO: 330119 - protein, 314 aa, unidentified
MVKSIGIDVSKRKLDLGLINDDQSTRSLRFGNDPEGIPSLVKTLRSCQEKIEELPVVIEATGGYHYGITFSLLEKGFRRVSVINPLITKKHLSSQVRKIKTDKKDALLLAKIGLLEELAVYAETKKEVLNKRKARLFHFLKKQLQQIDNRLSSVRSLGFSENCFEEEILKEIKRDLERKLEKVRKEVLESVTLNCPKIVGVSELGLKAIATELGNLERFRNHKQVIAFSGMDPSIRESGTSVRGRSRLSKRGSRTIRFFLYQGAWGVMMHNQKYRDYYAKKKSEGKHYYTCLSAIARKLLCEIYFNLKEHSYCI

SEQ ID NO: 330120 - protein, 344 aa, unidentified
MELFTLGIDLGKTTFHLVGMNQRGEVVLRKRFSRTQLLHFTANLKVELIGMEACGGSHFLGRALREQGHEVRLIPAQYVKPYVKTNKSDYIDAEAIAEAVGRPTMRFVPVKSDDQLDLQSLHRVRERWVMRRTAVVNQIRGLLLERGTTLRKGRRYVDEALPGIVAGGSSKLSGAVLVLLAELKQELEQLAEKIDRADKSIEKIARENESCRRLVAMPGVGPVTATAIIATIGSGAAFRKGRDFAAWLGVVPEEHSTGGKQTLWKIPQRGNQYLRRLFVQGARAVMQHRTKQSSGLSAWLAQLTARTHQNIAIVALANKLARMAWAVLAKNEVYKPPILASDTI

SEQ ID NO: 330121 - protein, 411 aa, unidentified
MSESDNPAAPTYAVFCGVDVGKAEHHACALDPSGAKLHNKALPNDEAALTAVLSGLTAHGRVLVIIDQPASIGALTIAVARNLSIDVAYLPGLAMRRIADLHPGEGKTDARDAYIIADAARTMPHALSRVGTDDETLAGLGVLVGYDDDLAAQSTRLSNRLRDALLHVHPALERLLGKHIERGGVIDLLVDAPTPAALRALGEDGIRTVMATRSPRLAKTLPATILAALDAQTVVVPGTTEFGRVIAGVATQLRQVRTERTALAADVEVRLATHPLAEVLTSMPGLGVRTALKILTIVGDGAAFPTAGHLAAYAGLAPVTRRSGSSIRGETRSQRGNHALKSALFLSAFASLADPTSRAYYDRKRAQGKRHNAALICLARRRVDVLFAMLRDAKPYQPPITTSPAPDTLAA

SEQ ID NO: 330122 - protein, 351 aa, unidentified
MEQHNTMTIGIDLGDRFSFLAVLNDAGEVVEEQRLVTHTQSFERAFAARPAARVVIEASTHSRWVSSLLAELGHEVLVANPRRLALIYGQDRKNDKRDAELLARVGRLDPELLCPVWHRSNQAHADLSLVRMRNQLVELRTKLISSVRGMVKSHGQRLPACSTETFHDKVAEHIPELLKAVAASALRTLAQLSEEVRALDRQIESLGRTRYPETTALRQVAGVGPVTALTFVLTLERPERFRHSREVGAYLGLVPRQDQSGDTDKQLRITKAGNVYLRKLLVQCAHYILGAFGPDTDLRRWGLALAERGGRNAKKRAIVAVARRLAVLLHRLWRSGQAYVPLGYRSVAHAA

SEQ ID NO: 330123 - protein, 310 aa, unidentified
MGNISVGIDVSKDRLDIAVRPSGEVLVVERNAAGLERLAAWLKERAPRIVALEATGGFETVAAASLASAGLPVAIVNPAQIRAFAKAIGQRAKTDPIDAAVIAHFAEATNLESRPLPDEQTRLLADLVGRRRQIVEMIKAEGQRLQRVTVPRLKKSIARLTKALEKELAALNADIDDTVRGSPAWRAKEDLLTSVPGIGAKIAHTLIAELPELGQLGKKEIAALAGLAPFTRQSGKWKGKSFIGGGRAPVRAMLFMGALVAKKHNPALKAFFDRLVAAGKPKMLAVIAVARKLLTILNAIIRDNRPWQTA

SEQ ID NO: 330124 - protein, 352 aa, unidentified
MKYVGLDWAYRTAQWCALDPGGEIAGEGRFAADRDGLARLVLELGDEVTACLEMMSGALWARDELVACGWQVQVADARKVKTVAPLAAKTDKVDARLLAELSRRQLVPALWLPSLDERELRERLRRRMHLVRLRTSAKGRVFGLQTQWGVRISLRRLRHADGMTLLERAGMPAVWRHSISECLAVIDFLDERIVPLDAELRPFAQADPRAVLLDTIPGVAELLALTIAVEIGEISRFAGPEKLVSYGRLAPRVHQSGEGRPHTGPLNKSGSRLLGWAAVEAAQHAWRESNPWHQLYLDVSRRSRNHNSAKAAVARKILIAAWHMLSRNEPFKPAPRTGATSVPASSRLALAA

SEQ ID NO: 330125 - protein, 379 aa, unidentified
MRDHNEVFVAFDTSKLRNAVAIAEAGRSGEVRFLGEIDNTPAATAKLLKKLAGQYDRVSFCYEAGPTGYGLYRQITGLGQACMVVAPSLIPKKAGDRVKTNRRDALGMVTQFRAGELTAVWVPDPRHEAMRDLTRARGAAVEDLRAKRQHVSSFLLRLGLHYPGDKTWTKAHMNWLVKQKLAHAEQRIAFEEMLLAVRQAQERIARLEAAIRGAIPEWSLAAVVDALMAMRGIDMVSATALLAEIGDLSRFHTPRELMAYLGLVPSEHSTGDKVQRGGITKAGNRRARRLLVECSWAYRHPPRIGNKKQDKVAAAPQAVREIAWKAQHRLYARYRALIRKGKLKTVAVTAVARELCGFIWAVNRELTIAGAGATAAGIR

SEQ ID NO: 330126 - protein, 425 aa, unidentified
MRLVYPVCCGVDVHKTFLVATIITTTNNIFPKYRQKRFSTYYSGLLDFKQWLLDNNCKDVCMESTGKYWVPVWNVLEAASINVVVANPKWVSAVKGNKDDKKDSKWIGDLFRMGLVPGSYIPIKDIRILREFTRYRSKLVSMRSSEKNRFQNAFTVCNLTLDAVVSDMFGVSATAIENYLLDADTVDPNYCVFLLRGSLKKKASDVIEAVKGFNMTAEQKERVRIVQGHFDDIDKRIVQIDNVISRLVADYEGQISLLCTIPGIDRRLAITIISEIGTDMSEFGSSKRLCRWAGLTPGNNESAGKKKSVKISRAGVYLKPALVEAAHAAVKATQKSPYFKTKYERIMKRRGKKRAIIAIARMMLTAIFAMLQSGEVFNPRDLQKFDMPEELRRKQTLSSAKDAVKLLVSLGLVPEGSISLETLAG

SEQ ID NO: 330127 - protein, 348 aa, unidentified
MRFYSGQHRFYCGVDLHTRTLSLCVLDAAGAVALEATLPPDPDRLLAALAPYRDGLVVGCECLFAWYWLADLCAAEGIPFVLGHALYLKAIHGGKTKTDTIDARKLARLLRGGAFAEAYVYPKPMRATRDLLRRRTYLVRKRAELLAHLQMTFLQYNLTPPAQKLAYAANRAGLDLDVFPDPSTRSMLAADLAVVTALSQQIKRLEAELIRSAKVHDPQAFHRLRTVPGIGPVLALILLYEVHDIRRFEDEGRFLSYARLVGGVRESGGKKLGTGGRKIGNAHLKWAFSEATCLLLRELPKAKTWLARRERKIGKRRALGALAARLARSVYHLWRKGEAFDVNRFLAS

SEQ ID NO: 330128 - protein, 337 aa, unidentified
MTHVGVDLHERFCYMTALDATGRKLKAGAVNNRPAELRGWLRGLPGPVEVAVEACSFWPAFQEAIADQVQRICLVHPQRVKAIASARLKNDRVDSATLAHLLRCDLLPEAWMADAATRERRQQVRLRISLGQHRAALKNQVHAILHQHGKHAPVTDTFGRRGRQWLGKLTLPPVAREALDSYVELIEQVGQHIQRQEQQLKKMAGEDRRAQWLTSIPGVGAYSAMVILSEIGELQRFRDKKALFSYAGLVPAVRESAGHKSHGGISRCGSPRLRWVMVEAAHTALRCSPAARGYFERLRRRKHAHVARVALARKLLGAVFAMLRDGECFDETIFAAV

SEQ ID NO: 330129 - protein, 407 aa, unidentified
MIFAGVDWAEAHHDVHVEDEQGRRLAGGRLPDGIEGIARFHDLVAAHAGEPPDVVIGIETDRGLFAAALVAAGYQVFAVNPLSVSRYRDRHSSSGAKSDPGDAKVLADLVRTDRHNHRRVIPDTGLAEAVKVLARAHQNMIWNRRRQANQLRSALREFYPAALAAFDDLTGGDAIEVLRVAPEPRLGAGLSKTQIAAALRRGGRTRRLDERAAAIQAALRAPQLQPPPVIAAAMGASVAALAAVTAEMTRQIAALEQQLTADFEQHPDAGVVRSLPGLGTILGARVLGEFGDAPDRYHDAKSRRNYAGTSPITRASGTRRVVLARHARNKRLADAIYLWAFAAITASPGARAFYDQRRAAGDTHHQALRALGNHLVAILHGCLARHLPYDEHTAWAHRTNPELKAAA

SEQ ID NO: 330130 - protein, 366 aa, unidentified
MKKTSTVRVNGNMIFKGHKLTIGLDLGDRWSNYCVLDEAGEVLLEQKLATTPEAMKQTFERIPRSLIALETGTHSPWLSRLLKELGHAVLVAHAQKVELISKSKRKDDRHDARTLARLARIDPELLGPVRHRSAKAQIHLTVIRARAELVSVRTALVNAARGLAKPHGERLPKCGTQQVSRELAVGLNAELREVLEPLLKEIESLNERIKEYDARMEKIARESYPQVALLKQVKGVGTQIALTYVLTLDDPHRFRRSRDAGCFLGLRPGRRDSGESQPQMHISKEGDRYLRTMMVQGAHYILGPFGEDSDLRRWGLRLAERGGKNAKKRAVVAVARKLAVLLHRLWVSGEVYEPLRNSHKAMRAVA

SEQ ID NO: 330131 - protein, 364 aa, unidentified
MKEEEKRRFVGIDLGKREYTMAIIGKNGKMKDSHGKTSTQGRQALYRLLEKGDKVALEAGNLAFIFAYEIQEKVGCEVRVLNSAKLPFIWDAPTKTDKEDARKLARLIEERRDEKLPIVPLPSKEEIARRKLLANYAREVKSRTKYLNLLHAMFVHQGHTTIVRKNLSTIENRIEAVSLLTGQEREEAEWILKHLELHDQRIKELKSRMTKETKENEDMKNLQTIPGVGPVVAYAFYAHVGDGSRFSAGAQVSNFIGFVPRLDYSGTIQRQGHITKHGNAYLRGLLVQAAWSMVRSGRDGSLKDRYICLTAFGGKSKKKTIVSIARRLAEMMYSVLRDKSKFEERIWAGRKEYLAKLKELKNCA

SEQ ID NO: 330132 - protein, 345 aa, unidentified
MSLMFFLGVDVSKKTLSVVLSDHRDKILWSNKSIPNDETGFKKLVETVIRNVSKKAGKEEYSIAAGMEATGVYGERLAYYLNGNSHDGRIVTYVLNPAAVRAFGNSVMAPNKNDSADAQLIASYLSMAITKGQISPWKAPSPEGRALRELSRRRDELIGLLDSEYNRLEKLECMQEPPEAIVQNVKELISYLKDSIHSLEKEIEDHIDNDPGMREDIELLRSIPGIGEVTSVTLQGESDGLNNFKSVKGLVSFVGIAPSEHTSGTSVHKRPKISRRGNARIRHHLYMATMRATQVNPVIKEFYERLLNRGKCKKLALVACMRKMLHIIWGVMKHRKSFDPCYALK

SEQ ID NO: 330133 - protein, 394 aa, unidentified
MKLVGIDVGKNSHHFCVMDKETGELNVTPSSFPNNKEGFDFLINSLKPYSKKSILLGMEDTGHYHVALLKFLLSNGYTVALINPKTTDLTRKMEGGITKNDKLDTITICDVLDTPERKKQYRITKVDRFDLYEQRQLTRHHHNLKEELNLYCNRLQKSIDLVFPEFNTLFSSKYGVVYMNLLKTFGSAEAIASTDIRTIRKCFEIKGRGGRISLTAEKLKECAKNSIGISSEVETIQIKHLVSQITLIKEQIAEIDKKIEEFSITNNSPILSIPGISHFSGTSILAELGDIGNYSKPSQIIKFAGVAPYHYESSQYNAQHTAITKKGSKYLRKTLYQIILPVINNNPVFKKYYRLKISQGKGHRCAQGHCIRKLLRIIYHLLETGQSFDPALLR

SEQ ID NO: 330134 - protein, 331 aa, unidentified
MYFSQFIGVDISKDTLDAAVYPAKDKKMDFLHFDNTQKGLTVMMSWLKRRGIKTTEMVICAEHTGVYTNPLIEFADKKGLALSLNSPLDIKHSMGIARGKNDVIDASRIAEYAYSHKDKLKLYEKPSDNIKKLQYLLTERRQYMRQRTALINLDCAMGKYGTSETRSRSESAKKHCEKLVKKVEDQMLAIIYSDPDVKRNYDLISSVKGIGLINAINTIVYTNNFKSFETPRRYACYIGVAPFDHTSGTSVKGRTQVSKICRTQQKAELSMAARSAIVSDPGLRNYYLRKMKEKGGGKNAHGVVLNAVKFKIILRMFAVVRSGEPYKVLNY

SEQ ID NO: 330135 - protein, 316 aa, unidentified
MAEYVALDVSLRSTSVHIVDERGRCRWRGTCPTDVAALVGTIRKHAPAVERVGLETGMLATWLCHGLAKAGLPVVCMDARQAKAALSCRIDKTDANDAEGLAQLLRTGFFRQVRVKSEGTMLVRTLLSARRQLVRTGLDLANQIRGLLKIFGLLLPRGGGRAFETAVRERLAGHGQLAAAIMPLLEAWRAVREQVLALDRLAYAAAKRDARCRLLLTAPGVGTITALAYVAAVERPEEFRNARAVGAWVGLTPARCQSGQVDYSGRISRQGNRYVRRLLVTGATAVIRYARTGVAPLWFTAGGLAAGQFSIGIFSS

SEQ ID NO: 330136 - protein, 452 aa, unidentified
MAKPKKRRHRKLDRSLPEMRPNAGGIDMGATEIFAAVPADRDSESVRSFPSFTQDLHELADWLQRCRVDTVAMESTGVYWIPLFQILEARGIEVHLVNAQHVHHVPGRKSDVLDCQWLQYLHSVGLLKASFRPEHAVCEIRSLMRHRQNLVEMACVHVQHMHKSLDQMNLQIHHVISDITGVTGLAIVDAIIAGITNPKELAKLRDHRIKASIETVTKSLVGDYRPEHIFTLKQSLTAYRYYQQLIADCDQEIQQRIQAFDTKDDGPTAAAAVDSSNSTTATPSSFDLHSHLERIFGVDLTRIPGFECLRIQTIFSELGADLSKFPTDDGFCSWLNLCPKDGSSAGRRIRGPKVKTKNRVAQAFRLAAQSLHHSQSYLGDYYRSQRARHGAVKATKNTAHKLARIFYHLVTTRQPYDETVFAKLEARSHKRRLHKLQSLAKQMGYSLVEANA

SEQ ID NO: 330137 - protein, 326 aa, unidentified
MMILGIDIAKEKFDVALYEDKELIATGQFTNNPAGFKKLSKWCNNKGAGQVWACMEATGRYGDALAMYLHQAGHQVSVVNPARTRKYAESQLKRNKTDQVDAKVIADFCRTQEPRLWTPPAPEKRELQEMVRRLSALIKEQTRERNRLKSGLQSQVVKDSIATNLEFLGTQIVQLEEQIQSHINQYPDLKRDRDLLISIKGIGPKTAAVVLAELPDVEDFDHVGQAVAYAGLSPQQYDSGSSVHKRSKLTKTGNQNLKTALFFPALSAIRFNPIVQALALRLAEKGKDKMLIVGAAMRKLMQLIYGVLKSGQPFDPNYATKMQDAI

SEQ ID NO: 330138 - protein, 421 aa, unidentified
MEVIHPRCAGIDISKKDAKVCVRAPGRGRARSVETVSTWGSMTKQILALRDHLVQQRITCVVLEATGDYWKPFYYLLEDLPDVEVMLVNARHVKALPGRKSDVSDAAWLAQLGAHGLVRGSLVPPEPIRQLRDLTRTRTALTRDRTREVQRLEKVLEDAGIKLSSVASSIMGLSGRDMLDALADGERDPAVLAQMARRALRGKISQLTEALQGRFTDHHAFMVRMHLGLIDQHTAAIDELTDRIEKVIEPFRAFRDLICTIPGIGPMTADVVIAETGSDMSRFASAAHLASWAGTAPGMNESAGKVKSSHARPGNPYLKGALGTAAMNLSRMPGTYLGVRYRRLSARRGPMRANVATQRAMLTAIWHMGTTGALYNDPGPDYFTRLNPSRAKQRAVSQLEAMGYAVTLHAAHNSGESQPHE

SEQ ID NO: 330139 - protein, 357 aa, unidentified
MRFYTKQHEYYCGIDLHAKKMYVCIMNQSGDILYHKNIHTDPHLFLSILGPYLPDIAVAVECTFTWYWIADLCLNHHIPFVLGHALYMKAIDGGKTKNDKIDSEKIAMLLRGGMIPFAYVYPPKMRATRDLLRRRIFIVRKRAEFLSHIQNTNHQYNLDDINKRISYKANRVCLDDHFPDPIVQKNVDTDINIIAALEEQIRSVESIIVKCARYHDPIAYTLLQTIPGIGRILALTILYEIENIERFPKVQNFVSYCRLVKCPRESSGKKTASKNNKIGNANLRWAFSEAACLFIRDNDYSKQYHQNLVNRYGKAKALAIIAHKLGRAVYFILKRRCGFSYNIFYAGKLSGIHEPSV

SEQ ID NO: 330140 - protein, 334 aa, unidentified
MENIALIGIDLGKNSFHIHCQDRRRKAVYRKKFTRPKLIEFLATCPATTIAMEACGGSHFMARKLEELGHSPKLISPQFVRPFVKSNKNDFVDAEAICEAASRPSMRFVQPRTESQQAMRALHRVRESLVQDKVKTTNQMHAFLLEFGISVPRGAAVISRLSTILEDNSLPLYLSQLLLKLQQHYHYLVEQIKDLESQLKRKLDEDEVGQRLLSIPCVGTLTASTISTEIGDGKQYASSRDFAAATGLVPRQYSTGGRTTLLGISKRGNKKIRTLLVQCARVFIQKLEHQSGKLADWVRDLLCRKSNFVVTCALANKLARIAWALTARQQTYVA

SEQ ID NO: 330141 - protein, 406 aa, unidentified
MRIIGMDIHRVAAEVVSLLDGQLHRMGRIPMARDSLEAFARKELTHDDHVIVEATGNAAAVAEVLASHVDRVVIANPKQVRMIAHAKIKTDAIDAAVLAKLYSTGFLPEVWVPDERTLALRRQVARRTQLVRQRVRLKNLIQSILHSHLIPPCPHGNLVGISGRKWIAAQIVPADERAAIERHLAQIDLIESSLKVIEGEIAHEAMADPIIRRLMTLPGVDMVVASGVAAAIGDIRRFADPTKLASYLGLNPSVHQSGEGPAYHGRITKQGRGQARGMLVEAAWAVARSPGPLGAFFQRIASRRGKHIAAVATARKLAMIIWHMLTKGTDYIWMRPALLARKFRSIELRAGLPTSHTKRGSAYDYNIPEKRAEERGRVEAAEQEYTYFASRWRAKPRAKKAPLQPT

SEQ ID NO: 330142 - protein, 402 aa, unidentified
MYNAVGIDVSKGKSTVAVLQPAGVIIRKPFNVNHTSSELDELAKYIGSLEGETRVVLECTGRYHEPVVKTLSEAGLFVSAVNPHLIKNFGNNSIRKVKSDPADAKKIARYTLDNWIELRQYSSMDNTRTQLKTLNSQFSFFMKQKVAAKANLIALLDNTYPGVNKLFDSPVRDDGSEKWVDYAYSFWHVDCVRKIGLKTFTERYQAFCKKHHYNFQPAKPAELFLASKDLIAVFPKEASYKLLIRQSIQQLNLASSHVEELRSKMNELASTLPEYATVMGMYGVGKTFGPQLIAEIGDISNFSHREALTAFAGVDPGVDQSGTHNSKSNKASKCGSNRLRKTLFQIMSILLQTAPEDDKVYQFLVKKRAEGKPYYVYMTAGANKFLRIYYGKVKECIRNLEQ

SEQ ID NO: 330143 - protein, 343 aa, unidentified
MQIHSVGIDLGKTTFHLVALGVAGKVIVRKKFNRKQLLVYTANVPASLIGLEACSGAHFLGRALRKQGHDVRLIPAQFVKPFVKSNKNNFIDAEAIAEAVERKNMRFVPIKTDDQLDLQGIHRVRDRLICRRTAVINQLRAFLLERGMVFAHRPANLKAAMADILENAEADLTPQMRSLINMLWDEWKLVKEQIKKLDLELERISAADAGCTRIRQIPGIGPVVATAIVAAIGNGAAFHKGRDFAAWLGIVPRQYSTGGKAKLLGISKRGNIYLRKILIHGAPAAVLRIKRDRAPIGPWLDALDARAPKNVVVVAMANKLARIAWAVLSSGEDYRPMGNTVAA

SEQ ID NO: 330144 - protein, 337 aa, unidentified
MTIIRIGLDIAKHVFQVHGVDENEQTVVRRQLRRSEIAKFFNRLPPTRIGLEACGASHYWARLLRGLGHEVVLLPPQYIKPYLKRGKNDANDAEAICEAMSRPGMRFVPIKSAERQAELMPLGVRDLLIKQRTAVINAIRGYAAEFGVIAAKGPVKVAELLQQAHAEEASVPAVALDMLRLLAAQLDALDVKLKQIETRLVALHRENPLRQCLASQPGIGPIGAVSFALRVTDPKSFRSGRHFAAWLGLTPKDNSSGGRRRQGRISRQGNETLRKLLVLGATAVIRFARPGHASLWLLNLLARKPRKLAAIALANKMARTLWAMMVSGEVYRRPLPA

SEQ ID NO: 330145 - protein, 411 aa, unidentified
MDIVVERCCGLDVHKDTVVACVRTPGKGGKRDQQTRTFGTMTTDLLALRDWLVAMEVTLVGMESTGIYWKCVFYVLEDAMECWVLNARHLRNVPGRKTDVADAEWVCQLVEHGLVRPSFVPPKEIRELRDLTRYRKAQIDERGREAQRLDKVLQDAGVKLSSVASDILGKSGRDMLEALVAGTRDPEVLAELARGALRKKIPELRLALEGRFSTHHALIVGQILAKLDFLDEAIGMLSGEIDRVIAPFEAEVAHLDTIPGVDRRIAECLIAEIGADMGRFETSARLASWAGMCPGNHESAGKRKSGRTRKGSKWLAANLAQAAEAAGRSKDTYLGAQFTRLRGRIGHPKARKAVEHSILVAAFHILAGGVPYADLGADWFQKRRPEAHVRRLAHQIEALGYRVTIEAAEAA

SEQ ID NO: 330146 - protein, 320 aa, unidentified
MTSKGAEKMQNDTIGVDVSKDHLDAHRLADGASRRFANDKCGRKAFVKWFAQAPVERVVFEPTGPYHRAFERALGAAGVPFVKVNPRQARRFAEAIGKLAKTDRLDAATLARMGAMLELKARPPQSEALLKLKELRLAREALVKDRTAAQNRAKILTAPLLKRHNAQRLEQIKRHIAAIEVEILKQVQADPDLAQRFAILTSIPGLSVITAFALLIEMPELGALEPGQAASLAGLAPMARQSGRWTGRAFIRGGRAEIRQALYMPALVAARFNPDLKAKYKKLTSAGKPAKVALTAVMRKLIVLANALLKANRNWAPKYA

SEQ ID NO: 330147 - protein, 439 aa, unidentified
MEKTATNQTVETVQTPPQDIVLWMGIDWADQKHCLATCLPNGSQRQLHWVEQKPQALDDFFLRWREKNPNGRIGVVLEQSRGALLYALLKYDFLRLFPINPRCSADFRDALRASGAKDDPCDAELICEFGCKHTEHLRELKLEDPATRQLILLSEQRRDIVDGQTALSNKLSDALKCYYPLALELFAEDIVAPIALAFLKRWPNWSAAKKAKESVLRAFFYAQNCRSEERIQLRLEAIKAAKPLTEDPALIRTMELLVGTLGKRLASVQQSIALYDARIAEVFATHSKRHVFASFPGAGKVLAPRLAAAFGTTEANFPSPTAMLCWSGVAPVKKQSGKTKIVSFRWARPVFLHQTFVEYARSSVKYSDWARAFFQERVDKGWGKFRIYRALAFKWIRILWCCWKNNEEYDETKYLKSLQKRGIKTYAALAVTPTATPCE

SEQ ID NO: 330148 - protein, 367 aa, unidentified
MEMYIGMDIHCKKTVYMIQECSGKVVAQGSVPTSVEGFSKMVDELGVPSGTKIGLESGPQSWWVSGVLSGLGMKPVVIDAREVRAKARRINQKSDFRDAFEICDGLRRGIYTAIVYVPEPQIQRLRQVLSRRRHFVKICTSQVNAAKFLLRSVGLSREAAFLKSNGAWQRLMRRPAVRPLNRYLEMHRDLWQLAQEKVVALEKELDQALEPFRETCGLLRSVPGIEPITSASYIAVLGKPDRFPDSSHLVSYIGLAVSTYNSGERERHGHITKRGSGELRMLLCEAAHHAANARHPLNPYFRRIAARHGYKKAVVAVAQRLARILFQMWRKDQAFDVGQLNVVSARQSRVHRVYWRIKETKEEVVSV

SEQ ID NO: 330149 - protein, 343 aa, unidentified
MEESQAVVVGVDTHKDSHSAALVDELGSLVASTDVGANQRGYVQLLDWARSRSSHRTWVVEGTGSYGAGLASFLAGCGEVVYEGDRPQRRKHGAGGKSDQLDAIKVAREALAREHHALPRQRGNREAIRVLLSTREGVVTAYRQALNQLYALVVTAPEPIHERLIRLKGEQLVNACLRLRCTAGDIETSVTTRVLRRIAHRIRSLQVEAADYESQLEVLVAETVPALLSEPGVGAITAAQLLVSWSHAGRIRNENAFAAMAGVAPVPASSGRVVRYRLNRQGDRRLNRALHVVAVCRSGFHTATKNYIARRTAEGKSSREIRRCLKRYLARRFFRLLQGLDTP

SEQ ID NO: 330150 - protein, 321 aa, unidentified
MSKEGTARMTQQVFVGIDIASDQLDVHVIPTGERFVCSNDTNGLQSTVKRLKKIAPELIVLESTGGHERDLVIALVEQQLPVAQVNPRRVRDFARSLGKAAKTDSIDAFVLASFAEKLRPPVRSLPSEQERALKELAARRRQLIRMRTSEKNRLSIAKSRDVKDSIKSIIEALDKQIQDIEKDLDDVIKADADLSEKEDLLQTAPGVGPNTARALLADLPELGALSNKEIASLVGVAPMNRDSGKMRGRRSIIGGRASVRSALYMATLVATRFNRRINVFYARLIKAGKPKKVALVACMRKMLTILNSMARNNTPFQEVLA

SEQ ID NO: 330151 - protein, 412 aa, unidentified
MQVLHERCCGLDVHKKTVVACALVTQADGTVQRRVRTFGTMTGELLALSDWLSGLEVTEIALESTGVYWKPVFNLLEGEGRTIVLVNPQHMKAVPGRKTDVKDSEWLADLLRHGLVRASFIPPAPIRELRELTRYRKTLVRERGQETQRLQKLLETANLKLSAVATNVLGASGRAMLAALLDGEDDPAVLAELARGKLRAKLPALRQALEGRVKPYHRVLLGELLGHITYLDEAIARLYDAIERHLAPFAEAVERLQTIPGVSATAAATIIAEIGVDMTRFPSHKHLASWAGVCPGNRQSGGKRLSGKPTKGDVWLRAVLGEVAWAASRTRDTYLRAQFERLARRRGRKKAVVAVGHSILVIIYHLLRTGQDYRDLGTDYFATLDSDRVTQHHVQRLSLLGYEVTLIPKEAA

SEQ ID NO: 330152 - protein, 534 aa, unidentified
MDKWQWQRPGGGVWGGGVWILLKLWTNISPPKGIPTLSIEVFSTQPEDLQIPQKRRLNKVGKPTSVNIRGLRGDRRAKELKGMDLSRVIVLAIDPARDYPKALICDYFGGVLEKPFFFAVNSDGIFMLHKKVQYWANYMRAQRVFVGIEVAGCYHNAIADALEQLGYEVNQVNSITTAYERIKMLDYSKSDDKDLLSIAQAIIANNGLSPKRVTGFYEVMQSVCRARRQLVRERSAVKTQIRQLMTKVFREFQGLVDPETLKQEKVFDFWGKKSRFIMSCCPLPSQILDLNKAGLTQLAKLVELKFTDHEIELLLKAAERSLPSSPELVAFDGEQVQFRLKQLECLDHQIAVLEVRMEEMLVQTPAILLLSIKGIGVVTAVEFIAEIGYIFKYTHKRQLIKLAGTNPVLSQSGGKRGKAYKISRQGNPALRYIVTLIGKNLCSKKNGNTYFVDYYERLFLRGKAPSQVYVAAGNKFLGIALAMLRGQTTFHVPGFEECTSDILKKLTRIKKIEGAREALNRLSCEDTKKQLVCG

SEQ ID NO: 330153 - protein, 317 aa, unidentified
MAEPCGVGVDVAKATLDLACSTNPAARWQATNDEAGWLSLVAHVRTLQPAIVVLEATGGYETGAATALSAAGLPVAIVNPRQVRDFAKALGLLEKTDAIDAAVLAAFAARIQPTPRPLADDLQADLQALVTRRRQLVEMLTAERNRVPLARGPVRKNLLSHITWLDKQLGKTDHDLRTRIEASPIWRVRDQLLQSVPGIGPTTSARLLASLPELGTLTHRQISKLVGVAPLPDDSGTRRGYRRIQGGRSTVRTALYMATVTAITHNPTIRASYRRWRAAGKLPKVALVAAMHKLLIHLNAMLKHQTLWHPSPTTATA

SEQ ID NO: 330154 - protein, 391 aa, unidentified
MSEHSRVVIGMDPHKRSVTVEVMQADEHILGHGRFGTDVAGFAELAGFAGQWPERVWAIEGCEGIGRHVAQRLIALGESVVDVPAKLSARMRMFATGQGRKTDDTDAHSIALVGVRISGLQPVVSDDQLEMLRLLVDRRRRIGQEHVTKICQLHQLLLEIVPGGAKKDLSAAQARKILTAVRPSSEVGKLRKRVALELVVDLERIYARKKQANKELVTLLKTTGTGLLELHGIGPTGAARLLVEVGDITRFPNRGHFASWTGTAPIDVSSGDRQHHRLSRGGNRQINMVLHMMGVVQLRNHTEGRAYYDRKVAAGKSPNEAMRCLKRRLSDIVYRAMLDDYVTAKATGPGGHRGATHQSSAAGSHPHTSTSDKPLPGPVTTKPTTTLPKAS

SEQ ID NO: 330155 - protein, 424 aa, unidentified
MATITPVTATVKSEDLMQVCCDVSKEKIDVYSRVGHEGALFEMMDTIRNCGSVLQRQLKAWQELAQAHGHAGVLVVCEPTGGHERKLLALARQAGSRTAYVSGEAVGKARVIESNDTGKTDRKDARIIATLAGMGKTLKVRQLPDEYERLRELNTTYDLECTTVATIRNHVHDQVRQLFPDLDGEDGFVFSATGRAIRQLFGLNPARIRECSWREFVAKVKTFVKAARLERLEKVWAAAASSLLHQCPATVRAMREERLGELFEDLDRHLGRKLQLRTRILDAYGKTEESRKLADIPDASSFQLARVIAESGPLADFRHASQLLRYFGMNIRERQSGKWTGKNRISKKGRALGRKVLYQLVFSSLIGEGKLFADPYRRKKADCACGMKAIVCLMRKALKMILGVFRSREEFSRDRVFASLPAAA

SEQ ID NO: 330156 - protein, 346 aa, unidentified
MKYYAGLDVAMKETFLCILSEDGEKIYESKCSTDPHLIHEKLAKGGVNLEKVGLETGSLSHYLFKNLHSLGYNVICIDARKMAAILSVTINKTDKNDARDIADAMRCNHYKEVHLRDINDHSTAILLKSRASLIQSRTALKNTVRGFLKAYGIRLGGVSHKKFPQVVREHSDDILPAAFTGIQGLLKSFESIHKEILELEEELKEICKHDQEVQLLMTAPGVGMIVALTYKTDLGDPTRFKKSESVGAYYGMTPRQYSSGENIKQGRISRCGAREVRTLLAEAAVVLLTRNQSWSPLKVWGLKLMKKYGLKKASMAVGRKLAVIMHRMLMTGESFKFSKADLQMVA

SEQ ID NO: 330157 - protein, 356 aa, unidentified
MSEITRVVVDLAKSVIQVNAVDAGGKLVTNRQLSRDKLLSWCAQLPPGCLVAMEACGGAHHWARKLIALGLNAKIIAAHLVAPYRLQGKGGKNDANDAAAVCEAASRPNMHFVPVKTTVQQGILCVHRLREGLKEERTASINRIRGMLTEFGLVASKSPDKLREKLTDMLEDASNDLSGMARLVIQEAYDQWKDLDERIDWCDERIKAHVKDDAHAKAAKELMGIGPVTASAVVATVGDFNQFKNGAQFGAWLGLTPKQNSSGGKSCLGGVTKRGDMYLRTLLIQGAKSAVMTAHKRDDPISKWLYQLREKSGWQKAAVAMANKNARILWAMMTKGCRFDPRHVSVKPTGSATTMA

SEQ ID NO: 330158 - protein, 474 aa, unidentified
MQNYYLGIDISKGYADFVILDGKKRPVEENFQMDDTFDGHCRLYERLGIFCNDHPESTIYAGVESTGGYENNWFNSLVKFQGTLNIKTAHLNPLGVNANSKADLKRNVTDKISAQNVAEYIIAHPEKISYQKQDHLASLRKQWSFIKMLVKQKTQLLNQLESNLYSANLEILVYCKNGVPDWVLTLLLRYPTASKLSKARKSSVASIPYISSQKAEELIETAKKSVSSSHDDVTEQIIQATVKQIKQIAQTIKAQTKIMVEKHSVPEVDLLKTFNGIGDLSAIGLILEIVSVERFASSKKLASFFGLHPVYKRSGDGSWGFRMSKKGRRVPRQILYMVTMAAINTNPLIREIYLKHTQQGMEKMAAIGVCMHKILRIIYGMLKHKKAFEPEIDRKNREKTYQCMPRGHKDKNRRYQEFDSKAPVSRRQSMKRKEQEQSQSNNDTMNGIEAPIPISLQQNINPVSVPYRNVKEQS

SEQ ID NO: 330159 - protein, 343 aa, unidentified
MDEISMIGLDLAKNVFQVHGIDGSGKVVLQRQLRRGAVEKFFAKISPCMVGMEACGGAHHWARVIGRHGHDVKLMPPAYVKPYVKRNKNDGRDAEAICEAASRPTMRFVAVKSVEQQVMLSVHTTRALLVKQRTMVANALRAQLSELGIVAAQGHRGLHELMARLQAPGEEIPEMMRSALLVLVGQWQALDANERALEKQIVKTARCDREACRLMEAPSVGPIIASMILAKVSDASMFRSGRDFAAWVGLTGRDHGTGGKHRPGRISKQGDRVLRTLLINGASAHLRQQMRRGISDPWLRELLARRPYKVAMVAFAAKTARIIWAMLAKGEAYRDRASASAAA

SEQ ID NO: 330160 - protein, 482 aa, unidentified
MKSRPPEKVKKATDHATRGHWNEMNRKQRRDMMRKIQSEDLSLEVVHPDAAGIDIGNESHYVAVPPSRDSQAVRRFGCTTVELKAMAHWLKQCRIQTIAMQSTGVYWIAVYDILEAAGLDVYLVNARDTKNLPGRKSDVQESQWLMKLHTYGLLRNSFRPSQEIPTMRTYWRQRNDLVQAAASHIQRMQKVLTQMNIQLANVLSDISGVTGQAIIQAILAGERDAHKLAALRDPRVRASEEQIARYLEGNWQEDLLFVLKQEQHGYEFCQKQMAECDRQLNHYLEQREDRSQGTRLPEEMRKGRLQKKKGNKPQFDLRAELFRMSGTDLTQIDGLDVMTATTILSEAGWDMSKWADEDHFVSWLRLCPDNRISGDKVIGKGRLPTNNRASIALRMAASTLRMSNTYLGAQFRRFRTKLGSPIAIKAMAAKLARLVYRMLRYGMKYVDQGAQFYEAQHRKLQITQLKWKATKLGFRVVEAPAV

SEQ ID NO: 330161 - protein, 346 aa, unidentified
MIHIGIDHHKRYSHVNLLDDSGMVLWEGRLGNDSSDFESLKARFIGDAPVRSVLEAGRNWGPLFDTLEELGLNPVLANPIKVRAIAEAQIKTDAIDAQTLAMLLKGNLIPRVHVPTKEVRDQKNLLRHRMYLVKTKTALKNRIHNLLDRNHQKPPAVSDIFGAWGRAWLSNLQLPELDAKLLDADLAMLDALNAQIKETEKWIETALESDRNIELVRTLPGIGKTLGAIIALEIGSVERFPNAAKLSSYAGLVPTTYSSGGKTFHGGLLPGCNRHLRCAFTEAAWVTIRVSPYFGAFFNRLKLRRGTNKSIVAVARKLCETCFHCLRTRTPYRESLYQFRGTLKVP

SEQ ID NO: 330162 - protein, 307 aa, unidentified
MFIGIDVSKARLDVHVRPTGETFVVARDDEGLAALVARLEGLQPRLIVLEATGGLQLRASALLAAAGLPVAVVNPRQVRDFARATGRLAKTDALDAEAIARFAEAVQPEPRPLPDAETERLAGLIARRRQIVEMMTAEKNRRHQVSSPKLRASLDAHLEWLRKELERIDEDLDGAVRASPIWRAKEELLKSVPGIGDVVSRTLIAELPELGRLNRREIAALVGLAPFNRDSGSLRGRRTIWGGRAALRATLYMAALTAIRHNPAIAAFNARLRAAGKPPKLAITACMRKLLVILNAMVRDQKPWQIA

SEQ ID NO: 330163 - protein, 343 aa, unidentified
MEHYVGLDVSLKLTAICIVDQTGRIEREGVVASNPEAIAAFIKSHAPHVARIGLETGATSTWLWTELNKMGLPVICIDARHAKAALRMQINKSDRNDAVGIARIMQCGWYKEVRVKDLDSHAIKALLVSRALLVKIKRDLENQIRGLLKNLGLVIGRAKMNVFALRAAELTEDRPELAGAVEPLLKAREAIERQIADLDRKVLRLARNDAQVRRFMTAPGVGAITALCFLATIDDPTRFKRSRSVGAYVGLTTRRYASGEADWTGRISKCGDKLLRSYLYEAANVLLTRVAKWSALKAWGIRLAKRSGLRKAKVAVARKLAVILHRMWIDGTEFNWSTKKAAA

SEQ ID NO: 330164 - protein, 357 aa, unidentified
MKKLFIGIDFSKEKLDATIILACGMNEIGSREYGCFPNNTTGYRKLCNWVKTNAWNTIAEEWLFCGEDTGSCSIGLSKWLYGKGYDIWIENAYAIKHSSGIQRVKNDKADSAIIAEYAWRQQDKVVPFEPLNESLAQLREIFLYRHKLVGQRVAMELRKEDKSQSNKSKAISFINRKSKHLIAEINKTIAECDKAIDSIIEADEELKENYAIITSIKGVARQNATCMLVYTNNFKKFGYDPRKIACYYGVAPFGKQSGTSVNTPAHTSHFANKLIKSLLGQAAHIAKIYNPEIRDYYQRLISKGKKPQVALNNVKNKLIRIIVVLVRKKVPYDQNTYKYYEEREVIERKKNEKLIYC

SEQ ID NO: 330165 - protein, 336 aa, unidentified
MVQIYGIDLGMSSFDVSFLSESGSVRHLSGVKNTVHGISKFLLSLPSSAVLCAEHTGVYGDLLLRLCTLNRICLCFVPGYQIKHSLGLQRGKSDPLDACRIREYAERFYDLLRPCFYPGEEMSELQELYRTRSLLVESRKRLDTLSIGDNCKSSVSLAADHARRAVLAELNTQISGLDHEIEALIQNSSEFSRNYQILTSIVGVGPVTSCELIIKTENFRKLDTAKKCAAYAGIAPYPKESGKMKCGHKISPMGDKQLKTLLFLCARSAKEHNKEIRLYFLKKHKVEKKHFFVAMNNIANKLLRLIYSLIQKQQTYDRDYIQRDPRCVVISDTNKC

SEQ ID NO: 330166 - protein, 411 aa, unidentified
MNAVGIDVSKGRSTVAILRPMGEVVQTPIDVMHNAVSLERLAYQILALGEDTRVVMEATGRYHEPIARELHAHGIFVSVINPIAIHGYCTSGTVRKVKNDQKDALKIARFALDRWTELREYTPMDALRQQLKIFSRQYNLYMKSCVALQSNLISLTDKVFPGVNELFKSPQRADGHEKWVDFVTTFWHCECISMVSENAFTERYQKWCRRMGYNFSRTKAADIYTESLGHIVTLPKNNNTKLLIQTAAKELTAMNELIAVVRGEMTRLAKELPEYETVRAMYGVGDTTAAQLIAEIGDIRNFPRRSSLVGFAGVDPAVDDSGKNVSNSKPATKRGSPHLRKTLFQIMTIYLRLAPQDEPVYQFLHKKRSEGKPYYVYMTAGANKFLRIYYARVKECMAKLDAPAENSETAE

SEQ ID NO: 330167 - protein, 412 aa, unidentified
MEVVHARCAGIDISKTDAKVCVRIAGAGRRKTAETVTTWGAMTRQILALRDHLAAEKVTCVVMEATGDYWKPFYYLLEDLPGVQVMLAGARHVKNLPGRKTDVADATWLAQLGAHGLVAGSFVPPAPIRALRDLTRTRTAITRERGREAQRLEKLLEDAGIKLSSVASDILGVSGRAMLEALIAGQRDPDMLADLARRRLRAKIPELTQALQGRFSEHHGFLARVHLDLIDQHTAAIGELTRRIEQVIEPFRGFRDLICSIPGIATVTADVIVAEIGDDMSQFPTAGHLASWAGTAPGSNESAGKVKSSKTRPGNPYLQGALGTAAMSCAQHPGTYLNAKYRRIATRRGPQKANVAIQHAILVAIWNMGTNGTFYEDPGGDYFTRLNPGRARTRAIRQLESLGYAVTLASAS

SEQ ID NO: 330168 - protein, 427 aa, unidentified
MARAIGLDVHLEFCEVAIAEDRAVRSAGRVETKPDALELFAQSLGPDDRVALEVTGNAWEIARIVEPHVARVVVVSPADTGIRQARAKTDRLDARTLARLLWSGELDAVWMPDRVTWVMRRRLSRRGQLVWTRSRAKNEIHAVLMRCLVGRPPFADLFGVKGRRWLAELELPVEERETVDAGMRQVEFLDTEIAAVERLIARDALASEEIKRLMTVPGVNVIVAASFVAAIGDIGRFHNPRKLVGYLGLDPRVRQSGSGPASHGHISKQGSVRARHALVESCWSAVRQPGPLHAFYQRVRARRGHSVAIVACARKLACLFWVLLTREEDYAYAQPSLTRKKLRLLELAAGAQRYAPEGAGVWHANEAVRAAERELAHQAEIAYQRTVRDYHATQATTKGAGATPGRASSSRQSGKQRGRATVPDPAL

SEQ ID NO: 330169 - protein, 326 aa, unidentified
MQGKVSSERTAMATVYVGIDVCKEWLDIHLHPLGRSFRVTNDTAGLRRLKRELDALDQMPRSALHIVMEATGKWHRAVQRSLHADGFYVSVVDPAQVRAYAHAIGRRAKTDPIDAAVIAAFVLATKPEIRPLRDAETQALSELVARRRQIVQMVVAEENRLRMALAKQAQESIKRLLKALRRELESLDADLDSHIRKSPVWRVREALLTSVPGVGATTARTLLAELPELGSLDRRQIASLAGLAPWTRQSGKWKGKSFIGGGRGKVRAVLFMAALVASRYNPDLKAFRDRLVAAGKPKIVATVATMRKLLTILNAIIRDGRPWQNA

SEQ ID NO: 330170 - protein, 367 aa, unidentified
MNHLAEIPFTAYVGIDWADAKHDICVQAAGSEEREFDRIVHKSEDIEVWAQALCRRFGGPIAVALELTKGPIVSALQKYDFFVIVPIDPIRLASYRKTFTPSGAKDDPSDAEFALDYMMRHPERLKVLKPQSVPMRKLTYLVEARNRLKGDQSRFVNRLIQALKQYYPQTLDWFSERNTVLFCDFLVQWPTLEKAKRARKKKLEAFFNNHNVRFAHVIEARIDAIKAATPLTHDEAVITAHGLQVEVLVEQLRLTIRAMKRFDKEIVATAEQLPDYELLFNPLPGAGKVLAPRLLAAFGEDRERYSCAEELQRRTGIAPVTKRSGQSEWVHWRWQCSKFLRQTFVDWAGQTINKSAWAGAYYRQQRT

SEQ ID NO: 330171 - protein, 429 aa, unidentified
MPDLFISAGIDVGADFSFMSIALPNQTFIGKPFKIVHNNFNSLEKTVLAIKEAEELYSMKVRIVMESTGIYHYPLFCYLSDKGFDVAVINPIITKNSTNMNIRKVENDKSASKNLALIGLKPDLKTSVIPSGAVFDLRNIVREYYSLMDDRSAYVNKLLGVLRVAFPQYLGIFSKVTVKTSLVLLEKYPTPDCFLSARKSSVTSIIIKTARFGKAYAEKQYQAIMEAARSAKVFGHCMPSNSAQIRLCISLIKKYDEEIAGILALMHKLVGEHANETFVKQIRLVETIPGAGFLSAATVICEIGDFSVFKSPKQLFAFFGLDPAVKQSGNFIGTKVKMSKRGSAVARRAIFIIALAAIGVTKKGVANNPVLRDYYLRKCQSKPKMVALGAVMHKVCNIIFAVLRDNMGFTLLLPEQHIQKYASSQPIAA

SEQ ID NO: 330172 - protein, 340 aa, unidentified
MNATTYGLDVAKHVFQMYWVDGQTGEIANRRFRRDELIAFLAQRPTGRVALEACGSAHWWARKIKALGHEVVLLHAKFIRPFVQTNKTDAADARAIWTAVQQPGMRTVAAKTEDQQAMLGLHRMRSLLIKFRTMQVNQLRGLLYEFGASFRTGRAAGLAEIRARMAELEDSLPGTMLNGLQDQLMRIDGIEQDIDQLEKQISVWHKQEAACQAIAAIPGIGRLTATALIATIGDAKTFRSGREFASFLGLVPRQSGTGGKVWLGGISKRGDPYLRTLMIHGARSVMYHTKAPTTWQKAIQERRPANVAAIALANKMARTAWAILAHGRTYEKDHISLKPA

SEQ ID NO: 330173 - protein, 339 aa, unidentified
MSEVTLIGIDLAKRVFQLHGARSEGSVAFRKKLSRGQLLAFVAQQPKCLIAMEACATAHGWGREFEKLGHDVRLIPPIYVKPFVKRQKNDVADAEAIVEAAMRPTMRFVAVKTEDQQARAMLFRTRQMFVGQRTQMINALRGHLAEHGLVAARGPAHLKTLAHAITDDDTTLLTEVRELGRMYLEQIEGLNARVAELDAKMRCAAKKADSVRRAQTMPGVGPVTALAIETFAPDLATFKRGRDFAAWLGLVPKQHSTGGKARLGKTSKMGQRDIRTLLVSGAMAVLQAVERFDTPNNGWLKCLLTRKPRMVAAIALANKMARGLWAMMTKQEDYTPSPA

SEQ ID NO: 330174 - protein, 435 aa, unidentified
MSTMTQAPVQVTGGVDTHRDTHTAAAVDTAGRLLGTAEFPATPPGHAALWDWLTGHGQVVLVAVEGTGAYGAGLARFLHAHGVVVVEADRPDRKTRRWQGKSDPVDPEAAARAGLAALRTGTPKTADGKVEALRNLRVARRSAIRQRADTQRQMRTLIVTAPEPLRTELRDRPVKDLITRCATSRPTTGQAGKPATATMIALRSLARRHQHLTAEIEQLDALIAPLVEQINPHLSTLNGIGPDVAGQLLVTAGDNPERLRSEAAFAMLCGAAPLPASSGRTNRHRLNRGGDRQANSALHRIVICRLRWDQRTRAYTERRTKEGLSKKEIIRCLKRYIAPRDLRGPHQPHPASTGHTLTSIGASPALTPLIMRLAATKRTLIPVNFMIDRVGAGRGRVRGSASGVPCGVLSGRAPAGPRGGRGRRPPPASRAAGRR

SEQ ID NO: 330175 - protein, 339 aa, unidentified
MELIAGIDLHSDNGYYGIINEEGERVFRKRLPNHLPTILSALRPFQAHLKSIVVESTYNWYWLVDGLMENGYEAHLANPAGIEQYDGLKHGDDKTDAFFLAELMRLRILPEGYIYPKEERPVRDLLRRRMMLVQQRTSHILSFQGLMSRQTGTGISCDHVKKLGEEDVQGLLGEEYVVLAGRTNIATIRFLTEKIRVLEWAALKRVKLKPEYEKLMTVPGIGIILALTIMLETGDIQRFPGPGNYASYCRCVKAKRISNSKKKKKKGNQKNGNKYLSWAYVEAANFAKRHCPEAKRFFQRKMAKANQVLATKALACKLAKACYFIMRDRVDFDTKKIFG

SEQ ID NO: 330176 - protein, 325 aa, unidentified
MIYIGIDISKATFVAAIPQGKSYRTETFSNDVKGIRRFISKLDPAIHQCVMEATGNYCFLLLYLLDKGGIQASLINPKKIKNYARVMMSVTKTDSKDACLIADFGERFKPGTYKFPSEQIMLLKQKKTVLRQLQKQLTATKNLLSSLEPLPVRDKKCVHSLKQTITFLKKQIKYMHQEMEAVVTDVFERQLKLLTSVKGIGVTLATALIIATGGFTYFDNAKQLSRFIGICPTIEQSGTSVNIRGHINRNGDETLRSMLYVAAWSASQHNKACKECYQRLRGKGKPGKVAMIAVANKLVRQAFAVVTSNKPYSDGFVSTKPDAPV

SEQ ID NO: 330177 - protein, 321 aa, unidentified
MSQPVQQVIGIDVAKQSLDIAGTGEFASFTVNNAEDGFAAILRKLKEISVSLVLMEATGGLESAVACSLQAEGYDVVVINPRQARDFARSMGYLAKTDRLDANVLAQLAQVIDCSPERSRFIRPLPEITRQELKAMVVRRRQLNQMLVAERNRLYPSHPGNRESIAIIIDALESELKRITRQMNKYVITHFQRHAELISSVKGVGEATVATLLAELPELGRLTRREISALAGVAPFNRDSGKMRGKRTTFGGRGSVRATLYMAALTATRFNPVIRAFYLRLLSAGKAKKLALVACMRKLIAILNAMVRDEQKWDIALHNVN

SEQ ID NO: 330178 - protein, 422 aa, unidentified
MPYTIAGIDVHKKKLAVVVADVEVEDEYQFERRWYGSNPEQLRLLTEWLIEKHVEEIVLESTAQYWKPVWEVLERYWKPQCQRREVGQMSGTLHLAQALSNRGRRGRKRDFRDAERLVKRLLSQELTLSFVPDTEQRLWRTVTRTKHQLRRNRVRLQNQLEALLEEAHIKLSSLVSDLLGLSARRMLKALADGETDPGALAALAHERLRATPAQLCDALGACAELNPLYRRLVKMALEDLQLIEQQIGQLDQEIASLLRQHQDAVERLAEVPGLGADSAQQIIAEVGAKAATFVSAKNLSSWVGACPGEEESAGVNRSRRSPKGNRQMRRILNQAANAAVKHRGSIFEILYRRFVPRLGHNKTIGVIAHRLCKLIWIILHNGVRYEERGPAVSEKSRRLRTARMIRKLRILGYRVEPRGNPA

SEQ ID NO: 330179 - protein, 370 aa, unidentified
MLDTTTFVGLDVHARSIKAVSLDVMTGEVRCATFGYDAGAVAGWVRSVDPKARCVYESGVTGFDLQKRLSGLGVDCAVGAVSKMIKPSADRRRKNDRNDAEFLARMLSVGNVVEVWVPDDECEAARDLTRALEDARDDLSRAKQRLSKFLLRHGLVFDERTPTGRRKGNWTRAHWSWIESIRFAERADEEVLAYYVDAVRRAAEEKARLEGLVEGEARKPRWRRRVDSLRCLKGVDTATAADLVFEAGEFSRFGNARSFASWVGLTPSEHSSGESDRRGAITKAGNKHLRKALVEAAWHYLTCSARPKDLARGQDPDRGARRHAAKGVRRLVERREALLARGVHNNKANVATARELACWVWAVGLMAEGA

SEQ ID NO: 330180 - protein, 391 aa, unidentified
MIYIGIDVAKDKHDCFITNSDSKVLFKAFTIFNNLDGFNDLYQKIESVMDDVTKVKVGLEATGHYSYNLLGYLIDKGLPTYVINPLHTNLYRKSLSLRQTKTDKVDARTIASMLMSDVNLKSYSDTSYHNKELKSLTRYRFDKVKERAKLKTSVSRLVCILFPELEKLVPTLHMASVYALLSEFPSAKHVATAHLTRLTNLLSESSKGRYGKDTAITFRDSARASIGSNMPAKSLELKHTIKLIQELDSEIDEIENEIKIIMDEINSPILSIPGINYRMGAMIIAEIGDFNRFDSPDKILAYAGFSPSTYQSGQLDGAYAHMEKRGSRYLRYALYNATKYVCHWDPTFAAYLAKKRAEGKHYNVAISHAVKKLVQVIYHLEKTKQQYIKAA

SEQ ID NO: 330181 - protein, 345 aa, unidentified
MNKTRVIAIDLAKSVFQVCLFDRSMRVQSNRPMSRARLQTLLVRQAPAQVVMEACASAHFWGRWAQSQGHDVVLLPPKQVMPYRQGQKTDGNDALAIGIAAQQPQIKTVAIKTLEQQALQTLKRTQEHLSDQLTATGNALRGLLAEFGLIIAKGPSSLKRRVPAILEDAENALPMSARHALALLWASWQQLVEQRASVEQQLRAYSATLEPCRRLQAIAGIGYKNAVGLYLRLGDGQCFKNGREAAACVGVTPRQHSSGGKVRMGGIGHHCGDQRLRASLITGSHSVIHALRRRAPKNGTEQWLVRLIERRGPGRAAVALTNRNIRTAWAMLRRATEYQPAAMAA

SEQ ID NO: 330182 - protein, 410 aa, unidentified
MEVLYQRCCGLDVHKETVVACLRVVSGGEVVRDVRTFETTTASLMALSEWLAENGCTHVAMEATGIYWKPVWHILDDGDFKLILANASHVKNVPGRKTDVNDATWLADLLAHGLIRASFVPDTQTQELRTLLRTRKQLVREKSSHILRVQKTLEDANIKLDSVITDVMGTSGRAMIEALIAGESNPAKLARLANYRLRASQEKLREALRGRVTEHHRFLLRLHLNQIDALDEAIVTIDQQVQAGIAPFRFAVEHVTSIPGVSDIGAQVIISEIGTDMSRFPSEGHLISWAGMCPRNDESASKRRSNRVRKGAPWLKTTLVQCAWAAVRKKDSYLKAQFLRIKARRGPKKAIMAVAASILTAIYHMLKDGTLYQDLGSNHFQTRSKGQQTKRLVKRLVDLGYDVALTPLAS

SEQ ID NO: 330183 - protein, 429 aa, unidentified
MKFKVYKQKKDFVSGKTIVGIDPAKQHHQASVINQYGIQIAKSFSFPVNLDGFNNNLWKKLHSIVPQFTPDNLVFAVEASCNLWKTIAYYLHDKGYTVLLVNPLVTHYSRPLMNHDFSKTDPKDAFLVAKNAFDANYDFYKSFTPQINRLHQLSITYDKLLKDKNKNLLRIRSLMEEVFPEFLNCLNIDTKTALFLLESYFLPQHFLNLDIEKLAPVITTISRSNYNKQLLLNLKDAASNTIGVNKISEEQSLRLILNSWLLEFKQINNHMAILMDEMITLAKQTDHFKILTSIKGISDNLASQFIAECRDLNNFQHYKQIEKLAGLNLRLSQSGDYIGARHISHIGDRRLLRIIYQMTIQTSTYIPEVRIKFLTRQIKKKAYRKNIIAASSTLLQLIMALIKENRTYEFKQEKLQQLALLEEQYKKSA

SEQ ID NO: 330184 - protein, 387 aa, unidentified
MYFIGIDISKFKHDCAIIDEAGDTVTASWSFANNCEGFSLLKQLLDALDGQKKIGFESTGHYGHNLKLFLETNNFSFMEFNPLLVSKFVRSKSLRNTKTDSLDAVSIAQYLMTVEYKPYPPSFYHMDQLKSLTRFRDSLVRQHSRQLVELTNILDKVFPEFKPFFDGRFSATALYILTHYQSPEKIANMNAKSYEALRKKSRGKFSMVKFAQLKTLAKNTVGRSDAFLLKQMEITIDIENQLDAKIDEIESQILECIRALNPPILTIPGIGELTAAIILSEYGNINKFENPAQLLSFAGLEPGYYQSGLAEHQGHMVKHGSSHLRYALMNACLPLITYEPVFAEYYAKKRAEGKPHRVALTPVAKKLLRVIFTLQTKNISYDPTLIR

SEQ ID NO: 330185 - protein, 372 aa, unidentified
MGESTTWIGLDVHQASVTAAVWAPGASAPTVSAAPAEVAKLVAWVRKVAAGTAVQVAYEAGPCGYPLARAFAAAGLACTVVAPSLIPQPAGGHRQRIKTDRRDARQLVTYLRQGLLTAVHQPTESEEALRELTRARQQLQRDVVRARHRVSKLLLRHGQRWTQTKPWTRAYRTWVRDLVWAEPAVALVCRLYLEALASAEQRVAAADAALATWALPAAVQAPVGALQCFRGIDRLTALTLVAEIGDARRFGSARALMHYTGLTCWEWSSAARRRQGGISKMGNAHLRRALVEAAWHYRYAPNTGARLRTRQQGQPAPAIAHAWTAQTRLHQKAKRLLARGKRPTVVTTAVARELAGFVWAVWHLPTAAPTVA

SEQ ID NO: 330186 - protein, 342 aa, unidentified
MKFYCGIDLSARDCHVCVIDEQLKIVVQQKLRNELPKIIKLLAPYKANLKIVVESTFNWYWLIDGLQAEGYDVVLAHTLGLYLITGAKVKTDRRDAYSLAKLLLVGAVPAAYIYPVETRPVRDLLRRRLHLVQVRAGEYGSLRRLLLRQGILSSKQQEIKTATEAELEQWFEHPLVRLHASQELQRIELYSEQIAELEKTILALAQTERSYDLLLKLPGVGQTIALTILYEAGELTRFANVKVFSSYCRVVPGIAQSGNVSRRGRASKQGNHYLKAAFSQAAVHAVRCYPKVRRYYERQLKRHQGRGRQMICYNIIAHKLAQAAFHVLKEQTEYREELLFGR

SEQ ID NO: 330187 - protein, 354 aa, unidentified
MSQQLSTTIAVIGVDIGKNSFHIVGLDQRGAIVLRQKWSRGQVESRFANMPPCLIGMEACVGAHHLSRQLKGLGHDARLMPAKYVRPYSKGQKNDFRDAEAIAEAVQRPTMKFVATKTADQLDLQALHRVRERLVSQRTGIINQIRAFLLERGIAVRQGQRFLRAELPRILAAPPDVLSPRMVHVIEDLAGDWRRLDERIEGLSGEIEAIARRDAGCERLMSVPGIGPIISSAMVAAIGNGDAFAKGRDFAAWLGLVPKQISTGDRTILGKISKRGNRYLRVLFVQAAWVVLIKPKSWERHGLKPWLEAAKKRLHHNVLAIALANKLARIAWSVLARGRSFEARMTNEANAQPA

SEQ ID NO: 330188 - protein, 361 aa, unidentified
MRIIGCDLHARQQTLAMLETTTGEVVNVTLMHEGNEVRDFYSQLPRPVLVGIEATGSMQWFLNLMEELGIECRVGHPATIRAAEPRKQKLDRRDAELILRLLAENRFPAIWLPRKELLDLRALLLHRHQWVRIRTRIQNALQAIALANGLRRGPGLWSYDGQAKIAFLPLPPHASYRRSALQTLYRKMKEEIENLTKQVAEQAEQRSGARLLMTHPGVGPVTALATEVFLGDPGRFVDGKALASYVGIIPREYSSGGTQRFGGVTKQGSPLLRFLWCEAGAHAVRRDPALQRFYRRKLVQKGLGKARVAVARKLGIRLWIMLRDEIDYEEFCRRGQKPQSGAACAGMLEVGNGANRHRPID

SEQ ID NO: 330189 - protein, 359 aa, unidentified
MNKLTKIERFFKETSFTADDELFVGVDVHKKSYHVALYLNDAPSIDFVMPAKKEQLGQTLQPTLPALRQVTYETGFSGYGLARSLRKQHLPASVAATSKIPRSSAGEDKTDKLDSKKLAAYAAKGLLKTVPIPSIKQEADRQLYRMRHRQARNLAKVKNQIKSFLMMHDIEEPAGLGPWSHKGIAALKTIRLHPTLRLSLDELLGDLDYYMSRLKALDQSLAEHLDKGVLARRMALLKTHPGVGPVVACQFATELFHYRDFHSTREVYKYLGLAPRVHQSGDRSVRGSINKVSNARLRSNLIQAAWCWIRVDVNAKKTYLRFLNNNGGIKQKAITAMARKLSGHLWMMLIKDHPYDPTK

SEQ ID NO: 330190 - protein, 355 aa, unidentified
MNDRKYIGLDVHQATISVAVLDSAGKLVMEAILETKAETILQFIHGLRGSLHATFEEGTCAAWLHDLLKPHVAHVLVCDPRKNALIKVGNKSDRIDARKLADLLYLDKLHPVFHGEAGNRALKELARSYLTLTRDTTRVMNRLKALYRSWAIPCAGQRVYAPRYRSEWLAKIPPAGVHRRAEIYYQQLDALRSLREQVRRDLLAEGRKHKAMNLLRRIPSIGPIRAVLLIALMQTPHRFRTKRQLWAYCGLALKTSTSGEYQIVEGRLRRSRKFLAIRGLNTNHNHDLKNIFKGAATRAAAVPGPFQDFHAGLVARGMKPTMARLTLARKIAAITLIVWKKGVDFDAEHLKQQAA

SEQ ID NO: 330191 - protein, 388 aa, unidentified
MRQVCGLDVHKDSVFVCILNEDGVVFQEKFGVLTTELEQMLGVMQAHDVSEVCMESTSIYWMPVWRVLEPYFELKLVNPFFIKQLPGKKSDVKDAEWIATCLLKDLVKGSYVPEDRIQQLRQYDRRIFDLNKDIVYKLTKLDAALQRCNIRISNLLSTTDSKSYKEVVRMLSEGVTSPDELLKAIYPRTIKKHGRDTVVGSLTGVITDTDIDVIRQLRDEVALAEKHKDECQSKMETLCRQWFPDEYELLQTIPGVKARSATSILAELGNDVSAFPDAAHLTSWCGLKPRNEESAGKIKSRKITHGNKYLRKTLIECSWAARRTQGSFYSRFSYHQTIVRRKNSLKVQVAVARKMLSAIWFILHDHVPYKDYTPPASEETSSDIVTTE

SEQ ID NO: 330192 - protein, 327 aa, unidentified
MLFVGLDLHKNYSEFAIMDNDGKIIEHGRMKNNLEDMDRFSKSLPPSTQIAIESSSTWYWSYKLLSSRHKVSLSNPVKNKAIASAKVKTDKVDSTMLATLLRGGFLAESYVPSRDIIELRELVRHRASLVKERTKIKNLVHSYLLMNNIHIDAHPFTKEFIEELRRIDDGRVRSYLRLIDALNAEIREASAAIVDKAKNNKYAKLLMSIPGISYYSSLLIASEIGDISRFKDSSSLIAYAGLAPSTYSSGGKTYHGHITKQGSKYLRWVLNQCTRVHIKTEPDGTVARFYSRLKSKKGDHKAIVAASAKLLKIVYWVLKENRPYHHG

SEQ ID NO: 330193 - protein, 404 aa, unidentified
MSVHVAPVTSSTIVVAVDVGKTSAMLSVTDCARKRVFGPVEFSMTRSGLVATVHRVEAVVVASAQVKVGVEAAGHYHRPVLDYGWPTGWEVLELNPAHVAEQRRVVGRRRIKTDAIDLEAITDLLLAGRGQLITEREVLIGELSAWAGQRSRRVATRSATKNQLLAQLDRAFPGLTLALPDVLGTKIGRLITAEFADPARLCALGVSRLIRFAAARDIQLRRALAERLVTAAREALPTRDGVVARRVLAADLGLLADLDTQIETAERELAALLPASPYATLTSVPGWGVVRVSNYAAALGDPDRWPGPRQIYRASGLSPMQYESAGKRRDGTISREGSVALRRALIDLGLGLWLTEPTAKAYAAELKSRGKPGGIIGCALAHRATRIAFAMVRDHTSYDPSRWA

SEQ ID NO: 330194 - protein, 451 aa, unidentified
MKDLSMQIINVRSAGIDVGSRFHVVAVDQRSENVRQFGVYSEDQQAMIEWLKLHQIQSIAMESTGNYWQTLFDALQRAGFEVQLVNGNQIKNVKGKKTDVLDCLWIQKLHSLGLLNGSFLPAAEIQSLRTYHRHRIHLIEQCSRYINKMQKAMRLMNIRLDVVLNDVMGQSGRLIIEAILAGERDSDKLASLANYRVKKSRGEIAKALIGNWRDDLLFELRRCLTLHDVYCQEIKECDHQLEIAIKSLLPQSQSVADFKYAKATKQRNKYMPEFDIERFSWQYYGVNLMEIQGVGNGTVLSFLTQVGDRMDHFPSSKHFCSWLRLAPNNKITGGKIISSRTPKGKNPLSLALRQAANAIGNQKEGELVHFFKRVAYRKDRASAITATARKLAVIIYNMVTKRESYKPSNPVPLSDKVKNKIIKNIRTRVEALELTKEQLNFLFQGASFSTA

SEQ ID NO: 330195 - protein, 376 aa, unidentified
MKKKTKAVSDSEQDQASERRSTSKAGVKLGLDMHYRQVTVTMQEEDGPIKVLGKMSHDGFSHWVEKKLQAGFELYSCYEAGASGYWLHRDLEGLGVKNLVVTPKPMGQDRHQKTDRRDSAELVDCLDRYLRGNSKALNPIAVPSAEVEEKRALIRYHRQLMADRGRCEARGKGLLCAQGIEVRGKWWQSESWQELKTHPRLKGWMQAQLESWRKKRLALEQEQQKLRRQIEALAPPLLPKGVGAYSAVALEYELKGLGRFKRARALSSYTGLCPGIHSSDSRGREGRINRCGNAAVRWNLVEMVWRLLKWQPQYEPVRQLARGLVKSKRARKRLAVKAARQLAIDLWRLHTGRVTAQELGLIMQPTALRPSSKAQP

SEQ ID NO: 330196 - protein, 342 aa, unidentified
MESAVTMGLDLGKSVFQVHGVDAGGAVVVQRRLTRGKLLHFFGKQAPCLVGMEACAAAHHWGRELRKLGHRVRLIPPRYVKPYVKRQKNDAADAEAICEAVTRPNMRFVEIKSCEQQGTLVLHRVRLMLMRQRVQLSNAIRGHMAEYGLVAPAGRNGLQRLIAILGNPDDERVPAVARASLAQLVCQFGLLNDQVLENDRRVRASARATELGCRLMEVPGVGPVLASAMVATVPDPAAFKSGRNLAAWIGLVPRQNSSGGKEKLGGITKQGDRYLRQLLVAGALAVIQYAQRHGTKRPWLVHLLARRTPKIAAVALANKMARMMWAMMMTGERYREPTVAAA

SEQ ID NO: 330197 - protein, 343 aa, unidentified
MKLTRVGVDLAKQVFQVHGVDRAERAVWCKRLKRSRWIADLERDVEPGCEIGMEACGSAHHWARLLQSKGYRVKLIAPQFVKPYVKTNKTDANDAEAICEAMSRPSMRFVALKSVEQQDLQAVHRVRSSLIRERTAKANQLRGLVYEYGLVAPQQISSLRRAVPQWLEDAENGLTVRFRSLLAGLYRDLQQIDERVRELDQEIAAIAREHEAVGRLEQLRGIGPLTASALYALVGDARQYRNGREMAVSLGLTPRQHSSGGKERRLGISKRGDKYVRTLLIHGARSALRAAPGKTDRLSRWALALAERSHPNVAATALANKMARVAWAMLRHGTNYEPEHVAA

SEQ ID NO: 330198 - protein, 315 aa, unidentified
MNHDNESFVGIDVAKQHLDVCILPQKKRFQIPYGDEGLKQISDQLRELQPTLIVIEATGGYERRVAAELLQAGLVLAVVNPARVRQLAKAHGTLAKNDRIDAYNLALFAQIVRPAARVKTSQKQAELNDLVARRRQLVEMIVMEGNRLEKLPADSVRQSIAQIMTLLQQQRQEIDNKIAEHLRSDHQWNGKVQLLSSVPGVGPVTASTLVAELPELGKMNRRAVAALAGLAPFDHDSGAWHGRRFIRGGRKSVRVALHMATLTATRCNPLIKSFYERLIANGKSFRCAMVACARKLLILLNSLVKENRSWTPLPG

SEQ ID NO: 330199 - protein, 407 aa, unidentified
MNPLYVGIDVSSKSNVVYFMLPDGSKHCNFSVANSHTGSSQLVKRILSAMTSCSLDTVLIGLEATSVYGDNLVYFLREDAALARFNSKIHVLNPKQVSKFKEAYNDLPKNDLIDSFVIADCLRFGRINKEVYIGDYRYKALQNLTRARYFAVSNLIKEKQRFMNILFKKYSTMTQEKVFSDTFSTTALAVYDEFESAEALADMDLHELTAFIMKGKNRFPNPNAVAKAIQKAARSSYRLPKTVNDSVNQVLSISITSIKALEAQIKEFDKAIATQMELLPNVLISIPGIGPVFSAGIMAEIGDINRFHNQAQLAKYAGLAWKQHQSGDFEAQTTRLINSGNRFLKYYLCEAAFSLVRCDKEYSDFYHLKYKEVNRYQHKRALALTARKFVRLVFRLLKDNRLYTSAE

SEQ ID NO: 330200 - protein, 343 aa, unidentified
MQGVTTVGLDIAKSVFQVHGVDATGQVVIRRQLKRRYVQAFFEKLPPCLVGIEACASSHHWSRELKSLGHTVRLMPPAYVKPYVKRQKNDATDAEAICEAVTRANMRFVATKTPEQQSGLTLHRTRHLFIRQQTAVINVIRAHLAEFGIVAPVGRRGVEALLNVVTDASDQRVPVVARMCLAALGAQLRRLKEQILEFDRMIMAWHRSHEASRRLDAIPGVGPVLATALVASIADPKAFRSGRNFSAWIGLVPKQHSSGGKDRLGSISKQGDRYLRSLFMAGALAVIRYAKIHGAKHRPWLTALLARRPIKIAAIALANKMARMVWAMMARGERYKEPIALAA

SEQ ID NO: 330201 - protein, 450 aa, unidentified
MGRPQVIDDEERERVYEKVAAVDVAKDSGMVCTRLPHPSRAGTRQSTVWTVQARMGAIRELGRQLARGGIQTVTLESTSDYWRIWFFVLEGCGLAVQLVNSSQAKNLPGRPKTDKLDAMWLARLTEMGLLRASFVPPAPIRALRDYTRARTRLTQERTRCWQRLEKLLESALIKLSSVASKLTTLSAQDMVRALIAGERDPQVLAALARGKMKAKHDDLVEALDGMFGDHHGELAQLLLDQIAFLDSKIAELTARIQEQAAAQPGAWGVNADGTTGPGAGTSPGDPVLPVVQRLAQVPGISEDLARSIIAETGLDMSRFPDAAHLVSWAGLCPRAHQSGPRARNGKKGRGNGYLRGYLGQAAIGAAATATFLGERYHRIARRRGKAKAQVAVARSILVIIWHLLASPEARFTDLGYGYYQARTDKDKRIKNHIRQIEALLGHPVTIAKAA

SEQ ID NO: 330202 - protein, 351 aa, unidentified
MPRRSTVRAVSTIGIDMGKNTLHMVGLDSLGAIVLRERVSRGRIKSRLANLPPCLIGIEAGMATHYVARELAALGHDVKQVPPAYAKPFRQGHKNDFRDALAVAEAVQRPTTRFVPPKSNEQLDLQALHRVRSRLVSQRTAVINQIRGFLLERGIIVRQGLRLLRQLLPDILAKRTNVLSPRMVRIVSDLAGDWRQLDDRIETVTDEIETLAKADDNCRRVMTVPGIGPIISSAMVAAIGNGSAFAKGRDYSAWLGLVPKQMSTGDRTILGRLSKRGNSYLRMLFIQAARVILVRPANWPKHGFGVWLVRAIQRLHPNVLAAALANKLARIAWTVLAQQRSYEARVTKAEA

SEQ ID NO: 330203 - protein, 403 aa, unidentified
MMNAVGIDVSKGRSMVAVARPGEVVARPFIVSHTQSGIHELIDQLSSLDGETRIVMEHTGRYYEPMAQRLSDAGFFVSAVNPKLIKDYGHNSLRKVKTDKADAKKIARYTLDNWLDLRQYTGMDTLRKQLKTMNTQLDFFTKQKTAAKNNLIALLDQTYPGVNAFFNSPVRSDGSQKWVDFAKSFWHVDCVRTLSAASFMQRYQKWCHRHGYNYQPDKAKAIFDTSTELIAMLPKNAMNKMLVMQGIDQLNAVSAIIEQLKAEMNTLASDLPEYSVVMAMPGVGPSLGPQIMAEIGDISRFPHKSALTAFAGVDPGANQSGDFEAKSNHASKRGSPRLRKALFMVMDCLIKTSPPNDPVYCFMDKKRSEGKPYLVYMTAGANKFLRIYYGRVKAYLASLSPAE

SEQ ID NO: 330204 - protein, 329 aa, unidentified
MSDVVVGLDVHLKNTQGTIMKLNGEIVKQEKFTTCKESLKQFLGDVPIGSKVALESLGFCWPWIDYIEKLGYEALLANPVKAKCRAEDVKTDKVDSEVLAHLTRMDWLPTCYVPNSELRWLRSLLRHRAFRKKMSTALKNRTRSEMSKRDIRLNVNLGTKKGRKATASLDVFEVVQNIQLLEALEKQTRDIEAMLRRKYGRLEPVQLLMTVPGIGFLSAVTLYAEICDVKRFSGPEKLAHYAGLVPSVHQSADHAWMGRETKGNKWLKWLMIEVSWAHVHFCPEGRLARVFEAACRRKGNSKDAIKVVARKLVNVVWAVWTYGQPFMVE

SEQ ID NO: 330205 - protein, 345 aa, unidentified
MEQQRQYVGIDLHRRRSVIVRRSAAGETLEVTKVDNADLLAFEQAVMAAGEHPEVVLEACYGWYWATDLLEELGCKVHLAHPLGNSWGNRRVKNDTRDAEDLADLLRLGRLAEAWIAPPEVRELRELVRYRAKLVCLRTNCKLQVYAVLAKEGVNVPMTDLFGVLGTELLETCRLSTAYRTRVESLRDLIEVFDREITKLEGDVRHELRGHAGYQAIQQIPGVGPLFASVFVAEIGDVTRFRSPAQLASWAGLTPKHHESDLTVHRGPITKQGSRLVRWAAVEAAQRQASGTKLRADFVRITAHHGDNAGARKIARVAVARKIVTLVYYGLRDGTIRSKAISEAA

SEQ ID NO: 330206 - protein, 396 aa, unidentified
MTMTPQVQSNVSTSDLHISLELSLETWKIGFADRLGRNPRLRDVPAGDFQLLRTEIRRAKKHFQLPEECPVYSIYEAGRDGFWIHRVLIALGIESMIIDSASLETTRRKRNPKTDRIDARKLVSALMRYRTGDKTACRVIRVPDHVAEDARHLQRELKTLKAEKTQHTNRIGSLLATQGVSKSINARFVETLDATHTGDGRPLGDELRERLKREFRRLQLAVEQIRELQQQQAKILRQAEKDHTQVARHAHLAQQLMMLGGIGPVSSWTLSAEVFAWRDIANRRQLGALAGLTPTPYNSGSGEREQGISKSGRGDLRSLMIEIAWGWVRWQPDSELTKWYQRRFVDNKRSRKQGIVALARKLLTALGKYIREGEIPAGARLKKGPLRHTYMPSLSA

SEQ ID NO: 330207 - protein, 406 aa, unidentified
MAAVMIGVDPHKASHTAVAIGTAEEPLGELRVRASAAQAERLVAWAAPWPERTWAVEGAGGLGYLLAQQLVAAGELVLDVQPKLGARVRLLATGASNKNDPNDARSVAIAALRSAAPRPVAAENHAAVLKLWSKRHHDLGRTRTQVACRLHAVLCELVPGGISKQITAGKATRVLESIEPAGAVALARCELAAEFLDDLRRIDAQMRDTKKKLALVVRASGTTLTEIFGVGPVIAATMIGYVADASRFPSRDNFAAYNGTAPVEVSSGNRKIYRLSRRGNRRLNHAVHMAAVTQIRYRHSDGRAYYDRKLAEGKTPKEALRCLKRRVSDAIYARLQADARRAAAFARTAGPGGQPGNDSVASAAGSHPENQLFGQATPEPATTLRRPDGHPGTRPAPAPKKNRKGP

SEQ ID NO: 330208 - protein, 356 aa, unidentified
MEKLTTVGIDLAKDVIAVCVLDGHGAVIERRVLRRDAFERWAAQLSPCSVAMEACGSAHHWGRWFSAHGHTARLIAAEFVVPFRKGGKNDGADAEAIAVAARQPTMRFVPIKTVDQQAILAWHSVREGWKEERTALLNRVRGLLGEYGVVIARSADRFLAALPKLSEDNRLPDPVRALLLEAREQFVALHARLARCDAQIAAHARNSPAAQRAGELLGVGPVTSSALVATVPDAKVFKSGRQFGAWLGLTPRQHSSGGKTRLGRISLRGNVYVRTLLIQGARSTLQSAINAEPSQANRLERWIIALYARKGYHKTLIAIANKHARMLWAMLAKDEHYDASAWQRHPMNQPCASVTQ

SEQ ID NO: 330209 - protein, 415 aa, unidentified
METQKSKVCGADIHKKFLIATILTRDGTKVTKRFGMVIDDLLKFKTWVIENRCEQVAVESTGTYWIPIHSVLDGSVDLIVANAYKIKHTPGRKTDVIDSEWIAELCLNGMIEPSRIFLREDRELRRLTRAREGYVNDMNRVKNRIHHVLESCGIKLSSVLADIFGKSGRYLLNSLLDGVSIEEIIEGIPVKRIRKKSDQIKESIKGSLDITQVILIRGGLDQMESIQKRIDELDKEIKSRVANKKEDLRIAMSIPGIGFTAATIILAEIGDFTDFDKPEQLAAWAGLVPAVYQSADKLVTGNITKHGSRHIRRILIEVAKVIALTNKSTLKRFFLRVQSKKGHNVAAVALARKVLCILHHLLINREMYQDDSAKKTKSINLDLSSKQTMISFEEMIQSLVRAGYEVRKRSSGTGG

SEQ ID NO: 330210 - protein, 342 aa, unidentified
MNEITRTAIDTSKAVFTLHGVDGEGRAVLRRNVRRKELLRFFEQLPSVEVVLEACGGSHQWGRSLMALGHRVRLIPAQYVKPFVKRGKNDHNDAEAIAVAAAQPSIRAVPVKSVKAQARTMLLTVRELLVRQRTQLANALRGHAAEFGLVAPLGDKGLASLESEIATATEAEVPAEAKGAMALLGREITRIEARLAEIEVKLLRQHKADPTSQRLAGVPGIGPIGALSFALRVEPGQFRSGRHFAAWLGLVPRECSTAGKQRLGGISRAGDERLRQLLVLGATAVIRYAKPGRPSASPWLLELLKRKPRKVAAVVALANKMARIVWAMLANGEAYRPHPATA

SEQ ID NO: 330211 - protein, 308 aa, unidentified
MGQYVGLDVSVEETSVCVIDGAGKTIRELKVPSEPDALLAALTEDACAIQRVGLEAGPLSQWLYGALAEAALPVICVETRHMKAALSAQIQKSDRNDARGIAQMMRVGLYRAVHVKTLASQKRRMLLTSRRLLQAKALDIENDLRGTLRNFGLKAGPVRTVKFEARIREPVAPHPDLAVIAEALRIARSVLREQIAVLNRQLLAVVREDEPCRRLMTVPGVGPVVAFAFRATVDVPARFKNSKAVGAAFGLTPRRYQSGEIDRMGRISKCGDAMMRILLFEAAQALLTRTRKWSWLKAWGMKLPATGV

SEQ ID NO: 330212 - protein, 408 aa, unidentified
MNEEGFSPADIEVFVGVDMAKGDHYAQAISSAGDELFDRPVANDEAAIIRLIDDAQAHGRAVLVVDQPASGAQLLLALARARGVPVAYVTGLAMRRAADLYAGSAKTDPRDAWVLADYAQRNADRLTWLDVTDDLLTALRVLNGRDVDLATDANRVSNRCRDALVAVSPALERALGDRLGQAGIRDLLARWSTPTALRQAGKARVRKMIARRSPRLADKVADAVFEALDAQSVTLPGEATWGQVIAELAADLDRIHTRRDELAGQIEEVFLEHPLGAVLVTLTGFGPRTGARTLAEIADPNRFADGGRLAAYAGLAPVDRRSGRSLNSTTRSRSGNHRLKNAMFLAAFVAAQHDPAARSYYLRKRDEGKNHNAAIVCLARRRCDLILSMLKTATPYDKTRHQELPAAA

SEQ ID NO: 330213 - protein, 405 aa, unidentified
MNAVGIDVSKGKSTVTIRRPGDVVLMPPCDIPHTQSAINALIEQIKSLDGETKACMEHTGRYYEPVANWLSDAGIFVSAVNPILIRDFGDDSLRAPKTDKADSKKIARYALDRWAKLKQYGSMDKTRSQLKTMNRQFGFYMDQKTSMKNNLIALLDQSYPGANDFFNSPARSDGTQKWVDFVYTYWHVDCVRSKSLQAFTEHYQKWCKRNGYNFSAAKAEKIYQSSSDLIAVFPKDDSTKTLIRQAVTMLNTASQTVESLRLKMDQTAATLPEYPVVMAMNGVGPSLGPQLMAEIGDVTRFTHRESLTAFAGVDPGKNDSGKRNQKSVRTSKKGSPSLRKTLFQIMDGLIKRSPVDDPVYAFMDKKRLEGKPYYVYMTAGANKFLRIYYGRVREYLASLEEAKES

SEQ ID NO: 330214 - protein, 438 aa, unidentified
MVKKKNEIGVYKEKKKSVEVESLYGCCCGIDVHSMIIMACLRTGNKNEVREYKAFTSSLYEMTAWLKSTGCEMVAMESTGSYWKPLMNIFEEEGLSSIVVNAQHMKTVPGRKTDVTDAQWIAQLLQQGLLSASYIPDRDQRELRDLIRYRKSIIEERTRETNRLIKILQGANIKLKETISDINGVTAQRLLSLIRTGEKIDLDKVIACKTGNIAAKPEELLMAMEGYCTDLQKDLIDEIIDNIKSINARIKRLEALLDKHMADPFVEAAKRLEVIPGIGNDSARTIVAEIGIDMSKFPSAKHLSSWSGLSPGNRQSAGKRYSGKTCKANKTLKSTMVQCSNAAVRNKESYYSAQYARLVRTKGHKKAVVAVAHSIMIAVYYVLCGESFKDLGADFYNNYNRDKKLNSHINQLRKLGFTKEELIEKLEVSNLEFKVKTA

SEQ ID NO: 330215 - protein, 349 aa, unidentified
MGMVGGLDLHRRQITFDVVALESGEEWRGRVWQPDRGRFRRWLRDDVARRANGRSVALAVEGCTGWRYVVEEIEAAGFEAHLAEPADTQAARGRKRRAKTDRSDARLLRDLLVAGELPASWIPPELVLEWRERVRLYVSLVNQRTVWCQRVHAELYHHGVAVPQGAIRTVKTRAMLADAGLQLSPAARERIDAGYRMIDATDLEAQPLKRELQRFGARQPACRALVDAQYGIGGLIAVAVWSELGDCRRFCRSEQVVRHTGLDVTVDSSDRRRAGGFLSRQGPETLRWALYEAAKNSSHHRSPDHHYYAQVKQRHDGKIAAISVARQLARRCYHVLRNLDPDIVYAIPN

SEQ ID NO: 330216 - protein, 349 aa, unidentified
MRCFQPPAETRFYAGVDLHARSLFLSILDRDGQERLARNLTAAPAPFLKAVEPFRDGLVVGCECMHCWYWLADTCREHAIAFVLGHAWAMKAVHGQKTKCDRHDAQAIARLLRGGNFPLAYAYPQERRGLRDLLRARLRLVRQRAQLYGHVHTARRQANLPPVSSDVKYKSKRAAITADIADPFVRRRVETDLALLEPLDTTIRRLEAEIEQAAKEHYSTQLAVLQTAPGVGAVLSLTILLEIDTIDRFDTRQQFCSYARLCGAVQESADKRVGIGNRKAGNAWLKWAFSEAAVLAAQKDEHIGALLQRLASKLGKAKALSALAHKLGRAFYHMLHTKEVFDIQRFARR

SEQ ID NO: 330217 - protein, 381 aa, unidentified
MTTTATHNGHDTTPERVLFVAFELSEKTWKLGFTTGHGQKPRERTVTARHHEHVLNEIAQAKRRLGLPETAPVVSCYEAGREGFWLHRFLQAQVITNHVVDSSAIEVNRRRRRAKSDGLDVRKLLSMLMRYAQGERQVWQVVKAPSVEAEDQRHLHRDLETLKQERASTTTRIKGLLSSQGLRVTSLTKLPEQLEALRLWDGSPVPPGLRRRVLRVYAHHTFLSEQIAAVEAERRAQLHASTDASIDKVRQLMLLKGIGINGAWVLVMEFFGWRAFKNRREVGGLAGFTPTPYQSGESAREQGITKSGNRHVRWMTTELAWSWLRFQPESALSVWFRERFGSGGKRLRRIGIVAVARKLLIALWRFLETGVLPEGAGLKEG

SEQ ID NO: 330218 - protein, 481 aa, unidentified
MKKRSIYQQQSQELMRIYEAAGNSKKVLVVAIDYAKKEHTIMLCNGNGDILRKPFGVWNNPEGVNYLLEQVQKTCTYHKIKTRHAFFGGEDSGSYTENFAQCLRERGYLVAGVNAQDAKKQRENMQASTDRLDLLGIARMLISRRGNCAPSQSGAYRNLRTLVRHRRKIVTLSTEERNRMHCLVDRLFPGFLEERKSGLTPFHEPSLRVMESRFSANQIKRRKQTTLVDMLARAGAQKPQQKAKQLQTYAGNVLQPPRDYVATWQTSLTQHVSLYRCLLGNIASLEREMAIWLAQTQGAFLMSVKGIGLVLAAGVTAEIGDPVTQKPVGNLTSYSGVIPRVNQTGGSDSSPHTGSVAKRCNRILKDYLVQSASHQGLHGVDDLMADHKRREANGQHANFGIARRYLRMAMHMMRLSHIYLPPELRVNATSEARGEYYQMIWPYLLEKWKRYDAHDVAFDSEHSLGQWRDMVQSIYKITLKI

SEQ ID NO: 330219 - protein, 363 aa, unidentified
MFASCDRKTTLFVGIDVHRDTHTAVGVSPFGEKLFEITVGNYEKDFRSLRQKVDEVSEKALLSPFYGLEDCQSYGERLAAHLVGEGLRVVSVPPILVDEKRKRETHPEKSDPLDALGVARVMIQRIDMLPVFTVTEESRKAKQIKELSMDRDFLVSERTRLKNQLHTLLHRLWNTEYRVKFKDPFSQKALRYWRAQTPKESDPFLARSMRRKVKRLQDINEEVVELEHELETLLKESGHTLTSASGIGTVIASEIVGEVGDVNRFHSPAALAKYAGCAPRECSSGKTNRHRKTRSGNRRLNRAFHRMALSQISRSGNEKARAYFQRKIAEGKSKAQALVCLRRQLVNVVWMMMKHKTEFRLSA

SEQ ID NO: 330220 - protein, 342 aa, unidentified
MKDTMIGVDLAKSVFQLHATSLTGELKFRKKLSRQGFVRFMEEHGPAVVVMEACGGANFWCRVLVRLGHEVKLIAPQYVQPFVKRQKNDAADAEAIVIAAQRPEMRFVEPKTEEQQARAVVFRTRERLLYQRTELINVLRSILYEHGLTFPAGFEQIGRIETALRDSSIALSAIVRTECLDLIQQITEKTNRINRKTQMAKELARDAETARRLQTMPGLGPITALAIETFAPPMETFKCGRSFAAWLGLVPRQHSSGGKARLGRISKAGQADIRRLLITGAMSRLNWLGRKRIQPGSWLAKMLDRKPRLLVAIALANKMARAIWAMLTKEEDYRNLAHPAAV

SEQ ID NO: 330221 - protein, 412 aa, unidentified
MQAIIERCCGLDVHQETVVACVLVGAPGVHPTKEVWTFRSVTRDLEALRDWLQELGVTHVGMESTGVYWRPVYAVLEGCFELIVGNARHIRNVPGRKTDVKDSEWIADLVRHGLIAKSYVPPRPLRELRELLRYRRKLVESQAAERNRLLKLLETANIKLASVASDVFGVSGRAMLKALIEGSASPEAMADLARGLLRRKRADLILALDGRLEEHHRFLLAMQLRRLEAIEADIAALDLRIDERLEPYRAPHTLLMQIPGVDWVVAAVLIAEIGVDMSVFVSVYHLSAWAGVCPGNHESAGRQKSGRARKGNVHLRAILVGAAISASRVKGSYLKDKFHRLKARRGGLRAALAIAHKILVSAYHMLAKNLPYRDLGEAYLDQISQTRTVANLKRRLERLGYTVTLEPKAAPA

SEQ ID NO: 330222 - protein, 358 aa, unidentified
MQIIGVDLHTRQQTVAMLNVETGEVVEKTLQHEGDSIREFYSTLPGPTRVGIEATGSMQWFLELMEELGIDCQVGHPAKIRAAEPRKQKHDRRDAALVLQLLIENRFPAIWMPSREERDARALILYRHQWVRIRTRVQNALQAIALSHGLRRGSSLWSEAGQHAIASLLLTRYAAERRTALQSLYRHLEEQINDLDRKVEELAWQRPQARRLMTHPGVGPITALATETFLGEPKRFADGKAVASYVGLIPSEHSSGGRQRLGRLSKQGNPLLRFLWCEAVGHAVRKDAELQRFYQHKLVQKGLGKAKVAAARKLGIRLWVLLRDQIDYQEFCRRGQLRQKHGGAHAGVPAREHDPAQQ

SEQ ID NO: 330223 - protein, 427 aa, unidentified
MFTAAFASLTKMNFNKLLSGNITKYQKEGFIMISVGIDVSKGKSTVCIMKPCGEILESPFDIGHTADELDSLISLIKSFDEETRVVMEDTGHYHLPVATYLSSHNIFVCCVNALRMKKFCSQSIRRAKTDKIDSIKIASFGITYWNELVKAYPSNVIYDELKFLARQYYQVTGMLVKSKVNFSNLLDQVMPKINDVLSNQGENHKLTEFVNRYIHFQNILNMGEMKFTSDYCKWAKKKGYRLNERKAAEILALAQNGIPTLPNSQSVKIAVSEAVKLIHSIEESRNTILAQMQDLCNTLPEYSVVKEMDCIGDTLAPRIIAEIGDVRRFKNKHSLIAYAGIDAPPYQSGAFHASERHISKRGNSYLRKTGYEIMQSLIKHKPADNAVYDFIQKKRSEGKCGKEAMIAGLNKFLRVYYGKVMEFYSEH

SEQ ID NO: 330224 - protein, 362 aa, unidentified
MAKLKRRPNLTGEDSINFYNSTHRHYCGIDLHARSLYVCILDQQGDTLLHKEIPAKPEPLLHLIEPYLDELIIGVECMHCWYWIADFCEDQGIAFILGHALYMKAIHGGKTKNDRVDSYKIAALIRGGNFPLAYAYPRRMRATRDLLRRRTGLVRHGADLKAHVVNTTSQYNLPPNKVNLKNVSAREQLGRTFDDPLVQRNIDLDMAVLECYHRELSQVEWLLEKQAKKHQPTYYHLLTTIPGVGRILALTILYEVGDIRRFESVQKFASYSRLIKCKAESAGKTYGTQGNKIGNAHLKWAFSEAAVLYLRGNPGAQKLLQRFQKRMSKAKALSALAHKLGRAVYFMLKNEKVFDEQRFLTS

SEQ ID NO: 330225 - protein, 353 aa, unidentified
MSSKANSTVATMGIDIGKNSFHIVGLDRRGAIVVRQKWTRGQVEARLANMPPCLIGMEACVGAHHLSRRLHLLGHDARLMPAKYVRAYSKGQKNDFRDAEAIAEAVQRPTMRFVATKTPEQLDLQALHRVRERLVSQRTGIINQIRAFLLERGIAVRQGLRFLRAELPQVLAKRTDVLSIRMVHVIEDLAGDWRRLDERIEGLSTEIEALARQDRGCKRLMTVPGIGPIISSAMVAAVGNGAVFSKGRDFGAWLGLVPKQISTGDRTILGKISKRGNRYLRVLFVQAAWVVLIKPQTWERYGLKQWIAAAKKRLHHNVLAIALANKLARIAWAVLNKDRDFDCVRTNVAPRRA

SEQ ID NO: 330226 - protein, 369 aa, unidentified
MTAPNYVDQPLPVIVGVDTHQQTHHAAVLAGTGTLIATREFPASPAGYEQLWAWAREHADAAGMAGVATVGVESTGSYGAGLAQFLLTTDPTDGWAAGVDVREVIRPEKTVRAMRGKSDPIDAEAAARAVLAGTATGRPKVKTGVVEAIRALVVARDSAVKQRTAAASQLRDLITTAPEPIRGELLGLSTARRVTRVIKYRPDTTDLSDPLQAVKYALRALGRRIQALEAEIAETDRALAPLVATAAPRLLALPQVGTNTAAQLLITGGQNIDRMRSEAAFAKLVGVAPLPASSGKTTRHRLNRGGDRAANSALYLLVCRRLATDPATQAYMDRRSQEPRMGKPDIIRCLKRYAAREIYTALRADLLTA

SEQ ID NO: 330227 - protein, 354 aa, unidentified
MNKDNIKYAGIDIGDKTSLVRIIDGEGDFLKELRIPTTRKALAQEFSEIAPMQIALEVGGHSRWMSQDLKKYGHDVTVANPSKVRLVYKNPRKSDRIDAQYLAKLLRFEPDLLESIVHRSNASQKDLALLRSRDGLVRARTSLINQARGIVKSFGERLPSCKSEAFAKKVREYIPTDLKSALNPIVDTIQALTEQIKAFDKEIERLCKEEYPETKKMRQIKGVGPITALAYVLTIEDPKRFYKSREVGAYLGMVPKRSQSGEVDPEKRITKTGDKYLRRMLIGSAQYILGPFGPETKLRNWGLRLAERGGKRAKHKATVAVARKLAVLLHKLWLSGEDYHPFYPERKETDANAE

SEQ ID NO: 330228 - protein, 398 aa, unidentified
MTESSDYESVQVFIGVDVGKDTHHAVAINRSGKRLFDKALPNDENKLRSLISDLKQHGQILLVVDQPATIGALPVAVARSEGVLVGYLPGLAMRRIADLHAGEAKTDARDAAIIAEAARTLPHALRTLKLADEQIAELSMLCGFDDDLAAQTTQASNRIRGLLTQIHPALERVLGPRLDHPAVLDLLQRYPSPEKLASLGEKKLAAQLCKLAPRLGKRLAADIAQALAEQTVVVPGTNAAAVVLPRLALQLITLRKQRDEVALAVEQRVLAHPLYPVLTSMPGVGVRTAARLLTEVACRAFASVAHLAAYAGLAPVTRRSGSSIRGEHPSRRGNKALKRALFLSAFAALRDPLSRAYYTRKMSQGKRHNQALIALARRRCDVLFAMMRDGSFYTPQAS

SEQ ID NO: 330229 - protein, 340 aa, unidentified
MEEVSIVGVDLAKQVFQVHGAAADGRVLFRKKLSRRQFAKFMASLAPCVVAMEACGTAHYWGRELSRHGHDVRLIAPIYVKPFVKRQKNDAADAEAVAEAALRPTMRCVAVKTADQQARAMLFRTRDLLVGQRTQLVNALRGHLAEHGIIAGQGVRNIARLATRLEEGALPDLVRDLGRLYLDRIAQISAEIGKLDKRIAAAAKENDLARRLQTMPGIGPVCAMAIAAFAPDMRTFRRGRDFSAWLGLVPRQHSTGGKQKLGRTSKMGQRDIRRLLIVGAMSVVHWRGRDGGRPGSWLARMLARKPRKLVAIALANKMARMIWAMLVRDENYRDPTGAVC

SEQ ID NO: 330230 - protein, 368 aa, unidentified
MTKSITFVGLDVHKNSIAVALADAGRNAEVRNYGIIGGGLDDLDRLIKKLSAPDKELQFVYEAGPCGYEIFRSLTAKGLECAVCSPAHTPKSAADRIKTDGRDAMMLARLHRAGELTYVFVPRADDEAMRDLTRCREDAKKAQRVTQQQLSGMLLRLGYRYEKDNWTKAHFGWLADQKMPTDPQQVVFQEYINAIKETTNRVDRLTKQIETLVPAWRMASVVKAFQALRGVSLIVATTMVAEVGDLTRFENPKQLMAFLGLVPSEHSSGETKRRGKITKTGNGHARRVLVEGAQAYRHRARLTRPLLKRQDGVSQEVTDIAWKCQVRLCARYKRLVEKGKSHNATVIAIARELAAFMWAIANKTPIAA

SEQ ID NO: 330231 - protein, 435 aa, unidentified
MGLIGAATVVGGWLRLGGFPGGSGLTYEPADTLLCCLVNDASAGSSGGPGTHRSGGATSVGLLRQFDVVGVRRPGGACHPLPICREKGMAMTMVSAGSITGGVDTHLDVHVAAALDPIGGLFGVESFDTTRAGYEALLVWLLSFGPVERVGVEGTSSYGTGLARFLMDQEIEVIEVDRPNRQERSRRGKSDPIDAVEAARAALSGRATGLAKSKDGPVEAIRALLVARRSGRNHRISALVQMRHLVFTAPQRLRERFFGLSKTQLVNQAAAMRPRDNGDVVIYATKVALKLLAQRVQLLDAQIKQIRTMLEALINTAAPDLLSVYGVGVDNAAILLVAAGDNPQRLRSEAAFAHLCGVAPLPASSGKVIRHRLNRGGNRQANHALYQVVLSRLASDPETKRYVERRTKEGKSIGETVRMLKRYVAREVFKHLPAG

SEQ ID NO: 330232 - protein, 339 aa, unidentified
MNEVTLIGIDLGKHSFHLHAQDAAGRMVFRKKLSRQQLLRTLAKVPSCRVVMEACAGSHWLARQLAGMGHEPRLISPQFVRPFVVGNKNDFGDAQAICEAACRPSMRFVSPRNEAQQTVSALHRLRERLVRERTATVNQIHGFLLEFGISLPRGAALMSRLPTVLDHETLPPRLVGLVVRLRAQVHYLEEQLRQVEQDLKAALREDDKSRRLLEIPGIGPITASALAVELGDARQFANARQFAASIGLVPRQYSTGGKPTLLGISKRGDRNLRRLLVQCARAVMQHTASRTDALSLWVKTLSTRRHSNVVACALANKLARIAWAVLARGTHYQARALTT

SEQ ID NO: 330233 - protein, 366 aa, unidentified
MTSVALAAERIYLGMDVSRDKIAVAVLRPGQDVPAVEVISHDGEMVRRLIGKFADRSVLAACYEAGPGGYELYRLLASMGVACDVVAPALIPKGAADRVKTDRRDSVRLVLSHRAGLLTAIRVPSEQEEAVRDLVRTRADLVDDRKRMMQRISALLQRHGRIWRAPRWTYQHRAWLGRQSFTEPALQAALCTYLAALDARDAELAVLESQLRGCWASVDPLAPMVRRLGCYRGIAELTGLTLAAEVADFRRFASAPAFMGFTGLTPSEYSSGARTRRGAITKAGPQLVRGALIEAAWAYRHRPAIGATLRRRQAGCPEQTLARSWKARQRLHATYTKLTRRGKIPSVAVTATARELAGFVWAEMTS

SEQ ID NO: 330234 - protein, 318 aa, unidentified
MNTNTLQNINVGVDTGKSQLDIYIRPLDIYFTVPNNEKGIKEAIRSIAKHRPRRVVIEATGRLEMPFIFACDKAKLPYVIANPLHVKRFAGAIGRRAKNDRLDAALIAHFGEAIQPELTQLKSENIRLMSDLVTRRNQLLSMQTMEKNRQQILPQSLASSIKPILTALKNQIVKVEEKISKLIDICPEYQAKNEILQSMPGIGKIASASIISNVPELGFITNKQASSLIGVAPITRESGRLKGKRTIQGGRAQVRTVLYMAMMSAIQCNPVFKATYERLLAAGKPKKVAIVACMRKMVVILNSMLRDGVMWYKDSAKN

SEQ ID NO: 330235 - protein, 474 aa, unidentified
MIKSVGIDFHQGKHVVRCLDERAQLCDSFSFQTTPEGLDTFEEHIFRDGSNPVIVFEPAGLTWFMMAICIRARHPDCRLVRAKGQKVAALRRYLRGSSKSDRLDALTLAKMVFIDPEQLDEVYLPPAKIHALQRLARQRKRLESDIAARKTRIGAIVESYVPGVRKAFSDPWSAQARAFLRCQLNPLAVAHDGEKALHSFLVGARHRNKTDKAESHRVFLVCKSAADLYQLSSRAEAVDDEFFSVFQEEIERELRLMELEEAESEAIAKRMEELYRELHPSDNLRSIPGVGRVTAPTFLATVGDPARFHNQSAFVNWTGVVPKTRQSSEVEAKGLRMTKAGPAIMKWALFQAGDIGRRFDPQLASLYYREMVHHGKNHKQAMGAVMSHLAARVLKVLQDGRPYELRDNEGKAISPAEAKKLIIHNYQVPENIRRERRRRNPVKRSYLKSQGTLLPRTNEAVVAPQPVKATIPEN

SEQ ID NO: 330236 - protein, 428 aa, unidentified
MAVFRFGGAVGRGFFEGRVAMEAIIERCCGLDVHKDIVVACVLIGPADGKARKEIRTYGTTTAQLEQLRDWLGQIGCTHVGMESTGVYWVPIYAVLEEHFELIVGNAAHMKNVPGRKTDVKDAQWIAELIRCGLVRKSYVPPKWQRALRDLTRYRRKLVEAQASERNRLQRLLETCNVKLASVATDVFGKSGREMLRALIKGDESPEQMAQLARGRLRKKLEQLVLALRGKVESHHRFMLEMQLGRVEDIEANIAVIDSKIDEAIAPHRAVMERLMTIPGVDRVVAMTVIAELGIDMNVFPTPAHAAAWAGVCPGNNESAGKRMGQQKRRGNVHLATALVQAAMAASKTKNTYFKARFWKLAGRAGTKRAAVAVAHSILNAIYHMLKGSVDYKDLGGDYLDRFLNRRSEQRLVQRLRSMGYEVRAQTA

SEQ ID NO: 330237 - protein, 314 aa, unidentified
MIKTVVGVDVSKDWLDVARSDGSEVVRIGNTQAAIAAWVLAERDAGLSLVAFEPTGGYERELRSALKAHGVTAVRVHPNELVAFRKSRRIKAKTDRIDARLIARFAAEELLRRGLPITIAGDETLRELAARRRQLVDALQAEKCRLALVRSAPVRASLTSSIAGLQASLETIETALLDHIAQQPELAQQLALLQTLKGIGPISAMTLIAELPELGHLSGKQIAALIGLAPQTHESGRSSRRAATGKGRGDIRRVLFNAARCAIRHNAIMRAFYQRLVEQNKRAGKVALVAVMRKMLVTLNAIARDHQPWKHHAT

SEQ ID NO: 330238 - protein, 450 aa, unidentified
MRPYRPVLRTYLQPAHIRMARRRSVLPSAPSRASREDQQNGASNTTATTAAQLDRGRSISAASAVRAIAREHARALVSFIDRMDSPLRLSRHHVPEPPSCKEKEESVEKHTVVAVDVAKAVFELAVSEEPGRVKLHRRLSRGEVEVFFAQAPRSTVVMEACGSAHYWGRQLQGLGHTVVLLPPHQVRPYVTRNKTDRADAKGILEAHRNSDLRPVPVKSLSQQVLGSIHRFRAGWIGARTAQVNTLRGLLRELGFVIPEGIERVLPQVRLLVADAESGFPDSLRWTVSAACDEIESLGERIRQAERQLEALAEQTPVVERLRSVPGIGLLTSTALVAFVGDVQRFPSGRHFASYLGLTPREYSSGLRHRRGRISKRGDSYLRVLLVHGARSVLCHAKKASAHDHLRTWALKLQSRTRHNKAAVALANKLARIAWAVWRKDREYESIAPAA

SEQ ID NO: 330239 - protein, 396 aa, unidentified
MNAVGIDVSKGKSMVTILRPFGEIVSSPFEIKHTSSDIHSIEGESRVVMEHTGRYYEALAHQLSAADLFVSAVNPKLVKDFNNDSLRKIKSDKADSVKIARYALDKWQSLEPYSITDELRAQLKVMNRQFHFYVKQKTAMKNNLIGLIDQTYPNANTYFNSPTRSDGSQKWVDFVSTYWHVDCIRKMSLNAFVEHYQNWCKRKKYAFNKSKAEEIYTKTKELVPVFPKNEITKHIIRQAIDQLNSTSVTVETIRTLMNETASKLPEYSIVMQFKGIGPSLGPQLMAEIGDVTRFTHKGALTAFAGVDPGVNESGSYAQKSVPTSKRGSSNLRKTLFQVMDVLIKTMPQDDPVYQFTDRKRTQGKPYYVYMTAGANKFLRIYYGRVKEYLSVLPDPS

SEQ ID NO: 330240 - protein, 332 aa, unidentified
MSAVVSGLDVHKEYTYATILGPDGEKLAQGRMPNEEVPTFLRPYGVERVAMEATTSIAPLYRKLVEQGYDVTVSHPKKTRYIAEARIKTDRVDSRALAELLRLNSLPESYMPPPNIAELREKVRRRAFLVRQGTKLKVKIRSVLVYEGVRPPKEYGLFTRKGAEWLRSLGLEPVDTYLRLMAPLKEEIRLLSLELRHIASGDEEIRLLTTIPGVGYYTAVLVKAEVGDIGRFRTGDQLCSYAGIVPSTYSSGGVTRHGHITREGSAWLRWAMVEAVQIHLRYDTPVTRAYHRIAERRGKGKAKVAAARMLLLVCRSVWRNRRPYYNPVHGQA

SEQ ID NO: 330241 - protein, 402 aa, unidentified
MNAVGIDVSKGKSMVAIMRPFGEIVSAPFEIKHTASDIHSLVELINSVEGESRIVMEHTGRYYEVLAHQLSEANLFVSAINPKLIKDFDNDSLRKVKSDKADSVKIARYALDKWHNLKQYSVMDELRNQLKTMNRQFSFYMKHKTAMKNNLIGILDQTFPGVNAYFDSPARSDGSQKWVDFASTYWHVDCVRKMSQNAFINHYQNWCKRKKYNFSQSKAEEIYGKAKELVPVLPKDDLTKLIIKQAVDQLNSSSTTVESLRTLMNETASKLPEYPIVMDMKGVGPSLGPQLMAEIGDVSRFTHKGAITAFAGVDPGVNESGTYEQKSVPTSKRGSSDLRKTLFQVMDALIKTKPQDDPVYRFLDKKRAQGKPYYVYMTAGANKFLRIYYGRVKEYLASLPES

SEQ ID NO: 330242 - protein, 419 aa, unidentified
MTGCNITASTPVLVAIDISKERHEILIEVPNKKRRRRISILNTLDEFERLINLLRSFQRPVRVAFEATGNYHRALAFQLGAAGFDIKLISSIALARTREALHNSWDKNDPKDAQVILHMMTIGAEQFYHDPLLHGTNDIQELSKTHDMISRAKTELWHRVLTHYLPLYFPEADRFHRSSRSDWFFAFLELFPSPHFIAALSKEAFIEAAWDVVGRKVGKERLLSDIYATATRSIGLPVAPGSDAILMFRMVLAEGRSLISQRNLIEARAVEMLKDNSDYQLLTTIPGIGPINALTILAEAGDLRRFNHHRQFLKFCGMDLASIQSGMFRGQTKLSKYGNARLRRTLWMAAQVAILQRPNSFRDKFERYITKDRHNTHLRRKAFTAIAAKMARTVHAVIKSGETYRPFYQGAIHSGRTLL

SEQ ID NO: 330243 - protein, 355 aa, unidentified
MDSVKYIGLDVHRDTISVAVVDQSGRLVMQSVIPTQAPAIVDCVGGIQGSLHVTLEEGTHSAWLYDLLVQRVKKLVVCNPRKNALLKSGSKSDAIDARKLAELLRAGMLSPVYHGENSALEVQHLARAYAMLTDDTTRTMMRLKAVFRSQAVVCTGRKLYGKRHHGDYLKELDQDGPRRRAEYLYQELDGLQKLRRQVRHELVVACRKHPAAKWLQSVPFLGPLRTAVLIGRVKTPHRFRSKRQFWAYCGLALETRDSGEYCVVNGQVERRKRPVLVRGLNWNHNHELKNLFKGAATTASAGSGVFQQFYLGLLNKGMQPEMARLTLARKIAAITLKIWKKGEAFNPEHLKSQAA

SEQ ID NO: 330244 - protein, 388 aa, unidentified
MTNYVGIDIAKYFHVATVIDSTGKKITGPFKFDNSREGFDLLVTKLELLEKSELVIGIESTAHYHQNLLHFFISNNYAVELINPLLTKRFRGINIRDVKNDNVDSESIALFMLFNSKDDYNFHSTYLDDLNHLCKERADFKKKHTRSKIRLTATLDKVFPELKPCIGSTLITRGFLTLLSEISTANEFANTRIDRIYNLVNKDRNFFSLARVEEIKSLAKKSIGFHNESLSLTVKLIVNEIFHYGNAITLLENKIIEIMEKMNSPIMKLPGMGYIQAASILSVIGDIDRFDKPNQLVAYAGLDPKVRQSGQFTANTTRMSKRGNALLRSAAVWSAHNMTRNSLTMNEFYQMKRNQNKSHYNALGHCAKKLLHYIFYILKNPDKEFVIY

SEQ ID NO: 330245 - protein, 343 aa, unidentified
MPYRIAGIDVHKKMLAVVVADVEIDGDFHFDRQKVGTTPADLRGLADWLVEQDVEEVVMESTAQYWRPVWEALEQHWRPRRRARDGVPRLAGTLHLAQAQSNRGPGGRKKDFPDAERLVKRLVAQELTLSFVPDTEQRLWRTVMRRKYQITRNRVQLHNRLEALLEEAHIKVSSIVSDLLGVSARRMLQALAEGETDPAALAALAASRLRATPAQLCDAFHACLTLHPVYRRLLKLTLEELRVIEDHLGQLDQQMADLLAAHHDAVQRLAEVPGLGVDSAQQIIAEVGATAATFPSPKHLASWMGACPGNEESAGRELQPPVPQRQSSDAARPQSGRQRRRES

SEQ ID NO: 330246 - protein, 346 aa, unidentified
MMNIRVLGIDLGKNVCSLVGLDGAGAVVLRRGAKRETLIALAAKLPPCIIGMEACCGAHHLGRLFTNQGHEVRLMSPEYVRPYIKAQKNDDRDAEGIAEAATRPTMRFVDVKSQEQLDMQMLHRSRDRLVAERTALINQMRGILLERGIIVPQDKRALEQHLAALVEESDDASGLSPRMRVLIIDARAQWLELDRRIAAFDSEFSAFVKESEEAKRLVTIPGVGVTIASALIAAIGNAEAFEHGRDLAAWLGLVPRQSTTGGKPKLLGISKRGNKYLRKLLIHGAQAALPHVAGRDTPLGRWAKGLLARAHHNVVVVALANKLARIAWAVLRSGDKFDVVGSPVAA

SEQ ID NO: 330247 - protein, 355 aa, unidentified
MTSVKYIGLDVHKESISICVRNSVGKVVMESVIETKASTILQFIDGLRGDLRVTFEEGTWAAWLYDLLKPRVSGVEVCNPRKNALLKDGSKSDRIDANKLSEQLYMNNIKSVYHGEHGLRTLKELARSYLTINKDLTRVMNRVKAVYRSWAIPCAGKEVYAPRYRAEWLGKISESGVRRRAEFYYQQLDVLRLLRQEVRRDLLLEVKKHKAWKLLRQIPGIGPIRAAVLMAVMQTPHRFRTKRQLWNYCGLGLETHDSGEYRAVKGQLQRAKKQATVRGLNEDHNHDLKDIFKGAAMRASTAAGPLHDFYENLLAKGRKPTIARLTLARKIAAITLIVWKKEVRFDANYLKQQAA

SEQ ID NO: 330248 - protein, 426 aa, unidentified
MRAIGLDVHLEFCEVAIAEGGELRSAGRIATKPEEIELFAQSLGARDRVALEVTGNAWEIKRLIEPHVAEVIVVSPTDTGIRGARAKTDRLDARALARLLAAGELDPVWHPDRETQVMRRRLQRRGQLVGARSRAKNQIHAALMRSLIGRPPFADLFGVKGRRWLSGLELPEEERESVDSGLRQIEFLDSELEAVERLIAAAALKSAEVKRLMTVPGVNVICAASFMAVVGEIRRFPSTRKLVGYLGLDPKVRQSGSGPAAHGRVSKQGSVAARHALVEASWSAVRQPGPPHAFYERIRARRGHSVAIVACARKLACLFWCLLTRSEDYAYGQPSLTQKKLRRLELAAGAPSKRGTKSGPMAANAAMRKAERELAQQAEAAYRRSIRDWHATQAKRKGAGATPGRASRGPSSGQAARQVQAPGPAL

SEQ ID NO: 330249 - protein, 354 aa, unidentified
MEKIAIGIDFSKETFDMTVLDTQKANGKLDADALAKAPHEQFKNQRSGFRKSLSWIRKVTGRKLDKDNAIFCGEATGKYSIRMSEYLREQGLFIWIDSGLRIKNSMGIVRGKSDKADSCRIAEYAFRHWDKAELYEPLEKDVSELRELFLYRDHLVAIRKATEQRNSLIKEFSDVVGESSFIKRSGDRIVKELKEEIKRCEEEMRKLVESNEEMEKAYDCITSIKGISLINGVAFIVYTNNFKWFGNNPRKIATYWGVAVFGKESGTSVKGRTKTSKCASRKLKRLISEAATCAIRWEPRIKAYYERLMAKGKHHGVAMNNVKNKLIHIITALAVNKTMYSDTYEEDRKLKKVG

SEQ ID NO: 330250 - protein, 389 aa, unidentified
MPTVADRPDAPTAIQANLAAIFISLELSRSIWLITSLSPGSAERMSRHSVRAGDVAALLARVSELKRKASERTGKSFPIVVIQEAGFDGFWLHRVLQSEGIESHVVDPASIATSRRRRRAKTDRIDGEAMLRALLAYKRGEPLVCAMVKAPTPEEEDRRRLCRERKVLIAERVKHVNRVKGLLFSQGVSGYEPLRRDRRQRLDELTTGDGRSLPMHLKNQISRELDRLELLLDQIKRAEAERDALLAAQQAAAPAPTGRMLLEFRGIGAEFAAGLWLEALFRHFDNRRQLASYAGLAPTPWQSGSVDREQGVSKAGNPRLRTTLIQLAWLWLRHQPQSALALWFKERANRNGGRLKKTTIVALARKLLVALWKYVTAGVVIEGAVMKDA

SEQ ID NO: 330251 - protein, 357 aa, unidentified
MLQVSTIGLDIAKHVFHVHGADGKGRAVFSKRISRGKLLDFFAAQPRCTVALEACGGAHHWARQLTQLGHEVRLIPPAYVKPFVKRQKNDAIDAEAICEAAQRPSMRFVAVKSEQQQAAGLVFRTRDLLVRQRTQLINAIRGHLTEYGWIAPKGPSHVATLADLIEEEAMASSLPEAARTMFRVMLDLFAGLNGKIADLDKEIARRAREDEVSRRLMTVPGIGPISATAIAALAPPAETFAKGRDFAAWLGLTPLQRSTDGKQKLGVTSKMGERTLRRLLIIGSSAVVSRQANRARRRVRGSNRCWLANRVCWYPRARRNEASSRAFSLSQRASSACARASRTSTSARMSAAFFSCF

SEQ ID NO: 330252 - protein, 346 aa, unidentified
MKFYTKQHQHYCGIDLHTKSMYLCIIDQNGETVLHKNLNTDPRSLYNSISPFLPDIVIAVECIFTWYWLADFCHKHGVPFVLGHALYMKAIHGVKTKNDRIDSQKIAVLLRGGMIPMAYAYPEEMRATRDLLRRRMYFKNKHSELLAHIQNTKHQYNLHDFKKKITYKSNRTDIVELFPDPSVQKSIQCDLDLLTSYHKTIKDMELYITQQAKEHNPNDLQLLQTIPGVGKILGLVILYEIHDITRFPTVQNFASYARLIRPKRESAGKTSSGGNRKIGNAYLKWAFSEAAILLLRESEKVKEYHLRLKSKHGKPKALAILSHRIGRAAYFILKNKQAFDMNKFLV

SEQ ID NO: 330253 - protein, 343 aa, unidentified
MEHFAGIDVSLEHSSVCVVDGVGKIVREAKVASEPEALVRFFRGLETGVRRIGLEAGPLSQWLHAGLVAAGFEVVLLETRHVKAALSAMVIKTDRKDARGIAQLLRMGWFRPVHAKSPGSQEVRALLVARKLLQAKLLDVEFSIRGILRGFGLKMGEVSKGRFAARVRELAAGHAMLERITEPMLRAREALRTEYAKLHGEMLAVVKPDPVCRRLMTVPGVGALVAITFKSAVDNPGRFARSRVLGAHFGLTPRKYQSGETDVTGAISRVGDAMVRMALYEAAHIMLSRVTRFSSLKRWALNVARRRGLKRAKVALARKLATVLHRMWVDGTSFRWGKQAASV

SEQ ID NO: 330254 - protein, 344 aa, unidentified
MNYSTLFVGMDVHKETFTLCCYDMEHDKVFHTQKVESDYMLVLKYLNAVRSSVGQDVQFVCGYEAGCIEYTLYRQLTRYGVNCVILAPTTMMKTAGKKTIKTDKRDAANIAKCLAYHTYSPVHIPTEQDEQVKEYLRMRDDHKLALKKVKQQILAFCLRHGFTYTGSKNHWTAAHIAWLKALKPEGLYGEILSEYLLTYQTLSDKLERLDARIEELAADPAYFKAVKKLCCFLGIKTHAALSTIVEVGDFQRFSSAERFSSYLGLVPGESSSGESQTRLGITKAGNCHVRTLLIETAQCFGRGQIGHKSVALKKRQEGNTPEVIACNTVFRAPFLCLQRSKHDF

SEQ ID NO: 330255 - protein, 341 aa, unidentified
MYPIKALGIDLAKLIFSIHGVDEYSKCKLRKTVKRNNLLAEIAKLPPCIIGMEACSGAHYWAREFTKLGHDVRIMASKFVIPYRQSEKNDANDAEAICEAVTRPKTRFVSIKSEEQQAVLCLHRIRQGAIKDRTARINRLRGLLAEFGITMPVGRYPAQKAIGGILEDGENNLPFLARELLNDLWQSIKTLNEEILKYDRKLYALANEMKAAKRLMSIPGIGEITATAVVATVNDAKHFDTSRSFAAWIGLVPRQYTTGGVVRLGRISKRGEKHIRTSLIHGARAVIANCKNKTDRTSLWVKELVERRGFKRATVALAAKNARLIWALLHSEKEYQVDYVK

SEQ ID NO: 330256 - protein, 362 aa, unidentified
MRTVFGIDVSKASSEVAILVNGERVHSYTMPNDIIGFSHLLKDLKTVSNPEIIFEATGVYSRRLQAFLEENSYDYTRLNPLEAKKQLDSLRVRKTDKIDAEKLASSQFVLNRKPTYVQEEVYQNLHDLSRFYQNLTEDIVRTKNRLHKVLQVAFPEIENLLSTPTGEQYWNLVSIFPTKHWVLELSEVELKETIRNSTSKRISENRVGNLAEKLVGLAKQSYSAISKTSPMIEEVKYNAQELIRLTNRREQVLQQLIALAEPLPEYEILLSIPGIAETTATSIIGELGDIRRFKSANQLNAFIGIDLKHYESGDFLGQEHITKRGNPYARKIMYKCIHNIASASHTNPCHIADFYEKRKRAL

SEQ ID NO: 330257 - protein, 471 aa, unidentified
MTTYPMRRRFANPMMEQAMAQRKRGVTLKPGKGQAALTVTHPNAAGIDIGSAAHYVAVPPDRDEQPVREFASFTVDLEAIAAWLSACGVDTVAMESTGVYWIPLYELLESRGFTVLLVNARHVKNVSGRKSDVLDCQWLQQLLTYGLLSGAFRPADQVCVLRELWRQRGRLLREQARHVQHMQKALTQMNIQLANVISDVVGETGQKILRAIVAGERDGQVLAKLKNRLIHASQDEIAKSLQGNWRSEHLFSLKQALGAFDFVGTQLAEADREIEAQLKVLQVHDANPAKGKKRSRARNEPRFDLRTQLFRVCGVDLTRIDGINVTTALAVISETGTDMSRFPSVKHFTSWLGLCPGTRITGGKTISGRTKQCANRAAQALKLAATALRTSRSALGAYFRRLCAHMDKPKAVTAAAHKMARLIYTMLTKGQEYVDQGQDYYEERYRERVLRNLAQRANKMGMRLVTAEPVA

SEQ ID NO: 330258 - protein, 401 aa, unidentified
MNCVGIDVSKGKSMIAVMRPLGEVVIPPFEVGHTESELCELSKLLGNLDGETRVVMETTGNYHLPVASFLYDSGFYVSVVNAMLVHSYGNNSLRRAKTDKKDAIKLANYGLDHWLTLPRYIPEDDVRLMLKTTYRQYQQCAKVQTMLKNNLISLLDTAFPDANRLFASPARADGSEKWVDFVAAFPHCECVCGLPERVFTAKYQKWCRKHGYNFNQDKALDIYASACGHFSVMPRTDTAKLLVVQAVSQLRAASASLAALRNEMQSLAASLPEYPVVMGMFGVGPALGPQLMAEIGDVRRFHSKKALVAFAGIDAPPYQSGQLEVRSRSISKRGSSALRRTLFLVMSVVLQRSPADEPVYQFMDRKRAEGKPYRVYMMASANKFLRIYYATVKQYLDSLEV

SEQ ID NO: 330259 - protein, 425 aa, unidentified
MNSKWNEKLNQVTENTLIVGMDIAKRTHYTCFVDERGRVLEKSFAVHQYKEGFEALYENVLHAMKVYEKTDVIVGIEPTGHYWMNLAYFLDNYGIPLVMVNPMHVKKAKELDDNLQTKNDKKDAVVIARLMKDGRFSYPRILKNIEAEFRNGSTLRSKMTEDLSGIKNRIVRWLDRYFPEFTQVYPTFGKMALATLEKTPFPKDIVGKTAEELVFLYRQVEGMRAPQLPKAKLLINVANNSIGLREGLQMARLEIATLLRQFRLLEEEIEMINSHLAELAKFTEEYVYLASVPGLGDATIVDLLSEVGSFSHYENPRQLIKLAGLTLRENSSGQHQGHKHISKRGRKRLRSVLFKVIVPLVRHNIAFKQLHEYYTNRQRNPLRGKQSMVVLCGKLLKVLHGICKKKVHFNERHMMNDLHCLSTAA

SEQ ID NO: 330260 - protein, 341 aa, unidentified
MKTKFIHFAGIDVSKGKIDVCLLLNFEKSDLIRTEFEQSKKGFAALNKFVKQHVGKDLSQLFVCIENTGLYDDAVLYYLANNGIAVCLENAATIKAAKRDQRQKNDKLDAREICLYALRYHDELELWQKPRPILEKVKQLLSCRSRSVEHLKALKQAQKEADGVRWAGVNLIKNYESGIKGLQKDIENIEADIWKLVKEDAALLKMFQLLVTIPAIGKITAWHFICYTNEFKRVKSGKNLSSYCGVVPFKEKSGISVNKPPRLPVRANLILKTLLHLCALTAVKMKGEFAAVYQKKIAEGKHVLKAINVIKNKLALRIAAVIRNEEPYSENYDYKRYLVKP

SEQ ID NO: 330261 - protein, 405 aa, unidentified
MRIWCGIDWSERHHDVALVDDEGVLVARRRIAESAAGFRQLLELLADHTERSEQPIPVAIETAKGLLVAALRAAGYQLFPINPLAVSRYRDRHVVSRAKSDLGDALVLANILRTDPAAHRPLPEDSELAASIRVLARAQQDAVWDRQQAGNKLRSLLREYYPSFLATFDDLASPDARATLAVAPTPAVAPGLRRASLRAALIRGGRCRNLDHQVERILAGLRGEQFRQPTLVEQAMGQQALAHLRTLDAAAANTVELEHALAEAFHQHPDAPILTSFPGLGTVLGARILGEIGDDRARFSDAKALKAFAGTAPVTRTSGRKRSVTMRVVRNRRLCQAGYLWARPLLTHSPGARAHYDHRRERGDTYSAAARHLANRYFGILFHCLQHRLTYDEAKAFPAATKIAA

SEQ ID NO: 330262 - protein, 316 aa, unidentified
MSAPLLFVGIDVAKAECVVAVRPTGATWTVPQTEAGWTALAARLQALAPTLVLCEATGGLELPLASVLAAGGLPLAIVNPRQVRDFAKAKGLLAKTDALDAAVLAHFAEAIRPLPRAVPDVTTQALAALVTRRRQLVEMATAEENRLGSAPPALRARLQAHLRWLRRELAALDADLDTTIRTHPGWRVQDQLLQSTPGVGPILARTLLGGLPELGTLSRGAIAALVGVAPWARDSGRHRGPRRCWGGRADVRAVLYMATLAAVRCNPVLRAFYQRLLAAGKLKKVALVACMRKLLTILNAMVKTQTPWAPRVAGAN

SEQ ID NO: 330263 - protein, 421 aa, unidentified
MLPGDHLPSTYFNQVYEDKRLWIVTASNTLGKEGFMIYAGIDIAKLNHFASAISSDGEVVLKPFKFTNDYDGFSKLKSSLDSFDPDQLIIGLESTAHYGNNLVEFLVNNNYKVCVINPIQTSTLRKNNIRKTKTDKVDTLVIAKALMMNPTRFFTKYDISLLHLKELGRFRLKLIKKRTQAKIQLTSYVDQAFPELQYYFNGIHHKSCYALLKEAPTAAKIVSMHMTHLSHLIEVASHGHFNKETAKELRVLAQTSVGIDDSSVALQITQTIELIELLDKQVKTVESDMESIVKSLDSVIMTIPGIGYINGGMILGEIGDISRFSNPSKVLAFAGLDPAVYQSGFFEARSTKMSKRGSKALRFALVNAAHNVVKNNKTFKDYYAQKRSEGKSHYNALGHCAGKLVRIIYKMLTDNVAFNLD

SEQ ID NO: 330264 - protein, 356 aa, unidentified
MTIGADVHKELVWTSDPDGSARAFENSKPGVDKLLRGLEPGSTVAMEATGKYYKLLADTAFQRGFRVMVFNPRDVLYYAKSVSPRAKTDRVDAKVIARYALVRTDHHPYQPTPGIIATLKSMLRTRASLVASRTGLGNRLRECPESESYLRPSIQGLSASVAAIDKEILPIVRTLPQYAALRKIPGFGPVVAPYMLALLASATFRHSDSFVAFIGLDIRVKQSGKKKGKCCISKRGDPEARRLLYLAAQAVCRRPGPFRDMYLRYQLHGLCKIAALNAVARKLARTAWAMYTKNEEYRPDLLCKQPYSSSAAARQAIRAALRSQPAQSDAGVVATRPRSPADNAAEHQGMYLCHLH

SEQ ID NO: 330265 - protein, 492 aa, unidentified
MVKSKRKSYKKRQHIQKVKGRRFTDEIRNLDLEKVLVVPIDGGKNSHKALAANYFGDILHDPFEFTNSASGVKMFHTILKSISSSIKAQKLIIGLESTGHYYENLYRSLTSLGYDVAMVNPTSVYSQRSGQLNWCKTDEIDLCAIGQVLIDNQATETRLPEGLYYNLKQLTRLRRDEVRKRARLKTQIRVLCDHIFPGLQKPHIFSDFWGKSSILLLENYPTPSSLIRLGTKKLARFFKKHNTKLGLYSAERLVNLAKNSLTTKATNLEAHLLNLRFKIADLKIADEKIRKLNLEIARYLVHTPGILLLSIKKINVSSAAEYLAEVGPLKQAGGAKKIIARAGLNPSRFQTSEYERANNSITRRGSNPLRNISLIISQNLIGLNPHSSRPCNPYFREFFDRLVGEGKDKRLAKVACSNKFIRVSWAIMVGRKLFSPPTWKKNKVNDDPLTKLKDFLFLNETKEFFEELAKIAKEQLPSNYHSHLYKEQDSSN

SEQ ID NO: 330266 - protein, 320 aa, unidentified
MKLFIGLDVSLEKTAICVIGEHGKIVREAQVASEPEALLRWIGDQDGEAAAIGLEAGPLSQWLHRGLSAAELPVVLMETRQVKGALKAMPIKTDRRDAEGIARLLHLGWFRPVHCKSVSAQEVRAVLSARKAVQQGFITLEMSLRGLLRNFGLKVGTISRGRFEQRIRELAAGNPMLVAATELMLRARAALRRELAGLERHVRQLAHDDPVCLRLMSMPGIGVVVALTYRSAIDDPGRFTSSKKVGPWVGLTPSRNQSGERDISGGITKAGDVNLRRALCQAATVMMHRGGQHGCEPGRRNSRAAGAPSAQWLRWPDVSP

SEQ ID NO: 330267 - protein, 355 aa, unidentified
MTASYDYHIGVDYHKSYSHLVVQDSSGKTLRSGRVKNDRQSLGGFLERYRENSHAVVEATRNWMVMYDWLDDICDDVVLAHPLKVKAIADAKIKTDKIDATVLAHLLRADLVPEAWAPSDKARELRVALRERMFYVRLRTMTKNRIVTVFDRYPEQTAQLKKLGDLFGKAGRVQLAQVNVSELDRIQIDRGLDFIGDIDARIKQSETTIRAMTKANGNVKLLKTIPGIGEFFARLIDAEIDDVSRFRNAKKLAAYAGLVPSTYSSGGKTFHGKIIKQGNKWLRWAFVEAVTPAIASDAQLRAQYEHLKFRGVNKARVAIARKLLTIAFQILRDQRAYEPRGESNMESTSTISRLS

SEQ ID NO: 330268 - protein, 415 aa, unidentified
MALKIVYKICCGIDVHKTFVVACIASTNDKGVTSYESHRFSTYTSGLKTLLQWLLDRDCKDVCMESTGKYWIPVYNILESDCSIILAHPKYVKAIRGKKTDKKDAKWIADLFKHDLVAGSFMPPADIRQLRDLMRYRFKLTCFKSSEKNRLQNCLTVSNIQLGNVVSDTFGKSAQAILDKILENPADTSFDLEPLVFKSLKKKLPELRDAIDGYITPEQTGKLKVIKAHYENLESRKAELEELILALAAPYQQELTILQTAPGISSPFTAIGIISEIGTNMEAFPSAKHLCSWAGLTPTNNESAGKKKSVRVSKAGCYIKPLLVQCANAVVASTKHPEMRNRYLRLKKRRGHKKAIIAIARMLLTALYHMLKNGENYNAELYQKSDLLPVDREITVEQALMIARNQGYKIKSATA

SEQ ID NO: 330269 - protein, 408 aa, unidentified
MGRAAEVVAPSSSIRSDGGCPVVQVNDLSRSVTVFDPLSTLVVVVEMSKASWLVSGVIPAVERRPLKKLEPDATALLRLIERWRSEAVRAGRSIKRIALAYEAGRDGFWLARWLIARGIEAHVIHSASVAVSRERKRAKTDRLDAAMLMRVFLGWLRGERGHCGMVAIPTMEEEDARRPSRERESLVNERSRIINRMKSALVRFGIRGFKPHLRRAPERLTSLRTAEGTDLPANIMEELRRDMARLALVREQITSIENIRAKRLERAPDTGPHAMVRLLSRVIGIGIETADMLVREILSRKLRDRRAVARYAGLTGSPDESGLKSREKGLAKTGNARVRRGLIQLAWRFLSFQKNSALARWYRTRTEGPSGARKTTMIVALARKLLIALWRLVTTGEIPEGVELRPAV

SEQ ID NO: 330270 - protein, 354 aa, unidentified
MMIIGCDYHPGFQQIAFVDTETGELQERRLEHREEAEEFYRNLAAQGVSVRLGMEASGHARWFERLFSELRFELWIGDAAEIRTKRVRKQKTDRQDAQLILRLLLEDRFPRVWVPSWENRDLRQLLWHRHRMVQARTRIMNQLQAVALNEGLRCKKKLWREAGREQLDSFKLAPWASRRRRDLLELLDRLSPTIAELTQAIEQEVEKCPEAQRLRTHPGVGSLTALAFVLIIGRAERFQCGKQIASYLGLVPSEESTGERRRLGHITKQGSSLLRFLLVEAAQVTVRSDPEWRSKYFHLAMRRGRKIAKVAMARRLAVRLYWMWRKGWDYQQMTKFSSHAGQPGTGDGVQLNTE

SEQ ID NO: 330271 - protein, 455 aa, unidentified
MDQVQDRGVGDAGFPVLRRDVAAIDVGSEEHWVCAPTPSGEGREVAVFGATTPQLEQLIAWLRARGVTAVALESTGVYWIVPHEMLERAGFEVLLVDTRQLARVPGRPKSDRRDCQWSQRLYSCGLLRGAFRPGDDVCQLRTLVRDKARLTDERSDWLRRMQKSLDQMNVRVHRAVADLDGVTGMAIIRAIVAGERDPQRLATHRDAHCRKSEAEIAEHLSGHWRADHLFSLQQALKMYDSITERLQEYEREILRHLQTMTPPDRRDGAAPPAPPRKAKKIKQRGQEPLRQALYRLTGVDLTAIDAIGVETVNVVISEYGADLRDFPTEKQFISHIRLAPHHATSGGKPVRNRKKAGSATARVCGALRMAAVSMRHSQTALGAYYRQIARRAGADVAVFATARKLAVYIYRLLRWGQPYVDEGAAAYEQRYHAARVTRLAKTAKTLGYALVPADV

SEQ ID NO: 330272 - protein, 416 aa, unidentified
MRTLKLTLEGFIMFYVGIDVAKEKHYVCILDDRGDYAVKPFWIYTDILGLRRLIEKLANLSLDNDDFIIGVESTGAYSENIYEYITDSDYEVVLLNSYQTAKFRDFRTIKKIKNDTIDAYVIAELLSTGKYKQSHISNDAYHSLKILGRSKRSLMEKMKTIKREISTVMATVNPEIAKFFPNIFTKTALVVINQYPTATHLCKATPKKLTRLFRHIKGNNFSEDKAQYLIDLAQTSIYAGRAHKARASTITSYIRILELYCQEIKEVELQIKQLIVEEIDTLGNTVENLQTILGVSDKTISAILGECGDLRRFDSAKAFIGYLGLYLTQYQSGNSNSVGRLAKRGIPIAKHALYMAAVGSILHNPQLNKIFRDKVSYGKSKKEALIIIAKKIAAIMYSIVKHNKPHEAHRVFIPNR

SEQ ID NO: 330273 - protein, 348 aa, unidentified
MVHFVGLDVSVKETSVCVVDDAGKVILEQKVPTEPADIIALLASLGVSFGRIGIEAGPLSQWLVNALTAAELPVICVETRHMKALLTAQQINKTDRNDARGIAQMMRVGLFKPVHVKTLVAQEQRMLLTSRKLLQRKLLDVESDLRGTLRNFGLKVGVASRSRYEARVRELVEGFPRLAAIVEPLLNVRRVMRQQLAVLHKMLLDTVRDDPVCRRLMTAPGVGAVVALTYRATVDQPQRFVHSRAVGAHAGLTPKRYQSGQADYDGGVSKCGDALLRTVLYEAAHSLLTHNGKWSWLKAWGVRVAQRRGMRRAIVAVARRLAVVLHRMWVDGSEFRWRKDSATVPSVT

SEQ ID NO: 330274 - protein, 419 aa, unidentified
MSKNMLCGCDVSLENNTVWLMLDDGSQPAKLFNADNNQLGAETLVERIYSIAKEHCVSDILIGTEATSMYDWHLLEYLAESKLALEFNLKLYRFNAKWIKNFKKSLAPRGKTDPIDSFAIAERLRMGRLPKEYIPDTKYQPLRKLTRFRFHLMQQIAREKNFFLANLFLKASAYSRVSPFGSTFSATSLSVINDFFSVDELAAMPVEELTGFILEKGKSRFSQPVEIVDNLKRVARESYRLKPELAPTVNLILASTYNNIRCYKDQVKLVDQAIAENLKAFKHTLESISGIGPVYAAGILAEIGDVHRFSNDSSLAQFTGLTWPKHQSGKFQAEETKMSHTGNQYLRYYLVEAANSVKRCDATYKAFYEKKYKEATKHHHKRALVLTARKLVRLVWTLLTRGMLYQPGYCSFEDLSKIG

SEQ ID NO: 330275 - protein, 344 aa, unidentified
MNITVLGVDLGKNVCSVVGLDASGAVVMRRKVRRETLIALAEKLPPCVVGMEACCGAHHLGRVFAAHGHDVRLMSPEYVRPYVKAQKNDDRDAEGIAEAATRPTMRFVELKSQDQLDMQTLHRSRDRLVGERTALINQLRAILMERGFVAPQGKRKLQQFLAVLMDEQGGAGLSPRMVLLVADARTQWAELDRRISAFDAEFVGWVKENEDARRLATIPGFGAIVASALVAAVGRAETFDRGRDLSAWLGIVPRQFTTGGKPKLLGISKRGNKYLRKQLIHGARAALPYVAERDTPLGRWAKALLKRAHRNVAVVAFANKLTRIAWAVLRRGERFAVKGSLMAA

SEQ ID NO: 330276 - protein, 349 aa, unidentified
MLADELDYVLGVDTHRDEHTLAVVTAPTGALVAGTAAAAAARGYRELLRVADRYAPGRRAWAIEGSGSYGAGLARFLADRGETVLEISRTPRAERRLRGKDDSLDAVRTARAALASETLALPRNGERREALRLLLIARRSAVDVRREALVQLRSVIVTAPDQLREQLRGLPVQRLLERCSHLRRSSSASADELATRLVLRSLARRIEAATAEADELEGEILVHVRALAPQLLDEAGVGPIVAAQLIVAWSHRGRVRSEAAFARLAGVAPVPASSGQTTRHRLSRGGDRQLNRALHTVVLHRRQHDPTTKDYIAKRIAEGKSRRDATRLLKRYLARHLYRLLQQQEPLMT

SEQ ID NO: 330277 - protein, 325 aa, unidentified
MSDPLHSIGIDVCKRFLDIHLYPTGKSWRVANTVVGLLSVRSQFPEPGQVQRIVLESTGGYEREAALWLTQAGYPVAVINARQGRNFARAMNQQAKTDQVDARVLALFGDKINPPVRPLASEAQQQLDDLVTRRRQLVDILTAERNRLTLLRGKAQTNVECHIEWLTEQIKGLDAEIEAQIQACQPWRHIQKLVLSVPGVGKVMSSTLLSALPELGKLGHKQIAALVGVAPFNYDSGQMRGKRRVFGGRANVRQVLFMATLVAVRYNPVLKAFYKRLLERGKLKKVALVACMHKLLTILNAIVKQGKAWVPPVGDAQPENVILPA

SEQ ID NO: 330278 - protein, 346 aa, unidentified
MEHDTGLPVPIKKRGKKYTHFVGVDVSKGKLDYAVLNQSRLLFHETHINTPEAILEFLQQLKQISGFTLTRALFCMESTGIYGNHLSEVLRKSKADLVIENPLHIKRSMGLMRGKDDKTDAIRIAQYCRKNQGDLRLQSARRPVIAELAALFSLRNRLLSNILAMNKPVADQRIFIKKGLHRQNEQLCRRTMTAMKADLEGMETAIDRLLDADAELKRLRAIIESVPGVGRITAIQMLISTNEFRNITCPKKFACYAGVAPFKNESGTYTGKARISKYANKRMKALLHICALNCRKADQQLKQYYERKTEGEGKPKRAVINALRSKLILRVYACVRQNRLYERRTA

SEQ ID NO: 330279 - protein, 347 aa, unidentified
MRFYTRQHQYYCGIDLHARSIYVCILNQEGEVLVHRNLKAKPHAFLAVIAPYREDLVVAVECMFTWYWIADLCAQEGLTFVLGHALYMMAIHGGKAKNDRIDSYKIAHLLRGGNVPFSYVYPQPMRATRDLLRRRNFLMRKRAELLAHIQNTNAQYNLPEFDGSLRYPANREDLAEHFTDDSVKKSIETDLALIEVYDKHLKEVELYLARHARIDDPNRYHLLKTVPGVGQILGLVLLYEIHDIARFPRVPDFVSYCLLIRSSKESAGKKLGTGGKKIGNAHLKWAFSEATCLFLRKNGAAQKYLQKLEARHGKGKALGILSRKLATAVYYMLKRQEAFDMKKFFET

SEQ ID NO: 330280 - protein, 357 aa, unidentified
MRIIGCDLHTRQETIAMLDTETGEVVEKTLQHEGEKVREFYSALPRPVQVGIEATGSMLWFLNLVEELGIDSQVGHPAKIRAAEPRKQKHDRRDADLLLKLLMENRFPSIWMPSKELRDLRALLCHRHQWVRTRTRVQNALQAMALTNGLRRGKSLWGQEGQHAIASLPLGPHAAHRRTALQALYRELDADIKALDKRVLEQALERPEARRLMTHPGVGPVTALATDVFLGDPVRFEDAKALASYVGMIPSEYSSAGRQRLGGLSKQGNPLLRFLWCEAAIHAVRRDPLLQRFYRRKLVQKGMGKARVAVARKLGIRLYIMLRDQIDYEEFCRRGQMRQKNGAARAGIPEVGYGPSL

SEQ ID NO: 330281 - protein, 365 aa, unidentified
MKKSSTAAATSKKNLDQKLTIGLDWGDRPSWYCVLNEAGEIVGEQALGTTPKAMKEVFTAMPRSRIALETGMHSPWVSRLLSELGHEVIVAHARNVRLIGESRRKDDRLDARTLARLARIDPQLLSPVKHRSAQAQAHLTVIRARASLVRARTALVNTARGLTKSYGERLRGCNPRNLDLEKAQSLSPELQAALGPLLQALESLSERIAEYNRQIEAIAQRSYPQTALLKQIKGVGTLIALTYMLTLEDPHRFRKSRDAGCYAGLQPGRRNSGQSEPQMHISKEGDPYLRTLLVQGAHHILGPFGADSDLRRWGLKLAERGGKNGKKRAVIATARKLAVLLHRLWVSGEVYEPLHNTKRTIVVAA

SEQ ID NO: 330282 - protein, 368 aa, unidentified
MNSIVYIGMDVHTTNYTLCAFTIAGQEPFARTTINPDINELVKYLETLNRELGGDVEFICGYEAGCLGFTPYHELTAKGYKCVILAPTTMPSTAVRIKTDKRDALNIARCLAYGTFSPVHVPTDQDSAVKEYIRMRDDAQTLLKQTKQQINALCLRHGKIFDGNSRWTPKHKQWLKSLKFGNAIVQETFSEYLITLNQLSDKIERLDKRIDEFSQLKEYAEKVSKLVCFKGIKTHTALSLIVETSDFQRFPTARQYASFLGLVPGEHSSADSRHRLPITKAGNSHLRRLLIEAANTYSRARVGRKSPNLKQRQEGNRPEVIAYADKANDRLRRKYVRIQTHSKANIAKAAVARELACFVWGMMNDRIA

SEQ ID NO: 330283 - protein, 398 aa, unidentified
MICVGIDCVGIDVAKDKYDCFILSSEGEVLADVFTIPNNAEGFDTLLQTIRRCARPEDKIKVGLEATGHYSYNILGFLLNEGLDTYVINPLHTNLYRKSLSLRKTKTDLVDARTIAAMLMSDVDLKSYTDTAYHNEELKSLTRYRFDKVRERTKLKQSVSRLVTILFPELEKLVSTLHMASVYALLSEFPGAKQVSEAHLTHLKAVLYDASKGRYGSDMATTLRDAARCSVGSVMSAKSLELRHTIRLIHELDAEIEDIEAAIQSMMGEIQSPITTIPGMGVRMGAMILAEIGDFSRFDSPDKILAYAGMSPSTYQSGQLSLSGAYSHMEKRGSRYLRYALYNATKYVCLWNPTFAAYLAKKRAEDKHYNVALSHAAKKLVRLIYALEKSKRPYSTAA

SEQ ID NO: 330284 - protein, 416 aa, unidentified
MPAFTLYIGIDWATQTHQVCVMDAYGAILREFVVDHTGESVREFLRSLEAASVEPSKIAVGIEVPRGPIVEALLERGYAVFAINPKQLDRFRDRHSVAGAKDDRRDAFVLADSLRTDQHCFRRLSIEPATVVRLRELARAEQEAGEELRRVANQLFQLLLRYYPQVLELCRFPDEPWIWGLLEIAPTPEQAHRLTLARLRNMLTKHRIRRVTAEEVREILGRAALPVATGVAEAISERVLLMLPRLRVAYQQRKQIVERMEALFAHISGAEDESCGSLRRDVAILISIPGVGRVIAAALITEAFDALSQRDYDALRAHGGTAPVTRRSGKTTQIVMRYGCNQRFRTALYHWARTSVMHEERSKHHYARLRGVGHKHARALRGVADRLLALLVAMLKSGQLYDGARRHISPQIASAA

SEQ ID NO: 330285 - protein, 354 aa, unidentified
MIIIGCDYHPGFQQIAFVDTETGDYGEQRLEHSEGAEKFYRDLAAQGEKVRVGMEASGHARWFERLLAKLTFELWIGDASEIRARRVRKQKTDRQDAQHILQLLMENRFPKIWVPSGENRDLRQLRWHRHRMVQARTRIMNHLQAVALNEGLRCKKRLWRDAGREQLESFRLSPWASRRRRDLLELLDRLTPTIAELTATIEQEVEQCPDAQRLQTHPGVGALTALAFVLIIGRADRFQCGKQIASYLGLVPLEDSSGPRRRLGHITKQGNSLLRFLLVEAAQVTVRSDQEWRSKYFHLAMRRGRKIVKVAMARRLAVRLYWMWRKGWNYGQLKKFGSHAGEPGNRDGVKSNTE

SEQ ID NO: 330286 - protein, 319 aa, unidentified
MAKRVEEVTLGFDVSKRQLELFGSDMSGQRSIDNDPNTIARFLDSFSGPVVIAVEATNVYHEQLVDLALARGFTVYLIDGYKLDKYREAVGIRAKTDANDAELIHRYLVSERPHLRPVNPQSQSERRLWRLLKRRAKLVKLKSQMDLSLRDLDMNLPEVSAVLKEFDRLIRRLSQLANELARSCGWQGMLSRLRTIPGVGPLNALALVAMYHRGEFSTVDRFVAFLGLDVRVRDSGRSKGRRKLTKKGDPEVRRLLFNGARAAANRYTEWADLKQQLMARGMSEIQTSVILARKIARIGYALLNTGGSYESARITCTST

SEQ ID NO: 330287 - protein, 471 aa, unidentified
MKLPANQEKKQSIPVVKPSSTLEEINQNAAGIDLGSGEHWVCVPTDRTDQNVRRFGCFTPDLIAMADWLKECRIDTVAMEATGVYWIPVFQILEAKGFEVKLVNAHHVKTVPGRKTDVLDCQWLQKLHTYGLLSGSFRPEDQVCVLRSYIRQRDTLIKSASAHIQRMQKALIQMNLHLHKVISDVTGLTGMKIIKAIVAGEQDPQVLASLKDPHIKSSTADIAVSLTGDYRREHLFVLQQELTLYEIYQQQIIAVDAEIEKCLASFEPKTLDEPPTTGRKRRKKPTANHPDFDLHKYLYRMARVDFTLIDGLDALTVQTILSEVGLNPKRFPSVKHFTSWLGLCPGQKVTGGKVKSSQTRTVVNRAANAFRMEAFSLTHSRSALGAFYRRLRSRLGAPKAITATAHKLARLFYQIWTIAGRYSDPGMEYYEQKYQDLILKNLQKKAQAFGLQLVPKSQDKEEASFYQTLST

SEQ ID NO: 330288 - protein, 388 aa, unidentified
MPRQRKPNDLSRSLIPLDLNTTLIAVVELSLSSWLVAGIVPGVERQPLKKLKTDENALLTLLNRWRDEAVRSGHKISRIAVAFEAGRDGFWLARWLKARGIEAHVIHASSVAVSREHRRAKTDRLDTELLKRAFVGWLRGERDHCKTAAIPTLREEDAKRPSRERESLVGEQSRLVNRMKATLVRLGIRGFNPKLRHAEQRLETLRTPEGEPIPANTLAELKRDMQRRRFICDQIRSIERERLERLARTPDTEPHAMVRLLARVTGIGIETADLLVHEVLLRNMRDRRAVARYGGLTGSPDRSGGTNREKGMARSGNARVRRGMIQLAWRFLLFQKDSALAQWYRRRTEHSPKARKTMIVALARKLLIALWRLVREGVVPEGVAMRPA

SEQ ID NO: 330289 - protein, 388 aa, unidentified
MNAVLPRVAEQTAIQTQLGAIFVSLELSRSTWLVTSLSPGGGEKMSKHSVRAGDVMGLQERFWSLKQKARARTGHDFPIIAIQEAGLDGFWVHRVLIAEGIESWVVDPASIATSRRRRRAKTDKIDGEALVRALLAYKRGEPRVCAMVRVPTPEEEDRRRIGRERKTLVGERTEHVNRIKGLLYSQGVSGYEPLRRDRRAQLDELRTGDGRPLPQYIAAQIGRELDRLELLLQQIKAVEADRDALVIPGQADNPISPQVAMLIGLRGIGPEFANVLHSEGLFRHFGNRRQVAAYSGLAPTPWQSGSVDREQGVSKSGNPRLRTTMVELAWLWTRHQPESALSKWFRERTKTDSRRKATIVALARKLLVALWKYVTSGVAIEGAVMKAG

SEQ ID NO: 330290 - protein, 349 aa, unidentified
MTKVSMIGLDLAKNVFQVHGIDAAGKVVERRQLRRQQLEKFFAKLPPGVVVGMEACSGAHHWGRVLQKLGHEARMMPAAYVKPYVKRNKNDGRDAEGICEAMGRPTMRFVPVKSLDCQAVMVLHRTRRLLVRQRTMSANALRSALAEFGIVAAQGLKGLHSLMQELEDPASAIPDKARMPLQVLARQWETLNTDICKLETEIVGAAKIDEVARRLMAIPGLGPIGATAILAAVPDASVFKTARDFAAWLGLTPRQFGTGGKQRSGGISKQGDRTLRTLLTIGATSYLRYERARGAKDPWVRDLLARRPFKVAAVAYAAKMARMIWAMLVTGEFYRAPNRSRSVAAQAAT

SEQ ID NO: 330291 - protein, 311 aa, unidentified
MKTFVGIDVAKAHFDLYDTTTGRHVRFENNRTGIKGCLKSLILLNPRLIVLENTGGYEQDLAVALHQASLPTVVVNPRRVRDFGRAIGQLAKTDQIDAALLAHYAASIQPPRRPYPDLHSRQMKALVARRGQLVNMHVAEVNRREHIHDPAIARSIAAIVKAIDREIEKVEEKLALLIGQIPELQQKMQTMCAVTGIGQTTATMLVTEVPELGQLNRRKIAALIGLAPLNRDSGSFRGKRMTGGGRRSVRARLYMPTVVACHHNPVLKAFYNRLLQKGKSKMTALVAAMRKLLTIINAMIAKGETWNPKIA

SEQ ID NO: 330292 - protein, 352 aa, unidentified
MEVTTIGLDLAKSIFRVHGVDTTGQVVVRRPLRRAQMLPFFARLPSCLVGMEACGTSHYWARELIKLGHEVRLMPPAYVKPYVKRGKTDAADAEAVCEAVRRPTMRFVPVKSPEQQAVLSMHRARDLLVKQRTQLVNMIRSLLAEFGLNIPKGLERALLMARRIVDGKAPDVPMEAAKIVSTLSQQALDIHVRLRQIDRDLLVWQRGNDVARRVMTIPGIGPVGATALAASVTDPHQFHSGRQFAAWLGLTPLQKSSGGKERLGRITKMGDKYLRKLLIVGMTSLVCRAKHNPETIEPRLANLLARKPVRVATVAMANKTARTIWAIMTRGETYRAGHQPALAHKNNVTRIS

SEQ ID NO: 330293 - protein, 391 aa, unidentified
MIYVGIDVAKDKHDCFITNSDGEVLFKAFTIQNNKEGFDELYQRIVTVTEDLAKVKVGLEATGHYSYNILGFLLDKGLTTFVINPLHTNLYRKSLSLRKTKTDKVDARTIAMMLMSDVNLKSYSNISYHNEELKSLTRYRFDKVQQRAKLKTSISRLVNILFPELEKLVSTLHIISVYRLLNEYPGASIVADVHLTKLTNLLQATSNGRYGKEIAITFREAAKYSIGSKMPAKSLELKHTIKLIWELDSEIDEIESEIKAIMDEINSPILSIPGISYRMGAMIIAEIGDFNMFDSPDKILAYAGLSPSTYQSGQLVSSYSHMEKCGSRYLRYALFNSAKYVCLWDPTSAAYLAKKRSEGKHYNVAISHAAKKLIRVIYHLEKTGQQYIKVA

SEQ ID NO: 330294 - protein, 343 aa, unidentified
MDHFAGLDVSVKETSVCIVDDAGKIIREVKVESEPDALLPVLTNPSYRFKRIGLEAGPLSQWLFSALAEAGLPGICVETRHMRAALKAQINKTDRNDARGIAQMMRVGLYRPVHVKTLRSQKLRMLLTHRKLLQSKAIAIENDLRATLRNFGLKVGVVGTAKFEARIRELVENLPDLAELVEPLLIVRRALREQIGILHRRLLAIVRDDEVCRRLMTIPGVGPVVALTYRATVDVPARFKNSKAVGAVFGLTPSKYQSGEVNRTGAVSKCGDEMMRMMLYEAAQIVLVRSVKWSWLKAWAMKIARHRGMKKAIVALARRLAVIMHRIWVDGTEFRWTREVAAA

SEQ ID NO: 330295 - protein, 317 aa, unidentified
MNTLTQTNSLVHLGVDVAKAELVLDCHGTTRRFVNAPKGIDALLNAISKPGLQLHLVCEATGGYERPLVAASVRAGIPISVIQPQRVRSFARAHGPRAKSDPVDAALLSRYGSQVLPKPLSPKDSNRQKLDELMSVRSQLIRAKVREENQAEHDVSREVIRIRQDLVKRYDKHIATLDAAAAKLIAADEELAKADHLLRGVKGVGDQTSRTLLAFLPELGHIGRRAVASLVGLAPYNRDSGNMKGKRFIQGGRGQIRTVLHMAALTAIRHNAILKAFYDRLRGAGKCFKVAIVAVSRKLLIHLNNLMANSVKIPLAP

SEQ ID NO: 330296 - protein, 427 aa, unidentified
MSYRIAGIDVHKKMLAVAVADVEVDADFQFEREKVGTTPIELRRLADWLVEHEVDEVVMESTAQYWRPVWEALEQQWRPQRRALKSAPPLAGTLHLAQAQSNRGAGGRKRDFPDAERLVKRLVAQELTLSFVPDAEQRLWRTVMRRKYQVTRNRVQLQNRLEALLEEAHIKVSSLVSDLLGISARRMLQALADGETDPAALATLATARLRATPEQLCDAFQACPTLHPVYRRLLQLTLEELRVIEDHLGQLDQQMADLLAAHHDAVQRLAEVPGLGVDSAQQIIAEVGATAATFPSAKHLASWMGACPGNEESAGVNYSHRCPKGNQHMRRVQNQAANAAVKAKGSIFAIVYRRLVPRLGHAQAIGAIAHRLCRLIWKILREGIRYEERGPAVSVEAKKVRTRKMIRELRTLGYRVELLPAPSSNPA

SEQ ID NO: 330297 - protein, 316 aa, unidentified
MTITAVVVGIDVAQAELVVAVRPTRDGWTVPNDETGIAELVRGLRPLHPTLVVLEATGGYERLVVGTLAAAGFPLVVANPRQVRDFARATGELAKTDRVDAQMLALFGERLHPEPRPLPDAATEALAAVLTRRRQLGDMLTAERNRLAHASETVRGDLREHIRWLERRLSDLDRDLDQRIQASALWRAKDNLLQSAPGVGPVVSRTLLGALPELGQLTHTQIAALAGVAPFARDSGIWRGQRHVRGGRAPVRRALYMAALVASRHNPIIKDFYQRLLAVGKPKKVALTACMRKLLTILNAMVRSNTVWRRMTAQTA

SEQ ID NO: 330298 - protein, 437 aa, unidentified
MDEVTDEPLYRDRVCGIDIGKAGMVATIRVPSDKDPARRAAETRSFGTTRREVLALADWLRCWQVPAVVMEATGDYWKGPFYRLEAEGFDCVLADAKQVKHLPGRPKHDPGDSKWLAACFERGAVTSCFVATPEFRVIRLHTRYRRDLTEERTREKQRAEKLLESAAIKLSSVVTDLHGVTGRDIMNHLIAGERSPRVLAQLARARARRKITELEAALDGAEFFTPAHAALLAAMLERIDRVNAEIARLTEVIDRLLAPYEEQLQQAESMPGWGRRTAQDAIAETGVDMSRFPTGGHLASWAGRTPLESSSGKRKGKAKAKKGNRYLGGLLGETAVAAGKTQTREGARYRRIARRRGKAKACVAVGNTQLKVYHKLLSSPGTRYTDLGPDYYERQASTRRQIAHHVGKLGALGFEVTLCRLPEPDPDPRQAASTQAA

SEQ ID NO: 330299 - protein, 421 aa, unidentified
MGKIIERCAGIDVGKRFLLCCVLTGAANEEPHGETLRFDTTVPALERLRAWLQEEQVTHVAMESTGTYWIPIFNILEEQFAIILANPEEVKNRKGHKTDRNDAKHIADLLRHNHIRSSYIPPKPVRQLRDLTRRRVQLTQDATRERNRVQKLLEQSNVKIGNVLTDVFGVSGQEMILALLDGQSTPEQIGALARGQAQHKLPKLIEALQGHRMSDHCRLVIRSSLRHLGCLQEEVELLDEEILSRMRMPPFEQPFALLQTVPGIGRLSAAAILAEIGTDLEPFPSAEQLVSWAGLCPGNRESAGIQKGRQTTHGNPYLRTSLVQCAWAATRKQGSVFAARFRQLAPRRGEKRAIVAVAHLMLTILYCMVKRRLEFQGAGCVHQQRRRERRAHHHMRALRRLGLDIRVMPEAAIVAAGQEVP

SEQ ID NO: 330300 - protein, 416 aa, unidentified
MKEWKEITHYAGFDWARDHHVVVIVNQQGQIVADFEFEHSVEGWKSFGEKTAGFANLAVAIETSQGAAVDQMLQRDYTVYPVNPAAAASYRQRKAPSGTKTDHIDGWSLADALRVDGQGWRALQPADELSTQLRLLCRDEVALIAQRTLLVNQLQQALVEYYPAALEAFEDWVSPATWDFVLEFPTPEALTKAGKRRWEKFLHTHRLWRPETVEKRLAIFSQADQFKASAPVTKAKSQLALSLCKLLRTLQQQLDQYREQIEALFKNHPDHDLFGSLPGAKKMLAPRLLAAIGSDPGRYGTFQVLQSFAGTAPISFESGKIHKARIRWNCDKFMRHTMHLWADCFHRVSPWGQAYYRKKRQEGMTHACALRCLGQRLLKILFRMISDKKSYDAELHARNQKKHGSWVLALIEKPAS

SEQ ID NO: 330301 - protein, 430 aa, unidentified
MEEAAMKHNSTRERKEKPARLSVSLLERIQPDAAGIDCGQNSHFVAVPPERDPQPVREFRTFTADLHRLADWLMQCGVKTVAMESTGVFWIPLYEILEQRGLQVVLVNARDVHNVPGRKSDVKDCEWLRELHSVGLLRASFRPAATIVPLRSFMRQRETLVEEAATRIHRMQKALSEMNLKLHTVLTDLTGQTGLQIVRSILAGERDPERLATYRNYRCHASHAEIVASLTGNYRPEHLFALRQNFAAYEFLLKQIAECDGEIEALLTALAAQQPPPPAPPPAARRRRASKHQPQFDIRGPMHRLTGGADLSQIDSIGPQAALQIIAEIGTDMRRWPSEYHFASWTSLAPNNKISGGRLLSRRESLNLTNPYICKSACTIRSVRGRLKPSWGDRRSPGFPPRTLQQAFSSSSNRVQKPRPGGEKGERLGR

SEQ ID NO: 330302 - protein, 423 aa, unidentified
MSKKSRIAGLAALYGRVCGLDVHKKLVVACVRILDAKDGTVQSTLRKFGTMTADLLELRQWLGELKVTHVAMESTGVYWQPVFNLLEGHFQVWVVNAQHIKKVPGRKTDMKDAEWIAQLLQCGLLKPSFVPDRQQRELRDLTRQQAKLVQQRNAVDNRIQKVLETANIKLGSVASDVLGVSGRKMIEALIAGEKDVTVLAELAQRKLREKIPELQRALEGELTEHHRFLLHQLLGQYDFLEKEIASVSERLGAVAPPSFRAAVEQLDAVAGVGERGARALLAETGIDMSRFPTHKHFASWAGRCPGNHESAGKRRSGKTPAANRHLDAVLTEMAHAAVRTKTSYFKSQYHRLAGRRGKKRAIGAVKHSLLVTVYFMLRDDKPYKDLGVDYFDKLNPQQRIRYHVRKLQELGQEVELSPMADAA

SEQ ID NO: 330303 - protein, 443 aa, unidentified
MSQIRLRILPGVLSVGSRRQGDTLASSRLRVMSLVIMERPAPDLQTVDYAASRERPWRRATYKWEPAVKNVRFVGLDVHAETIAVAVAELNGEVRSLGVIPNRADSVGRLMRKLGKPGQLRVCYEAGPTGYVLYWQLAQLGVHCEVVAPTLVPVKSGDRVKTDRRDAEKLARCYRAGDLTRVWVPDAAHEALRDLVRARLAAKRDQLRARHRLGKFLLRQGRRAPEGTTSWTGKYLGWIKQQHFEQAAQEATLLDYLHEVEHVAERIMRLERGIDAAVNSMPESLRTVIAGLQCLRGVAKISAVTLVSELGQISRFARARQLMGYAGMVSREHSSGERIRRGSISKAGNAHLRRIVTEAAWSYRHRPNIGKTLATRQCGSSETVKAIAWRAQHRLHARYRALLGRSKTKQKVITALGRELLGFIWAIGVELERTQHQEVRRAA

SEQ ID NO: 330304 - protein, 283 aa, unidentified
MDHVAIDLGARKSQICVRNGAGEIVEERRWDTWDLKRYLAERPKSRVIVETCAEAFGVAALAKELGHETRIVPATLVRTLGVGARRTKTDQRDARALSEVSCRVDLPSVHVPKAESRERKSFCGMRDALVGARTKVINTVRGWLRGQGRRLGKGSRATFTARVRAVCGAELPGYVERQLRVVEMLTVDIDEADKELEAQAEQDEICRRLMTVPGAGPLTALRFVAGIDDVSRFPNAHQVESFLGLVPGESSSSERQQRLSITKAGPPALRWVLVQAAWTVPPS

SEQ ID NO: 330305 - protein, 338 aa, unidentified
MKTYAGIDLHSSNNYIGVIDANDKRLYSKRHENQLKHVLKALTPFKKTLKGIVVESTYNWYWLVDGLQEHGFKVHLANPAAIQTYNGLKHTDDKWDSFWLAHLLRLGILSEGYIYPKDQRPIRDLLRRRLMFVRQRTSQILSLQSMISRVRSLDFSGNSIKRFNMAFIERLFDSYHHRFTAERNLLTIHFLEGIIREIETEVRSQIQLREEFQMLLTTPGIGHILGLTIMLEVGDIARFPTAGNYSSYCRCVESKKITNNKKKGENNKKNGNRYLAWAYVEAANHTIRVCPKAQKFFQRKMANGNRTLAIKALANKLSKANYYMMREQMPYDVDKLFR

SEQ ID NO: 330306 - protein, 357 aa, unidentified
MNYVGIDYHKAYSVLVTMNERGQRLQEARIPGNAPVAFAQYFQSLGGPAKVVLEGCRNWGYLYDLLHEIKPIEEVQLANAYKVRVIAEAQVKTDKIDARALANLLRGDLIPRLHVPSPKNRCRKNVLRQRVFWIRQRTMIRNRVHILVERQHGLSVPVLRDLFGKRGMDWLKRLQLPEPDGTLLRQDLAVMEGLNEQLKELDRQVEAGNRNDGVATLLQSLPGVGPFFAAVLASEIDTVERFHSPTKFCAYAGLAPTTSASGGRCYQGKLFGQCNRWMRWALIEASWVAIQCSSYFGELYRFHKARGKKSNQAIVIVARRLCEIAWHLLKENRPYEERPMIKNFPGRAESKVIESVG

SEQ ID NO: 330307 - protein, 400 aa, unidentified
MLSIGIDVSKGKSTVCGMKPGGEIVYTPFEIQHTREGMSELVSLLHNSGEEVRAVLESTGSYHCPVVAALLENGIFVSVVNSLRMKRFCSQSIRKVKTDRIDAMQIALYGLAYWQELQPTRLPEDTYRELQLLARQYYQMTSILIKAKVDFNALCDQVLPGMQELMSDHAGRHKLSDFVLRYRHTTHILEMGETRFRKDYCKWAEKKGYRNRERMAALIFATAQNGIPVLPNAPSTQIVITEAIRVLHTVEASRDAILTQMQALAKTLPEYSLVREMPCIGDTLAPRLIAEIGDVRRFHSKRALIAYAGIDAPPYQSGKFCANNRHISKRGNRYLRKTGYEVMQSYVMHKPANDPIFTFIEKKRGEGKSGKLAMVAGLNKFLRIYYGKVTELYRSLPAIE

SEQ ID NO: 330308 - protein, 339 aa, unidentified
MKITTVGIDLAKNVFQVHAVDERGRAVLRKQLRRDQLTTFFVNLPPCLIGMEACASAHHWARTLQRFGHTVRLMAPQFVKPYVKSNKNDVADAEAICEAVGRPNMRFVPIKSVEQQAVLSLHRVRHGFVRARTAQGNQIRGLLGEFGLIMPKGIINVAKRVPVLLEDAGDELPASLRQLIERLLEHLKELDRQVDELEAQIKAWHRGSELSCKLEKIPGIGPLGASALVASIADANSFDNGRQLSAWLGLVPRQDSSGGKPKLLGISKRGDVYLRTLLIHGARSVITHGKQHDAWLTRLLARRPFNAAVVALANKMARTIWALLAHERTYRKDYAAQVA

SEQ ID NO: 330309 - protein, 425 aa, unidentified
MNFNTNEKINQVSENTLVIGIDIAKRKHYACAVDDRGRILQKSFPIIQSKIGFDDFYERLMTLKEKHEKQEILVGFEPTGHYWMNLAAFLTHYGIPFVMVNPMHVNRSKELDDNLQTKNDQKDALVIARLIRDGRFSYPRLLEGVEAELRNGATLRSKLQEDLSALQNRIIRWLDRFFPEFTQVFKSFGKMAYAVLEKTPLPMDIQGKTPEELLSLYRQVEGLKSPQLPKSKQLVRIAPHSIGLTEGLVMARFEIATLLSQYHMMQAQLDELTCQLTALAKQMTDYDYLASVPGIGDITIVDLLSEVGSLAQYAHPRQLIKLAGLTLRENSSGQSKGQKRISKRGRRKLRALLFRVMMPLILHNSAFKALHEYYTTRTKNPLRKKQSIVVLCGKLLKILHALCKKKVMFDEHQMMTDFTVLKAAS

SEQ ID NO: 330310 - protein, 346 aa, unidentified
MKMVRFFLGLDVGKSEIVATLMDDEEKELFRGSFKNQLSGFREMMKAVTGVTLNLAKEYQIYAGMEATGTYYLKLVKFLYEKVDGVTPYVINPNKVKKYMEYRGSRTKTDLQDSRIIAMCIRDGVENGLFRPWFPSRKEHEELKQLVRLRESLLTMKNMEKNRIEGLEQNPDNSPHAMKILEDHVAYLSRQIKELEAILKDNIKHGNFPDIEKDIERLKSIPGISDLTATCFVSEIGEIERFDGIKQIVAYAGLSPMEKQSGTSIRGKAQICKKGSKKLRQILYMPTLAAIRCNPVIKSFYEKLLEKGKKKMVAITACMRKMLHIMYGIMKNKAYFDPALCMPKVR

SEQ ID NO: 330311 - protein, 367 aa, unidentified
MKKVSTAATKQSRNISSQRLTIGLDLGDRNSCYCVLDEAGRIQLEQRVRTTAKALQEVFGAMPRSRVALEIGTHSPWISRWLSELGHEVIVANARKVRLIGENRKKDDRLDAQTLARLARIDPQLLCPVKHRSAQAQADVMMIRARASLVRVRTGLANAARGLAKSYGERLLGCNVRNMNPEKAEGLSPELQRALEPLLSAIEEVSERICEYNDRIEALAQTSYPQVELLKQIKGVGTLIALTFLLTMEDPHRFRKSRDVGCYLGLQPGRRQSGKSDPQMHITKEGDPYLRTLLVQGAQHILGPFGIDCDLRRWGLKLAERGGRNGKKRAIVATARKLAVLLHHLWVSGEVYAPLHHSNRTAVAVAA

SEQ ID NO: 330312 - protein, 418 aa, unidentified
MEDSHSKKVKHINKKTLIVTLDIGKTVHYGYMRTPTGEEVKPFPFYNLRQGFNELWDKVCQFKQAQGLTDVVVGFESTGPYAEPLFHFLRTKPVHLVQVNPMHSKRLKELTGNSPCKTDKKDPRVIADIISLGHALTLVVPQGAAAHLRRLTQARERAIQRRTALLNQIQHLVFVVFPEFLNVLKTVHSKSALYLLQHHPTPQDIVALGCESLTVMLRRVSRGNVTIQRARQLFEAAQGSIGITDGRDSILVEVKHLITAIEHEDHLIDDVEQQLNYYVQQIPYSQSMLSIKGLGIITVAGLIGEAADFDAFATAAEVMKLAGLDLYEVSSGKHRGRHHISKRGRALMRKLLYLAALTMVRRQGIMHEHYQQMLGRGMPKVKALVAISRKLLRLICALVRNRTVYVTQYHHRTLEIAA

SEQ ID NO: 330313 - protein, 436 aa, unidentified
MEILTRCCCGLDVHKKTVVACLRRVETAGRVHKEVRTFGTMTADLMALAQWLTAEECCQVAMESTGVYWRPVFNLLHDRCEVLVVNAQHIKAVPGRKTDVRDAEWIAELLQYGLLRGSFIPPQAQRELRDRTRHRTTLVQERARVINRLQKVLEDTNIKLAAVATNVLGVSARAMLEALLAGTTDPSLLADLAQGKLREKRSQLEQALVGILRPHHRFLLGELLGQIDYLDGAIARVSEEIGRRLHEEEESLTLLDSIPGVSRRTAEVLLAEVGTDLQRFPTAKHLASWAGVCPGNHESAGKRLSGRTRKGSPWLRQALVEAAHGAARSKRTYVGAQYRRIAARRGKKRAAVAVGHTILGMAYQVLTRREGYRELGANYFDEHDQRRVERRLVARLMQLGYSVDLKRHVGQPPPEPQPLVSQSMDHVSDRPMPSVP

SEQ ID NO: 330314 - protein, 400 aa, unidentified
MISVGIDVSKGKSTVCILKPYGEIVSKPFNITHTQKDLSELSSMLFRLNDEVKIVMEATGIYHLPVLTYLQEKGFFVSVINPYLMKSYRNESLRKAKTDKIDSRIIANYGIDHWFKMKEFQTSGEIYEELKLLGQQYQHYMKLHLLSLAELTHLLDLTMPGIKNLLASWNETNRKDKRSDFVERFWHYDVITSMSEQEFTEEYILWAKEKKYVPSQEKAKVIYTLAQESIPTLPSETSSVKMLVTEAVRVLKEVDATLGLILSRMQEIAKTLPEYSVVIEMGGVGNTLAPKLIAEIGDVRRFRNGKALVAFAGIDPPPYESGQFVGCNRKISKRGSASLRKVGYETMRSLKMRSRPEDPVYRYVVKKESEGKSKKSAKIAGLNKFLRIYYARVTELYKNI

SEQ ID NO: 330315 - protein, 319 aa, unidentified
MAEEVYVGIDVSKAELVVAARPGGERMTLTNDRAGIKRLVGRLGELKPRLVVVEATGGLQRQVVAALWTAGIAVAAVNPSWVRNFAKGRGLRAKTDRKDAELLALYAERERPQVRPPADAETQALQELVMRREQLVAMLVAEEHRLTHALGPVRKELRHHISYLEGRLKQIAENIDKTVRRSAGWRRKSEIVRSVPGFGKVFCSMVLAKVPELGALNRKQIGALVGVAPVPDDSGTRHGRRAIAGGRFEVRNKLYMCALVASRANPVLKEFYQRLVARGKPKKLALVAVMRKLIVTLNAMLKTNSMWRPPCLAVSVREN

SEQ ID NO: 330316 - protein, 385 aa, unidentified
MKPNSQMTLGDFFRQCVGIDISKKKFTACLYMYDRASDVGCYTKSIDFANTKSGFNQMVKWSRKEAVKEYPLTYLMEPTGIYYEPLAYHLHKIGQTVYVVLPNKARKFCEAEGIKTKTDAVDARCLALMGCVSRKLSPWSPPSTIYHELRQMTRFHADLCKVRTSVSNRMEALDHMHGPDKSVIRHCQKLLEKIDKLMEKNGQALLQKLSENKELEERVKRIATAKGISVQTILCVVAETNGFHLIRNRKQLTSYSGLDVIAKQSGNEDPKHRISKKGNVHIRAALYMPALVAIRYNRQLKTTYDRICQKHPKEKMIGITAVMRRILLLIYTLWKNGEEYDETRDMIRMPRKKGLEPENGQEDLVGIDREPIDWNAVGDNGEPPF

SEQ ID NO: 330317 - protein, 393 aa, unidentified
MQTPIYVGIDVSKDKFDYAAIDTQNTTIKKGSLQMNRDGFQELEKLIQSYPNAVVGFESTGTYHINIMSFLLSITNHVHLLNPALVKKFAEADSLRKTKTDAVDALVIARFLIHRQHNISATTEIDSAYLTQLARLRESITRDVAKTKTHLKQMLNIAFPELLKSANVFTDTLLHILIQFPSAKAIRKATKKGIRKTFYNLTKSRGKNPNLNPDQLYELAKKSIGTADESLEMAIQFDIKHLEFLQKQLDEVTSKLIDNVNKRFANELEILKSIKGIGDTTASHFLSEVKDIHRFSSAKQLIAYSGTDPSVKQSGNMIKKGKISKRGVSSLRRVGYLITCSVIRHDCVFRDYYLRKRAEGMVYRKAVIATWNKLLRVIFAILTKQVKFDHNHG

SEQ ID NO: 330318 - protein, 341 aa, unidentified
MSIVGAFDVHRRQLTFDYLDTVTGEVKRGRIAPADREHLREWLARFAGCDDVHFALEGCTGWRYVTEELAAARVTPHLAEPADTAALRGRKRHAKTDKTDSRHLRVHLAAGDLPECWIPPAQVLEARAIVRLYKDLLDERGGWHQRIAATLFHQGVPVTASMSTAPGRAAVAGMALSPAGLQAVETGLRQVGRLTAELEPLRRRLDMISRRQSGCRALRATRFGVGAVTSVAIWAELGDVRRFGNSDDVIRHTGLDITVYSSDGKRSAGHLSRQGPQLLRWALYEAAKCAARPGAPDHGYYAATRDRRTGGLATLPVARKLARRCYHVLRELGEEALQPAA

SEQ ID NO: 330319 - protein, 400 aa, unidentified
MRVVFGIDVSKASSEVAILVNGEKVHGYTISNDAIGFARLLGDLRTVHKPEIIFEAIGVYSRRLQSFLDEHGYAYTRLNPLEAKKQLDSLRVRKTDQIDAEKLAQSQFVLNRKPTYVQEEVYQNLRDLSRFYQNLTEDIVRAKNRLHKVLQVTFPELENILSTPSGEQYWNLVIAFPCKDCVLELSNDELSKSIRLSTSKRISDKRVAYLAEKLIALANQSYCAVKKTSPILEEVRYYTKELLRLSEQRQAVLDEMVELAQPLPEYDILLSIPGIAETTATSIIGELGDIRRFQSANQINAFIGIDLRHYESGNFLAKEHITKRGNPYARKILFKCIHNIASANHTNPCHIADFYKKRKRQSQTTSTKLHTIASIHRLIRTMYYLIMHNKFYDYASTQNR

SEQ ID NO: 330320 - protein, 359 aa, unidentified
MVMIGTDSHKRTHTVVALDDIGRRLGELTVAAATDGHLKLLAWSRNWDEVSFALEDCRHLTRRLERDLLRAGARVVRVPTRLMAGARRGGREPGKSDPIDAEAVALAALRHDGLPIAELDGPAREVRLLVDHRRDLVAERTRIQSRLRWYLHELDPTLAVPSRGLRRFCVMDSLAELLAERDGVLARVSREQLARCRELTVQINQLERELRTLMRRLAPTLLALPGCGVLSAATLFAETAGARRFRSNDAYARFTGTAPIPVWSGNTAGKVRLNRGGNRTINCALHMIALTQTRGIGPGAAYVEKLLAAGKTRTEALRLLRRRLSDAVFAALRADEPPAAARSCVPTTTSTGSELPDAA

SEQ ID NO: 330321 - protein, 362 aa, unidentified
MGAIDPAVVPGEEEVFVLHVGLDLGRKRVEVCLISDQGELIDRFAAIPDREGLYGLWSRVAVYGQPIRGVVESMNGARFVHDELVGHGWEVLVADAQKVKGLAPLACKTDKIDARVLAELSFRDLVPAIWLPTLELRREREISRWRLHLVKHRSTLKNRVHSTLITFGHQRHMSDLFGVAGRKLLKELEMPEPWRSHVDASLVLIDDLEARITAIARELRRAGADHRYIPILMTAPGFGWITSFTVACEIADINRFSSPVKLTGYTGLCPRVKQSGQMDQRGPLSKHGPKYLRWGLMEAAIAASSHPLYRERYQRTKRRLGRQRGPKVAQIDLARQLTEAIWYMLTRNQPFAPAGAIYRLAA

SEQ ID NO: 330322 - protein, 416 aa, unidentified
MDVIVSRCAGLDVHKNTVMACVRVPGPDGGRTSTVRRFRTFTDSLRELRAWLIAEGVTQVAMEATGVYWRPVWHILEAVPEFELLLANAHAVKNMPGRKTDVADAEWLALLCECGLLRGSFVPPPVIAELRDLTRYRKKLIEERSRETQRVQKLLEDAGIKLDSVVSDILGISARQMLEALIAGVRDVEALAELAHTRMRPKIPQLRRALEGRFGAHHALMLRMHLDHVDQLSATIERLDVEVDRVIRPFSTQLQRLITIPGVGRRTAEVIIAEVGVDMRRFATAGHLASWAGMCPGNHESGGKRRSGRARKGNRALRAALCEAAWAAARCKDGYLPAQYRHLLRTFGKKGQTRAVFAVGHSILVIAWHLLANDCDYTDLGSEHFTRNADPEARTRYLVRQLEALGHKVTVEPAAA

SEQ ID NO: 330323 - protein, 419 aa, unidentified
MNRIETKKLRVVNSQTLIVAIDIGKTTNTGYCRCPGGKDIKPFGFSNNAEGFRKLWDCICWMKRFHHLEQVVVGFESTGAYGEPLGHYLKDKPVRLVQVNPMHTKRIKELQGNSPGKTDRKDPKVIADIISLGHALSVVIPEGAAAELRRLTLARQRCLQRRTALYNQLQDLVFVLFSEFLQVIKDVKTKTAQYLLRHYPTPQDIGKCGVETLSLVLKRVSRGKLGRVRAQALYGAARESVGLKEGTRGIVLEIDEIVCSLEACHRFIKKMEEEMVVYLQEIPYSDSLLSVKGIGEVTVAGLIGEVGDFRQFHALGEVMKLAGLNLFEISSGRHKGNRHISKRGRPVLRKLLYFAAINTVRKGGVMHAAYQRYLDRGMPKTKALIAIARKLLRILFALVRDHSQYVETYSQKEALELAA

SEQ ID NO: 330324 - protein, 352 aa, unidentified
MTVTIVETRAEIRAITGGVDTHADVHVAAALDPIGGLLGVREFPATAAGYGRLMSWLGGFGTVALVGIEGTGSYGAGLARHITTAGVRVVEAGRSDRQDRRRQGKSDPLDAVSAARAAQSGRARGASKGRDGAVEAIRALMVAKRSAAADRTQTINQARALVLTGPDDLRARFTGHTAAALVAELASLRPRPGSTVGYATRIALRELGRRAEFLDGQLERLDELIGPLVAARAPGLLALYGIGPHTAALLLIAAGDHPGRLRSEAAWAHLCGAAPIPASSGKTVRRRLNPGGDRQANHALWRIVFTRLGSDPATRAYAERRTAEGKSKKEIIRCLKRYVAREVYPHLRTTAG

SEQ ID NO: 330325 - protein, 429 aa, unidentified
MNDATERLELFRRIRTSVRGSERYLLVGVDVAKNNHHAFFGTPNGRTLSKNLVFDNSTKGFEILRSLAGDLQNQHGLVEVVYGLEPTASYHKPLAEYLIRQDEHVVYVSNVAVAKNRALLDGRWDKNDKKDAANVADLIGQGRCLYYDVPEESLRELRSLIAFRIRLKKEEHALRMRLRNNVFAQYFPELDKLYIRAGQPDDLVLSIAQHCLDPREIAGMEFEAFLKLIMTRKIRIEQEKRLRELWEIAKESAGCLVHDAARWEAQSLVSKLKAVRETVKGNEELMEKVSQQFPEYESLRSIPGFGPIVSAMVLAAIGNAFRFENRKQVLRLAGLDLSAERSGKNSDSAKPVISKQGKAALRYALVQAAMVASVKNPDIRSYYSKLLKGRELERGIKLKMKVKLAAKLLVVAWSLMKSKEQFKSSCFIG

SEQ ID NO: 330326 - protein, 359 aa, unidentified
MRKSISKLETVTTVGLDLAKNVFQVHAVDGQGNVVVNKALGRAELLAFFAALPKCLVGMEACASAHHWGREIAALGHEVKLMPPAYVKAYVRRSKNDSVDAAACCEAVGRPSMRFVPLRSVENQAELMRHRAREMLSSQRVALLNGLRGHLAEIGVVAPQGGRYAYELKTLAETGHDTNGEIVVPTSVREALAPLVRQIDAIDAEIAAIDRKLETQAKNDPTAKRLMTIPGVGPVTASAIVATVRDVKAFANGREFAAHLGLTPRQNSSGGKHRLGGITKMGDRYLRKLLVVGATAALVHREGHNDALRSWVKELFARKSGPHKKKLIAVALANKLARIVFALLSRGGAYDDRPVRARA

SEQ ID NO: 330327 - protein, 458 aa, unidentified
MGRKGKRTKGIEEAHPFAGMSQVNPNAAGVDIGAVEIVVCVAGENNTQIVKAFGNYTVDLQSIGTWLKEHKIKTVAMESTGVYWIPLFEVLESMGFKCLLISSRSLRRVPGRKSDIEDAQWIQTLHSYGLLESSFRPQADLVALRTMLRHRAQLLEHRAPHIQHMQKALLQMNVQLSQALSDVMGETGQAIIRMIVKGERSPQLLAAFRDPGCKKSEEEIGKALTGTWRDEHLFVLKQSLELYDFYTQQLEVCDKEIDRQYALIRPDWETGELPPIPKKKQKTHSKNAPENAKEIRLHLKRINGVDLSLVDGFGVSLAQTVTMEVGSNVSEKFPTEGNFCSWLGVAPKHEISGGKVLKNKTLKTKNRAGQAFRMAAQSVKNSDSVFGVMYKRFRARQGPAQATVSTAHAIARVVYRMLKYQVEYETISVNEYEKKYEEQQVKYLKKKVAKLGFQLVPA

SEQ ID NO: 330328 - protein, 538 aa, unidentified
MTVNTSTNRRKRKVNYKSRGRLNLHKPNGGIGPRVAKVGGDRFAIVCVDPAKHRSDWMMADYFGNLLIEQQTMEHQAAFFKLAVAQIREAQQQHDIQDIIVVVERTGNYHLAPKRAFAKAGLEVRVVHPFATKQYRMPADPGNKTDGNDLKAQHRAAVAGFGLCELELESPYRELQLRIRHRRNLVEKSSTLACQVRDHLHLSMPGYSTLFDHLLDHRSAMAIARCCDSPAKVLELGHTGLGKYLRERKIRYQPRTVDKVLAWASQAACDTIQNGPLHHAIWTDLEELYQRFQEQILTIERELAGDLVKTPYVRLMAIPGINVVSAAELAGEMGPIHHYANANAITGRAGLYPSRYQSDQTDQSGPLIRQANRRLRCVLMRIADNLAFHCAYYRGHADADRARGLDVRASRVKTAKKFTRLAFACIAGDEPMKHSAFQKPDSILEKLREFHHVHKTPIDQLLDDLKKTVEQLPYNTRSREAKVVAEVLLHNSKRKRGGIQIGALLPAVLARLGMNVVEGTGPETILHETETTEVRDRS

SEQ ID NO: 330329 - protein, 394 aa, unidentified
MKLIGIDIGKNKHFFCIMDQQTGEIISQPISFSNDKEGFDFLIQKIKSYSKDSVLIGMEDTGHYHFALLKYLLDLQYTVALINPKTTDFNRKMQGGITKNDKLDTINICDVLDTPERKKQYRISKVNSFDLYEQKQLTRHHHNLKEEENVYKNRLQKCIDIVFPEFNKLFNSKYGIVYMNILKTFGSAEYIANTDIWTIRKCFEIEGRGNRISLTPERLKECARSSIGISSSAEVIQIKHLTAQIELIEEQLTEIDKKIEEFSIQNNSPILSIPGISHFSGTSILAELGDISNYSKPSQIIKFAGVAPLHYESSQFNAQHTSITKKGSKYLRKTLYQIILPVIRHNQVFYKYYQLKISQGKGHRCAQGHCVRKLLRIIYHLLKTNQQFDPQLLR

SEQ ID NO: 330330 - protein, 342 aa, unidentified
MTFVGCDLHTRMQQVAVLDTGTGEMSERQLAHDGSAVEEFYAALPGPVTIGIESTGYATWFHTLIQRLGHTLLVGDAAKIRAMVVRKTKTDRRDALHILDLLRHDRFPTVWVPDPVTRDLRALLAHRMRLVRIRTMVKNGLHAIALNYRLARGSKLLRQAGLAQLHALALPPHTAQRRDQSLELLAGLTTQIRALDDAITTAALAHPDGPRLITHPGVGALTALATIVVLGPVARFHDSKHVVSYVGLAPALNASADKYHLGHITKQGSPLLRFALGQAASHAARMDGDLKRTYFTLVHRRGRPKAKVAVARKLLVRLFIMLRDQIDYDEFRRRGRTARASA

SEQ ID NO: 330331 - protein, 455 aa, unidentified
MAKQKRQTKMKVQVNALEQIKPHAAGVDVGAEEVYVAVPPDRDTQSVRSFPTFTADLRRLAEWLKACQIETVAMEATGVYWIPLYEILEEKGFEVCLVNARHLKNVSGRKTDVLDCQWIQQLHTYGLLNPSFRPPEQIVAIRSLVRHREMLVQYRSAHIQHMQKALTLMNVRLTNVLSDITGVTGLKIIRAILAGERNPKVLASFREPGCKKSEAEIAKSLEGHYKREHLFALKQALELYDFYDRQLQACDAELEAMYQEFDPPEYPGTPPPAPRTQKRRKNQAHFDLAPALYRLTGVDLTQIDGVDELTVQKVLSEIGTDMSKWPTVKHFTSWLRLCPNNKITGGKVIQTGVQPTKNRASAALRVAAASLKSSDSALGAYFRRMRARLGTPAAITATAHKLARIVYFMLKQRKPYHDCGANYYEQQYRARVLRNLNRRAAKLGFRLEPAVLEVS

SEQ ID NO: 330332 - protein, 351 aa, unidentified
MALIRTRMRHVAAVITSTGRLLGTESFPTTGAGYAALLGWMQAFGTVLRIGVEGTSSYGAGLTRSLRRRGVTVVEVNRPNRQLRRQRGKSDAVDAEAAARAALAQASERVPKSQDGAVEMLRLVRLQRRSAIDARTQAANQLHAVIASAPESLRARLRDRSIADVVDELRQQRMPRVQRVRSAASDLRDMTRLILRGLAARWSQLNAEIRTLDTYLKRLIEQVAPAFLTRPGIGPEVASTLLVAAGDNPDRLRNERSFAALCGVAPLDASSGRQQRHRLNRGGNRDANRALWVIAFVRWRMHPETKAYAARRMSEGRTKLEILRCIKRYIAREVFKLLRTACVNMPHATLA

SEQ ID NO: 330333 - protein, 346 aa, unidentified
MRTLYCGLDLHSTRCHVVVIDKEANVLHDRSFPTSAENLVEIFSSFEGKLKVHMEVSELAGWVRMVLLEEVPQAREVIVSDAKQFSWIAKDPHKGDELDAWKLAEYMRLGRTHPVFYPEDQNLAVFKKTVQHYEDITSQQAALKQKIKARLRVEGIVPQGKTAYSQGGREQALSLIEDPFRREAVAQLYQLLDHALEFQQEALELMERQGRRFPVIQRFQAVPGIALKLACRFVGYIQNPHRFATKQKLWTYCRLGITDKGSNGKPLGYSRLDPNGNGRLKDLSRKAFETSVFKRKDNNAFKRFYEASLRRTHDEVNARLNTQRKILETLWIMWKKGTQYDDSYMG

SEQ ID NO: 330334 - protein, 338 aa, unidentified
MTICYVGVDLAKDVFQLCGMTANRRVAFTRRIRRNQLLAQIAQLPACQIGLEACTGAFYWQRQFERLGHQVKIISPQYVKPFVKGQKNDGNDAEAIAIALTQPTMRFVPSRSVEQQDIQALHRARQRLVNHRTATVCQIRGLLLDRGFPIRTSVRAVMRAIPELLEDADNGLSAMLRETIAELDDLVRDLTIRIQSFDRKIAAVFHSNADCQRIARVLGVGPKTATAIVAAVGDGREFKNGRHFSAWLGLVPRQHSSGDRRALLGITKRGDRHLRTLLVHGARAVVRTAQRKDDPFSTWVNELKARRGANKATVAVANKNARVIWALLRHGGEYHAPA

SEQ ID NO: 330335 - protein, 418 aa, unidentified
MEFAALVGWDWADKEHQVSTREAGQELVVRKVVAGGANAIHEWATGTLKEYGGKPIAVCIEGSRGAVMHALMCYPHIVLFPVNPKSASSLREALFPSGKKDDPIDADVLLLLVDKHREKLRPFEPEDAVTRKLALLSEQRKKITNDITRSTNRLKANLKGYYPQALELIGDLDTQLACDFLATWPTLQRLKRSRPATIASFYRRHNSRSAELINERLGVIRVSVALTDDEALVEGGEIKTLSSVMVLRAQLEARRYLDDQIQKIYESHAEHNLIDSFPGAGPVMGARLIGLLGSNRERIISAEQLQLITGIAPVTRASGGRNGTKSVHRRLQRSKYLHQTIVEWASCSIPHSEWARACYDQLRARGKGRYSALRILGYKWLRILFRCWSTSTPYSEQHHIAELQRRGSPLAADFQMQT

SEQ ID NO: 330336 - protein, 324 aa, unidentified
MEAEAKYVGIDVSKARLDVAVWPGAHSFSVANDPRGIEELVEQVAALKPQVVVLEATGGLEAMAASELHAAELTVAVVNPRQVREFARSLGRMGKTDRLDALVLAQFAQSAHSNDRLPTLRLPDETEAELKALVTRRRQLVAMLIAESNRRERAPKVIRKSIVASIRALKRAIAAIEQQVREVLAGSPVQQAKAALLSAVPGVGAQLTATLLAELPELGSLGRRKIASLVGVAPHPHESGKFYGRRRCWGGRATVRTTLYMAALSAVRYNPALRACYQGLLERGKSPKLALVACMRKLLVILNAIVRDRAPWNPDYLLDFQHSR

SEQ ID NO: 330337 - protein, 435 aa, unidentified
MSMSFQQDVKEDIILKRAETGKVRGVKDDALIVAIDVGMEMNRGYCTTPDGRDIKPFKFDNSREGLDKLWGMAMASKNRFKCNEVIIGYESTGPYGEPLLHYLAKKSVKMVQVNPMHTKRLKELNDNSPLKTDDKDPRVIADIIKLGRALSIVIPEGDAAYLRRLNNSRERHVRERTALVNQLQQLVFLLFPEFKKVMKDIKCRTPLYILKKYPTPEAISVLDKHVLGEEMRKKSRGKFREPHAGMLINLAQNSIGIKEGVSGLSMDIRHILLQLEMLKTLIAEVEGEMEMALGRVSYSSKLLSIKGLGVVSVAGIIGEIGDFKNFKTRPEIMKLAGLDLYEISSGKMRGQRRISKRGRSLLRKILYYAAIQTIRKNGILHDYYTRLTDRGMKRMVALVAVSRKLLGIIYAIVRDDSEYSVDFEFTKRQVIKKAA

SEQ ID NO: 330338 - protein, 370 aa, unidentified
MAKRSMFVGMDVHKESIDISLAEEGRDGAVRHYGVIPGDLEALAKVVRAVRAPDRRLRFVYEAGPCGLGIHRYLTAQGEDCVVGNPSSMPKRSGDRIKTDRRDGNALARLHRAGELTAIYIPTADDEALRELVRAREDAVGLSTQAQHRLKAFLLRQGRRSPGRAGWTQPYRRWLADLSFPLAPQHIALQEYRDTIDETERRVARLADQRRQITPTWRWAPVVDALQALRGVSFVTAVGLVAEIGDIRRFTHPRHLMAFLGLVPSEYSSGPSVRRGGITKAGNPHARRLLAEAAWAYQGVARIGRQMLYRQEALPKAICDIAWKAQLRLTSRFRKLVARGKAKPKVATAVARELTGFIWAIAREVPAPPA

SEQ ID NO: 330339 - protein, 348 aa, unidentified
MAHFVGLDVSVKETSVCVVDDAGKVILEQQVPTEPADIIALLTSLGVPFGRIGIEAGPLSQWLVNALTAADLPVICVETRHMKALLTAQQINKTDRNDARGIAQMMRVGLFKPVHVKTLLAQQQRMLLTSRKMLQRKLLDLEADLRGTLRNFGLKVGGVSSSRYEARVRELVEGFPGLAAIAEPLLSVRRVMRQQFAVLHKMLLDTVRGDPVCRRLMTAPGVGAVVALTYRASVDQPQRFAHSRAVGAHVGLTPKRYQSGEVNFDGGVSKCGDALLRTMLYEAAHSLLIHGRKWSWLKAWGIRVAQRRGMRRAIVAVARRLAVVLHRMWVDGSEFRWSKNSTAVPAAV

SEQ ID NO: 330340 - protein, 426 aa, unidentified
MKEHIDYLSTLFVGIDIASRIHVISALDFNQDFFIKMKPFENTKEGAGIVEKMIADVLADNHQFKYVVIGMESTGFYGVHLANYLSTSELLAPFSVRVYCLNPKEVKNYKKSFNDIGKNDGIDSFVIADFARVGRIAIKPWRGSQYLALQRLTRHRMHITECITREKTYMLNNIYLKFSEYALLRNGEHPFSNKYGATAEAILTEFTTNEDIVNSSIEELVEFINSKSKGRIADPEETAKIVQAAARNSYRLDKCLYEPLTISIASSFNCISSFEKELKAIDKAILQTVQGLNPDEYTVLNSIPGIGKVYSAGILAEIGSIKAFQNANQLAKYCGIVWNDNDSGDFESEDSRMSKAGNRYLRYYIIEATGSVISHCPEYKAFYQKKYAETRNHQHKRALALTSRKFIRLLFGLLDKGQLYSPEKGR

SEQ ID NO: 330341 - protein, 353 aa, unidentified
MGDNDLKKINYFVGVDTSKDELDFAVLKDNVFLIHKECRNEPKEIAALVDELKTFKGFTTGKTLFCIEDTGMYCNPLLSHLKKTKAKIVLELPIRIKRSLGLVRGKNDRIDAIRIAQYASRYKDNLRLLSEKRPVVEMLRELLSLRSRIQSLNDGIKKRLSERARFDKKYINQKSSKLCGRTLAAMKEDLEEIEHEIDSLVENDPNISRLLAIVSSVPNVGRITALHIIVYSNEFKNIRTAKKFACFAGIAPFKIESGKNEGKAKISRIANRKMKSLLHLCAVSALRHPNEFSHYAERKIAEGKHKMKVLNAVRNKIILRVYTCVKEDRVYVKYENKELAASVLGTVNGKTTK

SEQ ID NO: 330342 - protein, 391 aa, unidentified
MIYVGIDVAKDKHDCFIISSEGEVLHDVFTIPNCMAGFNELYQRISLASEDLGNVKVGLEATGHYSYNLLGFLLDEGLSTFVINPLHTNLYRKSLSLRKTKTDKVDARTIASMLMSDVNLKSYTDTAYHNEELKSLTRYRFDKVQERAKLKVSVSRLVTILFPELETLVSSIHLASVYTLLSEFPGAKQLAGANLTRLKSVLADASRGHYGRDKAIELRESAKCSIGSTMPAKSLELQHTIKLIREMNTEISEIEAATSAIMDKIASPITTIPGIGYRMGSMIIAEIGDFSMFDSPDKILAYAGLSPSTYQSGKLDGSYARMEKRGSRYLRYAIFNAAKYVCHWEPTFAAYLAKKRAEGKHYNVAISHAAKKLVRLIYALEKSGAAFRTAA

SEQ ID NO: 330343 - protein, 364 aa, unidentified
MHKETLAVAIAAPERLGEVRYYGTINNEAQAVRRLFQKLQGLYGNILSCYEAGPCGFGLYHQLTAMNIKCQVIAPSRIPKSPTDRIKNDHRDAISLARLLRAGELTPVWIPDLTHEAMRDLIRARAAAKRDSRVARQRILSMLLRTDKHYAGKHWTGKHRTWLANQSFSQPSQQIAFQHYCQSLEQIEDRILQLDQEISRLLPEWSLCNLVCQLQALKGVGQLIAITLVAELGDFSRFSNPKQLMAFLGLVPGEYSSGNSIRPRGITKVGNSELRRLLYEAAWSYRTPAKVGAWLIYYRPDSVTQYSKDIAWKAQQRLCSRYRSLTAKGKKSQVAITAVARELTGFMWDIALAAQSSFSQQKQN

SEQ ID NO: 330344 - protein, 352 aa, unidentified
MRRYNTGTVKGKRLYVGVDLHRLRWQVTERTEEEETFNGSIPGCWEALRKRLERYRGWKIQVVYEAGYFGFWLCDKLVEYGAECIVTPPSLVPGEYGNRVKTDRRDSRKLAAYLAKGLLKRVWVPTPEERGHRQVIRRRRQLIGDRVRTQNRIKAELRFYGIEIAQVAGRWSKAYVENLHRLKFEDRWMRESFQRLLEEYRFLGEQIKRQTVMLEELSKTPLYQERVKILRTVPGIGLIAAMELLLELQDVARFRRANQLAAYVGLTPSQYSSADKVRMGRITAIGKNDLRGTLVEVAWRLIGKDRAMRKKYERIKARAGSKRAIIAIARITLLRTRRMLIDKRPYVLGLAA

SEQ ID NO: 330345 - protein, 341 aa, unidentified
MNNVTLIGIDIGKHTFHLHAQDKFGKEVSRKKCSRQQMMVFLANHPACTVAMEACAGSHYLARELKAMGHEAKLISPQFVKPFVKSNKNDFVDAQAICEAASRPSMRFVTPKSPDQQVLCVSHRIRESLIRDRTKTVNQMHGFLLEFGVSLPTGLSVIKRLASILEQHDLPVRLVALLQRLHDHFSYLSEQIQLLDKELESQLADDDLGRRLLSIPCVGPITASLLAVEMGGGQQYSSSRDFAASLGLVPRQYSTGGRQELLGISKRGNKNLRHLLVLCARVYMLRLEHQKGPLAEWVRSLLTRRHSNVVACALANKLARIAWAIATRHTQYETGPAAMNA

SEQ ID NO: 330346 - protein, 317 aa, unidentified
MSVAGEVFVGIDVSKAELEVCWLPQLGRLQVAREEAGLVPLVERLRALGPSLVVLEASGGYEMPVVMALAGAGLPCVVVNARQVRDFAKASGKLAKTDRIDAQVIAEFAQAIRPQVRALPDEAAAHLIALVARRRQLVEMLTAEQNRLALSHTAVREDLKQNIAWLKSRLQDLDGELARAVRESPLWRENDKLLQQVPGVGRVVSAVLLALLPELGRLSPKQIAALVGVCPFNRDSGSWRGKRSIFGGRAGVRSILYMAIVSAIRWNPLIKAFYQRLLAAGKPKKLAMTACMRKLLVILNAMMRDRANWNPNGALAA

SEQ ID NO: 330347 - protein, 403 aa, unidentified
MNNVAGIDVSKGKSMVSVLRPFGEVVAKPFSVGHTGSELKELADYLKSLDGETRVVMEHTGRYYEPVARFLHEEGVFVSAVNPKLIKDYGNNTLRKVKTDKADSRKIARYGLDNWAELRQHTPMDTIRMQLKTLNRQQSLYAKTKTMMKNNLIALLDQTYPGVNALFDSPVREDGSQKWVDFATTFWHVDCVRNMSLTAFAERYRKWCKRHGYNFSQSKAVEVHTGAQDLIAMLPKDALTKTMVRQAIDALNAVSASLERLKAEMQALAAQLPEYPVVMAMHGVGDSLGPQLMAELGDVTRFTHRNAITAFAGVDPGADQSGTHEAKSTRVSKSGPPELRRALFLVMDCLLKTQPQDDPVYRFMDKKRAEGKPYLVYMTAGANKFLRIYYGRVKEYLASLEEN

SEQ ID NO: 330348 - protein, 377 aa, unidentified
MGFHRELAVKVAVSHRDGGTRSERVGLKHQRKTAMEWFIGIDVSLEQSSVCVLDAGGKIMREAKIASEPEALVAFCRELELPVTRIGLEAGPLSQWLHAGLTSAGFETVLLETRQVKAALSAMVAKTDRKDARGIAHLLRMGWYRPVHCKSVPAQEVRALLAGRKLLLGKLRDVELSIRGLLRGFGLKVGEVSKGRLEARIRELIAGHPMLEQVIQPLLRAREVLNQQYHVLHRAMLNLVRHDAVCRRLMTVPGVGALVAITFTSAVDDPTRFSRARAVGAHFGLTPKRYQSGETDVVGTISKAGDEAARTALYQAAHTMLTCPGRYSSLKRWGMEVARRRGLKRATVALARKLSVVLLRIWTSESEFRFDRPVAAV

SEQ ID NO: 330349 - protein, 320 aa, unidentified
MQTPSALLNIGADVAKHTIVVACSEGGFPVREMANQRAAVLAFLKSLPAGSRIGVESTGTYHELFAEAAHRLGFLVFVLNPKDTRHYAKAVGLRGKTDRVDAELIARMVAHEHTKLHAWTPPTAQQREIDRLIKRRATLIGLREAVEMSLHELGGFADELKALRSRFNQLIARLDLRAKALVEANPERKQNFARLCTISGVGPVVGTALVNTLERVPVKSADAFIAFTGLDPRPDDSGQHRGKRRLSKRGPAELRRLLYLAALSAVKTKPWSSLYEHYRARGLSSTAALVILARRIARTAWSIYTHKTEFDPARLTRSLT

SEQ ID NO: 330350 - protein, 334 aa, unidentified
MAAVTIGVDPHKGSHTAVVIDQAEVVLGQVRVRASAAQAQRLLAWAAAWPERTWAVEGARGMGYLLAQQLVAAGERVLDVQPKLGARVRLLATGKTNKNDPSDALSVAIAALRSAAAAQVRPDDHATVLKVWSKRHRDLSRSRNQVVCRLHAVLCDLIPGGVSKQIRAAAAARVLEQARPSGAVQQARHELAAEFLADLCRIDVQLRQTRKKLATAVRASGATVTEVFGAGPAVAATVIGDVRDISRFPSRNNFAACNGTAPVEVPSGNRVIYRLPLRGNRRLNHAIHMAAVTQIRYRHSPGRACYDKKVAEAKTPKEARRASNGRSATPSAST

SEQ ID NO: 330351 - protein, 406 aa, unidentified
MRVVHERCAGLDVHKSSVVACALLPEGKQLRTFGTMTWQLEQLAEWLRSLEVQVVAMESSGVYWKPIFNILEVAGFELLVVNARHIKAVPGRKTDVKDAEWLADLLRHGLLKPSFIPNREERELRELTRYRRTLIEERAHEVQRLQKVLEGANIKLEDVISNVVGLNGRRFLSALMAGDYDPEAVAATANYGLQRKQALLAQALHGTLGAHQRFLLDQLLSHIDFLEQRIAALDQEVKQRSRPFEAAIARLDQIPGVGIRVAEEILAEIGTDMSRFPSDRHLASWAKVCPGNNESAGKRRSGYAGKGNRWLRSILVECAWCATRKKDSYFKAQYHRLAARRGKKRALFAVGHSLLTVIYHLLRDGVVYQDLGTNYFDQRDRSHVARQAIRRLERLGYRVSVSEGAA

SEQ ID NO: 330352 - protein, 398 aa, unidentified
MPELWAGVDAGKTDHHCVVIDVEGRRLLSRRVGNDETALLGLIGEVRALAAQDSVTWAVDLNGGGAALLIALLVNHDQRLLYIPGRTVHHAAASYRGDGKTDAKDARVIADQARMRRDLQPLRPGDEISVELRILTSRRTDLTCDRTRTINRLRAQLLEYFPALERAFDYSSSKATLVLLTGYQTPDALRRLDQSRLEAWLRHRKVRNAAAVAATAIEAANAQHTTLPGQRLAAAMVARLAKGVMALNEELAETDALIEGRFRQHKHAEIIMSMPGFGVLLGAEFLAATGGDMSQFASADRLAGVAGLAPVPRDSGRVRGNLHRPRRYDRRLLRACYLSAMISIRCCPASKAYYDRKTAEGKRHTQAVLALARRRLNVLWAMLRDDTRYQATPASAAA

SEQ ID NO: 330353 - protein, 341 aa, unidentified
MSEIITIGIDLAKSVFQVHGADRGGNAILRKKLRRDQVLAFFASLPRCVVAMEACASAHYWAREIAALGHDTRLIPPAYVKPFVKRQKNDMADAEAICEAAQRPTMRFVQGKSAEAQASAVVFRTRDILVRQRTQLINALRGHLTEFGYVVRQGVGHVGKLVEIVGDPTSDIPAEARPVLVVIAQGLQALQAQIALLDREIAARAKADPVAQRLMTVPGIGPVIATALVALAPAASTFRRGRDFAAWLGLVPQQHSSGGKERLGRTTKMGERSLRRLLILGASSATKVAARDPDKASGWLAGMLARKPRMLVTVALANKMARIVWALRAHGGSYRAPAAAA

SEQ ID NO: 330354 - protein, 400 aa, unidentified
MFCGWDWGSTQHGVCLIDDNGLVVKTWMIEHTERGLSALFTELARPGDPGSIPVAIERGEGLIVGLIAGAGHPVVMIEPAAFKAARPRWGSAGAKSDAADAFMLADFARTDAHRLRRVEPVAQATRELAALVRARSALVQARTAASNQLWAILAEHWPGAAILFQKLTSHVALAFLTDYPTPQSAALLAEGRMRQFCHRHSYRGGKPPAELVSRLRAAPASVNPIAPQVLEAIVRGSVAHIGLLNTEITNLELHLEAALAAHPKTVLLKPLPRVAIVSLAAPIAEIGPLIERCENPEQVAALCGAAPVTKASGKSRTVAFRHTANKPARVAITSFADNSRHSSAWAQDCYQRARSRGARHPHAIRILARGWVRVIWACWTTDIAYDPTRHHAEQQLATRT

SEQ ID NO: 330355 - protein, 406 aa, unidentified
MDVVYSHVCGLDVHKKNIVACTITPEGKEIRTFGTMTDDLILLVDWLKVKECTHVAMESTGAYWKPIYNLLELEEIETLVVNAQHIKNVPGRKTDVKDAEWIAGLLRHGLLKGSFIPNREQRELRELIRYRRSLIEERAREVSRIQKVLEGANIKLSSVASNVLGKSGRAMIEAMIAGETDPEALSDLAKRKLKSKKADLKRALNGLMGPHQKLMLGAQLRHVDYLDEEIGRLDEEIKKRMLPFDEDLELLDTIPGVARRTAETILAEIGSNMNQYPSAAHLCSWAGLCPGQNESAGKRLSGKTRKGNKKLRSTLVEAAKAAARTKETYLSSQYHRISARRGANRATVAVAHSILSMVYYILKRKQPYIELGPTYYEERKRDVIIKHSIKKLESLGVSITVNTAAS

SEQ ID NO: 330356 - protein, 403 aa, unidentified
MNSVGIDISKGRSTIAVMRPFGEVVISPFEVRHTDSELSELARQLKSLNGETRVVMEATGNYHAPVAKLFHDAGLYVSVINAKLVHGYGNNDLRRVKTDRKDAVKLANYGLDRWLTLPRYVPEEDTRLLLKNCYRQYRQYSKVQTVLKNNLISLLDMVFPNVNRLFSSPIRGDGSEKWVDFVAEFWHCRCVSEKSQKAFTNKYQRWCRKHGYNFSEAKAHTIHAEACGHIDVIPKSETTKLLVEQAVAQLRATSAALAALKHEMQALASILPEYPVVMDMFGVGPTLGPQLMAEIGDVRRFYSKKALVAYAGLDAPPNDSGDVTGRHKSMSKVGASSLRRTLFLVMSVYLQNAPLDESVYQFMDKKRAEGKPYRVYMMASANKFLRIYYATVKAYLESLEHTA

SEQ ID NO: 330357 - protein, 363 aa, unidentified
MFTERTSVGLDVHARSVAAAAIDGVTGEVWQTRLTPSYEHIRSWISQLPGLVAVAYEAGPTGFGLYRALTEAGVRCEVVAPSKLQKPSGDRVKTDARDALHLSRLLRLDEITAVSIPSVDQEAARDLVRAREDCRGDLMRARHRLSKLLLRHGIVYYGGAAWTGAHDRWLRTVAAPQLRAPATRMAFDADYDHVLTMQARRGRLDAAIEDMATDCEFTPIVRRVSCLRGVSTLTGFALAVEIGDWKRFTGNTIGSFVGLVPSEFSSGSSRVQGSITKTGNTHVRRLLVEAAWHHRARYHVGAVMRARWDQASAAARARGDQGNRRLHSRWVDFLERRKRPTVANVAIARELAGWCWSLAVMDD

SEQ ID NO: 330358 - protein, 422 aa, unidentified
MSYCPVAGIDVSKRFSDMCILSPDNKIFAQEKIYHDETSINRANALLQKAERLFFSKPVIVMESTSHYHLILFQFFSEHGYDVIVVNPLQSNSMKDFSIRKRKTDRVDAFKLAMMYRTKTLRPSQIPQTATRALRQLCRHRAELLNDVSSYKNRLTALLDQTFPGYDKVFSDVGGVTSCAVLVRFPTLTILLVEEESELVEVIAAASKSGYSFAKKKAGLLISAAQKAQTLGIHSCADETLIVCTIQMLRTLSESVLQIETAIDNLLAQIKEMRNNVSLLQSIPGVGSHSAALLLGEIGDISLFKKPKQLAAYWALDPTERQSGSFRGTKNKLSKRGFPYARAALHMGVVNSICKRGKDSAANPVLLSYYEKKCKNKPAKVAQAASMHKLVFIVFAVLRDQMPFELKTPEQHAVEQGFVKAA

SEQ ID NO: 330359 - protein, 349 aa, unidentified
MYYVGVDYHKRYSAATVLDASGTMLARRRVDNRLDDFRDFLAPYDKAEVEAVVEATRSWGIPVDILEQLADRVVLANPGEVKLIAKARISTDKVDSLSLARLLRMDWVPEAYLRPKANREQQLILRLRCFLVQLRTRVKNRIHDLIDRQDESVREMTTGFSDLFGKKGMTWLRSLELGHPSGKLLGQLLAVYDALDKEVRQSDRLVCELFAADEDCKLLAKTPGIGTFFAVLIKTEVGSIERFANSPRFNSYAGVVPSTESSGGKTWHGRIIKQSNCWLRWALVEAVIPATVADAGLRAHYEYYRRMKGSRVAKVITARRLGCIVYRVLKERKPYFEQPVPRRGYRQTG

SEQ ID NO: 330360 - protein, 386 aa, unidentified
MIIIGVDPHKRMHVASAIDPATNHRVAALQVEASLAGYRRLLKWADTFGERRWAVENAHGLGRHLAQWLLARGEAVEDVPSTATARVRELSRGGRRKNDVIDAAAAASVAALHGDANPVLPEDLTTVLGLLDERRTNVTTQRTRLVNQVHAVFRDLLPGGAPQNLTAATASRLLAGIRPVGPAEAARKQLARDLVSEIRDADQRLKLLTAQIAETVAATGSHLSEVDGVGPIVSGRLLARTHKMSRFPTAAAFASYAGVAPVEVSSADRVRHRLPRGGDRQLSHALHIAAVNQIRMPSSAGRAYYDTKIAAGKTEKEARRCLKRRLADHIWRLMIRDERDDAAGPGGQQGTTVQSSAAGSTPNTSSSDKSLPEPATPDSTTSQTAA

SEQ ID NO: 330361 - protein, 341 aa, unidentified
MNRIVVGVDIAKRVFQLHWVEPETGEIVALQLKREKFLEHFGNRSIGMEACGGSQHWARSLQKLGHEVKLLSARMVKPFVGGNKNDAADARGIWTAMQQPGIKAVAVKSEEQQAVLALHRMREQLVKFRTAQINGLRGLLTEYGEVMPQGRAGIKRDIPGALGRLSDRLPAIVIETLREQHARLGELDEQISQIERRLRQWQREDSASQRIAAIPGVGLLSATAAVATMGDAKAFKSGREFAAWLGLVPRQTGTGGRVRLLGISKRGDKYLRTLLIHGARAVLTHSKSPPEWLTELVKRRPKNVAVVAMANKMARTIWALIAHERAYQSAYVSRPALGLKE

SEQ ID NO: 330362 - protein, 343 aa, unidentified
MEKLYYIGLDIHKKTIAYCIKLQDGTVFRHGEISADRKSLRQWLSELPGPWKGAMEATIFTGWVYDFLKPHALELKVAHPEMLKAITAAKKKNDRADSERITDLLRVNLLPECHMASEEIRELRRILRYRNIIVRTAVKMKNKVSGLLMEVGAEYNKKRLHGGKYFNELLGKVEDVPPSVINLLTLSRASLEMFQGVQKRLLDTLHNNELISERVKRLMSIPGVGEVTALTWVLEIGEVERFSSIREAVSYCGLCSAQRESAGKEHRGPISKKRNKHLQTVLIEAAKLSPRWNPQLAALYTKEAARGNRNRATLAVARKLVAYMMAVDKRSADFSLEIKTEAA

SEQ ID NO: 330363 - protein, 422 aa, unidentified
MQNTVASKLKQVPEGFLILGVDPHKKRHAAVAITQDFTTQAKFKFDNTREGFEFMLRRTKMEMMNSGCRGVIFAIETGSHYWRNLAYFLDEKGLPYRFINQFTLKRRREGKDLNRRKNDYRDSEVAAQLLCTGEFVESRLPQGVYADLRAAHNAYRRLVKERTRITNLIKGLLDAVFPEFTHVFKDPCALTALSVLSTCTIPRVIARMTEEDFIAIVEAHHQGRRLMRKKLGALHSIAKTSIGIEAGARSVSMEISFLVEKLQLIRQHIRTVEGSLITLVDETEEGKYLLSIRGLNYIAVAGLLAELGCFKYYRSAKQMIKMAGTNPTESESGGKRRSRSPMSKQGRPVLRYCAWTSVIPMLRLNSDFRAWAKNMRERPAYANPLNGREIVGAAINRLLRLSYALVKRQTFYQSSHLVKLAY

SEQ ID NO: 330364 - protein, 427 aa, unidentified
MNKKEANTEEYAALIGLDWAAEKHDVCLWDAATGKSRHRVIEHTPEALADWLAELQACYPGQRLAVCLEQSRGALMYALMGHAFLDLYPINPVTLARYREAFAPSRAKDDPGDARLLAEILRMHRDKLAVWKPDDEQTRTLGFLNEERRKAVNLRVKLGLRLQAALKLYFPQALQWAGTDSSAPMACDWLLKWPTLDALRRARPQTVRAFFYAHNCRSAAHIESVLAALPAAKPLTTDAAVLAVQPLTVQMLAKQIRLLHGSIAEYERQIAALFRPHPDAFLFESLPGAGEVIAPRLLTAFGTDRSRHPTAQDIQTYAGVAPVVERSGKSCWTHWRWNCPKFLRQTFHEYAKNSIPYSAWARAYYEQQKQRGKGHNAAIRSLAFKWIRIIHRCWQTRTPYDEGLYLQALAQRGSPLVALLAAPAREA

SEQ ID NO: 330365 - protein, 360 aa, unidentified
MLAELIDAVVGVDTHRDTHEVELALPTGTAIGTRKISNDNSGFAELLAWIGDHAPGPRVVVSIEGTRSFGVGLARAVAAAGLTVIECEQPNHKARRGKGKSDPIDAHLAVLAALRLDADRLPVPRADGDREALRILLGTRHELTVVTTAQTNRLRALLLGGQDTERDLARATLTDPVLLALVRRREPPQASREQAVRHGEIRRLAHAIRAGRHALAANRAQLQTIVDQMAPGLTERRGIGAVTAAQAIVSFSHPGRCRSDAAFAALSGTSPLQASSGKTVRHRLNRGGDRALNSAIHTIAITRIRCCPTTKNYVARRTAEGKSSREIQRCLKRYIARQLYRALNTSTTLTAQISAAPAAA

SEQ ID NO: 330366 - protein, 318 aa, unidentified
MAQKATIVGIDIAKDKVDACIRSASARQSFPSTAEGYQALLDWLAGHGVGKAVMEASGGYERNCAVALRAGAIEVRIVDPKRVRYFAKSAGRLAKNDPIDAETIAWFGETFPQAPAKAGDDEREELDQLVSARLGLVRLKTQIANYGEHTQPPAVRKAHQAVLKTLAVQLAKLEAAIATQVKKSPRLTEPAAIIESVPGLAEGTAAGLIAFMPELGQVSNKVAAALLGVAPYDNDSGKHRGKRSIKGGRQKARNLLYMPTMGAATQHNPVLKAHYQRLMAKGKEPKVALVAGMRKLIVILNTMIARGETWDPTRHATA

SEQ ID NO: 330367 - protein, 311 aa, unidentified
MEQSTVVGIDVAKEHLDVHVRPTDEVFRVTNDDAGLASLVRRRHARRPMVVVLEASGGYEVPLVAALASAGLPVAVVNPRQIRAYARAVGHLAKTDRLDARGIALFAEAVRPAARPVPDEQARALSELIARRRQLVDMLVAEQNRRLLVRDRRLQRHVDAHIAWLEEALRRLDHDLTTLIRTTPAGRETDDRLRSVPGIGPVTACTLIADLPELGRLDRRRIAARADLAPFARDSGAVRGRRMIAGGRPQVRRVLYMATLAAIRFNPAIHEFHQRLVTAGRPGKVAVTAAMRKLLTILNAMLRDRRPWQPA

SEQ ID NO: 330368 - protein, 383 aa, unidentified
MNQDSTHLPHKFPHQVSLTDQARYIVGLDIGDDYSYVCLLHKDSGGVEEETRLRTTPDALRRYFSQHHGIRIALETGTHSPWISRLLGELEHEVLVANARHLRLIYQNDRKNDRLDAENLARLARLDPKLLHPITHRGEQAQTDLGVVRSRQALVNTRTQLINHVRGSVKSFGARLPKCDSDCFHLKVQESIPDALRAALGSVLAVIATLNEQIKALTMQIQALSEAYPETEILKQVRGVGPITALTFILTLEDKHRFNKSRTVGAFLGMTPSRAQSGNQDPQKRISKQGDPMLRSLLTQCAQHILRKGSPDSDLKGFGEHLVGKGGKGAKRRAVTAVARKLGVLLHRLWVTGEAYDPFYNRKQQNSAKTLIDAPNDPLNLLP

SEQ ID NO: 330369 - protein, 353 aa, unidentified
MKPKTDFSTASLAVIGVDIGKEVFHIVGLAVDGKIAFRKKVRRLGFEDAFDKLPPSIVGMEACLSAHFVSRVLRRLGHEPRIIPAIYVRPFVKGQKNDYNDAEAIAEAALRPNLRAVQEKSQDQLDLQACHRVRSRLVSRRTATINQIRAFLIEQGITVRSGARALRNSLFAILENRRDEISPRMASLILGLYEDWCQLDKRIETITSAIEELSQVEPKCQRLMSVPGIGPIIATGIVAAVSMGEAFERGRDFAAWLGLVPRQHSTGGRSVLGRISKRGSKYLRTLFIQAAKVLLMRPHNWPRYSFGAWLTAAASRLHKNKLAVARANKLARIPWSVLRNEKAFDTHLEVAAI

SEQ ID NO: 330370 - protein, 483 aa, unidentified
MYCLVTPRVRCSRWGGLSFRVMTGRRATGQCHQRPKIQRMKALPVLDAKAAAIDVGSEQLHVSIGGDVPKVFGTFTGDVEELRDWFKEQEVRTVAMEATGVYWLYLYEVLEAAGLKVVVVNGRHVQNVPGRKTDMADCQWLATLHAHGLLRGGFVPQADIRQLQDYQRLRADHIIGAASQVQKMQQALERMNIKFHDVISDLTGVSGLKVVRAILNGERRPGELLALCDEQIQKKKSASVKESLRGCWKKEQLFALRQALELWETYQQKIGDCDLELQALLQRLAEPPGPQGGGGLIGPVKLAPEKGRRKNGPVIERIQELLARICGGHDATQIPGLGEHLVLQIISEVGTDMTCWKTEKHFTSWLGLAGGRKQSGKRKGTVKAHRNRAGRMFCAAARSLAQTIDKALGGFYRRLRGRVGGLAANVALARKLALLFYRLLRHGSAYVEKGLKAYEAKVLETEARLLRKLAKKQGFTLVPVTIG

SEQ ID NO: 330371 - protein, 370 aa, unidentified
MPRMPQAPEPSHAHVDPTGVDPDEVVLGVDTHKDVHVAAVINVLGVLQGTRSFPTTAAGYQQMLRWATGFGTLRRAGVECTGSYGAALARHLVGEQIEVIEVNQPDKATRRRRGKTDTVDAEAAAHAVLSGRASASAKAGNGPVEMVRIFKLAKASAIKSRTQAINQLKAVLVGADPQLRDSLSGLSNPTLIRRCAQLDAGTPRDATTAAAYTLALLARRILELTTEIDDLNRQITDTLSTHAPQLLERNGVGPDTAAALLITAGDNPERLHNEASFAALCGVSPVEVSSGKTQRRRLNRGGDRRANSALHTIVLSRLRWDPNTRAYLARRIANGKTRREAVRCLKRYVAREIYQLIAQPTEPTQCARAA

SEQ ID NO: 330372 - protein, 339 aa, unidentified
MNITTMGIDLAKNNFSLVGMNKHNKIVLRKSLSRTKLLRFIANCPPCLIGMEACSGAHYWSREFHKLSHRVGIIAAKFVQPYLKGCKNDNNDAEAICEAVSRPNIWFVPEKTVDQQAVLCVHRVRQGLISERTAMLNQLRGLLSEFGIVMPQGRYSAQKRIPDILEDADNQLPMLARRMIARLWQRIKQANEDILAYDRELAQLVRESEVATRLMTIPGVGEQVATGMLASVPDPRAFKNSRQFSAWLGLVPRQYTTGGHIRLGRITKRGDKYLRMCLVHGARAVVANLRDKDDRVSCWVRDLVERRGYLRAVVALAARNARIIWTLMMKEENYRAMAA

SEQ ID NO: 330373 - protein, 355 aa, unidentified
MNSEKYIGLDVHQATIVVAVMESTGKLVMESILETKAATILQFFAGLRGTLSVTFEEGTWAAWLYDLLNPHVDKLVVCNPRKNALLEHGNKSDRIDARKLAELLRGNQLKPVYHGETGVRMLRELSRSYLTIVKDLSRVMNRLKAVYRSWAIPCAGRDVYYRRHRGEWLAKIREAGVRRRAERLYEQLDMLQHLRQQARRELLAESRKHAITAKLRQIPYLGPIRSALAVALIQTPHRFRSKRQLWAYSGLALETRTSAEYHFVEGQVRRSKKLLCIRGLNKDHNHDLKGLFKGTATMASVRPGPFHDFYQASLAKGIKPTMARLTLARKIAAITLTLWKKGENFDAEKLKPQAA

SEQ ID NO: 330374 - protein, 312 aa, unidentified
MNKKILGVDVAKDTLYFSDINGVIHGEVVNEPKGFRKIITLFNQHEMELVVLEATGGYERQVLYHLAEKGIPVALVESTRVRNHARSAGIFAKTDKLDARVIAHFATCHPPRLYRLMSPCFRKLRAINQRREQVVEMIRQEKTRIDKVCDSYILRSINRILKVFEKELKSLDAKMEKLWSQEKELQSKVKRLQTCPGIGKITATTVVLEFPELGTLSPKEAASLAGLAPMNRDSGKFRGKQSITKGRRRLRRSLYMASVVSVTHNPVISKFFHRLKAKKPGKVALVACMRKLLICLNAMIRDEVDWRDKSVA

SEQ ID NO: 330375 - protein, 344 aa, unidentified
MQIVRIGLDLAKYVFEIHGVDAHGKTVVRKTLRRHAVSAFFANLPPCLIGMEASNGAHFWAKALSDLGHDVRLISPQFVTPYVKSNKNDRNDAEAICEAVGRPNMRFVPVKSAEQLAVQAVHRIRSRLVADRVRLVNQVRGLLGEHGIVVAKDIGNLRRALARIVGDNEDHALHDLVRALMAELREELTELDARIAGYDRKIRELYRNSEICQRLGKVEGIGPVTATALVAAVGDRSSFKNGRQFAAWLGLVPKQRSSGGRARLFGISKRGDRYLRTLLIHGARSALGRVRDKQDPRSLWLGRMRQRRHPNIVAVALANKNARIAWSLLANDSAYDASLSVGAA

SEQ ID NO: 330376 - protein, 318 aa, unidentified
MTHQRAVLAAGIDVGQRFLDIGLAPSGKTFRVPNAAEGIAAVLERLTQEGVGRVVLEAIGPYAQRLVSALAAAGFEVGLVNPRRIKAFREFEGRRAKTDRLDARLIARFALAMTDTIRPLPTAEQLALRALSTRRRQLTEMIAMEKTRLKQAAEPLLLDSHRSAIATLSAECRHIEAELARRIAEDPQLASTFEILMSVPGIGQRIATVLVTDLPEIGRSDRRAIASLAGLAPHISQSGNAPPRAAISGGRPCVRTALYMAALVASRHNQEMKLAYLNLRSQGKPAKLALIAVARKLLVTANALVKNNTRYRPASLDS

SEQ ID NO: 330377 - protein, 341 aa, unidentified
MESYYVGLDVSKDETAICIRGQDGRIKLAVKRATDPDAIIGVLSKTSLHIACVVMETGRMSNWLYHELEQRGVPIVCVDARQAHAVLSQMHNKTDANDAAMLADLARTGFYRQIVVKSPLAQERRALLRAREVAIKSRMNVENTIRGLLASFGVRLPKQLSTYEQRVQEAINRAPMLGDIILPLLRLRTEALRQAAQLSKVMLSHARKDEACRRLMTIPGVGAVSAVTFVATIDTPERFRRSRSVGAYIGLTSRRYQSGEMDYGGRISRRGDRMLRTVLYEAANSLLCRAKSGTGQHLKDWALALKRRTSHKKAVVALARKLSVIMHTLWRDGTTFEVKEA

SEQ ID NO: 330378 - protein, 381 aa, unidentified
MKPTTRPEESTAKPSQQLYLAFELGRKEWKLAFAAEAGQKARLRTILAGDLAVLEREIELARQRFGLAAGCEVASCYEAGRDGFWLHRYLVSQGILNQVVDSSSIEVNRRSRRAKTDRLDALKLLGMLIRFERGERKVWSVVRVPSLQEEDNRQPARELDTLKQERTRHRNRIGSLLATVGVSSKVGRQFLQELEAVRQWDGQPLPAGLLARLHREWERLEGVQQQIRILEKQREAASQAQTPTVTEKTAQQLLRLRGIGVNSAWLYSTEFFGWRQFRNRREVGSLAGLTPMPYHSGDSTREQGISKSGNGRLRRMCIEIAWAWLRFQPHSTLSLWFQQRYGPGNRRNRRVGIVALARKLLVSLWRYLETGVPPEGALLKA

SEQ ID NO: 330379 - protein, 389 aa, unidentified
MYFVGIDISKYKHDCFITTETGDIVCNSFTIMNNHDGFEELLSVLSSLNPKEQIRIGFESTGHYALNLKLFLEKAHYSFMEFNPVLLAKFNKSQSLRRTKTDTIDSVSIARWLMTVEYKPHPVGFYHTYSLKSLTRLRNSLVKQRSFYIIKITNVLDHIFPEFKPFFNNRFSKTALYLLENYRTAEKMARMNSQSYDNLRRISRGKFSMQKFLKLKELARNTVGSDNELFVSQLNSLMTLYKQAAHEVNSLETQIISLIEEIKPKSLTIPGIGSLSVAVIYAEYGDLSKFSSPSQMLSFAGLEPSYYQSGTFEHGGHMVKRGSSHLRYTLMNLCIPLIQHNMVFAEYYAKKRTEGKTHRVACSHLIKKLIRVIFTLEKNGIDFDPTKLR

SEQ ID NO: 330380 - protein, 389 aa, unidentified
MQTEAAHAEPSTAIQTNLAAIFISLELSRSIWLITSLSPGSGEKMSKHSVRAGDVAGLLARFSELKQKAFARTRKSFPIVVIQEAGLDGFWLHRALGQEGVESHVVDPASIATSRRRRRAKTDRIDGEALLRTLLAYKRGEPRVCTMVRAPTREDEDRRRLCRERKVLIAERVEHVNRIKGLLFSQGISSYEPLRRDRRQRLEDLRTGDGRSLPTHLKTQISRELDRLELLLDQIKLAEAERDALLAEDQAAAPEQPGRMLLEIKGIGAEFATTLWLEGLFRHFDNRRQLASYAGLAPTPWQSGSVDREQGVSKAGNPRLRAILIELAWLWLRHQPQSALALWFKERVKRNGGRMKKTTIVALARKLLVALWKYVTAGIVIEGAVMKVA

SEQ ID NO: 330381 - protein, 350 aa, unidentified
MREAVYIGIDVAVKFCVLVVVNAAGQVLHRGRVATTELELQKAVAPWGRRAQVAIEQGELAGWVCRTLAPGVGRIVVAEPKHLAWIFRDPNKNDPIDAEKLAQLLRLGQIHEVYQAQQDDRWVFKRLVQHYEAMTYRQSVLKVQIKSQLRQEGVLVRGESVFEPAHRQELLGRVKSEAIRGIVKDQFEALEALLELQRKARRRMAQFGRRYPELRRLQTIPGFGPICACRFVAYLQTPGRFANKRKLWRYARLAVVQRFSGGVPLGRAHLDRSGCGSLKDVSRKVFQGAIRRREPNALKQFYVESVKKTGNEKHARLSTQRKIFSIALSLWRNQTEYEEKGLSSAERRTG

SEQ ID NO: 330382 - protein, 373 aa, unidentified
MNNTTVYVGMDVHKNSFSLCCYTVRDDACSHYVKIDPDYRLVLEYIESMRGIYGDDSKFICGYEAGCLGYTLYHQLNDHGVECIILAPSTMAKSPVQKKKKTDKRDSEMIARCLAHHSYHKVHVPTSEEEQIKEFIRMRDDHKLALKKIKQQILAFCLRHGFIYNAGASYWTAAHLSWLRNLEPEGLYKEILSEYLLTYDKLTDTLERLDRRIEELADQDAYRESVRKLCCFLGIKTQTALAVIVEVGDFKRFQKAQQFASYIGLVPGEDSSGDGINRLPITKAGNTHVRRLLVEAAQSYGRGSIGFKSKALKARQEGNSPEVIAYADKANERLRRRYYRMTLKCGKKVNVVKTSIARELACFLWGMMTGETA

SEQ ID NO: 330383 - protein, 337 aa, unidentified
MQKTYLGIDVSKLSFDLSVLIVQDGVKKDVLTTKFENNEEGLKAFKKHLDDNGVAFNENSLLVIENTGIYHRLIWQFCSDYSLPIYIGNAADLKWSFGIARTKNDKVDSMRLCDYAYKNREDLKPTPALNKSFLVLKDLLTNRSKLIRQQNAIRQTIKELKISNDKATQKMLEAINKAAIDGLKKSIKLIEVQMRKMVKSDSKVLANYTLMITVPGIGEITSIFILCCTNNFAIKISGKQLASYAGVVPCEHTSGTSVKGRNKVSHMANKELKSILSMGAMSAVQAYTEFGDYYERKKIEGKHHNKIMNAIKNKMLLRVVSVVNSGTPYVNNYKKAG

SEQ ID NO: 330384 - protein, 351 aa, unidentified
MFRPDLTHACIDHQCPELDPSVGCGAPLSPRRPGGCDLIGARVPGHPSLCCPSAPLGAGQPHHKQREGTGSMAGPVRTVIGGVDTHKDTHVVAALGEQGALLGTASFPTNLAGYAQLHDWLQDFGAITSVGIEGTGSYGAGLCRFLQAAGVPVSEVSRPKRLWRRRYGKSDPRDAEAAGRAVLAGEALGIPQQRDGMVEAIRMLRMARRSAIKARTQTTNQLRAVLDTAPDELREPLRSLSAHALVAIAQRWRPGAPTGPLAAARVTLKLLAERWTTLSAELNQLDAQLAPLIAAAAPELLATHGVGPDTAAALLVASGDNPERLGSEASFAALCGVSPVDASSGRQHATA

SEQ ID NO: 330385 - protein, 433 aa, unidentified
MYEVEDEPLFAERAAGIDIAKAGIEVTIRVPSEARPGRRQQETRSFGATRRQLLDLADWLRAWGVTRVGMEATSDYWKPVYFVLESRDFDCQLYHAAAVKALPGRPKTDRADSVWLARITERGSLPSSFVPPAPIRALRTHTRYRRHLTQARTAEKQRVEKLLEDGHLKLPAVISDIHGVSGGAMLEAIIAGERNPRVLAQLARGTMRGKIRRLEEALDCSFFTGEHVAILAMMLAAIDSFTTQIGQLTARIETLAEPWLHQIEQLDAVHGAGRISAQDVIAEIGTDMTIFPTAAHLVSWARWCPQVRQSGGKRKGANAAGRGNPYLSAALGEIAISASHTHSFLGAKYRRLVKRMPKKKALVATGNSVLTIFYALLSDPAASYHDLGPHYYERRINARRQARNHIHSLERLGYHVTIQATGPDTGKPLTATA

SEQ ID NO: 330386 - protein, 417 aa, unidentified
MKTRVTRREHSNKEISFLRAERVEVGIDVHKRTYSVTLWSEQRQAVISRWTQPADPAALLRSLEPYRRRVNRVVYEAGPTGYALVRALRAEGFRADVIAPSRTPQASGAEAKSDRLDSRKLAMWSAKGLLRAVRVPTMEEEGDRQVFRARDDVVAKRRRIKQQIKSFLLQHGIDEPDGLRTWARRGVEALRKMELTAQLRFSLDLLLDDLEHYDAHLKKADAALKALAATERHKPSCEALQSVVGVGPVTAMAIRTELIAPERFDDGRQVASMAGLAPLVSRTGQTVREGALMKCGNGRLRKAVIEAAWRWVAKDPWAAQAFGRLVGNTGDKKKAIAGMARRLVIILWRISVTGQPYRPRPIEEPTTPGPPETKTKTRRPPARPNRLRKETPSAPRRRPLSAPRPGWPAGAPAGRQK

SEQ ID NO: 330387 - protein, 478 aa, unidentified
MEKTSKNKLEDVTRLLTLQKIRDVKDLESYKLSVWHPHSAGIDLGSREIYVALAPRIAAEMGLPIVHVFNTFTSGLQACRQLLLDCGINTVAMESTSFYWYTIYSILVTAGLEVCLVNPKKFRMVPGRKTDILDCQWLQTLHLYGLLRGSFHPEERVAGLRNYMRERSRIIKDRSRHVCRMQKCMIKMNLMLNHVIDDIMGKTGMSIIKSIVEGERNPKKLAALRSGRCKCSEEEIAEALNGYYKEDELFLLKTNYEAFCFFDNQLYEIDRKITELLATFPLKKDKDETAPPSKKSKYQKKNKNDIRTDKNLNDILYRILGTDLTSVTGLQPNSILQIISEVGTDMSKFPTCNHFASYLGFVPHNKITGGEIISSKTDRIKSSAAQAFRKIVPSISRSDSALAGFYKRIAPRIGTGKAVVAVCRKLAIIFYNTIVYGNEYVEYGQEKYKEKMKEREKKLVLKLAQKNNWNVSSSLLDN

SEQ ID NO: 330388 - protein, 361 aa, unidentified
MKSTTIIAFDQHAATTVAAVLLPGHRTPALHTLASDSATILRFVERLRRERPVSCCYEAGPCGFELQRACSTRGIPCDVIAPALIPRRPGDRIKTDRRDAGQLAILSRAGALTAIHIPTDQEEAARDLLRCREDIRADLLRARHRLSKFLLRHGRRFTGTKKAWSKRHDVWLRAQTWPLAALDQTHRAYLRAVEETLARLRAVEEDLRALLDLEPLRPRVERLRCFRGIDDLTALTIAAELGDARRFATAPSTMAFVGLVPSEHSSGTKQARGAITKTGNAHLRRVLVEAAWHYRHHPFVSAALRRRQQGAPAAVITQAWTAQHRLHRRYQRFAARGKPKQHIVTAVARELTGFVWAALTQ

SEQ ID NO: 330389 - protein, 388 aa, unidentified
MIYVGIDIAKLNHFAAAISSDGEIILEPFKFTNDADGFQLLVSKLESFDKNSIIIGLESTAHYGDNLVRYLVAENYKVCVLNPIKTSVMRKNNIRKTKTDKVDTFIICKTLMMQDSLRFVTYYDLDLMNLRTLGRFRQKTIKQRTRLKIQLTSYVDEVFPELQYFFKSGLHQKSVYALLKEAPTPKEIASMHMTHLANLLKVNSHGHFTKEQAKELRVLAQKSVGANDSAISIQITQTIQQIELLDSQLEKIEAEMTDIMKFNDSVIMTIPGIGYINGGMILGEIGDIHRFSNPNKLLAFAGLDPSVYQSGNFQAKTTRMSKRGSRVLRYALVNAAWNVVRNNATFKAYYDAKRAEGRSHYNALGHCAGKLVRVIWKMLTDEVEFNLE

SEQ ID NO: 330390 - protein, 345 aa, unidentified
MNITTVGIDLAKNVFQVHGVDPRGKVVLRRQLRREQVALYFVNLPPCVIGIEACASAHYWGRTLERFGHTVRLMAPQFVKPYVKANKNDVADAEAICEAVSRPNMRFVPIKSIEQQGILSVHRVRQGFVKARTAQANQIRGLLGEFGLIIPKGICHVVERVPALLEDASNELPLAFRQLIDRLNCHLKELDQQVRELERQIIAWHRSSELSRKLEKIPGIGPLAATALVASIADARSFKNGRQVSAWLGLVPRQNSSGGKPTLLGISKRGDVYLRTLLIHGARSAILAAKRQSGNKNVWLVNLLNRRHSNIAAVALANKNVRTVWALLAHGRDFSPDYVPIRAAA

SEQ ID NO: 330391 - protein, 326 aa, unidentified
MHILGIDIAKASFDTALTQDNQSYEQASFSNSRQGFKDLIEWLASYQVEELHVCLEATGRYGAALAEFLHTQGFQVSVVNPARIHAYGESKLRRNKNDRLDAQLIADFCLRQQPPLWTPPLLIQRESQEISRHIATLKEDRQRKRNQLGAGVTSPRLRRSIQETIDFLDKEIKLLEEELHELLSQDPDKAQQIELLLSIPGIGRLTACRFLAEVDVAQFRQASQLAAYAGLVPKEHSSGTSVRKKPRLSKVGNRHLRTLFFMPALSAHRFNPIIADLHRRLTERGKPKMSVVGAVMRKLLHLAYGVLKTGKPFDPHHHRQSIPVGG

SEQ ID NO: 330392 - protein, 349 aa, unidentified
MGKQIDTSQATVFCGIDVSAATLAVAVIEQDQPLQQHAFANRASGHKALIAWLGKRKSMLRVSLEATGIYSLDLALALDRAPDIAVAVLNPKMVHRFAQTLRRSKTDAADAMVLAEYSRRMPFTGWRSPRLSALGLRAVGRHIAALVVEHTRQQNRLHAAQGSTATPRCVVQDLRRSLIALERRIVKMRREALALVHSDAEVEQRFKLLTGIPGIAATSAVQILGELALLAPEMKVRQWVAHSGLDPVHQDSGTSVHRPTRISRAGNRHLRRALYMPALAAVRWDPHLRAFYELLQARHKTKLQALIAVARKLLHAIHGIFRTGQPYDGQKLFPALLPSENQNPLPVLL

SEQ ID NO: 330393 - protein, 436 aa, unidentified
MESAMGKDGILHYKLRQQGVLNMNAAGIDVSSRKSTIAVLRPFGEVVKVPFEVSHTAEGLASLARQLKAIDGETRVVMEHTGRYYESVANVLHESGLYVSAVNPLPIKEYGGNSLRKVKTDKADAMKIARYALDNWCDLRDYTPMDTVRYDLKTLNRQFQLASKQKTASSNNLIALLEQSFPDIRKCFEGPVRKDGTQKWVDFAHTFWHADCVRKLSLNAFAERYRKWCKRNRYQFSTEKTDEVYGLAKSAVVLVSKTEVTKVLIKEAANQLTSISRSVETYRTEMNRLASQLPEYPVVMEMYGVGESFGPQLMAEIGDVRRFERKQSLVAFAGIDPMPNQSGEKNVRSNKSSKRGSPYLRKTLFNIMTVHLQRAPANEPVYQFLDTKRAGGKPYYVYMMAAANKFLRRYYAKVRDYLASLDSLPPVDMDSTGLNK

SEQ ID NO: 330394 - protein, 316 aa, unidentified
MTSQVAVIGIDVAKETLSLCDTRSGEVFELANDRRTIKAWLKTLPGCCAIAIEATGIYHMDVATLAHAKGHRIYVINGFRLSNYRKGIGGRNKDDRSDAQLLARYLSHEQAQLEPWQPPCKAYCRLQTLLHRRATLVRSAIALRQSFSQDRALASELKPVLKRMAVLERRLEKAIQATLNEAGLQEQSKRSQAIEGIGPLTAAALNLAFLRGYFRNSDAFIAFVGLDVRLKESGRYSGRRKLTKQGDPEIRRLLHNAAMSAARTKRWKEIYLGYLARGLKKTEALTILSRKLARVAFALMQTQTAYQPPEVRPALT

SEQ ID NO: 330395 - protein, 477 aa, unidentified
MTITYVCESIARNEQRSIPVRSFSGDLIKKSPLGMMQGCQTHHSPYQGGLQMNCTQNYKIDQVTEQTLVVGIDIAKRTHYACFVDDRGRVLRKSFPIFQSKEGFRQLYEAIQEAMQAFGKPQVIVAVEPTGHYWLNLAYFLEEHGIPLVMVNPAHVCRSKELDDNLPTKHDAKDALVIARLAKDGRFLVPRLLHEIEADLRVGSTLKEKLRKEQTAVKNAIVRWTDRYFPEFWTVFRDLGKTALSVLEWTPLPADMAGRTVEELLEVYRQSEGMKCPQKAKIQALINTAKDSIGVTEGTAMARFEIAALVRRYRQLEAEIAALDAELKALVQTTMEYQWLKTVDGLGDATIIDLLAEIGSFAHYRDPRQLVKLAGLTLKENSSGQRKGQKHISKRGRKRLRSVLFRAMIPLIRHNEAFRELHEYYTTRSVNPLTGKQSIVALCRKLLNVLFAICTKKQAFDAERMKQDVLSQVQRAA

SEQ ID NO: 330396 - protein, 363 aa, unidentified
MVPHRTFVGLDVHTRSVKACAITVDTGLVIHRSFGNDPEAVVDWCLMLPGPVKAGYEAGPTGYGMARVFTDAGLDLVVAAPSKLLPQPGARVKTDRRDAQHLAELLAAGLVTAVRVPTLVEETARDVFRCREDAQLEFKAATARLGHFLLRRQITELEGCQWTKTRLDWLARQHFEDPNDQVVFDSYLGDIQSIGRRKIDLEKQIARIAGTEPWRGVVEALCCLRGVSTLTAFGLASEIGDWHRLTARTIGSYVGLVPAEYSSGPSRHLGGITKTGNPHVRRLLVEAAWWHKRPYWPAGSSKLQQAWAKVNEPVRQRSDFANRRLNHQWARFVANKKRPVVAATAIARQLAGFCHDLAVMVTP

SEQ ID NO: 330397 - protein, 354 aa, unidentified
MKCMTKYVALDVHQATTVASVRGESGRVLARTILPTEEPALVEFFRGMRGAVHVTFEVGTQSQWLYELVSPLVDRAVVCDPRQVTRRGNKGDRVDADRLSELLRLGGLRAVYARSAHRSDLKELTRTYRTLVEDGTRVMLRIKALFRARGIKTPGSAVYHPTKRAEWLAQLSESGVRFRAEALYAELDVLRELRPKAKAKMVAEARRDPAWPLLQTIPFFGPVRVALLIATMQTPWRFRNKRNLWAYSGLAVRTSSSADHRFVEGQVVRRRRAPLTRGLNRNHNRVLKDVFKGAATAAASQPGPLQEFYAAMVARGMREEMARLTLTRKLAAITLRLWKRGEQYDPTKLTRQPS

SEQ ID NO: 330398 - protein, 346 aa, unidentified
MYYIGLDVHKKTISYCVKDAAGKIHCEGKIGSTRRELDAWIKTLPQPRMMAMEATIFTGWIYDHLLPHAEKVKVAHPLMLRAIAAAKRKNDKIDASKIADCLRCDFLPECYMTSTEIRDRRRTLRYRGLLVKQMVQMKNRISGLLIKTGASFNKQRLHKVGYFTELMAGNEEIDCVRPLLKLSRDTINRSQKLDYALVSSLERDPLLAERLKRLRTVPGVGPITALTWVLEIGDVVRFRSIKQAISYCGLCGAERSSADKVMRTPISKQRNKHIQQVLVEAAKLAPRYSHELLDLRKGNAAGQSQPRHTGSCQEDGGLDDCGRTQKTGFRACREIRRYGGGLKTCP

SEQ ID NO: 330399 - protein, 388 aa, unidentified
MGESITYVGLDTHKATITVAVAKGGRDGEVRLHGRIANRPAAVERLARSLAERYGRLRFCYEAGPCGYGLYRQLRRLGHDCIVAAPSLIPRRPGDRVKTDRRDSLKLARQDRAGELVAVWVPDVEDEAMRDLVRGRAAAVAAVTRARQQLQSLLLRHGVVYDGGTRWTKRHRRWIAGLCFEQPAQQFVLAEYRAAHAEAEARRDRLTGEIERLVPGWTHAALVAALQAMRGVALVIAATLVAEIGDFRRFAGARQLMAYLGQVPSENSSGERVRRGGITKAGNGRVRRVLTEAAWTYRSKTGTGKTGTGAALKRRRDALPPAVCAIAAKAEARLTARFRHLLAAGKLRPVAVTAVAREMTGFLWAIANAVESPQAASRRPEPTAAPAI

SEQ ID NO: 330400 - protein, 348 aa, unidentified
MMTHGIDLHKRDLVIATVDAQGAEIKQKRVRAREADVLRYFSGLPGPHRAVVESTGSWYWVADLCREHGIDLTLAHARKLKAISSAKVKTDTVDSLTLAPLLRADLIPKAHMISSELRPVRHVLRARLRPVEKRSSCLNSIARLLEKYNVDAVASLPPLAQLQATCQEEQIQLLEQQRKRLETSLPPQLVPNEDVQRLLWIPGVGKIAAFTLYLEIDGIDRFATERDFFSYRRLVPGADNSGGKVRHKRSKEGNRYLKTSLQQCRRARRSVLPRDQSLRAEEGTQEEPLRRARSPPRRSRASSTTCSRSRPTSTLSSRGVPLSRTKQSQWPRRASPTAQLTPLGSHPH

SEQ ID NO: 330401 - protein, 481 aa, unidentified
MVVPYEEPKTPTQPKTPTQPKTPTKPRKPRERSVPVPVPDSATTLNIINPDAAGIDVHSNMHMVCVPADRDANPVRRFGANTADLQELAAWLKKCRIKTIALESTGVYWIPLFELLESLGFEVYLVEPGQLSRCGARPKTDVLDAQWIQRLHSYGLLRASFRPPDSVLALRAYWRQRQMLVRCAASHAQHMQKALEQMNLKLTQVVSDITGVTGMLIIGAILEGERDPVKLAQLRDPRCRQSEDEIALALQGTWRPEHLFALRQAYNLYQFHHRQISECDEQVETELTNFPNRAGEKTHSLKPRKRGRKSNDVRFEATGPLFKALGVDLTLIEGIEVGTALVILAEIGVDVSRFPTEKHFASWLRLCPPQNQSNNTNRSRRNRKGTSRVTIALRMAAQSVGKTMTPLGLFYRRIRSRIGGLGAVKATAHKLACLVYRMLKYGQEYVIQSIEEYEAKAKANLLKALKRKAAAIGFQLSPMPT

SEQ ID NO: 330402 - protein, 292 aa, unidentified
MEQNNEVILGVDTHLDAHVGAVISETGTLLGTLSVSTDTAGYLNLVSWANSFGHLRRAGVEGTGTYGAGLARVLRDHEIEVLEVNRPDRAMRRSRGKSDPTDAENAARAVLSGRATAVPKEQSGAAEAMRAVSVARRSAVKAKTQAINQLRALLVSAPQEIRERLLKTKTAECVASCARLRSLGDTPMLQTLTTTLRLLAKRWLALTEELNTLDAMLDRLTSQHASRLRDRFGVGPQTAAVLVAVAGDNPERLKSEAALAALCGTSPLQASSGKTVRHRLNRGGDRSANNAL

SEQ ID NO: 330403 - protein, 345 aa, unidentified
MTVYCGVDFHARQQTIAYCDTQDGEINFIQLKHDDREALRRFYTQFQGPVIVGLEAGGYSDWFERFLEELDIETWFGNPTEVRRRARSRQKNDWRDAELLLDLLMKNEFPRVFRQNADARAVLSQLRYRHKLVQMRTQVTNSLHALAIREGLSLRSTLLTKAGRAKLRGLSLTPIQVKQCDEWLALIDQLSDNIKRLEQELKELAAQNEQVRLVRTHPGIGLLTGLALVHTLAPISRFSNSRKVTAYVGLEPREFTSDTKQRWGGISKAGSTLLRFLLVEAAQHAARADAELKNTYQHLSSRRGKPKAKVAVARKLLVRAYILLRDEIDYATYLRRTVAVRSARH

SEQ ID NO: 330404 - protein, 319 aa, unidentified
MIAATNVIGIDVSRDWLDGFRLPGLQRFRLANSPEGHEELISMICQMSELVQVGFEATGGQEWALWAALVEAGVDARQLPPAQIKAFAMSRGTRAKTDRIDAELIAHFMVFRPEAGRTLPSDNLRVLRALTTRRAQIVEMRKRLTAQISARKKQGIPADIEDLDAELKAMLDAQISDLEQRINRAISSEETSATKAHLLRSIPGIGPVSAAMLIAEMPELGRMTAGEAAAMAGLAPVPHDSGAMRGRRAIAGGRRALRHVLFQAALAAACHNPLLKTVAKRMKEHRKPHKVVIIAIARRLITIANAILKTGENWRYQAG

SEQ ID NO: 330405 - protein, 369 aa, unidentified
MGEYSEIFVAFDVAKRKHAVAVAESGRRGEVRFLGEIENSGTAIERTLKKLSGRHGRLHVCFEAGPTGYGLYRQVQALGHACTVVAPALIPRRAGERVKTNRRDAVTLARLHRAGELTGVWVPDAVHEAVRDLVRARQAAADDLRRKRQQLLSFLLRQGRIYGAGGHWTLAHRRWLARQSFEHPAQQIVFQEGVDAIEDAAQRLHRLEKQLAIIVPSWSMAPVVAAFQAMRGASFLVAVTFAAEIGDVRRFDTPRQLMSFLGLVPAESSTGDTIRRKGLTLAGNRRARRALVEAAWTYRFPARVSEALRARLDGLPKGIRDIAWKAQIRLCARYRRLSAAGKKLPVVVAAIAREIAAFLWAIGREVAPM

SEQ ID NO: 330406 - protein, 314 aa, unidentified
METRAQPVFVGIDVSKNKLDVALWPSGEGFAVERNAKGLNSLCAKLAALNPVTIALEATGGFETVAAAALAAAGLSVAVVNPAQIRAFAQALGKRTKTDPIDAAVIARFAEAAKPAIRPLADAETQLLADLIARRRQIVDMIVAEKQRLDRAPEKRLRKSIERLLKALEKELSNLNGDIDTAVRASPLWRANEELLTSVPGVGPTTARTLIAELPELGTLTRKEIAALAGLCPFTRQSGQWRGKSFIAGGRASVRAALFMTAMVAARFNPLLKTFYARLTAAGKPKKAALIAVARKLLTILNAILRDQKPWQPA

SEQ ID NO: 330407 - protein, 343 aa, unidentified
MDYFAGLDVSVKNTSVCIVDGTGKVVREVKVASEPDALLQVLRNRAYRFKRIGLEAGPLSQWLFSALGEANLPVICVETRHMRAVLQAQINKTDRNDARGIAQMMRVGLYRPVHVKTLRSQKLRMLLTHRKLLQSKAIAVENDLRGTLRNFGLKVGMAGATKFEGRIKELIENLPDLAVLVEPLLIVRRVLREQIGVLHRRLLAVVRNDEVCRRLMTTPGVGPVVALTYRATVDVPARFRKSKSVGAVFGLTSAKYQSGEIDRSGRISRCGDEMMRVMLYEAAQSMLRSKKWSWLKAWAMQIARRRGMKKAIVALARRLAVILHRIWVDGTEFRWTREVVTAV

SEQ ID NO: 330408 - protein, 337 aa, unidentified
MSYLGIDLHTNCLTVCYRTAQGQERTRTYALKDLSAFAKTLRKRDRLAVEATGNTRWFVAQIRRRVKEVVVVDPNKFEVITKSVHKTDKHDAKTLAYFLSKDMLPKARMKEEQTAQLQSLAATRDQLVKQRTALINKIHNVLNGHGLKMKKESLSSAKGLATLWAYDWPAIVKVELQVLADQIRSLNDSIKHLDGELTDRGQKLPGHENLTSIKGIGDKSATILLSVIGNVKDFENEHKLAAYFGIVPRVSNSNETQHHGRITKRGSKLGRTTLVQCTLVAKRYSPYLRRFYEKIQRRRGSGKAIIATARKFLGIIYQTLNNKWIFEDFPNFVLAES

SEQ ID NO: 330409 - protein, 347 aa, unidentified
MKKVTVIGMDMGDKNHKAIGLSEDGEVVDRAEVPCTPEDVRAYLKRHPGALLAIETGTHCRWVSKLGLELGHEVLVGNARKLRMIWDSSRKNDWRDAEMLAKVARTDRSLLHPVTLRGDGDQRLMRLVKSRDLLVKGRTGIVNQIRGFCKSEGVRLPKCSAESFVRLEHEVPPAVRAVTKPLFAILKELTKKIGLYDKMLVDAVKRSHGEEAALLDTITGVGPVTTAAFLAAVGDVSTFGSARDAGPYFGLVPRQDQSGQIDKQLRISKEGNEIVRRLLVTAANYIMGPFGKDSDLRRHGMRIAERGGKNARKRAKVAVARKLAVLMLAILKSRSAYRPLTEVEAVA

SEQ ID NO: 330410 - protein, 420 aa, unidentified
MDTSLNSHNSDPGGTPVAWIGFDWGDKEHAFALQDQAGKQERAKLEHTAENLHRWLKEIGQRYAGRPVALAIEASRGAVIHALLQHPWLIVYPVNPVTSARYRKAFRPSGAKDDLPDADVLLDLVRHHADKLRALEAQDPLTLQLAGLVQTRRKIVDRRTAVFNELTSLLKSYYPQALKLVGSLDTELAVAFLRRWPDLISLKTARSGTIKRFYYQHQVRSETLVQERLALIAAAVALTTEEARVSVARLQLAQLLDQLEVFQKHVAIFEAEIKTVFASHPDAAFFRQLPGAGPQLAPRLCVAFSASYPDPASMQKFTGVAPVREKSGGQVWTHWRWGAPIFLRQTFVEWAGQTVRYSPWAKVYYEHMLKRGKDHPAIIRSLAFKWIRILWKCWQQRTPYDEARYLKQLIHRKSSHAVNP

SEQ ID NO: 330411 - protein, 343 aa, unidentified
MIYVGVDLHLRFCYMTVLDANGKRLWQGRVENVESDLQQFFANLKSSHQEKGGIAVAVEACGFWCAFVDCVEPLVDRVVLVHPAKVKAIADAKLKNDRVDSDTLAQLLRANLLPEAWKADRATRDLREVLRMRVALGRDRTRYKNQIHAVLHLHGQRAPVSDLFGRQGRAWLKTLAVRPAARQAIDTSLRMVDQLDSELHALDRQLQKSAQQDPDARCLLSIPGIGAFSAMVLKAEIGDIRRFPDKKSLYNYAGLVPVIRQSADHLRRGGITRSGSPLLRWVLSEAAVTATRYSPAARAWFTRLAQHKHPHVARTALARKLLGAVWALWTQGLCFDERIFAAM

SEQ ID NO: 330412 - protein, 344 aa, unidentified
MYGGVDTHKDTHHAAVVDRNGGVLGDAQFPADSAGYQHLLGWLRGFGRVVKVGVEGTGSYGAGLDRHLHAAGVSVVEVNRPNRQARRRHGKSDAIDAIGAARAALSGEADATPKTGIGPVEAVRVLRIARDSAVKERTAAINQLKALIVTAPDQLRGLLRGLTPAKLLRACTSFDVDEDQLRDPVEATKAALRAIATRITALKTEVTQADKRLKPLIAAVAPRLGALFGVGPHSAGQLLTTAGDNPDRLGSEAALAHLCGAAPIEASSGQTTRHRLNRGGDRQANKALYTIVLTRLGHDEATKAYAQRRTQQGRSKKEIIRCLKRYVAREVYTALKADFAALTP

SEQ ID NO: 330413 - protein, 310 aa, unidentified
MTNLICGVDVCGQWLDAWVDGASCRFENSLAGVEGLVGFCRRHAVGLVVMEATGGYERLAFGGLWAEGVGCAVVNPRAVRQFAEAMGCLEKTDRIDAAAIAGYAQAKRIAAQPPAGEVQRKLAALVTRLRQLTALRTMQQNQRRLVEDADALASIDEVLALIGRQVRSFEAGIITAIAGDPLWARLDAAFRSIKGVADRTVARVLAELPEIGTLSNKAAAKLAGLAPLARDSGKRVGKRAVRGGRSGVRSVLFVVAEIVRRHNPDFAAFHRRLTLAGKAKKVIRIALAHKLLIRLNAKARDVRNQIECPA

SEQ ID NO: 330414 - protein, 338 aa, unidentified
MSLYCGIDLHANNSYVVVSDLEDEVVLGQRYPNDLGRILGALEPYRVELSGIAVESTFNWYWLVDGLSEAGHTVHLVNPLAAQQYKGLKYTDDRSDARWLAKMLRLGILPTGWICPPGDRAVRDLLRKRVQLVRQRVASRLSLRNILERTTARRLSGNALERLSEEELSDWIEDEHVLLSMTTTLAVIETLNEQIKLLEGVVFEQARKASAFSVLTTIPGVGPILASTIQYETGDLSRFAGVGHYASYCRLVRSERLSNQRRKGQGLRKNGNAYLSWAYHEAAHFAVRYQPSARQWHQRKLSKTCALVAIRALAHKLARAAYFMMRDQVAYEPARLFR

SEQ ID NO: 330415 - protein, 345 aa, unidentified
MKHFIGLDVSVKETAVCIINESGEICREVKVVSHPDDLIAVLKGQTWNVERVGLEAGPLSQWLFEGLARAGLPVICIETRHVKAFLKAQPNKTDRNDARGIAQMMRVNLYRPVHVKTLTSQKRRALLTARKLLQEKAIAIENDIRGLLRNFGLKVAAVGTAKFEERIRELIEGMPDLAAIMEPLLAARRNLRTEFARLHGQALAVVKDDATCRRLMTIPGVGPVVALAYTATIDIPQRFRNSKAVGSILGLTPKLHESGESKRVGCISLCGDGMMRTLLYEAAQILLTRVRKWSSLKAWAMKIAKRRGMAKAKVALARRLAVVMHRMWLDGTEFRWTREAMTSAS

SEQ ID NO: 330416 - protein, 339 aa, unidentified
MITIGIDPHKGSHTATAIDEDEVVVGELRVDADRHQRARLLAWAAAFEPRCWAIEGATGMGALLAQQLVGAGEHVVDVPPKLSARVRLMNTGRIDKSDPNDARCCAVVALHNSTLNTVTGEDEDRVVLRLLADRYHQLTAQRTRTVCRLHAMLCLVIEGGTGRHLKAEQATNLLAGVPLDDPITLERVATCAQFVTEIGVLDQALADTRARIAAAVTASKTSVTDVYGVGPIGAAIIVGHAGDIRRFPTGGHFARHNGTAPIEASSGPKTGHSLNPRGDRQLNHAIHTAALTQIAHDTHGRGYYLRKQAEGKTPKEAIRALKRRISDVVYRQLINDTRD

SEQ ID NO: 330417 - protein, 425 aa, unidentified
MKALRTHVAGVDVHKEILAITVLVGDADSEPQAHQFECSTFTDDLMKCGVKLREYGVKEIVMESTGVYWKPLYNVWEPMGFEITVAQAAHVKNVPGRKTDMNDSHWLAQLHRFGLVRASFIPEGIFQRMRLLSRHRTNLTGDLATIKNRVQKVLEDGNIKWGSIVSDVFGKSGLEILDLIADGVINAKTLASKVTTKIKRKKEAEKALTNTLTKEHIFVIKQLMDQFHYLANKIKEVESELAEKAKPYAHLIEKLDEIPGIDKVLAMGILAEATDQMDKFKDERSFAAWAGVASGNNESGGKKKRSKCRKGNPHLRRIFAQCAQNAKMKRGSFYRAKYNKLVFRLGCKNKAKIAIANRIARAVYKILCGDKYKELGYMRGDPHEQKIKHLVGQLKAMGVNVFHHNHQMIVSEKRVVVEKSGIILN

SEQ ID NO: 330418 - protein, 349 aa, unidentified
MSETSIVGLDLAKQVFQIHAADDKGRCLFRKQRKRRELLAFFAGLGPCIVAMEACGSAHFWAREIAKLGHEVRLLPPAYVKPYVKRGKSDRIDAEAICEAASRPTMRFAPVKTIEQQSLTTLHRSRELLIKTRTMLVNALRAHLAEFGFVAAKGIGKLPDLIEIVSEAPAEALPEMARAPLLGFLDAIALINQKLDDIEKQLRIWHNANKHSKRLETAPGIGLISATALCALVPDPKLFRNGRHFAAWIGLTPRLDGTGGKTRLGRISKAGDRTLRRLFVLGATSLIKSLANKATPLALWVQALLARRSRRAVTVALANKLARVAWAIMASGQAYRPLPGAQLPMPGRP

SEQ ID NO: 330419 - protein, 347 aa, unidentified
MNFYTHQHKHYCGIDLHTKAMYVCILDQGGTILVHKNLPTTPEAFLRVIAPYREDVVVGVECMFTWYWLADLCAKEGIAFVLGHALYMKAIHGGKAKNDKIDAHKIAVLLRGGMLPQAYVYPAEMRATRDLLRRRCHLVRKRAELLAHIQNTNSQYNLPELGKKLAYKANREGVEDHFPDPSVRKTIEVDVSLIDHYDKLLGEVELYITRSAKAHDVQTFSRLQSVPGIGQMLALVILYEIQDIARFPRVQDFVSYCRLVKCAKESNGKRLGTSGKKIGNVHLRWAFAEAAVLFLRQSQPGKEYFAKLEHKHGKAKALTVLAHKLGRAVYYMLTREQAFDLHRFVTA

SEQ ID NO: 330420 - protein, 446 aa, unidentified
MQKKKETTMPIINNNAAGIDVGSRSHYIAIGQNPEDVKEFGVSTDGHQAAIDYLRSNQITSIAMESTGSYWQSLFRVLQQEGFEVLLVPGNQTKNARGKTDVKDCQWIQKLHSLGLLTGSFLPDEQTLKLRNIQRHRSSLIETAAKYTNKIQKALRLMNIRLDVSIRDIAGKTGRAIVESILEGEREPRELVKLVDARVKKSKQEIEKNLHGQWDDELLYELKDCYDLLKIHEQKINDCDLKIDSILQQQTMHIDFDVNTSLTKKQNKGKHQCKIDLQKYCYQIYGTDIFAINGVSVSTALNLMSEIGLSIYKFDSAKKFTSWLRLSPNNKISGGKVLSSRTEKSKNVLTKSLRDAANAVGLSKKDDYLTHFFRKIAFKKGRGAAITATARKIAVILWNMIVKKEPYTPIKTKEYLEQQKQRKIKFLKKDMQKYGILINELSVSYG

SEQ ID NO: 330421 - protein, 407 aa, unidentified
MIFVGNDWAQDHHDVCVIDGEGTILVECRFDEGIAGLTKFHAVMGGFVSDPGDVVIGVETDRGLWVEALLGAGYEVFAVNPLSVSRYRDRQGVSGAKSDRGDAKVLADMVRTDRHLHRQVAGDSDLGHDIKLVARVHQTLIWDRLRHVNRLRAALREFYPQAVAMLGMCPLRDGIAVLEIAPDPHSGARLTKTQIVKALKRSGRQRNLETTALKIQGLLRGEYLEASPGVVAGLSVTVSATVAIVTTINEQIARVESELAPRFEQHPDAAIYLSMPGCGVTLGARMLGEFGDDPERYSDAKARRNYAATSPVTIASGNYYNVKARWIRNERLHDAVVQWARLAICNSPGARTMYDEQRAKGAGYHKAIRAVANRLVGCLHGCLKSGTLYDEDTAWAHRQPQETVKAA

SEQ ID NO: 330422 - protein, 365 aa, unidentified
MNFIGADLHKKSITLCVMDEKLKILARKTVPCDQPDQIVEFFRQFRPFKVVVEATANYLWFVELLEPLAEEIVLANPKKLRVIAESTKKTDRLDAQVLAEFLARDQVPRAYMPTPRQRQHRALVRHRQYLRGRMTSVRCKIHHVLADYNADRKDLFSAQCGKSYFKQVSLSDADSFVIKQLWSEWEDHQARLLAMTKKIKAFIAKAPAREKEARAILKSAPGVGFVTAEVVLSEIGEVSRFGNAKKICAYAGLVPMVRQTGGKRSKDLHITKQGSGLLRWALVESAWRLVKSSPKWSALYSRLKKRCGSKRAIVAVARKLLCVLYAMLKTSTPYKIVSTEAEAPKAKATRRRLVRKASPEPAVTT

SEQ ID NO: 330423 - protein, 304 aa, unidentified
MAEPILTHGGRAMEEYSEAFVAFDVAKRKHALAIAEGGRTGEVRFVGEVENSPAAIERTIKKLGKKYDRLHVCFEAGPTGYGLCRQVRALGHDCMVVAPALIPKRSGERVKTNRRDAVTLARLHRAGELTGVWVPDVVHEAVRDLVRARETAADDLRRKRQQLLSFLLRHGRIYEGGGHWTLAHRRWLARQSFEHTAQQIVFQEKIDAIEDAAQRLHRLDEQLRAVVPTWSMAPLVEAYQAMRGASFLVAVTFAAEIGDVRRFDTPPQLMAFLGLVPGERSTGRHGSPVVPHARRQSTRPPRLG

SEQ ID NO: 330424 - protein, 339 aa, unidentified
MMKLSTIGIDLAKRVFQVHGVDEAGRVVLRRQVRRSQFLEVFSQIEPCLVGMEACGSANHWARELKKLGHEVRLISPQFVKPYVKSNKNDVADAEAICEAVSRPNMRFVPMKELEHQDIQSIHRARTLLVKQRTAVANQIRGLMAEYGVVVAQGLGQLRKQLPGCLGDAENGLSATARDVICCLSEQLRWFDERIAGFERRLEQVVRENEVCQHLKEIPGVGTMTATALYAAVNHAKEFRNGRQLAAWLGLVPRQHSSGGKPTLLGISKRGDRHLRTLLIHGARAGTRVARNSHSAEARWLSSLIERRGYNRATVALANKMARKAWVVLNRGERIAAPA

SEQ ID NO: 330425 - protein, 403 aa, unidentified
MSICFAGLDWASRTHAVCVIDERGSVLTQFEINHDASGLADLNRRLRGAGVTAVAIERPSGLIVDALLEAGLSVVPIHPNVVKASRPRYRSHGGKSDASDAYLLADLLRTDGHRFKPLAPQSDDIRSLRALVRGRDDLVATRVQLANQLRSLLHSFWPGATEVFADVDSPIGLAFIRRYPTPASAQRLGPKRMAAFCTQHAYSGRRSPEELLDRLHQAPAVALGKLEMAAKGELALSLARTLDRLGDQIRLLTRRIENHVSSIDDGRILMSFPRAGRICAAQILAELGSVRERFDSDEHLAAEAGVAPVTYASGKSKAVTFRWACNHRLRAALTCLADNSRHANAWAASVYAKAKARGCDHPHAIRILSRAWLRVIWRAWTDRKPYDPALHGSAKLLLQTQGG

SEQ ID NO: 330426 - protein, 315 aa, unidentified
MSETSINVGIDVSKDTLDAALSTGEGFSRANDEKGILALVEQLKGFQPERIVLEATGGYEQALVAELAVNALPVTVVNPRQVRDFAKALGRLAKTDSMDAEVLMLFAQAVKPESRALPDEKTRELQALGARRRQLLGIVLAERQRLAKAPAVVRRDIRAHVAWLIKRLKDIDQQLGAALRASPLWREREQLFKPVKGVGRVLLSTLCASLPELGRLNRRQIASLVGVAPFNCDSGKFKGKRHCWGGRADVRAVLYMAALSAKRFNPAIRVFYERLVVAGKPKKVALTACMRKLLSILNAIARDHTPWNPNLHLST

SEQ ID NO: 330427 - protein, 342 aa, unidentified
MHYVGLDVHKKSIAYCVKQADGVIVREGTVAARREDLRSWAAELPQPWTGAMEATLFSDWVYDHLTPFAAVLKMGHPARMRAIATSKKKTDQIDARTICDLLRCDLLPPAYVMPPDLRQLRRVLRYRNLLVRAGVQMQNKIAGLLLEMGVEYDTPRLHRKKYFGQLLKEKEAEIPASARRLLAFSREQYETLHRMELQLLRGLEQHPDIAERVARLMTIPGVGPVLGLSWTLEVGPVERLGNLSRAISFCGLCSALRESAGKQTRGPISKQRNVHLQTVLIEAAHLAPRWNPLLAEVREREIQRGHRNRATLAVARKLVAFLMAADRGHQPHPRPASVTAAA

SEQ ID NO: 330428 - protein, 302 aa, unidentified
MTIVGCDFHPSWQQIAVFDTETGEVRECKLVNGNGEAERFYRRLSSPTLVGVEACGNSQWFVDLLQRLGHEVWIGDAAQIRASYVRKQKTDRRDAAHILKLLIEGRFPRLWTPSAEQRNLRQLLIHRHKLVGIRVQVKNGLQHLMLNRGVQLKEKLWSQAGQKALRELTLAGWAALRRKDLLSLLASLNEQIGQLDQATEKAAEENQEARLLMTHPGVGPITALAFVLTLGDVTRFKRGKQVASYLGLVPREHSSSGKQRLGSISKQGNRFLRMLLVESAQAVTRLDEGFRKQYQRRCVSER

SEQ ID NO: 330429 - protein, 366 aa, unidentified
MSPLIHEIAPQLGRLASPVPSPYSRQSRPSGELASARSGRTRKSGRMESPVSAEEPRYVGIDVSKSTLDVAIEPTHEHWHVTNDEPGIQHLVERLKPLHPERIVLEATGGYELAALAALGCADLPAVAVNPRQVRDFAKALGQLAKTDALDAQVLARFAAVVQPALRPLPDAATRELAGLLARRRQLIDMRTAESNRLGQALEAVRPDIREHLRWLDKRIQQLDGDLHDRLRASPLWREKEDLLRSIPGVGPVLGMTLLAEVPELGSVSHRQLAALVGVAPFNCDSGKWKGTRRIWGGRASVRAVLYMAVCSAVRHNPTVRALYQRLVAAGKRKKIALVACMRKLLTICNAIIAARTPWRCQPLDS

SEQ ID NO: 330430 - protein, 401 aa, unidentified
MTTMRDNATRVKRFRELKATLRTNRQRLLVGLDIAQAEHVVHVRHAHTRVVVPTLPIPNTTRGFAQLWARLQQAQRATGCREVVCGLEPTGTYHEAVARFLEGQGADVVLVSSAVAYWNRRTQDGTWDKHDRKDAANCADLLEQGKVLFYSQPDGPLAELRRLVKCLRRARAELAACKARWRTTLRPALGPMGEPLPNRLRAELPVVLQAWEPGGAGRPAVPKGRLALGLATACADLGAQVTAVQARIAAIEQALTPLAERLPAYPLLRTIPGIGPTVGAILLAEIGDIAWYTQFSQLRKLAGLDIVRVQSGQFAGQARISKCGRGLLRWALYHAAMGMARTTAGRARLAAFKAKRQGDRYAGFKAIVELAAKVLRVVWGVWRSGTPYDPLRTGGLRRQPR

SEQ ID NO: 330431 - protein, 397 aa, unidentified
MYIVGIDIAKRKHEAAVIDGEGTVIIKPFSFTNNCSGYNRLLAMLAKAKLPLDEVSFAMEATGHYWLALFTRLQKEGFRVQVINPVQTNSIRSFYIRQAKTDPRDALLIAEVIRFGHFSESTLHPENIYELRELCRGRHAIVSMQADVKRKVVALLDQVFPEYETAFTNLFSDTSMAILQTCPTPKELSEMPLEELCHLIEVSSHKRFRMVKAQELQELARNSFGFAMAGDVFSTMIRLYAKHLVFLKQQVQEMDRKIAEIMDTLDTPITTITGIGPTLGAYILSEIGDISRFSSAAKLAAYAGIDPTMRQSGEYNGVRNRMSKRGSPYLRHAIWLAASSAVLHDPALKLYFQKKRDEGKPYMASVGHACRKMVSIIYAVMRDNKAYTPCIPNEISA

SEQ ID NO: 330432 - protein, 453 aa, unidentified
MRKPRVIPDEDHEVVYERVAAVDVAKASGVVCVRLPDPARPGRHANQIWDNVPAARARITELGRELLRHQVQMVTLESTSDYWRIWYYVLESIGLAVQLVSASQARNLKGRPKTDKLDAMWLARLTQWGMLRPSFVPPAAIRQVRDFTRARTDLVHERTRVLQRLEKLLEDAMIKITSVVSDGMKAKSAVAMVAALVAGERDPRAIADLAKGSLRGKRDALAEALDGMFDSHHGVIAQALLDQVAFLDQRITQMEAGAIAALAQVEESWGVDADGETGPGRGTGPDSRVLAAGRLAEIPGVSVWLAIVIIAEIGLNMTLFPTPAHLVSWMGLCRSARQSGTRHGKGKPKKGNSYARAAAGQAAIGAAGTATFLGERYARIARRRGGAIAQVAVARSIMIIVWQLLADPAARYRDLGPDWHATHVNRDKKIRNHIRGLQALGLTVTVADDEHAA

SEQ ID NO: 330433 - protein, 334 aa, unidentified
MHKRTSNLCIKTKDGRLLLETKLHTTKEAFTTCLRAYTGAHVVFEPVSQSWWLGDILEELGLIVYLANAREVKAIAHARVKNDKIDANVLCDLLRSDLLPESYRSSKVAREWKELVRFRASLVGMRTQIKNKIHGLLGRNGIVAPFGMVFGVKGQAWLKSLELSAVHRMHLDSYLSLLDTYEAAIAKATDQIETTVTADTTTTLLMSIPGISYVSALSIMSEVDTVYRFSDGKQIASYAGLVPSVYASGDTVRYGRLTKRGSKTLRTILIEAAHRQGRLKTAIGLKPYFERIKERKGVRTATVATARKLCVLIYHILESGIPFDDTRLVAGMRT

SEQ ID NO: 330434 - protein, 430 aa, unidentified
MKSNTQNAKIEAITEKTLVLGIDVGSEMHYARAFDYRGIEYSKKPFKFSNTEAGFVTFKEWIQDLKERHEKDKVIPGMEPTGHYWFNLGKFLQDNEMKPVLVNPHHVKKSKELDDNNPTKNDRKDPKVIAGLVREGRYMIPYLPDGVYADLRTASNIRFQLQAELTRIQNRISRWFNIYFPEYKTVYGKPDAKSGMLILKAAPLPEDILTLGIDGVNQIWRDAKLRAVGKARAKTLIEAAEHSVGSKEGAVSGKMEIRMLLEDYESRNTRLQEVMVLIEELVRKIPMTEKLLEIKGVGIRTVSGFLAEVGDISRFNNPKELQKLAGLALVENSSGKHKGETTISRRGRKRLRYLLFEVAMSLVSKNQEFRELHNYYTTRRLNPLKKMQSLMAIAAKLIRVFYAMLTKGVDYDPKKMVSDIKRPAVYLQAA

SEQ ID NO: 330435 - protein, 376 aa, unidentified
MENDSTLYVGLDVHKDSITVAYALGADEVQLLGKIGTTQTDIDHLCKRLQSKARRIRIVYEAGPCGYGLYRRLVQKGFDCMVCAPSLIPRKPGERVKTDRRDAIKLVRSLRAGDLSAVYVPSVEDEAFRDLSRAWVSAKDDLKRARQRLKAFLLSHGVRYTGRADWSGAHRRWLSTFAFDSAWQQLAFDELRHTIEDRLAQCARLEAALREAVLDWRFYPAVLGLQTMRGVQFTTAVGMLAELGDLSRFAHPRQLMAWLGVTPSEHSSGDKRRQGSITKNGNSYARKLLVEAAWSYQHPARVSPDIQRRHEGIPKPIVDRAWDAQVRLCRRYRRLVARGKQKNIAVVAVARELAGFIWDISQIAMSLAVPREVLIT

SEQ ID NO: 330436 - protein, 415 aa, unidentified
MSNQIRWFVGIDWASEQHRVALLDAGGNRIDEWQVTHSGAELGQLCDRLLAQTGAQPCEIAVAIETPRGPVVETVLERGFELYSINPKQLDRFRDRFTVAGAKDDSRDAHVLAASLRTDCVAFRRITLDDPLIIELREWVRIHDELSNERTRLTNRMRDQLWRYYPQVTKLGDDLGAEWNLELWEQVPAPEKAAQVTEKTLARILKKHRIRRIDSAEALRILRQAPISVAPGTIDAATAHIRTLIARLRLANELIKHAQRQLDELCSKIEACAAGQICEQHDMSILRSFAGLGRTNIATLLAEACEPLRRRDYHALRMLSGVAPVSRRSGKKWLVLRRYACNKRLAVAVFHWARVAIQHDPISRNRYAALRQRGHSHGRALRTVGDRLLYVLCTLLERQTLFVPGYRNPQPAAET

SEQ ID NO: 330437 - protein, 373 aa, unidentified
MIVIGADTHKRSHTVGAVDAATGRVLADRTVKAKRRSFDDLLLWARGLGGEQVWAIEDCRHVSGALERFLLRRGERVVRVPPKLMADSRRSAREPGKSDVIDAVAIARAVLREGLDELPVAQLAGPELDVRLLVDHRERLVAQRTALINDLRWHLHDLWPGFEVPARALTASRWQDRVAGRLQRAEQAARVRIARDELRRIRELTRSVDALERELAILVADLAPRLLAERGCGVLTAAKLIGEIAGIGRFATDAKLARIAGSAPIPASSGRTDRHRLDRGGNRQLNCALHRLAITKGRLDPDTADYLARKQADGKSRREALRCLKRHLARRVWRLLQPSPAKHSPGPSTHPPTISPPGITIHCNTPYSRFSLT

SEQ ID NO: 330438 - protein, 351 aa, unidentified
MKRDKYMGLDVHQATTVVSVIDAEGKIVWETIVPTETGAILRLIESISGLIHVTFEETTQAEWLYDLLQGLVAEVVVCDPRRNKLLVAGSKGDKADARKLAELLRTGMVRSVWHARQTTRGLKELVRAYETFVVDTSRTMLRIKALYRSRGIATGGSAVYQKRERDHWLEQLTEVGMQQRAAWLYEQLDQVRELRKRAKAAVLGEGKRHKAVQLLRTIPQVGPIRAAQIVASAGTPHRFRTKRQFWSYSGLAVVTHTSAEYEMRDGRVVRRNKPVATRGLNTNCNRRLKSVFISAATSGGASWQPYLDHLQEKGMKADMARLTLARKISALALAIWKKGESFDPKKLNWTK

SEQ ID NO: 330439 - protein, 455 aa, unidentified
MPKKTTSDRPELKTVNVSAAAIDIGSKMHMAAVNPACTEVPVRSFSTFTQDLHELADWFTACGVTSVAMESTGVYWIPVYEILEQRGFEVILVNARYAKNVPGRKTDVSDAAWLRQLHSYGLLRGSFRPDAEIATLRACLRQRERLVEYAAAHIQHMQKALMEMNLQLHHVVSDITGVTGMRIIRAIVAGERNPDVLATYRDVRCHSSPETIRAALVGNDRDEHVFALTQSLELYDVYQAKMLDCDRKLEVLIAALNNKGEKPVGKLSKPRIKTKQVNAPTFDVRTALYGVLGVDLTEIHGLGPSLALKLVGECGTDLRAWPSAKHFTSWLCLAPGNKVTGGKVLSSRTRRSSSRAAALLRLAATTVGRSDTALGAFYRRLSARAGKSKAVTATARKIAVLFYNTLRHGMSYRDPGAEHYEQQYRSRVLANLQRRAKSLGFVLQAIPGNANPAVS

SEQ ID NO: 330440 - protein, 376 aa, unidentified
MREKLRFLGLDVHAETIAVAVAEPDGEVRSLGTIANREDSVGKFIKKLGPAEQLRAGYEAGPTGFVLYWQLTQLGVECAVVAPSLVPKKAGDRVKTDRRDALKLARSHRSGDLTAVWVPDEDSEALRDLVRQREAAKQDQLRARHRLTKFLLRTGRRPTLGLKAWTERYMAWLEQIRYTQPAQQATLVDCLNEVEHMSARVKRLEEAILEVVKLAPQSMQEVIRGLQALRGVAHISSVTIAAELGNISSRFESARKLMGYCGLFPSEDSSGKRIRRGGITKAGNAHLRRIVVESAWSYRHLPRVGAKLRKRQQGVPAEITEIAWRAQNRLHKRYMKLTMAGKDQRKIMTAVGRELLGFIWAIGIKAEAACQQQLAA

SEQ ID NO: 330441 - protein, 484 aa, unidentified
MKVVFPTCCGVDVHKTFVVATIITTPADSLQPHYQKKRFSTFNSDLNRFADWLLEHNCLDVCMESTGKYWIPVFNILETHMHVVLTHPKYVKAIKGKKTDKRDAKWIANLFRFDIVKASFIPPADIRALRELSRYRLRLSYMRSAEKNRFQNSMTISRIRIDCVLTDPFGKTASSIMDYLLSDVPFDETECAKLIHGRVKASNEEIFDSIRGFEILSEQRFKMSHAKQHMELLSSYIDDIETELFRLSRSYDKVIKRISGIVGFTERSALFVISETGADMGVFESAKHLCSWAGLTPANNESANKKKSTRCSKAGQYLKTLLIQCALAAVKSKKNPYYAIKYKRLAKRRGRKKAVIAIARMMLTGIYHMILNNEEWKTDDYDAVIYPTKPNKVALTLVKVIQFLGKEGYEPETFNLDEFARARGASDLELKVVKAYFELDPDIRKMLMEHFKTELTDNNDHPKTPEELESQYPVEEEGSGLGAG

SEQ ID NO: 330442 - protein, 321 aa, unidentified
MDKYKEIHGVDISKDVFDVMDTNGKHHQYDNSLKGFKLYLKSINTETLVVMEATGYYHYLLAQFLYDQGIHVSVVNPLSVKRFVQMKLSKIKTDKSDARAICDYAQMNQVPLYNGKGAEQSESLQLLALMDIYLKQRTQLKNKLHGEKVLGIPSKTVYNSLKKSLAELDKQLSSLQERLMSLVKKSQQQQLSNLKSIPGLGDKTAALLIVLTEGFTKFETAAQLCNYAGITPTIRRSGSSVRGRSRISKVGNRKLRNLLFLCAFSACKYNKQCKAIYERIVAKGKSKKLALIAVCNKLLKQAFAIAKSGIPYDEKYVSKLN

SEQ ID NO: 330443 - protein, 354 aa, unidentified
MKRNSKYVGLDVHQAMTAVTVRTEGGRVIARSVIETSERSITEFFSAVGGTVHVAFEEGTQAQWLYDLLSPLVGRVIVCDMRGEKRSGNKGDCIDADYLSEQLLRGGLRAVYHGSRDRADLKELTRAYRNLVEDSTRVMLRLKALFRARAIRTTGSGVYDPTKRAVWVAQLVGQGARLRAETLYAQLDVLRAQRKKTKAAMVTEAKRDPAWGVLETIPYFGPVRIAMLLATIGTPWRFRTKRNLWAYSGLAVVTRSSADYEMFDGRARRRPRRPLTRGLNRNHNRVLKAVFKGAATTATGKPGPLQDFYHGMLERGMREELARVTLARKLAALTLRLLKTGEVFDPTQLSRPQT

SEQ ID NO: 330444 - protein, 390 aa, unidentified
MVFVGIDVAKDKHDCFIISSEGEVLAEVFTITNNRAGFECLLLRIRSCAGKSEKIKVGLEATGHYSYNILGFLLDNGLDSVVINPLHTNLYRKSLSLRKTKTDRVDARTIAAMLMSDVDLKSYTDTAYHNEELKSLTRDRFDKVRARAKLKQSVARLVNILFPGLEKLVPSLHVASVYALLSELPGAYQITTCNLTHLKTILADASKGRYGRDKSIEIRNSARQSVGSRMPAKSLELQHTIRLIQEMDMEINEIEVQIEAMMVEINSPLITIPGIGTRMGAMILAEIGDFSQFDSPDKILAYAGLSPSIYQSGQYISGHAHMEKRGSRYLRFAIYTATKYVCLWDPTFATYLAKKRAEGKHYNVAISHAAKKLVRLIFAMERSGQAYRAA

SEQ ID NO: 330445 - protein, 346 aa, unidentified
MSKNSDDSVVSVVGIDLGKNNFHVHGVNATGQVILKKRLTRDGLLRSMSNLPRCLIGMEACGGSNDWARKLQAMGHDVRFISPQFVKPYVKSNKNDFIDAEAICEAVQRPGMRFVPIKGVEQQDVQSIHRARSLAVSHRTAQSNQLRGLLQEYGVVLPKGMATLRGRLPEILEDADNGLTPMFRELLAQLIDEVRRLDERIMGYDRQITQLAEASDACLRLMTIPGIGAMSATALVAAVADAKVFGNGREMAACLGLVPRQHSTGGKARLLGISKRGDCYLRKLLIQGAQSALRFADKKSDMRSRWLCELAVKRGRNVAAVALANKNMRTAWALLTRHDHYRPAMA

SEQ ID NO: 330446 - protein, 420 aa, unidentified
MKDPVVNDFSALIGIDWADKKHDVCEMPVGTSKYQLSVISSKSNSIHDWAMYLKKRYPDKPVAVACELKKGPLIYALSKYKHIMLFPINPSTVAKYRKAFTLSGAKSDPSDAFIQTEILALHMDKLQPIIPESSEIRALAQLVEYRRKLVQERVDLSNWITATLKNYYPQVIDWFNEKDTVIFCNFVIKWPSLTQVKKARKATLIQFFNQHNSRYSHINEQRIADIRTAQALTNDPGVVDPNKILIEALMPQLQLLIEAIARLDKEIKKRYQKLNDRVIFDSFPGAGPQLAPRLLVAFGENRDRYRAATEVQQYVGIAPVIEQSGKKKWIHWRYSCPKFLRQTFVEWAGQSVRYSYWAKAYYDQQISKGKPHNTIIRALAFKWIRIAFRCWKNKTPYDESKYLNALKKRNSQLLKFAAGA

SEQ ID NO: 330447 - protein, 370 aa, unidentified
MDHYNGAFVGIDTSKLRNAIAVAEDGRGGDIRFLGEIDTAEAATRKLVTKLATKYGHLTFCYEAGPTGYGLYRLIRKLGHDCIVVAPSLIPKKPGDRVKTNRRDAVGLAKLLRAGELTAVWVPDQRHEAMRDLSRAREAAQKDLQGKRQQVSSFMLRLGRHYPGKKTWGRAHMNWLMQQKLEQREHRIALEELLGAVRQESERVERLEQAIRDATPEWSLAEVLTALQAMRGLDLVAAVTVLAEIGDLSRFQTPRELMGYLGLVPCEASTGDTVNRGGITKAGNGRARRILVEAAWSYRHPPRVSLKKQIKVAASPQAVREIAWKAQMRLCGRFRSLTRKGKRPNVIVTAIARELSAFIWAINREVMAGR

SEQ ID NO: 330448 - protein, 311 aa, unidentified
MATYVGIDIAKHGFDMATEPKQKIQHFDNDPDGIQRCCKVLQQRKPDLIVMEPTGGYEVALVVELQATGLPVAVVNARRIREFARASGQLAKTDKLDAQIIARFAAVLQPPAQEALDQQTRTIKALVARRHQLVQMHTAETNRTEHARDKAVAQSIQAILKTIERQIKKVEQQIRDQIDCTREFKQKTQQLESVPGIGETTASLLVTELPELGRRNRRQIAALVGVAPINRDSGTYRGKRITGGGRRHLRARLFMPVLTATRFNPNIADFYQRLLRNGKTKMTAIIAAMRKLLTMLNTMIAKNESWNPKSA

SEQ ID NO: 330449 - protein, 353 aa, unidentified
MNITTVGIDLAKEIITVYAQDADGQCVMSRNFKFKELSAWLVQLPAGCVVGMEACSSAHHWGRRMQAMCLEPRLMAAEFVQAFRKSKSAKNDHNDAEAIAIAVRQPTMRFVAIKNEAQQSRLAWHRVREGWKEERTALINRCRGLLLEFGYPIARSAAAFQRGLKTSLQEETLPPNLRRLLAQIDYQLRQLDLQLAECDREIAQSAHDDEAACRLRAVTGVGVITADAVCASVGNAHDFKNGRQFAAWMGLTPRQYSSGGKTQLGRISRRGDSYLRSLLVQGARSTLQSTLKKAPDKLNRMQQWIIRLYGRVGYHKTLVAIANKNARQLWALLAKGETYDLNAWQQYANGDAS

SEQ ID NO: 330450 - protein, 320 aa, unidentified
MSASSVVVGIDVAKTHVDVSVLGASLEAQRFDNEADAHSALAAALKPLGVALVVMEATGGYEAALACALQAAGLPVAVVNPRQARDFTKSMGRLAKTDRIDARMLAEFAAVLVRRDDLASLIRPLADAQQQALAAMVTRRRQLVTMMLSEHQRLQLAIAVVRPSIVAMIEAIRKQLDDVEAQMVSHVQAHYAELDKLLRSASGIGPVASATLIAELPELGKLNRREIAALVGVAPMANDSGNTKGRRRVQGGRFEIRRVLYMATLVAARHNPAIKTFYDRLLKAGKLPKVALVACMRKLLTTLNAMVRTNKPWDKSLHGA

SEQ ID NO: 330451 - protein, 400 aa, unidentified
MNRTRTVAGLDVHKDSIYLCIMGYDQAIIWENTYGVLTPDLCQMHHDMRAHGVTEAAMESTAVYWVPVWNELCESMELRLVNPYFIKQLPGRKSDVKDARWIAECLLKNLIKGSFVPEPIVQDMRKLNRRIMDLCEDTTYNSNKLDAALQRCGFRLSNYVATTKSKSYRSVLKAIIDGQTDPDELLRLVHGRILNKHGRERVKAALTGSFSETDLIVLRQLKETLDLIEEQTADCQQELVRLCKEHYPKPYERLQTIPGVKERAATAIIAETGVDMKMFATAASLVGWCGLKPRNDVSNGRFKSRKVTHGNRYLRQILIEIAWAASRTRNCFFSHFSYLQTTVKKKNKMKIQVAIARKILVAVWHMLSKEEDFIDIYLKRQEELKRTEGQIKLLESYMAD

SEQ ID NO: 330452 - protein, 353 aa, unidentified
MKLNKYMGIDVHQATSVVVVLDANGKVVLETIVATEAAPIIRLVQSLNGPLHVTFEETTQASWLYDVIRAYVLEVIVCDPRRNKLLSEGSKGDKPDARKLAELLRAGLLRSVYHGHEATRRLKELVRAYEALSIDTMRTMFRIKAIYRGRGIRTPGSGVYQLKQREQWLHRLTEPGVRQRVEWLYEELDHLRSLRKRAKQTMLTESRKHRAFTLLRTIPQLGPIRCALIVATLDTPHRFRTKHQLWAYSGLAVVTHTSSEYEIKAGRVVRSRKPIATRGLNRNGNRRLKDVFVAAAAGGTQAEPYRSYLRHLEQKGMRAEMARLTLARKIAAITLSIWKKGETFDPKKLNWTT

SEQ ID NO: 330453 - protein, 413 aa, unidentified
MNVLHPRCAGIDVHKETVVVCVRRMGSGGRATEEVRTFATTTTALVAMGDWLVAAGVTHAAMESTGVYWKPVWHLLEDRVELLLVNAHHIKQVPGRKTDVKDCVWIAQLLQHGLLKASLVPPRPQQELRELTRQRAQLVGEQGRAAQRIQKVLEDANIKLASVATDVLGVSGRLMLRRLIDGETDPTKLADLAQRQLRRKIPALQEALRGRVTEHHRFLLKLHLAHYDYLEESIQQLNARIEAKLAPVADARELVTTIPGIAQRTAEVILAEIGTDVTPFPTSGHLASWAGLCPGNNESAGKRRTGTMRKGSNWLRTALVQAAWAASRTKDTYLASHFKRVAARRGRKRAVASLAHTLLVIVYHVLSRRQAYHELGADYLDRLDPRRVSHRLVKRLERLGYKVTLETQTPVAV

SEQ ID NO: 330454 - protein, 367 aa, unidentified
MKKGSTVAAKPSRKISEQKLTIGLDLGDRSSWYCVLDESGSIVLEQKVSTTSKALKEVFGGMPRSRMALETGMHSPWVSRLLSELGHEVIVAHARNVRLIGESRRKDDRLDAQTLARLARIDPQLLSPVKHRSAKAQADLTVIRARAGLVRARTALVNTVRGLAKSYGERLRGCNVRNMNPEKAEGLSPELQAGLTPLLAGLESLSEQIREYNERIEQLAQSSYPQVALLKQVKGVGTLIALTFLLTLEDPHRFRKSRDVGCYLGLQPGRRNSGQSEPQMHISKEGDPYLRTLLVQGAQHILGPFGVDCDLRRWGLKLAERGGKSGKKRAIIATARKLAVLLHHLWVSGEVYEPLHNHQHRPLAIAA

SEQ ID NO: 330455 - protein, 316 aa, unidentified
MPADCFVGIDISKAQLEVGLLPTREIWHVPNEPKATTGLVARLQELAPKLVVLEATGGLEIPLAAALSRAGLPVVVVNPRQVREFARATGQLAKTDKIDALILALFGDRIRPEIRPLPDDTAQAFDALMARRRQLVSMLAEEKNRLQQASTAQVRRGIQRHIRWLEGEIKDVETGLSETVKASPIWKARDNLLQSVPGVGRVMSFTALAQVPELGQLNRKQIAALVGVAPLAADSGTIRGKRLVWGGRAHVRQPLYMATLCACRYNPVIRAFHQRLIASGKPPKVAIVACMRKLLTILNAMLRDNTPWTFNPQIVP

SEQ ID NO: 330456 - protein, 410 aa, unidentified
MKLFCGIDWAEAHHDVAIVDENGQLVAKKRIADDPTGLAQLVELFAGVGDCAADPIPVAIETPRGLLVASLRATGRAIYSINPLAVARYRERHSVARAKSDHADAMTLANILRVDAHLHRRLPADTELCQAIAVLARAHQDATWRRIKAHNELRSMLREFFPTFLATFTRRFPLGIASSEARAVLAIAPTPGAAAKLSTNRITAALRRAGRSRGIDGAAAEIKTALREPQMRHLAQVEATMGKQTSALLAALDTACVSVDDLGQACAELFQTHSDYAIITSFPGLGDSTGARVLAEIGDDRSRFVDARALKAYAGSAPITRASGKSISITHRRIKNDRLAAAGWIWAFGAATHCRPAGEHYRRRREHGDRHSAASRHLLNKLIGQLHYCLQQQVLFNEDRAFSRPGAAVA

SEQ ID NO: 330457 - protein, 349 aa, unidentified
MTIVEDRPVITGGVDTHADLHVAAALDPLGGLLGVQEFPATATGYAQLLGWLGGFGGIALVGVEGTGSYGAGLARHLAAAGVRVVEVDRADRQDRHRQGKSDPLDAVSAARAAQSGRASGAPRGRDGAVEAIRALMVAKRSARAGRTQANGQARALIVTGPDELRARFAGHRPAQLVEAIAALRPRPGDVPGYATRVALREPGRRAQFLDAQLDRLDEVIGPLVTARAPGLLRLHGVGPDTAALLLIAAGDHPERLRSESSWAHLCGVAPIPASSGKVSRNRLNRGGDRQANHALWRIVITRLGSRPGHPATRAYVTRRTKEGLSKKEIIRCLKRYVAREVYRQLRAGA

SEQ ID NO: 330458 - protein, 339 aa, unidentified
MHVVIGIDPHKASHTAVAIDEDEHELASLKVRATSRQVDQLLKWATPFDKRLWAVESAAGMGYLLSQQLVAKGEEVVDVPPTLSSRIRVLASGKSNKNDPNAARSVAVAALRAPKLRPVVQADHSQVLRMLAKRNIEIGRLRNRMVCRLHALLLELAPGGIAKEIYVSDVERLLGKVRPQTPTEQVRYELAGELLDEVRRLDAQLKVSHRRIHEAVRASGTSLTELFGVGPVIAAQVIGFTGDVRRFASRDAFAAYNGTAPVEFSSGGRVVHRASQRGNRQLNHAMHMAAICQIRQKDSEGRRYYERKVAEGKTKREAIRALKRQVSNAVYRQLLLDAR

SEQ ID NO: 330459 - protein, 427 aa, unidentified
MNATESNRVNEFRQFKQRIRGSTEDLVVGLDIGKRKHHAFFGDANGKTILKGLIVENSAEGFGQLLSRVDFYRQRDGFTGVVFGLEPTSVYHKPLAEHLIGQGHLVVYATNEAIKKNRSLIDGRWDKHDTKDSANVADLVAQSKCHYYDLPELRLRDLRSLLLLRKRLKKQEHSCRVRIRNNLVAQYFPELDGFWNNAAAENLAIVRGYLDPARIRQLSCEQFVARVATHNGGLRQKRRLRQIWEAAANSVGCRPGPAMQLEAELLVDTLQSIKGQLAQVKQAIQALAAGFPEYAYLKSIPGFGPYVAAMTLAAIGNPHRFENRAQLIRLAGFDLCAHRSGQKSTTAVPVISKKGKADLRYALYQAALVASSLTRHFRPYYNRLLEGRQREKGIRTKMRVKIAAKMLVIAWTLMKRKEFFNPAHIQA

SEQ ID NO: 330460 - protein, 402 aa, unidentified
MYNAVGIDVSKGKSTVAVLQPAGVIIRKPFNVNHTSSELDELAKYIGSLEGETRVVLECTGRYHEPVVKTLSEAGLFVSAVNPHLIKNFGNNSIRKVKSAPADAKKIARYTLDNWIELRQYSSMDNTRTQLKTLNSQFSFFMKQKVAAKANLIALLDNTYPGVNKLFDSPVRDDGSEKWVDYAYSFWHVDCVRKIGLKTFTERYQAFCKKHHYNFQPAKPAELFLASKDLIAVFPKEASYKLLIQQSIQQLNLASSHVEELRSKMNELASTLPEYATVMGMYGVGKTFGPQLIAEIGDISNFSHREALTAFAGVDPGVDQSGTHNSKSNKASKCGSNRLRKTLFQIMSTLLQTAPEDDKVYQFLVKKRAEGKPYYVYMTAGANKFLRIYYGKVKECIRNLEQ

SEQ ID NO: 330461 - protein, 339 aa, unidentified
MTSVTVGLDTAKSIFHVVEKNASGRILKKVKLPRNKLVNYFANKEACTIAIEACGACHYWSRAFSQLGHRVMIIAPQYVAQHRIGNKNDFNDAQALADVAQREDVRTVPPKSIEQQDAQLLHRVRERYVKQRTALGNQIRGLLAEYGIVIPRGISSLRKALPFVLEDSENELTSLVRMMLDELNCELITWDDKIKNIDKLFVQQARENDQCQKLQTMTGVGPLISSILWVALGDGKNFKNGRHFAAWCGLVPKQHSTGDKARLLGISKRGNAYLRTQLINGARSALKHAKNKDDRLSVWAVNLEARAGFNKACLALANKMARMAWAMVVKQEEYKTQAV

SEQ ID NO: 330462 - protein, 317 aa, unidentified
MNFVGIDVAKDSMEVMVHESSKGWNFMNDESGLHKLIAKMKRLSPYLIVLEATGGYENAVATGLQCKGFSVAVINPRQIRDFARSIGTLAKTDILDARVIAHFAAKIQPPPRILPTEEAKRLGAILMRRRQVITLLTAEKNRLLQANPAVRERVKNHVTWLKQELSDISKELKQMVQDDPEWKEKNTIIQSVPGVGPILSVTLLADFPELGTLNRKQIAALGGVAPFNRDSGKMRGKRTIWGGRSVVRTATYMAAFAAIRCNPLLTSFFNRLVAAGKPRKVALVACMRKLLCILNAMLKNRTKWTCYSPQLVGPCYC

SEQ ID NO: 330463 - protein, 362 aa, unidentified
MLHVGVDLHKQTSQIAVLSEEGELTQHRVANDIQRLEQFFTQLPPATPVAIEASGTWWWLVDLLERLGHHAILSHPKQTKAIAAARLKNDRVDAHRLVLLLRGDLLPQVWIPPAPLREARELLRHRMQLVWLRGEIRNRLVALLDRRNLHPTTAKSWFTKRGQRELQQLPLAETPSRVREDCAALLPLLDAQIRRLDAELVAHWGRDARVQRLTTIPGIGPFIAILLVLELGDIQRFANAKRVGSYIGLTPRIRASADRVRTGHISKEGNRLLRWALVLAATQAVRRPGPLRAWYHAVKKRRGRSVARVALARRLAEIVYHVWKHECDYFTVLRRGDRAGVSSPGDMGLSTAALIGQPPSRA

SEQ ID NO: 330464 - protein, 453 aa, unidentified
MDKAQKMLEPMQVIYPNAAGLDIGSTEIMVAIPPDRAGETVRGFGTYTPDLKELADWLAESQVTHVAMESTGVYWIPIYELLEERGFEVIVVNARHIKAPPGRKSDVKDCQWIQRLHSYGMLSGSFRPGADMCTLRAYLRHRDNLIEDRAKHILYMQKALVQMNIQLGQALSDLTGKTGLDILRAIVAGEQDPVVLAKLRKGRCQSSEADVIKALTGHYRKEHLFVLKQALAMFDTFSERLKECDHEIERLLEEITPELPDDFPPLPPDPKPGSHCKNAPDYDARRSMYHLAGVDLTAIPGLNENLVQKILAEVGLDMRRFPSVKNFCSWLGLAPHNAISGGRILYSHTIRSNNRAGQAFRMAAQAVSRGKTAYSEFYRRIRARSGAKEAIVATAHKIARTFYFMLMRRQPFCETDLETYLQAQRERDVRRLQAKAAKLGFSLQPTAAPLLCY

SEQ ID NO: 330465 - protein, 400 aa, unidentified
MSGLKGNVNSYVGIDVSKDKFDACGITGEEAKLFQFSATMDRKGFEKLKGHLGTISVSSVLIGMESTASYHVNLFSYLVSEGYRVILINPLLISNYVKMQLRKTKTDKKDAVVIAQFLLANGDTLIQRATPSLISDLRDLSRQRESLVDEMTSLKIEIKQLLNITFPELEHMVGIFTKSIIKLLQQYPSAFALRDADLNQLSQMLIADSYGHKREAFAAALIKAAHSSIGTNSTAKEMILKQKIALLLHLEDALQEITAMLIEMARKLMEEDINIMTSIKGIGDKTAANFLVEMGGDINQFERSGKIIAMAGLDPAVYQSGKHEGKGRITKRGNRHLRRIIWMMTTRVIQYSDVFKVYYLKRRKEGLPYKKAVLATAHKLIRVIYAMLTQRTTFCPQGNS

SEQ ID NO: 330466 - protein, 339 aa, unidentified
MKYTPVGVDIAKYLIQVHFIDEHTGEVIDKRLRRQDFLMFFCNREPCLIGMEACGGSQHWARELTKQGHKVRLLQARFVKAFVMGNKNDVMDARAIWMAVQQPGKEIAVKTEEQQSVLVLHRSRRQLVKFRTMQINSLHGTLLEFGETIHKGRAAMEREFPEALERMKERLPPYLITVLENQYNRLNELDSLIEDIEKQLTSVAKQNETCKRLLDIPGVGPLIATAAVATMGEASAFKSGREFAAYVGLVPKQTGSGGKIRLLGISKRGDTYLRALFIHGARAAALLTKEPGPWITELKKRRPASVAIVAMANKLARTVWAIAAHGSKYDKNHVSTRPY

SEQ ID NO: 330467 - protein, 387 aa, unidentified
MLSIGIDVSKGKSTVCGMKPGGEIVYTPFEVQHTREGMSELVSLLRSSGEEVRAVLESTGSYHCPVVTALLENGIFVSVVNSLRMKRFCSQSIRKVKTDRIDAMQIALYGLAYWQELQPARLPEDTYRELQLLARQYYQMTSMLIKAKVDFNAICDQVLPGMQELMNDHAGRHKLSDFVLRYHHTTHILEMGETRFRKDYCKWAEKKGYRNRERMAALIFATAQNGIPVLPNAPSTQIVITEAIRVLHTVEASRDAILTQMQALAKTLPEYSLVREMPCIGDTLAPRLIAEIGDVRRFHSKRALIAYAGIDAPPYQSGKFCANNRHISKRGNRYLRKTGYEVMQSYVMHKPANDPIFTFIEKKRSEGKSGKLAIMARSQSSTAACRQ

SEQ ID NO: 330468 - protein, 398 aa, unidentified
MTESSDYESVQVFIGVDVGKDTHHAVAINRSGKRLFDKALPNDENKLRSLISDLKQHGQILLVVDQPATIGALPVAVARSEGVLVGYLPGLAMRRIADLHAGEAKTDARDAAIIAEAARTLPHALRTLKLADEQIAELSMLCGFDDDLAAQTTQASNRIRGLLTQIHPALERVLGPRLDHPAVLDLLQRYPSPEKLASLGEKKLAAQLCKLAPRLGKRLAADIAQALAEQTVVVPGTNAAAVVLPRLALQLITLRKQRGEVALEVEQRVLAHPLYPVLTSMPGVGVRTAARLLTEVACRAFASVAHLAAYAGLAPVTRRSGSSIRGEHPSRRGNKALKRALFLSAFAALRDPLSRAYYTRKMSQGKRHNQALIALARRRCDVLFAMMRDGTFYTPQAS

SEQ ID NO: 330469 - protein, 371 aa, unidentified
MEATTIGIDLAKSTFHLVGMDRRGKVVWRKALARRQVLEFLARLKPAVVGMEACATAHYWGREIQKLGHEVRLINPSFVKPYRKGGKNDFNDAEAICEALSRPTMRFVEVKSLAQQDMQSLHRVRQLVLKQRTQTANQLRGLLAEYGLVTRRGITALRRAVAAWSDEPQRLTALMGQLAAANLEMLAGLERQLKELDRRIAQACRADERCWRLAEVDGIGPVTATAAVAKIGNARQFPNGRALSAFWGIVPGQHSSGGKTVLLGISKHGDRYMRMLLIHGARAALRVAGRRRDARSLWATRLKLKSGANVAAVALANKNARVIWKLLTSGERFRPQPPATEAERAQTAQRLASEKRAGRRVAVRLEHELKI

SEQ ID NO: 330470 - protein, 418 aa, unidentified
MQVDRDEPEIVERVAALDVGKAEVVCCVRVPGQGGRRLQEVRTVSTMTASLLELGDWLSGLGVTRIVMEATSDYWRAPFYLLEDRFQTWLVNAKDVKHLPGRPKTDRLDAVWLCKVAERQMLRASFVPPPQVRELRDLTRYRVDLIGVRTAEKQRVEKLLEDALIKLSVVVSDLFGVSGRAMMAALIDGERDPKVLAELARGSMRSKTDRLREALTGRFTDHHAFLLTRMLSRIDQVSADIATVQDRIEVQIAPFAPVVARLDEIPGVGVTAAQVIIAEIGLDMSRFPTPAHLVSWARFAPGVSESAGRKKGNSGTGHGNRYLARVLGEAAVGASRTHTFLGERYRRIARRRGSKRAIVAVGRSILTIIWQLLSDQNARFVDLGSDYYHSRVNLNRKMRNHIRELQNLGYRVTLEPAA

SEQ ID NO: 330471 - protein, 355 aa, unidentified
MNDAKYIGLDVHQATISVAVLDSAGKLVLEALLETKAETILQFIRGLRGSLHVTFEEGTWAAWLHDLLKPHVAQVVVCDPRKNTLGKVGNKNDRNDARELAELLYRNKLKPVYHGEHGVRTLKELARSYLTITRDLTRVMSRLKAIYRSWAIPCAGQQVYAPRYRAEWLAKITEPGVRRRAEFYYQQFDALAALRQQARRELLAESREHFAVKLLREIPSIGPIRAALLVALIQTPYRFRTKRQFWSYIGLALKTYGSGEYRFVGGQLKRSKKFLAIRGLNLNHNHDLKNIFKGAATWAAATSGPFQNFYEACLARGMKPSMARLTLARKIAAITLLVWKKGVRFDAEHLKQQAA

SEQ ID NO: 330472 - protein, 425 aa, unidentified
MSSPAPQTPQLAAWIGIDWADQHHDIALRETGSDRVEHARIKSTPEALATWLAELRSRFGGKPVGVGLEQSRGALIHALLEHEFIVLYPINPATLERFRKAFFSSGAKSDPEDAGLLLELLEKHSHRLHAWRPDDPDTRSLVRLVEARRKAVNQRTQLVQRLTAELKGYFPQALDWAGEDLTSAMAVAFLRRWPTLQAVRRARPETLRRFYSQHHCRSVDLINARLKQIRTAVPLVTDRGIVEPSVLTVRMLVGQLEALSAGVEAYDTRIRELFAAHPDADLFKCLPGSGAALAPRLLAAFGADRARFGSAAQVQQYSGIAPVTEASGKSRWVHRRWAAPKFLRQTFHEFAGHSIRSSVWARAYYEQMRRRGKGHHAAVRALAFKWIRILWRCWQDRTPYDEKQYIQALRKRGSPLVELLPALAT

SEQ ID NO: 330473 - protein, 324 aa, unidentified
MSDISTKPAAVKAAGIDMAKAKFDVAVDGTDERFTASNTPEGHRQTAEQLTRLGVTRVGVEATGNYEAGLVGYLRAAGFTVVVLDPAQVHGYRRFKKQRAKTDPIDATLIGAVTAAISDEEIHQAPDPRLAPFCEHLTMIEQIVEDIARLKTRWDRFSSKHCLDWLKSEIARLERRVKTERRKLVRKIEAHADLKARYQLAQTIPGVGEGLALTVIVRVPELGSVSREQAAALVGVAPYNVDTGEHAGERHIAGGRARPRKAFFMAAFAGCNRWNPELKAFYDRLRAKGKPHKLALTGAMRKLVIMVNAVLARGTPWVDRPAQP

SEQ ID NO: 330474 - protein, 336 aa, unidentified
MLYVGLDVHSKQSSLCILNSGGGTVNQIQFKGPRSMVVDHLRQLKEPFAICYEASCGYGQLYERLMPIAHHVAVAHPGKLRLIYGSKRKNDRVDAQKLAKLLLLDMVPPVHVPSIDVRAWRSLIMLRQRVLALIVRCKNQIRGVLREHDIVGAKWLWSKKQLAWLEALELHPIAKLRLELAVDEFKTHRAKIKRIERELQKYADRSPAVKLLMTIPGVGIRTAETFVAWVNDITRFRNNRRIGSYFGLVPCQDASADKNRLGHITRDGPPVMRKLICEATWTAIKKCPAFKQFFERVMGGKSERKKLALVATMHRMIRVMGAMLRSGEAYDANYKR

SEQ ID NO: 330475 - protein, 451 aa, unidentified
MKKEKVNKGVIKMGSGLPVFNHFAAGIDIGDTLHCVAINDGNGGHEVKTTSAFTCDLNEIVDYLKHNGITTAAMESTGVYWLPLYIMLEEAGIEPYLVNAKHVKNVTGRKKDDTDSIWIQKLHTCGLLQKSFQPDNEIRLLRNYTRQRKNLIILGTDAVRRMQKALELMNIKIHTVISDILGKTGMEMVKAILAGEKDPQILATLCDPRIKASQEEIIKSLQGIWKEEYLFMLEQAVENYEFHQKQIKNCEEKIKQQLIKQVAIIKEGDITSLEEMLKKKAKSKRNQFDFAISPLLIAIAGVDLCMIPGISEVTALGFISEVGVDMSKWNSGKQFAAWLNLTPNTKITGGKIISSKMMKKNNKAGQYLRQAASSLSTNKTPIGDYYRRMRGRLGGRGAALTTAHKLSRVIYTMLSKKTEYNPGMMIDNQEKFKEEKIKKLEKQLARLKQAA

SEQ ID NO: 330476 - protein, 416 aa, unidentified
MKSARNTLPDQPVNDVTGGIDWAVADHAVCVVDGRGRRFAQTLVEHTAAGLRDLINFLTGHGVGEVAIERPDGPIIDTLLAAGLLVVVISPNQVKNLRSRYGSAGNKDDRFDAFVLADTLRTDRSRLRPLTVDSADTVALRSACRTRKDLVTHRVAAANQLRAHLSNVFPGAVGLFSDLDSKISLAFLSRFTTQDQANWLTPTRLTAWLAKHGYPGRTSPATLHHRLTSAARGITGPAGDAHAAITRAMIVVLTTLAEQIQALNTHIDQQLQAHADQHIFTSLPRSGRVRAARLLAEIGDCRARFPTPESLACLAGAAPSTRQSGKLRVVTFRWSCDKQLRDAVTDFADGSRHANPWAADLYDKARARGHDHPHTIRILARAWLHIIWHCWQNNLSYDPAQHHALQRILNTKNQAA

SEQ ID NO: 330477 - protein, 406 aa, unidentified
MEVVYERCCGLDVHKKSVTACVITPEGKEVRTFGTMTEDLLALVDWIKEKGCTHVAMESTGVYWKPVYNLLELAEIEALVVNAQHIKAVPGRKTDVKDAEWIAELLRHGLLRGSYIPSREQRELRELVRYRRSLIEERAREVNRLQKVLEGANIKLSAVASDILGASGRAMLEALIQGEENPQVLAGLAKGRLKQKEGELVQALRGLIGPHQKMLLAAQLEHIDFLERQIERLSEEIARRMRPFEEELALLDTIPGVARRNAEEILAETGTDMDRFPSAAHLSSWAGVAPGNNESAGKRKSGRARKGNKALRATLTEAARSAARAKNTYLSASYHRIAARRGANRAAIAIGHAILVIAYHILKRRQPYVELGPNYLDERKKQAMVRRTVKKLETLGYEVRIEPKVA

SEQ ID NO: 330478 - protein, 346 aa, unidentified
MEELKVVGLDLAKSVFQVHGIDARGRKVLGAKLKRGQVLEYFARLPVVRVGMEACAGAHEWARRLRGLGHEVKLMAPQHVKAYVQGNKTDARDAAAIAEAAARESVPAVAVRTLEGQQMQALHRMREGLMKQRTATANQLRGLLAEFGVVMPAGVKKLREQASLWCMQAGVELVVMREGARVLLEQLGWLEERIARLEGQIKQLHRVNAASRLLETIPGVGLLGATAVVASFGGCESFESARKLASCLGLTPREHSSGGKQQLLGISKRGNGYIRKLLIHGARAVLRVRCNNPLYADSWEVRLAARRGTNVAAVALAAKNARRIWALLRSGQAFDPAYGQREALST

SEQ ID NO: 330479 - protein, 364 aa, unidentified
MFTERTSVGLDVHARSVAAAAIDGVTGELSQTKLTPAYEHIRSWIGDLPGPVAVAYEAGPTGFGLYRHLSAAGIRCEVVAPSKLQRPAGDRVKTDAKDAVHLARLLRLDEYTPVAVPRVEQEAARDLVRAREDCRGDLMRARHRLSKLLLRHGIVYYGGDAWTRKHDLWLRTEALAQLTTQATRLSFDADYETVLATKVRRDRLDAAIDQMAADSEFTPLVRRLGCLRGVNTLTGFGLAVEIGDWHRFTGNSIGSFVGLVPAEYSSGSSRTLGPITKTGNGHARRLLVEAAWHHRPRYRIGKTMRDRWDLAPAPARVRGDEGNRRLHHRWVRFIDRRKRSTVANVAIARELAGWCWSLAVLDDS

SEQ ID NO: 330480 - protein, 338 aa, unidentified
MKLYGAIDLHSTNNVMVVINEHDQVVYQKRLPNDLSLIAQQLSSYRRSLEGIVVESTYNWYWLVDGLMEKGYRLHFANTAAIQQYNGLKYTDDHSDARWLAHLLRLGVLPEGYIYPKQERAVRDLLRKRGQLVHQRTANLLSIQSLISRTTGNSINAQYIRALNIQRVDGVLSNPNHVLALKANLAVMNSADGQIEILEKAVQDRVKLRPQFKFLKTVPGIGPILALTIMLETGEIERFASVGNYASYCRCVGSKKISNGKRKGSGNTKNGNKYLAWAFVEAANFAIRFSARIKSFYQKKKSKSHAIVAIKAVAHKLCRACYYILKDQVAFDITKAFA

SEQ ID NO: 330481 - protein, 411 aa, unidentified
MDKIYDKCCGIDVHKKLIVACFRCGRKQELREFGATTRELLTLADWLKEGDCEMVAMESTASYWKPLYNILESSDLNAMVVNARHMKAVPGRKTDVKDAEWIADLLQHGLLKASYIPDKDQRELRELVRYRKSLVGERTRELNRLQKMLEGANIKLSGTVSDINGKSARSILEYLLTGDSIDEVKYDEMYKQKVIAHNLKATKEQIIDDLNGVMSPLQRRMMKELLIHLDELNTHIKNLDDEIDNFMKPEEKQASQAIQDVTGIGNTSAQAIISVIGTDMDRFPTDKHISSWAGLCPGDNESAKKRKSGKTRKGNSLLRTTLITCAHAAVKNKKSYFHAQFMRISAHRGPKRAYVAVAHSMLIAIYHILKDGVVFKDLGADYYNQFNKERKIAAYLKKLKALGWEAPVVAA

SEQ ID NO: 330482 - protein, 338 aa, unidentified
MRLYCGIDLHSTNNYLGVYDEQDRGVLCKRLPNELGVVLSSLEPYKAELVGVVVESTYNWYWLVDGLREHGYRVLLANPGGNEQYNGLKYTDDRHDSRWLAHMLRLGILATGYIYPKEERPLRDLLRKRMRLVQQRTAHVVSVENTITRNTGRRLSWSRIEELTDDQINKLLGAELIRMAARASFEVIKILDEQISEIEKTVKARARLRDEFELLKTIWGIGPILALTVMYETGEIKRFPGVGDYCSYARCVGSARWSNGKKKGENNTKNGNRYLGWAYVEAAHFAARFYPRAQKFMQRKLAKGNRALAAKALGHKLARASYYVMRDQVEFDPAKLFG

SEQ ID NO: 330483 - protein, 419 aa, unidentified
MPFKIFRKNCCGLDVHKTWIYACIGITDPNGRTEYKQTRFSAFTKGLQELADWLAKYNCKEVCMESAGKFWIPVFNVLEKSCLVTLAHPKYTKPQKGNKTDRKDAKWICDLFMCDMIKPSFIPPPDIRQLRDLMRYRMKLTNMLTGEKNRALNCLTVSNLKLDDVFSDVFGKSSRSIIAYILEHPGEKFDVAPFIDKRCKHPLDEIQAAVDGAVSREQAAKLRECLQHIDEIGAHKENIEREIFRLAEPYAYQLSLIQTVPGLSGNPMTAIALLSEIGADMSAFPSAKHLVSWAGCCPRNDQSNGKVKSTRISRAGSYLKPILVQVANAVIKSDKYPECKERYRKLKARRGHKKAIIAICRMLLTAIWNILSKLEPYSADGYLADKISEHSVVITKAQGLALLRQRGYIFKDELPVESG

SEQ ID NO: 330484 - protein, 455 aa, unidentified
MANDNHPVNPNAAGVDIGAREIYVAVPSDRDQEPVRAFETFTEDLHRLADWLSACRVTTVAMESTGVYWIPLYEVLETRGIQPCLIDARHMKNVPGRRTDWHECQWIQYLHSVGLLRSAFRPESDICAVRALMRHRSDLVQMASQHVQHMQKALTQMNLQIHHVISDLTGVTGFAIVDAILAGERRADELAQLRDFRIKADGETIRKSLVGHWRTEHLFTLKQSRQLYQTYQQQILDCDAEIQKLTGEFSPRVDPSDRPLPPQTKHNKMATSPKGKAIDPHHCFDMRREAYKLFGVDVTQIPGIATIALSLFAELGRDMSRWPTRHHFASWLALCTDNDISGGRVLWKANRKAKNRAGQLFRLAANSLHHSKTYLGNFLRRMKAKLGAPAGITATAHKIAIIFYTLVQRQIEYDETIWAQREAERQQHYEAKLKRQAQKLGYMLVPMQSAQSVPS

SEQ ID NO: 330485 - protein, 373 aa, unidentified
MRAVLAWMCISGVWWPVCCSPSPMGASGVKCGRAGTMTADLLALGDWLDLCGVEQVAMESTGVFWRPVFNLLEDGHEIVLVNPQHMKAVPGRKTDVKDAEWLADLLRHGLLQPSFIPPASIRALRDLVRYRRTLVQERVQEVNRVQKVLELANIKLAAVASRVLGKSGRAMLDALVGGESDPEALASLARGRLRAKLPELRLALTGRVQPQQQTLLQQMLAHIDFLEASLAHLQGEIDGMLQPFEEAITLAQTLPGVGPVAAAGPIAEIGIDMSAFPTHQHLASWAGVCPGNKQSGGKRRQERTRPGNPRLKAFLCEVAQAITQSLGHLSGRLLSSRGAPPWQRARDPRAGPSRPRHPLSPVARASTIHGSGG

SEQ ID NO: 330486 - protein, 370 aa, unidentified
MSVRRILAKTIDTDLEYEAIGIDLAKNCVSAALLTTDGEVVCIDRLDYSELEKSAQVLCPTTFAMEPCTEMNYLVQKLEAWGHRCLVIGGKNVQNYVENHYSGQKTDLNDAQALAFLAQDTQLRTIKAKDMEQQKYASLTTLREQYIKQYRQTIVSLKGICQAWGLNISKGISGKARLKDLIENHAAFPEELKESLVDMVTHAQTAQKALNKITKTLEELAKNDKLCQLIQTIPGLGPICSCRLRATIGDIKRFKNPKDFPAYYGLVPRSIATGHNEKKGRITHRGDKTMRSLMVQGAGSVINMATRGKLKSKQLTKWILKKQKEKMPWGKLVCAVAAKLLRIVRAVLISSKPYNSKIAGVAKCSLPKGA

SEQ ID NO: 330487 - protein, 474 aa, unidentified
MHGSPMAAAGLGYRLMHIAILWPLESCRRARRRPLIAHKVAASRSLECCRGQARGGFTRPREGAALKRSDIAVFDVFCGIDVGKSSNHIVCLDRHGEEPLINRSIPQSEMEIREVLEEALFHGRPLVIVDQFGAFGRLVVGVAKDMGIPVAHMSPRRFRQVAETYGEDKFDEKDAFILADASRTMPRNIEFVGDRAESMAEIKVLSSRRDDVVAERTRCYNRLHDFVHQVSPPLEELFSKSKLHNDLEIRLVARFGGPLGFRRAGRARAMRWASALKYHAVDGPKKVEQVFDVLDRQTVVLPGAAVIEEQIRAIASRVIELVAEERRLNTMIERRAAMIPEVELLQSIPGVGPVYAAVIAVEIGDVGRFADSNHLASYAGVAPRKEESGTSVHKSKKRKGGNRRLKNALMQSAQRSVLRDPVARAYYERKRAEGKKHLQALRALARHRVTVIYAMLNEGTYYEPPVEIDERGRG

SEQ ID NO: 330488 - protein, 312 aa, unidentified
MENKVYVGIDVSKDKLDLAIRPDGQEWSEGQDDASLERLVRKLKDIAPELVVLEATGGYEARVAALLATAGVAVSVVNPRQVRDFAKATGKLAKTDRLDAHAIAHFAEAIQPQVRYVSDEEGREMAALMSRRKQLIEMMVAEKNRMHTCLPKLLPNLKAHIAWLEQCLEELDKDVQDKIQNSAIWHEKDDLLRTVPGVGKVVSFSLLAGLPELGVLDRKKIAALVGVAPLNRDSGKYSGRRGIWGGRGDVRSALYMATLSATRCNPVIKSFYQAMVARGKLKAVALTAAMHKLLTILNAMVAQSKPWCPPIA

SEQ ID NO: 330489 - protein, 359 aa, unidentified
MSSISPPGPLSKIIIGVDTHKHVHVAVAIDDDGQRLGDLRVPVDSLGYQELDRWAQSFGRVLAYGIEGTGSYGANLTSYLRRQGRKVVEVNRGDRRARRANGKSDTLDAELAARSVIAGTSTAVPKSADGTVEMIRKIKVARDIACKNRTSAIISLKTVIVNTPQELKEQLDSLGDKALIQKCSGFRPGTVDDPISAAKHTLRALARRWEFLNAEVKDHDAVIAKLTTSLSPTLCDGFGIGPDTAAEILIVFGDNPDRVRSEAAFAKLCGVAPIPASSGMTTRHRLAWNGHRQANAALYRTAIVRMQHHQPTKDYVAKRTAEGLSKRDIIRCLKRFIAREIYGRVMADFRARTALSAAA

SEQ ID NO: 330490 - protein, 357 aa, unidentified
MIAMKYYTSTTKFNCGIDLHARQMYVCVMDREGKKLVHTNIRNNDFEFFLKLVAPYRHDLTVCAECMFGWYWLADACQAAGLQFVLAHALYLKAIHGGKNKNDRIDSEKLAHLLRTNLIPPAYVYPAAKRPLRALLRQRILYVWRRSELLSRIQSHQLAYNRPTCRQNHYNRDAWTEQLLASEPDPVRQLALQNDLALIGHYDAQLASLEKALLKLTKQTASRDFNLLQTTPGIGDYLGLTLLHEIGDIARFPTVKDFLSYCRLVKGTVASAGKLKGLRGAKLGNPYLRWAFGEAAVIAKRDPAIIGPLAQRLEARLGNKFKANTVLAIKLARAVYFMLKHKTAFDPDRWVAVLSKN

SEQ ID NO: 330491 - protein, 371 aa, unidentified
MSTVEFPQVIERGCGLDVHRDTVVASIQGIDLVEETQTFFTFTSDLERLICWLQNHGITHVAMESTGVYWKPVYYVLEGYFEILVVNARHIKNVPGHKTDKADSQWIAKLLLSGLLKSSFVPDADMRFLRTLFRHRKKLINQRSRAKNRLQNILEDANIKLSSVVSDVFSKTGLAIIEDLINGINDPVELAKQARGSLVRKRSELEMALHGRFNEYHKYMLQLIMNTIQEHNQRVEQMEQKLEECMLPYKHEIELLQTIPGISRISAIGIIAEIGVDMGKFISAKHLASWAGVCPGNNESAGKKLSARSTQGNKYLKTTMIEASWACSHTKNTYLSFKYYSISKRSGKKKAAPKKKKAAKKKKPVKKKKKK

SEQ ID NO: 330492 - protein, 355 aa, unidentified
MIIIGVDFHPEFQQIASVDTDTGEFQEKRLVHPAEAERFYRALAGTGQKVRVGMEASGHARWFERLLAELQFELWIGDASEIQTKRARKQKTDRQDAQHILKLMLKDDFPKIWVPSWENRDLRQLLWHRHRMVQARTRIMNQLQAVALNEGLRCKKKLWRAGGRQQLESFRLAPWASRRRRDLLELLDRLTPTIAELSEAIEQEVENHPEARGLMTHPGVGALTALAFVLIIGNTERFQCGKQVASYLGLVPLEKSSGNRWRLGHITKQGSSMVRFLLVEAAQVTVRSLPEWRSQYFRLVMRRGRKTAKVAMARRLAIRLYWMWRRGLNYEQLKSSVRTQDSPEQAMVCSRTPSN

SEQ ID NO: 330493 - protein, 374 aa, unidentified
MSLTTKYVGLDVSKQKIAIAIADEGKQDPRYWGSIPHTKEAVRKWVQQVRSTDMTLEVCYEAGPTGYVLYRWLLEMDVSCTVIAPSLIPKRAGDRIKTDKRDALRLAQLFRSGELTSIYIPTLKDESLRDLVRAREDAKEDLNRHKQRLGKLLLRHQLSPPNGATPWTHAYEEWLDTLQFTEDSQRVVFQEYRETIRETKERMKRYEKEIEEQEKVSHQAPLIQAFQALRGVAVLTATTLASEICTISRFPSASAFMSYCGLVPSERSSGETRWQGRLTKAGNAHLRRVLVESAWSYRYSPAVKRKMRERVTGLPSEIQTIAWNAQQRLHRKYRSMIRKGKHKGTLVAALARELAGFVWAIAKEVERLEQKKAA

SEQ ID NO: 330494 - protein, 344 aa, unidentified
MEHFAGIDVSLKDSSVCVVDAAGRIVREAKVASEPEALVAWFRGLGLKVTRIGLEAGPLSQWLHAGLSEAGLETVLLETRHVQAALSAMVVKTDRKDARGIAQLLRMGWFRPVHRKSADAQEVRALLVGRKLLQSKLRDVELSIRGILRGFGLKVGEISKGRFAARIRELVAGHAMLETVTGAMLAAREALLAEFMRLHRRMLAIVRADAVCRRLMTAPGVGALVSITFRTAVDDPGRFRSSKAVGAHFGLTPKRYQSGETDVIGGISKVGDAMVRTALYEAANAVLSRPTRFSTLKRWAMDVAKRRGLKRAKVALARKLGSVLHRMWIDGTEFRWGKEAPVAA

SEQ ID NO: 330495 - protein, 402 aa, unidentified
MNAVGIDVSKGKSMVSIMRPFGEVVASPFEVTHSSNELSELAKSLKGLKGETKVVMECTGSYYYPIAYALHEAGLFVSAVHAKLIYDYGHNSIRKIKTDKADSIKIANYGLSNWLELPKYLPEEDIRIMLKTFSRQYSKYQGMKTMLKNNFIALTERTFPGVNELFTSPPRKSDGHEKWLDFAIKFWHCECVCGLTLKVFEGRYQKWCKKEGYNFSKDKAFDIYTSACGHFSVMPKNDAVKLLVTQVTSQITAISENIAIIAQEMKSLAESLPEYPVVSELFGVGDILGPQLMAEIGDVFRYRNKGSLVAFAGLDAPPYESGKFVSTDRNISKKGSPHLRKTLFQVMQVFIQSAPIDEPVYQFINRKRAEGKHYYSYMTAASAKFLRIYYARIKEYLISIEG

SEQ ID NO: 330496 - protein, 355 aa, unidentified
MSQTPNTAIAVIGIDIGKNSFHVVGHDARGAIVLRQKWSRGQVEARLANIPPCLIGMEACVGAHHLSRKLASLGHDARLMPAKYVRPYSKGQKNDFNDAEAIAEAVQRPTMKFVATKTAEQLDLQALHRVRERLVSQRTGIINQIRAFMLERGIAVRQGIGFLRTELPTILATRTDALSPRMLRVIEELAGDWRRLDQRIDGLSGEIEALARQDQACSRLMTVPGIGPIISSAMVAAIGTGDVFSKGRDFGAWLGLVPKQISTGDRTILGKISRRGNRYLRVLFVQAAWVVLVRIKNWERYGLKSWIEAAKRRLHHNVLAIALANKLARIAWAVLAKGRGFELTRTGDAGVVQPA

SEQ ID NO: 330497 - protein, 397 aa, unidentified
MSAVVGIDVGAYKHAAAVCRSGEREAERGVFRLSADRAGFDELDRWLERHGPVERVVLESSGHYYWPLASHLHRRGYGVAVVNPLQAKYFAKSRLQRSKSDPADARTLAALGMSEEPRIKDPLLGAEAKEAARFWGGLVKEQAQVRQKLLRLVEIGFPELKECFEDPLCETALAVLREAPTARAAARKRVSTLAETTRPGGRRRLGESKARRLHELAEKTIAPPELDAQMSFEVGMLIQQFDLLDKQIEIAEQRVADVLDSELARRLQTIPGVGPALAATFIAEIGDIWRFDDFDQLASYAGVHPKEQSSGTKGQNPETSWHMAKTGNSYLRSAAYKMAVVGTQHNPVIRAHYLRKRAQGKSAMNAIGHSMSKALAIVWGVWRSGLDFDPTLGGPRT

SEQ ID NO: 330498 - protein, 468 aa, unidentified
MSSRVRSTTRQKKSRKAGRRGLRVIREQVAGIDLGSREHWVCCPGHSEQEPEVRTFGTTTPELEKLLKWLQAEGIESVAMEATGIYWIPPYELLESRGIEVVLVNARQLSHVPGRKTDMLDCQWLQLLHSCGLLRGSFRPVESICQLRGLQRERANMVSEATRAVQRMQKALDQMNVQVHRALTDLTGKTGLRMVRAMVEGERDPYRLAAFRDNRCKKSEAQIAEYLTGNWRDEHLFNLKMALQLYEKVQDILAAYDQEILHLLAELQVPERAQLELPPHPNPAKEKAIRRRGEQPLRTALWRFAGVDLTRIDGISAGTAQVILSEVGLDLQAFPSEKHFVSWLRLSPKTAFSAGKPLPKKNKGTGATRVAGSLRMAALSLCHSSCALGAYFRRLARRKGGATAVFATARKLASYIYRMLRFGQDYVDEGAQAYEVRFQQKRLRSITSVAKQMGYQLVPLDDTVQVSG

SEQ ID NO: 330499 - protein, 383 aa, unidentified
MPDVSSTAPAQVRLWVALDVHKHSIVAATLPPTGGAPEVQRIESSERAIRRLIDRLGGPSGLAVAYEAGPCGYDLFRLFGRLGVACDVIAPSLVPVRAGDRVKTDRRDAKKLVRLYRAGELSFVAAPTPEQEGLRDLVRCFDDLRCARTAARHRVAKQLLRHGRIFREGKKSWTKQHVAWVRRQRLEQPNAQRALEHMLAHLNGLDAQLGALEHELAALATSDPWRDPVAWLCRFRGIGLRTALGLLAEIGDFRRFGSARELMSFLGLTVSEYSSGDRQHRGHLTKTGNRHARRLLIEAAWHYQHPPRRPLRTGALAEPVPSAVDARAWQAQIRLHHRYRHLTDHRKRSTAAVAAVARELAGFIWAAMTHQPVRTDQQLTATA

SEQ ID NO: 330500 - protein, 502 aa, unidentified
MPIRMYGWLLITRMLMGIGTTRDSLNKEWPMRTKALGIDPDASGGVCALVDVASERVTTKRFPITDEGMSQLVKWISRQGELIVAIEGRNGQSDPFERALRKAAIVFYSFTAHAVAKFRSAMLGQNKNNQKDAEAVARYALTLETQGLLERSRRVWFVDEELQTLTRLYAVKRRENTREISRLWKILHKVCGDLYLAFRGRHPDYRFHSSLLQQRGVVRLLAEQPDVSSWHLMSEKELMGILGGSSRERAETVVELQRLSASLAPLRPSHTVMVQTTAATLLTLSESLDRMKSGLDELTQENLSVCRLRRHAGIGVLTAATIIAEIIDIRRFPSNNHLASYAGLARREYKTGRSTTEIAPVLYNHRLKNAFFSAAKNFILYNPDSHLSAYYRMLVARGMSITEAYKRVARALVRVFYRELTELVTDSAKTNGRNSERKSEDGMATGTDRQAQVASSNIPPSTEDHTPTQRQTEPEAKHIAKAIVAMISETENRRKRNVENFT

SEQ ID NO: 330501 - protein, 429 aa, unidentified
MKKLRAAAGADVAKEFSKVCIMTPDMQIFKTLHITHNKLEDFEKLFVLLDQVKEDFGCSTTVVLEATGHYHKILVRALVKRNIEVVVINPIQSDSIRNLNIRKVKNDKVDAKKLAALFHLKEGDFQIVTQVDTQIDALKDLVRQYYTYQDEITVHKLRLGSFVDRVMLGYDKILSLTSVSGLDVLKAYPSPRALLRARKSTLLRLLCKSARKGPAWAERKYDKLIAMARIMVELGEPGLHLIEMIRREIAQIEYIQGLCGQIVDDIMALINESRRSDTSDLAQIIDLLDSIPGIGILAAATLVAEFGDIDAFRSARAMAAYAGIDPNVVESGKFKGTRVRISKRGSRYLRRVLFHIASANIRKLRNGSYANPPIKDYYQRKCESKPKMVALVAVMHKMIYIIFAVLRDRKAFELRDPKKHAATLMGKVA

SEQ ID NO: 330502 - protein, 358 aa, unidentified
MNSQKYVALDVDSANIVAGVFDSKGKSIMECFVKTNSTAVRQFFKLLDGTVHVALEEGTQAGWLYDLIRPLVAEVIVCNPRRNKLLQSGNKGDRIDVNKLGKLLRLGELHSVYHGDQAIEGLKQLVHGYQTLVEDSTRAMNRLRAVFRGRGIKCNSTVYSADKRQEWIEKLDIKTAQMRVGYLYKELDCLMKLRDEAETAMCRQARTHSAYKLIVSVPGLGPVRTAQIIAVVGSPHRFRTKRQLWPYCGLAVVTRSSADYEWVGDRARRRNKPTPTRGLNHNFNRTLKAVFTGAALTAIGSNKEFKQYYQRLKDKGIRPEMARLTVARKLVAVTLTLWKKGEKYDSERLNQAAGTGDQ

SEQ ID NO: 330503 - protein, 420 aa, unidentified
MRNAGIHANSLLEVRRMYNAVGIDVSKGKSTIAVLQPGGTVIRKPFDVSHTSQNLNELADYLSSLDGTTKIVMECTGRYHEPMVKALSEAGLFVSIVNPHLIKNFGNNSLRKLKSDPADARKIARYTLDNWTELRQYSGMDNTRTQLKTLNSQFSFFMKQKVAAKANLIALLDNTYPGVNKLFDSPTREDGSEKWVDYAYSFWHADCVRKIGLKAFTERYKSFCKKHHYIFQQDKPEKLFNASKELVAVFPKEKTYKLLIQQSIQQLNLASEHVERLRREMNELASTLPEYSTVMGIYGVGKTYGPQLIAEIGDVSRFTHREALTAFAGVDPGVDESGQHKSKSNRASKVGSARLRKTLFQIMTTLLQNAPEADPVYRFPDKKRSQGKPYYVYMTAGANKFLRIYYGKVKECLRNLEQTE

SEQ ID NO: 330504 - protein, 454 aa, unidentified
MSERKKRKKKAPRINLPASLQHVNLDAAGIDVGSDRHVVAVPEGRAEVSIREFGAFTEDLIALANWLAKCGVKTVAMESTGVYWIPLYEILESHGFEVKLVDARRVKNVPGRKSDVLDCQWLQQLHTYGLLHGAFRPPDQVCVLRGYMRQREMLVQASSMHIQHMQKALQQMNLHLHNVVSDITGITGMKILKAIIAGERNPQVLAKHRDQRCRHSAETLAKSLVGNYREEHLFALTQAVDLYETYQAKISDCEEAITRHLQAQPTRTDEPPPPAQKRIEKKHSVRAGVNVREELFKLTGVDLFSIAGLGADTLLTLAGEVGFDMKSWKSEKCFTSWLSLCPGTRTSNRKVLSSKTRRNSNRAAAAFRLAAATVGRSKTALGAFYRRIAARIGHPQAVTATARKIAVLYYSLLKNGTAYVEIGQEVYEQKYRQRRFNAMQKQALSLGYQLVPIS

SEQ ID NO: 330505 - protein, 370 aa, unidentified
MDVHYKFSNVTFRDSAGNIVRRERLDHPERAQLRERINRWPKGTPVVLEASFGWGWLSDLMAEAGLEVHLSNCYKVEQMRKARGLVKTNKKDADLTSLLPLEATKWWEVWRAPRDVRDRREQMRFRSDLVALQTTIKNRIHAMFHRNGIFHEFSDLFNGKGRLFLADICIKGSDYLSSQALQAFRGHILLLAHVRKQLASLERILKRQLEKTLLVRRLKTIDGFGLILSHVMMAEIGQIGRFRNHKALASYSLLAPRANDTGEADPERTPLGRHLGTRGNKTLKWAFIEAAHGAVRHGGKWRQMFDRVTGGGKKDRNRGYIKVARELVKAVYVVWKKDVDYIDNPLPRPGQGSKKSRSGTGQLCRTMVHA

SEQ ID NO: 330506 - protein, 352 aa, unidentified
MDATTVAVDLAKDVFEVALANRAHRIIDRKRLTRRQFESFIDGLSAGTTVVMEACGTAHYWGRRCQARGLAVRLLPVQYVRPYVRRNKTDRTDTEAMLEANRCAGVAPVPVKTVDQQALQALHRVRTQWQATRTGRINVIRGLLREHGCPVPVGARTVLARVTAILDDPARALPTVLRQTVAHLVEEVRTLEARVIAVDRELARVARAHPVATRLQQVPGVGIVTATAMVGAVGHIHAFRRRRDFASWLGLTPRESTTGTRRYLGRISKRGDGYLRCLLTHGARAVVLAAQRTARTSPHRLTRLQQWAVTVAARRGHNKAAIALANKLARIIWALWCHEADFHSPTVQPTAA

SEQ ID NO: 330507 - protein, 354 aa, unidentified
MPNYYIGADVDSKMTELAIEKNEKIVGRYRVPTTIPALREVLGSVPARKFLTFEEGPMAGWLYRNLKDNVDDLVVCDPRRNKLIACDGDKDDSIDAGKLAGLLRGGFLRPVHQSEDIGRVVLKQWVSLYHDRVGEAVRQINKIRARCRMYGIRTPRRVLRDQVSRDKWMTELKEKDLAEQLAVLWIGFDTAAKQVKMAKKQLIRHTKGYEIVRYWSDVPGIALIRAATMLAYLDTPWRFSNEKKLWKYCGVGLQRTASGTDRFGKMNSGKLQLAWAVNRRLKAVVMGAAMSAINQKNNIFACEYKRMIRNGLTVNNARHAAARKILSVLWAMWKTSSRFDESLVCSLPPKTVKA

SEQ ID NO: 330508 - protein, 344 aa, unidentified
MAYHTALDVSLRSVSICIVDDDGTIQYEGKAASDVSDIVGCLKRFDPSIDSVGFEAGALTQYLTYGLQAAGYEVICLETRQVNAALAAMRNKTDKNDARGIAQILRTGWYSRVHVKSMESHLIRALLSSRKMVLKQCVDMENEIRGLIRLLGIRLPSPLKHRAFDATVRQSIEKNTTLADSLIPLLDARLVLYQTFLKLDNQAKALVREDTVCQRLMTVPGVGAITALTFKAGVDDPTRFKRSRTVAAHFGLTPRRFQSGEIDNPGRISKAGDPDVRSALYAAAHSLVVRSAEWSSLKVWGLRLVKTKGHRRAVTAVARKLAVILHKMWLDGSDFRYGSTEATS

SEQ ID NO: 330509 - protein, 426 aa, unidentified
MRVLYDRVAAIDVHKDMVKVAIRVPGAKRGTRKTDVLEFRTFYGVLQEMARELRRRGVTHVVMEASGVYTDPVYYALRELDFEEVMVINPAHAKALKGHKTDAKDAIRLLDLYECGLLSGSYIPDPDLREVRDLARYRMKTVQARTSEIQRLQKTLETAGIKLSSVVSDVTGGSATAMIEALISGERRGSVMAGLAQTRMRTAGKMADLSMALAGRFTDHHALMCRLHRDRITIFDDAVKDLDAKIAPLVARYAREAELLKTLPGFGDVIVAGWLGAIGPAPHQHFATASRLASWATLCPGNYMSAKKSKGGRTGDGGAYIKPLLTQAAWAAVRVPGRLQARFHRLVRKFGGPRNKGAQKRAITAIAHTLLKIAYTVLKTGKPYADLGADFYTRRESPQARQGYLIRQLQKLNPGCVITIIPAEAA

SEQ ID NO: 330510 - protein, 424 aa, unidentified
MKNCNKQNEKIELVDEKTLVIGVDIGSYDEYARAFTCRKQELSKKPLHFHNTAEGFKTFKDWAVNIMKANGLEKIIVGMEPTSIYWEALATYCKDNGMILVHVNPAAVHKSKELDDNDPSKNDRKDPKVIAGLVADGRYQFPYMPEEEYAELRELSNLRIRTQENLTQCKNRLSRWYSRYFPEFKGAYKNVVSKTAMMILDLYPLPEDIVTLGVEGILQIWRSKKVRGAGERKARKLYEAARNSIGRKEAASIARIEFKSIKEDLDRYQERLDEIEKKADEILPKIKNVDKLFEIKGVGKATVLTFLSEVGEISRFDNPKEIQKLAGYAIVTNESCKHQGEKRISYRGRKRLRWVLYQTALSVIAKNAEFRQIHAYYTTRTNNPLKGIQSVVAVACKMIRIFYKILTDGVSYDGTKMTQDIVHA

SEQ ID NO: 330511 - protein, 354 aa, unidentified
MIIIGCDYHPGFQQIAFVDTETGDYGEQRLEHSERAERFYRDLADQGKKVRVGMEASGHARWFERLLVELTFELWIGDASEIRAKRVRKQKTDRQDAQHILQLLMENRFPKIWVPSGENRDLRQLLWHRHRMVQARTRIMNQLQAVALNEGLRCKKRLWRDAGREQLESFRLSPWASRRRRDLLELLDRLTPTIAELTAAIEQEVEKCPEAQRLQTHPGVGALTALAFVLIIGRADRFQCGKQIASYLGLVPLEDSSGQRRRLGHITKQGNSLLRFLLVEAAQVTVRSDQEWRSKYFHLAMRRGRKIAKVAMARRLAVRLYWMWRKEWNYGQLKKFGSHAGEPGNRDGVKSNTE

SEQ ID NO: 330512 - protein, 340 aa, unidentified
MSVMIGIDPHKGSHAAAAVDSGEEVVGELEVRATKRQTGGLLAWAERFPQRCWAIESANGHGYLLAQQLVAAGERVVDVPSTQSARVRVLDSTRSQKNDPNDARSVAIVALRQDGLRAVTAEDHVAVLRMLANRHTQLSSLKTQAACRLHAVLATLLPGGLASEMTPNKASRLLRRVRPTSMIETERKRIAHDLLGEVRRLNKQRHESKTRLKMAVDASGTSLTDINGVGPVVAGLLIGHTGDVTRFPTRHHYAAYNGTAPIEASSGQRKRHRLNPRGNRMLNHAIHTIAVCQLRYPNTEGRIFYERKLQEGKTKKEAIRALKRRLSDVVYRHLVADQQR

SEQ ID NO: 330513 - protein, 310 aa, unidentified
MDVIIDKGCGLDVHKDTVAACVMGSGIKKEIRTFRTMTGDLCKMKEWLSEKGITHVAMESTGPYWKPVFNILEDSFEVILVNARHIKNVPGRKTDVKDSEWICKLLRSGLLAASFVPPRAIRELRDLTRYRRKLTQAISSEKNRVQKVLEDANVKLSSVVSDTFGVSGSRMIEAIMAGDFDPESISNLAVGKLKSKKDDLKKALEGHFRDHHRFMIQASLDHIESLEKIIASLDQEINLKLKDSHREFELLQTIPGVKEQGAASIIAELGADMDVFPSEGHLSSWAGMSPGNNESAGKKKVERRPTAIRI

SEQ ID NO: 330514 - protein, 416 aa, unidentified
MSLALPDALFFTGIDWAAETHAVCVMDAGGKIAAGFTIEHSAAGIALLIGRLARYGIPGGMPVAIERPNGRLVDLLLEAGHPVVPVSPNAIKTWRDGEVLSGAKSDAGDAAVIAEYLRLRAHRLKAAAPYSDETNALRTVVRTRDDLVEMRVAATNQLSALLDAHWPGAKAIFADVESPVSLEFLTRYPTPAAAAHLGEKRMAAFCAKHGYSGRRSAAALLARLRHAPAGAAGEALTEALRDAVLAAVGVLTALNASVKNLDRSIAAHLGEHPDGPIFTSLPRSGQVNAAQVLAEWGDCRQAYAGPDSVAALAGVTPVTKESGKHRAVHFRWACNKRFRKAITTFADNSRHASPWAAKIYNDARASGKDHPHAIRVLARAWIRVIWPCWLNGAPYDPARHGAAAALAGQPTKQIAG

SEQ ID NO: 330515 - protein, 344 aa, unidentified
MGEVITIGLDIAKSVFQVHGVDGLGVVVIRKRVSRAKMLEFFAGLPRCLIGIEACPAAHHWARELQAIGHTVRLMPPSYVKAYLKRSKNDASDAAAICEAVTRPSMRFVAVKTKEQQAALMLHRARQLLVRQRTMLSNAIRGHLSELGIVSAKGRNGTDELLEIIGKDADSRIPLAARSVLKVLASQYVAIGVEIASISKSILAWHRACEPSRRLEEIPGIGPIVATALVAEISDWMAFSSGRGLAAWIGLVPKQHTTGGKDKLGSITKQGNRYLRWLLVNGAMAVIRYAQKHGTKKHPWLGQLMARRPTKVAAVALANKIARIAWAIMVRGDRYREPALMPAA

SEQ ID NO: 330516 - protein, 413 aa, unidentified
MELLHPKCAGLDVHKDVVVACARIAVDGKLTQEVRSFATTTTALFELSAWLEHQGCTCVAMEATGVYWKPVWHILEGSFELVLANAQHVRNVPGRKSDVNDATWLSDLLAHGLVRSSFVPPIAIQEVRDLSRTRKQLVREVIQHTNRIEKVLEDTNIKIASVISDVLGQSGRAILDALVAGQTDPEKLVALCSGRLKASRKVLIEALRGRATEHHRFLLKLHLAQVDGLRQGIRDLEARMGESLEPFRQHIENLTTIPGVSDVAAQVIAGEVGLEMTRFATAGHLISWAGMCPRLDESAGKHRSTRIRKGAPWLKTTLVSAAWAAVRTKGSYLQAQFQRLRARRGPKKAIIAVAASMLTAAYHILRDGVPYKDLGPDYFTRRNKDHVAERLQKRLEALGFTVEVRPASAGVST

SEQ ID NO: 330517 - protein, 338 aa, unidentified
MKVTTLGSDVAKSIFQLQGVDEHGKGVVQKRVPRSKLLETIAQLPACGIGMDACASAQYWARELQKRGQTVKLISPQFVKPYVKGNKNDSRDAEAIGEAVSRPHMRFVPLKTGESHESQAIHRRRSRLIKDRTALVNQVRGLLAERGIVIAQGITRLRQQLPTIVEDRAKELTPLSREVRRELYDQLVGLAERIARADRMVQRVFTENAQGQKLAPVEGIGPGIATALVAAVGNATEFANGRHLAAWVGSVPRQCSSGVKERLLGSSKRGDRYLRTVLIHGARATVPRARRKTDARSRWLMSVEQRRGKNIAAGAIATKKARIAWALLTSEAEYRKAA

SEQ ID NO: 330518 - protein, 489 aa, unidentified
MSKASQQQQAKKDATLKAQAPKRQARGSHRPQGEGNQRRSQLRITNPDAAGIDIGSQVHYVAVPEERAERTVRSFGAYTTQLEELAHWLKECAVKTVAMESTGIYWIPLYQKLEEAGFEVLLVDARQAKEVPGRKSDVQDCQWLQQLHTYGLLRAAFRPEDSVCRLRTLQRHRKNLVECGGMFVQHMQKALNEMNLHLHHVLSDISGYSGLAIVDAILAGERDPRKLASLADYRVKKSQAQIEAALTGDYRPELLFVLNQSLQDYRQIQQQLAQCDLRIEKQLRQIADCTNPSQDCGPRQQGPESATGKRAKIKPKDALEVSLAGHLKRILGVDLTTIPGLNVLAILTLISEIGTNMAKWRNEKAFVSWLGLSPNNKISGQRVLSSRTRKVVNRAATTLRLAAMVLGHTNTPLGSFYRRKRAQLGAPKAITATARKLGCLIYRLIKNGQAYQAPDLHVYELKYKDQILNSLRKRANSFGFDLVEVPKAA

SEQ ID NO: 330519 - protein, 332 aa, unidentified
MSVYVGIDVHRKRSQVAVVNEGGEVLANRNVPNGVKPILSVIGGLPAGTPAAYEAAFGWGWLLELLEAYGFEPHMVHPLQCKAIASARLKNDKVDAATLAQLLRADLLPEAWIAPPEVRQLRAMLRHRAQLVRLRTLLRNRVHAILADHGHGRPAGCWTGPGRAWLASLELPAVSREVIDDALALMDALQQPIDRLDQEVRQRAKADPRVRVLTQLPGVGPYTALVLLAEIGDITRFSSARKLASWAGLTPTVRGSDRTVHHGHISKQGPTWARWVLCEAAQTAKRHPDFAPGYEALARRRGKKIATTAIARKLITRAYHLLTDAASGGAPS

SEQ ID NO: 330520 - protein, 350 aa, unidentified
MDRYIGLDAHSASCTVAVVGPSGRRLQSQVLETNGKVLVEFVCTVPGTKHLCFEEGNHAAWLHELLSPHVEEIVVAHVRESRGPKSDQRDAFGLAEMLRIGAVKTRVYKGQGEFTLLGELARAYTVVVVDSTRVQRRLKALFRSRGVPTDGKGVYSPSARAEWIAKLPERSRTRAETLYMEMDALLAVRKKALREMTVEARRHSVFRTLKTCPGMGEIRIAQMMPVVVTPYRFASKRAFWAYIGLAVVTRSSSDWVRAKDGKWIRAQTLQTRGLNRNFNRRLKDVFKGAATTVIQHRDDEPLYRHYQSLLDGGTKPNLAKLTIARQIASITLSMWRSGEEYDPKRMEQSK

SEQ ID NO: 330521 - protein, 411 aa, unidentified
MKSLYRRIAGLDVHRMLYVLTVLIELEDGTHVKHQRSFGGFKRDRRALVAWLLELGVEHVVMESTGIYWKSIYAALEQAGIPAHVVNARHARNVPGRKTDISDSEWLAQLGRFGLVKPSFIPPQDLRELRLVARYREKLAQTLGGEKNRLHKILDDAGIKLGAVVADIGGVSAQAMIEGLIAGTPVEQLPDLARGVMRSKRESLEAALDGDLSPRHRLVLGHIQTHIRHLEAELASLDRTLIDAMAPYATYWHLLQTLPGIDQIAAALILVEIGTDLSVFGDVAHFASWAALCPGNHESAGKRKTGKTRKGNHALRYLLCEAANAARRTNSALRDKYQSLVGRKGHKKAIIAVAHQMIRTIFILFTRRVPYRDPGIDYQALVVEKNAPRWIQALKKYGYWPTSSAAPAPAQ

SEQ ID NO: 330522 - protein, 391 aa, unidentified
MIYVGIDVAKDKHDCFITNSDGEVLFKSFTIPNNREGFETLFQKVQSVSDDLTKVKVGLEATGHYSYNLLGFLLDKGLPTYVINPLHTNLYRKSLSLRKTKTDKVDAHTIASMIMSDVNLKSYSDTSYHNEELKSLTRYRFDKVKERAKLKSSVSRLVCILFPELEKLVSTLHMTSVYALLSEFPSAHAVASAHLTRLTHLLSESSKGRYGKDTAICFRDAARNSIGSHMPAKSLELKHTIKLILELTSEIDEIEVEINAIMDEINSPILTIPGISYKMGAMIIAEIGDFNRFDSPDKILAYAGMSPSTYQSGQLDNCYSHMEKRGSRYLRYALYNATKYVCHWDESFGTYLAKKRAEGKHYNVALSHATKKLVRIIYAMGKSGQAYTNAA

SEQ ID NO: 330523 - protein, 391 aa, unidentified
MIFVGIDVAKDTHYAAVSDNSGAVLVKPFAFQNNAEGFCLLLKKLSEFDRSKLLIGLESTGIYSENLICFLYESDFRLAVINPIQTATLRKTAIRKTKTDKVDTMLIIKSLMVNSYRLYSQRDADSLKLKTLCRFRQNLKKSKARLKIQLAGYVNLVFPEFGKFFKSGIHIAASYALLKKYSSPKEIAALRTSTLCTLLSKASHGRFGKDTAEALKSLALSSVGVKNPYISIQIAQTIAQIELLEQQIKDLNSAIEEAMESLNSVLMTVPGIGAVNAACILGEIGDIKRFSKPCKLLAYAGLDPTVRQSGQFTAKSTRMSKRGSALLRYALINSAWQLTLNDTTFKAYYDLKRSQGLNHYGALGHVAHKLTRVIFKLLTSDTPFNPAILVA

SEQ ID NO: 330524 - protein, 371 aa, unidentified
MTTVERSSTAIEVVLGVDTHLDSHVAVALDQLGRRLGDLTVPTTPDGYRTLVSWAVGFGSLRSAGIEGTGSYGAGLARHLKTKGIEVLEVERPKRRHLRRRGKSDPIDAEAAARAVLSGETAGQPKSGDGKVEMIRMLRAARCSAVKSRTQAANQLRNLVVTAPDGLRDRLRGLSTKVLATEAARFRPGERPSSPEEATKFALRSIARRYRALSQEITQLDSQLARLVAEAAPDLLALPAVSTNHAATLLVVAGDNPERLRSEASFASLCGVAPIPASSGKTVRYRLNRGGDRDANRALHLICVVRMRERRTREYVARRTAEGKSKREIMRCLKRYIAREIYRVVVPAAAAPPPTAPSPGVASSGRSAVSS

SEQ ID NO: 330525 - protein, 338 aa, unidentified
MKLYGGMDLHSTNVVTQLINEEDKVIYRKKQSCDLALILQGLEPFKEHLEGIAVESTYNWYWLVDGLMEAGYRVHLVNTAAVKQYEGLKYTDDDSDAFWLAHLLRLGVLPTGYIYPKQSRAVRDLLRKRGQLVRQRSAHILSIENLYTRNTGSCLSCNATKCLTQEQIQQQFDDPNVALAIDSNRAIMNALDQQIKVLEQAILKQAKLDDRYRCLLSIGGVGEILALTILLETGDIKRFAQVGNFTSYCRCVGSEKLSNGKKKGQGNTKNGNKYLAWAFIEAANFAIRFNEQAKRFYQRKAAKRNRVVALKAVAHKLARASFYVMRDQVPFDSAKLFA

SEQ ID NO: 330526 - protein, 272 aa, unidentified
MSRLRELSPHIIALEATGGFETVVAAALAGAGLPVVIVNPAQIRAFARAIGRHAKTDPIDADVIAHFAEATKPQVRPLPDEATRVLADLVTRRRQIIEMIGAERQREQRITVLRLKKSIARLLKALEKELASLDADIDDAVRGSPAWREKEDLLASVPGVGPVIARTLIAELPELGQLGRKEIAALAGLAPFTRQSGQWRGKSFIAGGRVAVRSILFMGALVAKKHNPVLKAFFDRLVAAGKPKMVALVAVARKLLTILNAILRDGRPWQTA

SEQ ID NO: 330527 - protein, 352 aa, unidentified
MRVYIGIDAGWESMRYEVRNAKDHRIKRGGIAATPEALEKLLKTFEKVKDVQVAFESGTQMYWMDNVVKQMGMDSYPFHAAHFFPAGKSKNKTDKKDAERIAHSAVKHDLPERIVIPEEGERQLREKMSEREGYKKELTTLVNRLHALTVSQGLAIKKGRLTESAESWDLVIEQLNEEAQPKAKRLYTVALSLMQVLEMLEDEIREMIERKDWKPAFTRVTSIPGIGFWTAVVLLAWCGPKAARFKSSRQAASYFGLVGKAYQSGKTKRMGHITKAGPPIARRIFTQAAHAFLRSEGGRSSRWGEWYERFTCSRTRRKKIALVGLTRKIVTAAVACLRNETVWDNSYVEAAG

SEQ ID NO: 330528 - protein, 339 aa, unidentified
MTELKLIAMDTSKHVFSLHGVNERGAVVLRRELRRQQLDAFFRKLPPTEIVLEACGSSHHWGRTLAALGHRVRLIAPQYVKPFVKRGKNDRIDAEAISEAALRPNMRFVPVKSAEVQAEAMILSVRELLVKQHTQLVNALRGHASEFGVIAAKGTGHVEGLLERIAADPAVPAPAQAMFVELGERIAELRTRLAELDARLARLHKANPLSQQLAAVPGIGPIGALTLALTVDASQFKSGRHFAAWLGLTPRQNSTGGKTRLGGISRQGNERLRQLLVLGATSVVRLTKPDYRHANAWLLALLQRRPRKLAAVALANKMARVVWAMMTSGEAYRPQPAAG

SEQ ID NO: 330529 - protein, 346 aa, unidentified
MMHVGLDLSRKRLDVQLLTEQGDRVQRLAAIPTADGLQDLVSQVAMYRQPVRAAIESMTGARFVHDQLELAGWDVAIADGVKVKGLAPLACKTDKIDAWVLAELSRRDLVPAIWLPDPGVRAERERARWRLHLVHHRTALKNRIHQTLITFGHPCPVSDLFSVGGRKLLAGFALPEPWLGSVTAALKLIDDLNRQIADRERELRELGADHPYIPLLRTVPGIGWVLSYTIAAEIGDIHRFPSATNLIGYTGLCPAVRQSGEHDHRGPLTKHGPRFLRWALIEAAQHAARTPAYRTRYQTMKRRLGRQRGAKVATVDVARRLTNAIWHMLIRNQPFAPGGAALALTA

SEQ ID NO: 330530 - protein, 344 aa, unidentified
MKHYAGLDVSVKETAICIVDESGRICRETKVVSHPEDLSKALTETGFRIERIGLEAGPLSQWLFEGMALAGLPVICVETRHTKAFLRAQINKSDRNDARGIAQMMRVNLYRSVHVKTLVSQKRRALLRARKLLQEKAIAIENDIRGLLRNFGLKVGIVGAAKFEERIRELTEDMPDLEEFIDVLLAARRKLRDSFSRLHGKVLELAGNDTACKRLMTIPGVGPVTALAFISTIDIPSRFRHSRSVGPALGLIPVLKQSGESERVGRVSLCGDGMMRGLLYEAAQSMLTRVKKWSWLKAWAMNVARRGGLKKAVVALARRIAVIMHRMWIDGSDFRWSRDGAAGT

SEQ ID NO: 330531 - protein, 421 aa, unidentified
MKQEAPEEFAAFIGLDWADSKHDVCLQAAGSAKREYFILTHTPEAIDAWVSTLRTRCNGHPIAVCLELNNGPIVSALRTYDFLVLFPINPLTLARYREALTPSRAKDDPTDAARQLALLLTQRDTLQPLKPQSPAMRALAPLVAHRRRVVNDRVRITNRLTSTLKNYFPHVLPWFQDKDTAVFCDFLSRWPTLKAAQLARRSTLETFFRDHHVRSADIIGKRLQAIKTATPLTSDAGVIAPHVLFVQALVSQLRVTLDALETFDHAIAQRAQSHPDFPLFQALPGAGPVFAPRLLVAFGEQRARYASAAELQQYAGIAPVTERSGKKSWVHWRLQCPQFVRQTFVEWAAESIRHSFWAQIYYQQQRDKGKAHQAAVRALAFKWIRILYRCWQERTPYDEATYLQALTRRGSSLLQNLAKVS

SEQ ID NO: 330532 - protein, 406 aa, unidentified
MELVPIFKRVIGLDVHQGQVTACAIIEEADGQVRIEQRQFGAFKKDRRALAQWCARLQPDEVVMESTGIYWKSPYTALEAAGIRAKVVNARHVKQVPGRKTDIGDAQWLAMLARAGLLRASFIPPAKLRELRLIARQRQKLVGQLASEKNRLHQVLTDGGIRLGVVVSDVHGQSARAMVKALIQGAAPHEVLPLASRRLKASREELFDALQGDLTDSHRFVLDELMRHIEAIEARIARFDARLLEGLKEERNSLLLLQTLPGVDLIGAAMLLVEIGADMSVFGHADRLASWVGICPGNDESAGKRKSGRTRKGNPYVRRLLCEFAHAASRTRCALQSKFQALVVRRGRKRAIIGLAHKMLRTIFFMLSRGQPYRDSAINYEALSVKRNAPRWIKALTRYGFLPALA

SEQ ID NO: 330533 - protein, 345 aa, unidentified
MPIVGGLDIHRKQLTFDYLDTETGEAGRGQVSPADRAHLRAWLARFAGRDDVAFALEGCTGWRYVAGELAAAGIAAHVAEPADTAFARGRKRHAKTDKTDSRHLRVLLEQGRLPECWIPPEQVLECRALLETYHDLRREHTAWVQRIHAVFFHQGAPALGEGALRTEAALAALRQAAAVHLSPAGQLQVATALDMLAATEARMDMLRLQLLHAARRLPAAAVLADRLYGVGPVCALALACWLGGAGRFSSSRKAVRFAGLDVTVYSSDGKRSPGHLSRQGPEILRWVLYEAGKTHARASAPGHAYYAAVKDRTGGKLAALSQARKIVRQACHILDELGDGALTAS

SEQ ID NO: 330534 - protein, 416 aa, unidentified
MTGSDRSFVGYAVDRKNQVAQSYIRREPIMKKTTLFVGLDVHAKTINVAVAESGRDGEVRSIGIIANTPDAIRKKMRRLGKGGKKLRVCYEAGPCGYVIYWQLTSMGIECEVIAPSLIPKKPGDRVKTDRRDALALARNHRSGDLTAVWVPDSAHEALRDLVRAREAIKKDLRSSRHRVSKLLLKQGVRNPSGAKNWTQKHMRWLKTLSFEEFSLDYVYQDYRAEVEYQSERLGQIEAAIDTAIEDSPDNIKEVVAGLQFLRGIAKITAVGLVAEIGQFSRFDKPSKLMAYVGSVPSEYSTGGPGKRKQGGITRMGNSHLRRLITESAWNYRFRPYVNDRMKKSHAQLKESLTPEVKQIAWKGQHRLCGRYRSLMNNGKSKQVTVTAVGRELLGFVWAVATYIESKQENTATEKAA

SEQ ID NO: 330535 - protein, 520 aa, unidentified
MAATRSRRRPSRPRIPTSVGKPRGVLHPRVQQVGPEHFGIVCFDCHKVSSKFLLADFYGRCLIPPTAVQHNRPDLDSTIAQIRLAFEQHQVRDGVVAIERTGRYHRVVQRAFAASGFETRILHPFVTKQYRQPVDPGNKTDDADLAAIHRATVTGCALLEATRDEAWTTLQLLIRHRRDLVRKGAALNCQIRDHLEAALPGYAACFDKLWESQIPWHLLRHYPTAEQLRTAGLTTLCHSLRQAGIRFQQRTIQTVVDWALQAAAGDIAAGQHLRIALALYDDRQRKTQEIQALERDIAARLVQTPYVLLLSFPGINVVSAADFAGEAGPIEHYLNAKSITGRAGLRPSRYQSNQVDLASGPLVRNCNHALRAAILGVADNLIVCNHHFQALATQWAAQGKDPRDTRIKVGMRFCRIAFQMVAGRQVFRHPCIQGRHYILDKLTAFHREHDTGMADVLRDLQAAIGQLPPPAYAAEAKPLAEELQRIQDGHRRGPQVLGDILPIVLARLGVGVIQSTESGE

SEQ ID NO: 330536 - protein, 344 aa, unidentified
MQIARIGLDLAKYVFEIHGVDAHGTTVLRKTLRRHAVSTFFANLPPCLVGMEASNGAHFWAKTLLDLGHDVRLISPQFVTPYVKSNKNDRNDAEAICEAVGRPNMRFVPVKSAEQLAVQAVHRIRTRLVADRVRLVNQVRGLLGEHGIVVAKDIGNLRRALAGLGGDNEDRALNPMVRALMGELREELTELDARIAGYDRMIRELYRNSEICQRLGKVEGIGPVTATALVAGDGDRSSLKNGRQFAAWLGLVPKQRSSGGRARLFGISKRGDRYLRTLLIHGARAALGRVRDKQDPRSLWLGRMRQRRHPNIVAVALANKNARIAWSLLTSDSVYDAGLSVRAA

SEQ ID NO: 330537 - protein, 372 aa, unidentified
MLHAGLDLSRNRLDVCLLSEHGELVEEFAVPSDHDGVRALARRVLDRGEPIRGVIESMTGARFVHDTLERYGWDVLIADAQKVKGLAPLACKTDKIDARVLAVLSERELVPAIWLPDPTVRSEREQARFRLHLVKHKSMLKHRIHSTLITFGHPCPVTDLFGVEGRELLDRLEIPDPWRQTVDASLDLLDYLERQIAEINRELRAGGADHPYVPLLLTVPGIGWVLAFTIASEIGDINRFPTAKKLCGYTGLCPRVNQSGETDRRGPLSKHGPKYLRWAMLETTMHALRHPPTTSATSATRNASVANAAPKSPRLTSPESSPRRSGTCSPAMSPSLLLREAPLFVWPPDGPQWNCAPEAGLQCRLVLPLRRR

SEQ ID NO: 330538 - protein, 354 aa, unidentified
MNSVKYLGLDVHLSTISAAVLDGQGKLVMESVLATHSAAILDFVHGLRGTLHLTFEEGTQSAWLYDLLVRQVNEVVVCNPRKNALLKAGNKSDAVDARRLAELLRAGLLSPVYHGETSTVTVKHMGRSYEALTEDSTRVMSRLKALYRGQAIPSAGKRPYGGQREEWLGKLGGAGLQGRAQRLYQQLDALQALRREARQELVRECRKHAAAQLLRSIPFLGPIRAALLIGRVQTPHRFRTKRQFWAYCGLALETRSSADYRFVNGQLERTRKPVWIRGLNLNHNHDLKNLFKSAATTASVRPGPFGTFYQGLLTKGMLPAMARLTLARKMAAITLSVWKKGERFDAEKLKPPAA

SEQ ID NO: 330539 - protein, 392 aa, unidentified
MIFVGIDVAKNKHDCFITNTDGEILFNSFTITNNLDGFNDLYQKITSTMENITKVKVGLEATGHYSYNLLGYLLDKGFPTYVINPLHTNLYRKSLSLRQTKTDKVDARTIASMLMSDVNLKSYSDTSYHNEELKSPTRYRFDKVKEHSALKVSISRLVCILFPELEKLVPTLHMTSVYTLLYEFPGASYVASAHLTRLTNLLSKASKGHYNKDTAVLFRLTARDSIGSVMPAKSLELKHTIKLIQELTSEIDKIEAAIKQIMDEEIKSPILTIPGISYRMGAIIIAEIGDFNRLDSADQILAYAGMSPSIYQSGQLDNYHFRMEKRGSRYLRYALDNATKYVCHWDKSFGAYLEKKRSEGKHYNVALSHAAKKLVRTIFAMERSGHPYIASV

SEQ ID NO: 330540 - protein, 316 aa, unidentified
MYLGIDVSKLTIDCCLISDGRNHEKRFSNNPKGFQLLTDWLKFHKMTSELHCCCEATGTYYEPLANYLHQHYTVTVENPRRIKGYAIAELQRSKTDKQDARLIAQYCQDRKHKLKAWIPPSQEQKQLQELARYLDHLKQQRATETTKLHEAPDYIAPHIKTTIENLSGQIRAIKKQLLQFYKSHTDYNTQRKRLKTITGIGEQSAAVLLSAYKRHPFSNQKQFTAYLGLDPRKNQSGSSVNGKSRISKIGNADIRKSLYMPAVVAYRCNVFSSFVNRLKSKGKPIKLILIAIMRKLAVIAFNLLKNGQDFEPQRYK

SEQ ID NO: 330541 - protein, 343 aa, unidentified
MAIVGGLDIHRRQITYDYLDTDSGETRRGQLSPATRLELRAWLARFTGQQADFALEATTGWRFVAEELERAGIAAHLAEPADTRALRGPKRRAKTDRTDAHHLRELLRAGTLPESWMPPAHRRRAHPVRLRRGLVGERTGRYQRIHAILFHHGLPERSQLLTADGRAWLASIHLPVVARQAVELALRMIDHLEVELDTLDAQLAGIARAQPGCQALQRRYGVGWLTAVAIWAEFGDVRRFANSRQAVRFCGLDITIAESDGKRARGHLARQGSPVLRWALHEAAMCAARPSSPDHASYLQVKQRLGGKRAALSVAHKLAREAYHTLGELGDQALIPADLPTAA

SEQ ID NO: 330542 - protein, 343 aa, unidentified
MDHFGGLDVSVKQTSICIVDDTGRIVKEVKVASEPEALLKVLGKPAYRFKRIGLEAGPLSQWLFSALAEAELPVVCVETRHMQAMLKAQINKTDRNDARGIAQMVRAGLYRPVHVKTLRSQKLRMLLTHRKLLQSKAIAIENDLRGTLRNFGLKVGMVGKVKFESRIKELVDNLPDLALLVEPLLIVRRALREQIIILHRRLLAIVRSDEVCRRLMTTPGVGPVVALTYRATVDVPARFRKSKSVGAVFGLTCSRYQSGEIDWSGRISRCGDEMMRVMLYEAAQSMLRSKKWSWLKAWAMQIARRRGMKKAIVALARRLAVILHRIWVDGTEFRWTREVVPAA

SEQ ID NO: 330543 - protein, 315 aa, unidentified
MTTSITRTAGVDVSKDHLDVHFHPENLKRRFPNDDRGHQALIDWLAPMTPERVVYEATGAYHRAFERALGHAGLPLAKINPRQARRFAEAAGRLAKTDRIDAKMLARFGLLLQPAVQQLKSQALDQLNELVVARRGLLKDRTAIGNRQRNLTLPLLKHQAVARLKQIDRQVEAIDKACHQLVSAEPELARKFDLLISIPGIGEVTAIALLVDMPELGRLEARQAASLAGVAPVTRESGKWQGRSFIRGGRAVLRQALYMPALVVIRHNPPLKRKYEALREAGKPAKVAITAIMRKLIILANALVRDDREWTPITP

SEQ ID NO: 330544 - protein, 348 aa, unidentified
MVADELDYVVAVDTHRDEHVLAVVVAPVGVVVARLAVAANVRCYAQALRFADSYASGKRVWAVEGAGHYGAALARFLSGRSETVLEAGRSPRGERRLQGKDDGLDAVRAARAALGHELASPRAGQRREALRLLLVARRSAVDVRRETLVQLRSVIVTAPDRLREELRKLPVQRLLDRCSRLRRSKTATPDELALRLVLRTLARRIEAATVEASELEREILTHVRALAPQLLDEPGVGPIVAAQLLVAWSHRGRVRSEAAFARLAGVAPVPASSGQTTRHRLSRGGDRQLNRALHTVILHRRQHDPATKQYIARRVAEGKSRRDATRMLKRYLARHLYRLLQNQEPLLA

SEQ ID NO: 330545 - protein, 416 aa, unidentified
MSVALPQALFFTGIDWASAEHAVCVLDAAGKITARFTIKHSAEGIASLVRRLARYGDPAGLPVAIERPSGRLVDLLLEAGHPVVPVSPNAIKTWREGEVLSGAKSDAGDAAVIAGYLRLRYHRLAPAAPYCDQTRALRAAVRTREDLVQMRVAATNQLSALLDAHWPGARAVFADIESPISLEFLTRYPTPAAARRLGHKRMAAFLARHGYSGRRPAAQLLARLHGAPAGTAGRALTEALQDAVLAVVAVLRALNGAVKDLDRSVAAHLGEHPDGPVFTSLPRSGQINAAQMLAEWGDCRPAYDGPDSVAALAGVTPVTKQSGKYRGVEFRWACNKRFRRAVTTFAGNSRHASPWAAQIYAEARAAGKDHPHATRILARAWIRVIWPCWVNGVPYDPARHRAAAALAGQTPSQPAA

SEQ ID NO: 330546 - protein, 346 aa, unidentified
MSYSTTVGVDLAKNVIQISVVSGRGKELSNRSLTRAKFAEFLGKQKPSLVAFESCATSHYWARAAKRHGHEARIIPAKAVAPFRQGHKTDSNDALAVAEAARRPKIKEAPMKTIEQQGLQAIQRSRELLIQESTALSNHVRSLLMEFGIVIKRGFASLLRAVPEILEDGDNELPDLYRPTLHRMYTRLLELREDIEAMTGEVERLAKAHPICSKLMALEGIGPIGALLLYATMGSGAAFSSGREFAAYLGLAPKQYSSGGKTNIVGLSKKIGNSRLRSVLILGARAYVYKLKEPKSSKDKWLKAIIERNGESRAAIALANKNVRTAWAMVTQGTDYQRRTQLEMAA

SEQ ID NO: 330547 - protein, 405 aa, unidentified
MNAVGIDASKGKSMVTILRPFGEIVSSPHEVKHTSDQIDNLIREIRSLEGESRIVMEYTGRYHEPMARWLSDAGLFVSLVNPKLIKDFDNDSLRKVKTDKADSVKIARYTLDKWHKLNQYGAMDELRNQLKTMNRQFGYCTKLKTAMKNNLISLLDQTFPGANIFFDSPARSDGSQKWVDFVDTYWHVDRIRSMSLVAFTEHYQKWCKRKGYNFQPDKPAEIYESVRNIIPVLPKDEVTKFIVRQAVNQVNTTSAAVEELRTRMNDIASQLPEYPVVLTMKGVGTSLGPQLMAEIGDVTRFTHKGALTAFAGVDPGKNDSGSYSQKSVRTSKRGSAPLRKTLFQVMDSLIKAMPQDDPVYEFMNKKRSQGKPYYVYMTAGANKFLRVYYGRVKEYLSEHTETAVK

SEQ ID NO: 330548 - protein, 411 aa, unidentified
MESIVRCCAGLDVHKDSVEACVRCLNKETGKLEQETRHFFTMTQDLMEMARWFESREVTQVAMESTGVYWKPIFNIVESRFQVLLVNAKDIKHVPGRKTDVKDCQWIAQLLQHGLLRASFIPPRQQRELRDLTRHRAQVLGEHSRTINRIQKIFEDANLKLGSVASDVVGVSGRLILKAIIGGESNPEVLANLAQRRLREKIPELKKALLGNITEHHRWLLGLLYEQLTTTEAFLSKLDEKIEQLTRPQSPVLEKLDRIPGINRRVAEVVLAEIGPDMSPFPTDAHLASWAGMCPGSNESAGKKKSGKTTKGSRWLRQALVQAAWAASHKKDSYFQAHAQNVMRRRGRKRGLVAVGHSILIVIYHLLKEETEYQDLGANFLEQIRSEHLVRFHVKRLEQLGFKVEVQAMAA

SEQ ID NO: 330549 - protein, 343 aa, unidentified
MNATMIGLDLAKSVFQVHGEDAEGNVVFQRKLGRGQVEAFFRKHPPCVVGMEACGSSHYWGRVLRAMGHEVRLIPAGYVKPFVRRNKNDARDAAAICPAMGRPDIRAVPIKSADQQAVRAVERGRELLIKQRTQLSNCFRSMLSEMGIIAAKGHEGFAELRERVRAGDERVPEPLKAALDELGRQIDHLTPSIDGLEKRIVAAAKANPDMRRLCAIPGIGPIIAHAIVAAIGDGRRFRSGRDFAAWAGLTPRESSSGGKTTKLGVSRQGERRLRALLALGASALMRRARSPAGRATEWQRGILARRPVKVAVLAQAAKNARVAWAVLTSGKAYRRPEPQAAAA

SEQ ID NO: 330550 - protein, 339 aa, unidentified
MNRIVVGVDIAKRVFQLYWVEPETGEIVALQLKREKFLEHFVNRSTCLIGMEACGGSQHWARSLQELGHEVKLMSGRMVKPFVVGNKNDVADARGIWMAVQQPGIKAVAVKSEEQQAVLALHRMREQLVKFRTAQINGLRGLLTEYGEVMPQGRAGIKRDIAGALGRLSDRLPAIVIETLREQYARLSELDEQISQIERRLRQWQREDSATQRIAAIPGVGLLSATAAVATMGDAKAFRSGREFAAWLGLVPRQTGTGGRVRLLGISKRGDKYLRTLLIHGARSVLTHSKSPPEWLSELVKRRPKNVAVVAMANKMARTIWALTAHERAYQSGYVSRPA

SEQ ID NO: 330551 - protein, 341 aa, unidentified
MKIIRVGVDLAKNVFQLHGVDRSEKTVWRRKLVRADWIKALLDRIEPGCEIGMEACSGAHHWARLLQAKGFTVKLIAPQFVKPYVKSNKNDANDAEAICEAMSRPNMRFVAIKTVEQQDIQAVHRVRSGLMDQRKGKSNQLRGLASEYGLVAPKELLHLRSAIPLWLEDQENGLSERFRRLLRGLWRDLQTLDERIEELDREIEQIARRDPVAIRLQQVRGIGPLTATALLATVGDASQFSNGREMAASFGLTPKQNSSGGKERLLGISKRGDAYLRSLLVHGARAVIRTAQAKTDRLSTWAMRIATTRHPNIAAVALANKTARIAWAMLTKGTDYRPQTT

SEQ ID NO: 330552 - protein, 483 aa, unidentified
MKNQPPQSSKKGSRQRTSQKPWSEMNREQRREMQRKIQSQDLNLEVMHPDAAGIDIGKEVHYVAVPPNRSSEAVRRFGCTTAELRAMADWLKQCGIQTVAMQSTGVYWIAVFDILEEAGLEVYLVNARETKNLPGRKSDVQESQWLMKLHTYGLLRNSFRPPQEIRTLRTYWRQRGDLVRAAGRHIQRMQKALTQMNIQLANVLSDISGKSGQAIITAILQGERDGGELAALCDGRVQASQEEVAGSLEGNWQDDLLFVLQQEQDGYEFCQKQMAECDRHLEQCLQQRADRSQGASLPVEKRKERRKKKKGNHPQFDLRASLFRMAGTDLTLMDSVDVMTAMTILSEVGWDMSKWKTEDHFVSWLRLCPDNRISGDKIIGKGRLPTNNRVTIALKMAASTLRTSQTYLGAQFRRLRTKLGPPVAIKAMAAKLARLVYRMLRFGMQYVDQGAEFYEAQHRKLQISHLKRKASQLGFQIIEASAA

SEQ ID NO: 330553 - protein, 347 aa, unidentified
MRFYTTQHPFYCGIDLHARTMYVCILDQNSEVLVHRNMKTRPETFLNVIAPYRPGIVVAVECMFTWYWLADLCADEGIPFVLGHALYMKAIHGGKAKNDKIDSQKIAALLRGGMLPQAYVYPAAMRATRDLLRRRMHLAHKRAELLAHVQNTNSQYNLPAIGKKIAYKANRDGVAERFADPAVQKSIEVDLALITYYDELLGDVERTIVNTAKHHDANTLYLLQTVPGIGKILSLVLLYEIHDINRFPRVQDFVSYCRLVKCAKESAGKRLGTSGTKIGNAHLKWAFSEAAVLFLRDHPAAQKYLARLEKKHDKGKALTVLAHKLARAVYHMLQRQVAFDREKFFQR

SEQ ID NO: 330554 - protein, 342 aa, unidentified
MDDIKRIGMDTSKHVFQLHGVNSAEQPVLRKRLTRRAMEEFFAKLSPSVIAIEACGASHHWARKLGSLGHEVKLIAPQHVKPYVKRGKNDAADAAALCEAMSRPTMRYVPVKSPEQQAALMLITVRDRLIRTRTQLGNAIRGHASEFGVTAAKGVAHVGSLLERISKDMALPDLARRMFAVLGVEFTENETRLDDIETELSALHKADERSQRLRKIPGVGPIGAVLLSVKAPAPEQFRSGRDFAAWLGLTPKDHSTGGKVRLGSITRAGDEILRSTLVLGATSLLQQVRKKRGKGVSPWLIELLKRKPPKLVAVALANKIARIAWKLMISGENYATREVQSI

SEQ ID NO: 330555 - protein, 449 aa, unidentified
MSHSTNMSPTNEVGKPLNNHGPVRCLYNSAIGVDVHAQLLVCCFQKHLPETNQLLSEQAQFGTSNSQIKQFVDWVSSHKPEIILMESTGVYWMSPYEALESAGFTSQQLAVVNARDIKAAYGRKSDKADARRLTEFARMNSFKRSFVPSRDIRTARLIARRLHHATQDCTREANRMQKLLSCSGTRVSSVFSSFKGKAAQKIINSFLDDAYPEFIACVRSNCSRLRATFTDIVDAFRQFDTPTFKELLLEQRKSWRQAMERRDRLEALLRIQMKPYKKTVDQLCLIPGVKELAALKILSEIGTDLSSFRSSEAFCSWIGICCGNNESAGKAKKSGTPKGNNYLRAYLTEVGQAIALVKTYTTVLRKVFQAFKERRGHNRAVVAVAHKIARIIYTMIKNSIAYVEISSPTLEKVRLKRLRASISNAKEVGISLQKLSVVKDSTGEILTDT

SEQ ID NO: 330556 - protein, 352 aa, unidentified
MATEYFIAMDTHCHSTDICVKTRANGPGRRWKVPTTIPAIREVLEQVKHPRKLTLEEGPLAGWLLRNLKGDVDEAWACDPRRNALIAKDGDKDDPIDAAKLADLFIGGFLRKVHHPESLAREVAKQTAGLYHERVEQRVRCVNKVLGHLRGWGVVVREKDLAEGPPRQAVLAALGSGPEAAVVRGHVDLLLGSYDEACRQEEVLRREVRKLAKAEEQVGRWQALPGIGPIRGLTLLVYLDTPWRFKSKAALWKYLGIGLVRSHSGEGQEYLHVEHHVHRVLKGTILGAAESAILQGDNVFAQQHRAWVAAGLSPRNARRNVARSQAAVLWGMWKSGGEFDPTLVGLAQAQGT

SEQ ID NO: 330557 - protein, 439 aa, unidentified
MKAILERCAGLDVHKRVIWACVLLLGKDGTVKKFIRSFGAMTRDLLALSDFLAEHGVTDVAMESTGVYWKPVYNILEGSFRVLLCNAQHLKRVPGRKTDVKDSEWLAELVMCGLLKGSFVPPRPLREMRDLTRHRAQLTAERAREVQRIEKIFEDANIKLGAVATDILGESGRDMLNALIAGEEDAKKMAELARGRLRSKIPQLQEALHGHVTEHHRFMLKLHYEHVLYVEGLLKQVTDQIGRLIDTGNLDPTAPKPDVPESEAPAAPEDSPLPFEEAANLADEIPGINRHAAEDILAETGTDMRQFPSERHLASWTKMCPGNDESAGKRKNARTGKGNRWLKRVMTQVGWAAARTKDTYFHAQFCRIAKRRGKKRAVLAVAHTILGVLYHMLKYHRHYQELGADFFDQLDPERVTRYHVGRLEDLGYNVTLTKAPVAA

SEQ ID NO: 330558 - protein, 408 aa, unidentified
MNPLFVGIDVSSKNNVAYLMKPDGSKHSSFSVQNNLGGAKLLSERIVSALGSMQLERVVIGLEATSIYGDSLVYALREDGRLGRFQRKIHVLNPKQVRKFKEAYSDLPKNDWVDAFVIADHLRFGRINREVYMDDYRYKALQTLTRARFDVIQNLTREKQRFANYLFLKCSGMAQDKDIQNTSATTIALMEHFETVDDLANADLEELTAFITETGRGKFADPDATAKAVRAAAKGSYRLPKTVNDTVNQAMAVSIASMRALKGQVKVLDKAIEQQFEIIPNTLTSIPGIGKVYSAGIIAEIGDIHRFDSQASVAKYAGLVWNRSQSGDFEAEHSRMIKSGNRYLRYYLLEAANSVRRCDSEFRRYYNLKLKEVNKYQHKRALALTARKLVRLVFRLLKDNRLYIPPEG

SEQ ID NO: 330559 - protein, 412 aa, unidentified
METVVERPSALDVHKEQVTACVRVPGEGRSREEHVAEFPTTVAGLLTLRDWLVAFGVEQVVMEATGVFWKPVWAILEDEFDCLLVNARHVKQVPGRKTDVKDAEWLCQLAEAGLLRRSFVPPKPIRALRNLTRYRKTQIQERAREANRLHKALEDTGIKLDCVATNILGKSGRDMLDALVSGTTNPEILAELARGKLRKKIPALKEALEGRFDHLHAVWIGAILAHLDFLDEQIANLTEAIGEQIAPFEKAVELLCTIPGIQRRNAECIIAEIGVDMAIFPTAKQLASWAGMCPGNDQSAGKRRSGKSRKGSKWLDWALEETAIAAIRTKDSYLAAQYARLRPRRGHKKALGAVKHSILCIIWHMLTTGELYTDLGGDYFRKRDPERLTKRLIAQLESLGHHVILEELPQAA

SEQ ID NO: 330560 - protein, 372 aa, unidentified
MDYSTVYVGMDVHKDSFTLCAYTIEAEKGSYSRKTPSDYKEVLKYLEFLRTIYGDDARFICGYEAGCLGYTLYHQLTDRNVNCVIMAPSTMLERRGRKRVKTDKRDAELIGRCLAQHNYSSVYVPTDADEQIKEFLRMRDDHKLALKKIKQQILAFCLRHNYRYDGNSHWTASHLQWLRSLTPEALYKEILDEYLLTYDTLVAKLERLDSRIEELASRDGYSESVRKLCCFIGIKTHTALSVIVEVGDFKRFASAEKFASYIGLVPGEDSSGDDQTRLGITKAGNSHLRMLLTEAAQCYSKGQIGYKSKALKARQAGNAPQVIAYADKANERLRRRYYKMVLSKCKKHNVAKTAVARELACFIWGMMTDNIA

SEQ ID NO: 330561 - protein, 345 aa, unidentified
MQPMYYIGLDVHKQKISYCVKDSSGRIYAEGWIPATRFDLDRWMKTLPQPWSAALEATMFSGWIYDHLKPHAAALKVAHPLMLRAIAAAKKKNDRIDANKICDCLRCDFLPECYMAPTAIRERRRTLRYRNLLVRQMVQMKIKISTLLMEAGVSYNKQKLHKAGYFRELLASNPDINESLRSLLRQCREMVVRLGKMESALIHSLQQDRLLVERVERLMSIPGIGPITALTWALEIGEVQRISSIKKAISYCGLCGDEQRSANTAQRTPLSKQRNKHLQTMLIEAAKMAPRYSPTLALLYDREKQKGNANRATLAVARKLVAYLMAVDRGQCHFLVIDQDTCTAA

SEQ ID NO: 330562 - protein, 359 aa, unidentified
METKVNKKLFEGQSIYVGIDCHKKNWTVSIFGEEYEHKTMSQNPDATLLSAYLKRNFPGAEYQAVYEAGFNGFELCRKLKEEGIRCSVIHAADVPTSHKEKIQKVDPVDSRKLARALRSKEFKPIHIPDRWIEADRALIRQRFRMMKDLTRTKNRIKSILFQFGIQIPERFTASQTRSWSRNYMKWLEELSVDHESLRQTITNYLRIGQAQRQELLVVNRQTRAMSQTERYKHNFNLLISIPGVGLNTAMMFLVQIGDIRRFKSLDDLCNYIGLVPSMHGSGDKITTGKMIHRGRKELKILLIEAAWEAVRLDPVMMATFNRLKSRMNKYKAIIRIARKMISRIRFILLTQTPYQLGIN

SEQ ID NO: 330563 - protein, 484 aa, unidentified
MKKQPTAPDRTAPRSSRSRKPKPPSWKIVHPHAAGIDVGATAHYVAVPPDRVPAGQPAVRRFGEFTTDLDALVEWLRSCLVETVAMESTGVYWIPLFQKLEAAGLTVVLVNARAAKHVPGRKTDVQDCQWLQQLHSYGLLAASFRPNDAICRLRTLVRHRANLVAHAAEQVMHMQAALTQMNLHLHHAVSHLTGETGLRILRAMLAGERDPEKLIQLRDAHITKSTPEQMKAALTGDWRPEQLFVLQQALRAWEFTHEQMDACDRQIEHQLKSLPTVSAPTPPPKPRAPDPLAAENPRPKGQQSRKRNDPLMDLTPELARVCGIDLTRAGGLRELSALVIVSEIGVDMSPWRSAKAFASWLGLCPNNKVSGERVLSTRTRPVINRVATALRMAATGVAESNTWLGSFHRRMRGRLGPAAAITATAHKIANVIYHLLKNKEPYVERDLVKYEQKVYRNKLNRLRKQAATMGYELVPTAEEKALAS

SEQ ID NO: 330564 - protein, 424 aa, unidentified
MNDTLNKKIEQVTDKTLIVGVDIGSEIHYARAILVRGYEVSKRPYRFENTDDGFSGFITWAYNLAIENKLTKIMIAVEPTGHYWFNFAEYLKKYDVQLVLVAPQHVKHSKEMDDNTQEKNDRKDPLVIAKLVPEGRYLIPYIPEGIYADLRTAFNRRCELVDAQVRNSNRMNRWFDVYFPEYKTVYDRTDAISGLAVLKRAPLPADILTLKEDGIYQIWREEHIRSVGINRARKIIAAAENSVGVKGGAAARWEFWQLMEEHDLIVRQLHDIMLLIEEYLRQIPGADRLLKVPGAGIVTVAGFLAEVGDIKRFTDPKQIQKLAGLAVVENSSGKRKGMPGISRRGRGRLRWILFQLARTMVKFNKEMRTYHLYYTTRKENPLKKMQSIMAIAARIARIFFGILKNGTEYDPAIVMKDFNKAVAA

SEQ ID NO: 330565 - protein, 342 aa, unidentified
MKEATHILGIDIAKNKFDVNLRARLHPDARHSATFHNNAKGFAALQRWLVQHGAAVPVDLHACLESTSRYGDALANWLYTHAYQVSLVNPRRTRHYANSRLARTLNDQIDAALIADFCAEQRDQLALWEPLPAEHRQLQDLTRARQALVEHREGFANLLETATGPARKSFQRQMAHLDKEIQRLEAAIQAFLKEEAPGLQSQIALADSVPGVGLITAATVVAELPPIAKLARASQAIALFGLDPKNKTSGTSVKTPARLSKMGSKRGRRALYMPALVALRHNPVVQALGQRLKQRGRSGKYVVVAAMRKLLRLIFGVIKSGKPFDPLWAASSPAQPQTLTPA

SEQ ID NO: 330566 - protein, 449 aa, unidentified
MSRPQVIDDQEHERVHDRVAAIDVAKDTGMVCTRTPHPSRPGARRAAVWTVKARMNAIGALGRQLHKDGIEIVTLESTSDYWRIWFFVLEACGLAVQLVHAAQAKNLPGRPKTDKLDAQWLARLTEMGLLRASFVPPKAIRDLRDYTRARARLVQERTRCFQRLEKLLEGALVKVSSVASKLTTVSAQDMIKAMIAGQRDPHELAALARGRMKAKHDDLVEALTGMFDDHHGELAALLLDQIAFLDTRIAQLTARAAELTAAMPGAWGVNADGTTGPDAGTGPDDPVLPAVARLAQIPGISLDLARAIIAETGLDMSRFPTAGHLVSWAGLCPAARQSGSRTRAGKKGQGDTWLRGSLGQAAIGAARTATFLGERYGRIARRRGKAKAQVAVARSILVIIWHLLSNPEARYTDLGPGYYQARTDVDRKIRNHIRQIQALGFAVTLTRAA

SEQ ID NO: 330567 - protein, 408 aa, unidentified
MLLVGDDWAEDHHDVEVQDETGRRLGRARLPQGIAGITQLHGLIGRFLPEDAAPEQVVVGIETDRGGWVAALVAAGYQVFAVNPLQVARYRQRHVTSGPKSDSGDAHTLADMVRTDRHQLRPIAADSALAEAVKVLARAHQTLIWDRSRQVLRLRAALLEFFPAALQAFDDLAAPDALELLAAAPDPTSAAGLQPSKIMAALKGAGRHRVADKAAELQARLGADHLALPSVVVDAYAATVQATVAVIGTLNAQIETLEAQVGAYFGQHPNAEIYRSQPGLGAVLAARVLGEFGDATDRYTTVRSRKNYAATSPITRQSGKRKLVLARYARNNRLADALHQQAFSALRASAGARADYDGLRARGVGHHAALRQLANRLVGILHGCLKTHTCYDEATAWPQHAQAETAAA

SEQ ID NO: 330568 - protein, 389 aa, unidentified
MAISFRGSRASGKTDWVGCGGGFEPPTFDFIKSSASSDLSTLGSANDQGLGRKEAEHVDYRLRLSPEQTGECGERRLTHRGGEAEQFYRELKKKGISVRVGMEATGHSRWFERLLAELNDELWVGDPAQIRAKRVRKQKNDRRDAEHLLKLMLENNFPRIWVPTPENRDVRQLVLHRHRLVGMRTRVLNQLQAIAMNEGVRRKRGLWTEKGRAQLESLPLPPWTTRRRQELLELLDRFDPSIDQLSQAIVQEAARVPEVQRLQTHPGVGPITALAFVLVLGTPCRFGCGKQVASYLGLIPCEGSSADNWRLGHISKQGNALLRFLLGQAAQSVARSEEQWRHQYVHLALRRNHAIAKVAMARKLAVRLFWMWRRGWDYQQLKKFGSHVG

SEQ ID NO: 330569 - protein, 451 aa, unidentified
MEEAISMEVIHPQAAGVDIGSRSHWVAVGQSEQDVREFGVFNQDLFALADWLMEKKIKTVAMESTGTYWQNLFAVLSARGFHVILCNGKFTKNIKGKKSDVMDCQWIQKLHTLGLLASSFLPEEKTEQLRTYCRHRSNLIHATASTSKKMQKYLRLLNFRLDVVVKDICGLTGLLIIRAICEGETNPEKLASYRHGNCRKSEAEIASALQSNERKDYLFALGQELETYGHLQLKIGQCDKEIAKMLEEIIGSDDHKRQHHIDPKPHKRINKNTPKDIDPNLRSYQMFEGTDLLAIEGMSYSTVLALMSEVGIEGIRKFPTAKHFASWLRLAPNNEVSGGKVLSSRVPKGSNRLKIALRNAANAIGNLKESTPLRDFFQRVNFRKGRVSAISATARKLAVIIWNMVVKGVPYVNPEGYLFLDQKRKLGLVKRIKKQIDKFGLTNEDIGFVSS

SEQ ID NO: 330570 - protein, 427 aa, unidentified
MRNRNYKLEAITPSTLVVGVDIAKEIQWVRFVNYRGLEIGKAIKFYNNKSGFDSILASIKSICKEKGFDNVIVGMEPTGHYWKPLANYLLIDEKEVVMVNPSHTKRAKELDDNSPTKNDKKDALTIAKLVQDGRYYEVYMPHDIFAELRVLTNTRNSVMRRRNAVKNTMTAVIDEYFPELVTVFKEPLNGKTSIQILKSCPFPALILELGVEGVLIEIRKAVKKSVGIKKATQLVETAKTSIGVNYGITSAKLRLELLIEELELLNRQLTKIEEAMDLALDVTGFKKVILSVPGIGVVTAASFLGEVGDPMRFESPRQISKMAGYNLIEDSSGKNKSGTVISKRGRKNLRNILYQMALSMVSVNPEIRVLYNYLKTRPNNPLKKKQALVVVAKKAITIIYNLIKKQSEYKAELVLGEFRKNQIKQAA

SEQ ID NO: 330571 - protein, 332 aa, unidentified
MLFCGIDLHSNNCLVVVSDDNDKVVYSKRLPNDLAVICDALSPYQRELFGVVVESTYNWYWLVDGLAAAGYSLHLANTTAIKQYDGLKYRGDESDARHLAHILRLGLLPEGHIMPKADRTVRDLARRRMQLVGQRTTQIVSIQTSMAQHIGAAMSGNGIKLLSALDIDAMPIGTTDALGMKANLAILQALQVQINGLEAALHQHCRRDKNYRLLRSVAGIGPVLATVILLETGDIGRFADVGNYASYCRCVGSAHISNGKKKGEGNTKNGNRFLAWAYIEAANFAIRYCEPARKFYQRKKAKRNGIVAIKAVAHKLARAGSVALANRRWPIR

SEQ ID NO: 330572 - protein, 336 aa, unidentified
MMLYAQVESVDMLINVGIDVGKESLDLCILLDKTTGKMKSKKFKNKKEGFDSAFEWITKTTCNAPGKTLITMEATGVYHEGAAYYLYSQGFQIFLSNPGKAEKFAQSFCLVHKTDKSDAAMLAKYGSIQLDNIAFWIPEDDDVRVIKTLIRRLNALEKDKLRESNRLEASTISDAAERVIQSTVYLISVLDGEITEIQHEIDRLISSNPEMNKNRELLLSVIGIGKVMARELVYLFSAKKFTSAKQVAAYVGLIPRLNESGAFKGRSSLSKSGPFRIRSKIFLAAVCAGTHNPDIKAQKIRLTHAGKTKMQALGAAMRKLIQICYGVIKNQTETVN

SEQ ID NO: 330573 - protein, 407 aa, unidentified
MQEATQHDAVDVFVGVDVDVGVDVGKGQHHAVALDRNGKRLYNKALPNDEVKLRALIAELKTHRRLLFVVDQPSTIGALPVAVARAEGVLVAYLPGLAMRRIADLHAGEAKTDARDAAIIAEAARSMPHTLRSLRLADEQLAELTMLRGFDDDLAAQVTQTSNRIRGLLTQIHPALERVLGPRLDHPAVLDLLERYPSPSALAAANEKTLANRLTKLAPRLGKNWAAEIVQVLNEQAVIVPGTQAAAIVMPRLAQQLAALRKQRDEIAAEVERLVLAHPLWPVLTSMPGVGVRTAARLLTEAAPKAFATAAHLAAYAGLAPVTRRSGSSIRGEHPSRRGNKVLKRALFLSAFAALRNPVSRAYYSCKIQQGKRHNQALIALARRRCDVLFAMLRDGTIYPPKSAPNA

SEQ ID NO: 330574 - protein, 389 aa, unidentified
MSQPFEASRSLTALEQHNTIIAVIEMSQSKWLVAAVVPGIKRQPLKMLDADQESLLKLLHRWRKEAEQAGHPIKRVVAAHEAGRDGFWLARWLRTRGVEAYVIHPNSIAVSREHRRAKTDRLDTELLLRALLGWLRGEKRHCSMVAIPTIEEEDAKRPNRERDSLVTEQTRIGNQIKAILTRFGIRRFRLKLRKAEQQLKELRTAEGSPLPENSRAELFRHLARLHVVREQIRAIEKARLQKLEADRDRKKSPHAMVRLIARVVGIGVETADMLVNEVFSRQFRDRKAVARYAGLTGSPDESGKRRREKGLARAGSARVRTGMIRLAWRFLRFQEGNALAQWFQTRTADGRGSTRKTMIVALARKLLIALWRLVTTGEMLDGIVLRPAS

SEQ ID NO: 330575 - protein, 346 aa, unidentified
MEHYAGIDVSLELSSVCVVDGRGKIVKEAKVASEPEALVYFLKELGFAVDRVGFEAGPLSQWLHAGLTQAGFETVLLETRHVKAALSAMTVKTDRKDACGLAQLLRMGWFHQVHAKSIGSQEIRALLVARKQLLGRLLDVELSIRGILRGFGLKVGQVTRKTFEARIRELVTGHTTLERIAEAMLPARATLKAQYEKLHKAVLAIVREDVVCRRLMTVPGVGPLVAVTFKSAVDDPSRIAKSKAVGALFGLTPRKYQSGEKDVTGGITRTGDEMVRTALYEAANVLLSRITRFSKLKRWGMDVAKRRGSKRAKVALARKIGVILHRMWIDGTTYRWAEAKPIAAQG

SEQ ID NO: 330576 - protein, 331 aa, unidentified
MDQRNYVGIDVSARSLEVALVGAERRSATATFANTSTGHRQLIKWATKRGRLAQVCLEATGVYGLAVALALHHHPKTEVMVVNPKAIKNYAGATMQRAKTDAVDAQLILDYGRRMPFARWQPPSDEVLQLQAITRRISQLKVELNREANRLDAEDYKVATTDLIERDIQVNLRHLNRRMVRLEKEAVALVLSVPHLSMLFQRLLSIPGIGETSALRLLAELAVLPEGMKPPQWVAHAGLDPRPHESGQSVHRPRAITKAGNKYLRAALYMPALVAMRHQPNVKAFYDQLIAAGKKPLQAITAVMRKLLHAIWGVWKHDQDFEGQKFYKIAT

SEQ ID NO: 330577 - protein, 338 aa, unidentified
MSIVMGLDQHRGQITGEWIDTDTGEVQRTRVTPADRAHVRKWLTRFRGSELEVALEATTGWRFVVEELRRVGATVHLAEPAETAGLKGPKKRAKNDRADARHLRELLMVKRLPESWIPPDHILDLRARVRLRHTLSEQRGEWQQRIQATLYHHGCPQRRQLMTGDGREWLAAQPLPAAAREAVAVALAMIDSLDRQLAPLDEELRAYARRQAGCKALLGHYGIGPLVAVTILAELGDCTRFSSSRLAVRYAGMDITVYQSDQHRAPGHLSRQGPPALRWALFEAAQSACRRGSPDLEYYRQAAARVGHNRACLSVARKLLKRSYHTLRELGEEALQPA

SEQ ID NO: 330578 - protein, 355 aa, unidentified
MKQTTKYVALDVHQATSVASVREESGRVIARTILPTESTALVEFFGGMRGAIHVAFEEGTQAQWLHDLLVPVVDRVVVCDRRGTPKQGNKGDQADADQLSELLRRGGLRAVYHDSPHREVLKELARTYLNLVQDSTRVMLRLKALFRARGIRTPGKRVYHPEGRAAWLAQLPGRGVQFRAETLYAELDVLHALRPKAKAMLLTEAARDPAWAVLRTIPFLGPVRVALLLATMQTPWRFRTKRNLWAYAGLAVVTRSSADHTLVDGRPVRRARAPMTRGLNRNHNRVLKDVLKGAATAATARPGALQDFYHGMLARGMREELARVTLTRKLAALTLRLWKHGGRYDPAQLTTDARS

SEQ ID NO: 330579 - protein, 344 aa, unidentified
MDYYAGIDVSLKDSSVCVVDATGRILREAKVASEPEALVAWFRGLGLEVTRIGLEAGPLSQWLHAGLSEAGLEAVLLETRHVKAALSAMVVKTDRKDARGIAQLLRMGWFRPVHRKTVDAQEVRALLVGRKLLQSKLRDVELSIRGILRGFGLKVGEVSKAKFAARVRELAAGQTMLETVTEAMLTAREGLLAEFMTLHRRMLALARADEVCRRLMSAPGVGALVAITFRTAVDDPGRFQSSKAVGAHFGLTPKRYQSGETDVAGGISKVGDAMVRTALYEAANAVLSRPVRFSGLKRWALEVAKRRGLKRAKVALARKLACILHRMWLDGTEFCWGKETTAAA

SEQ ID NO: 330580 - protein, 431 aa, unidentified
MCQPLLARAMHADDKLAYARAFPVHVGVDTGKTFHKLVARGPDGRRTKAVTVPVTRAGFDAADAHLAALFPDMPRERMLVGIEFAGHHGQTFAADLHRRGYAVVTVLSAVTKRLKELEDNSPRKDDAKDAGLICRLVGDGLFVGYALLESRAIALRALTTERQRLAVEETRLKNRLLGVLDVVWPEFAATFPNVKKCTPFTLLRHWPTPAELGAARPVRVRALIRKISQNHISPERVVTFLKAAAATIGVVDDRGARRQEIRRLMARWLIVRLHVGAVEAQLAELAQEIPAVAALTTVPGVSVVCASTLVAELGTPASYASPRQVLKLAGMNLAGKESGTSVRSRIRQTKRGRPALRRQLFLLAGRCCKKEGLCHNQYAALVARNGGSKVSAVCAIARKLVPMLLHIMQTAEPFDAARWQVLQRQSPYRAA

SEQ ID NO: 330581 - protein, 422 aa, unidentified
MLHDSEDTEEIIERVAALDIGKAELVACIRVPHPDKPGQRAQEITTYPTMTRSLLGLADRLQELRVQRVVMEATSDYWKPVFYLLEARGLDPWLVNAKDVKHLPGRPKTDKLDAIWLAKVAERQMIRPSFVPPPPIRLLRDLTRYRADLVNTRTAEKNRVEKLLEDAQIKLSAVASDIFGVSGRQMLAALLAGQRDPTTLAQLARTRMRAKIPLLEEAFVGRFSEHHAFLLGTMLARIDQASADIAAVETRIEGLIGPFAQTVDKLDEITGVGPAAAHVIIAEIGIDMTRFPTAAHLCSWARFAPGVKQSAGKNKGRGTTGHGNPYLARVLGEAAVAAGKTDTFLGERYRRIARRRGKKKAIVAIGRSILVIVWHVLADPDTRYHDLGGDFYDNRISPDRKKHHHIRQLEALGYQVTLTPAA

SEQ ID NO: 330582 - protein, 390 aa, unidentified
MTQASDLSRSLVALDQDSTLIAVIEMSLKSWLVAGLVPGLMRQPLKKIEPQPAALVRLLQRWREEAAKAGHPVERVTVAFEAGRDGFWLARLLHQHDIEAYVIHPASVAVSREHRRAKTDRLDTQSLMRAFLGWLRGEAKHCQMAAIPTLEEEDARLPGRERDALVKERTRLINRIKSVLIRFGIRGFKAGLRNAAAKLALLSLPEGGPLPQNALTEVRREIDRLALVRSQIKTIEAQQLAEVRAAKATPDAPQREAAMLFILTRVVGIGVDTAQTLVREILSRKLRDRRALARYAGLTGAPDESGSKRREKGLARAGNARVRKSMIQLAWRFTMFQKESALVQWFFARTAAAKGPRKTMIVALARKLLIALWRTVTLGVLPEGVLVRAA

SEQ ID NO: 330583 - protein, 343 aa, unidentified
METKRYIGIDLHRNCFTACLRLENGREYVKQWKLEELAKFTTKLRSTDQVAVEVTGNTRLFHDAVAPHVERVVAVNPSQFKVITHSVKKTDPNDARNLALYLAKDLLPEVRMKDKTQAQIASLTQTRDTMVKLRTALKNKVNNLCSAQGVNLNKESLASEKGLKAVLAMHFDLLVNLELKIIVEQIRSLNKSIAELEETIGKEGQKLEGHKNLTSIKGIGGLSGGILLSIIGPIGDFADEGKLAAYFGIVPRVSNSNETEHSGRITKRGTKLGRTTLIQCALIAQRYSPYLKTYYEKMKGRRGTGKAIVALARKFLGIIYRTLKNKWVFEDFPNFVLAEEATA

SEQ ID NO: 330584 - protein, 324 aa, unidentified
MLPTLGIDISKDSFHVELSVNDKLRHRRFSNHKAGFAELSGWLTKHKIACVHACLEATGPYSEALALYLHEQGHTVSVVNPARIKAFGQSELMRNKDDRPDAALIRRFCEKQRTSSWTPPTPQLRELQSLTRHLDNLLETRQQQVNRLEGTNAKSVVKSLRKLIAHLDAEIQRTEQQITDHIDRHPDLKQQCQLLTSIPGIGQRTAAKLLAEIEGLSKYDSARQVAAYAGLTPKNNRSGTLRGRTRLSKTGNARVRKALFLPAIVAQQRNPIVRAFCQRLAQRGKTKMQIVGAAMRKLIHIAYGVLKTNQMFDPNHELLLKPGS

SEQ ID NO: 330585 - protein, 351 aa, unidentified
MKKTKIVAKEKDLYAAVDLHSNNGFYCVIDEKDQIVFSKRLPNDLKTVTDALEPFRERLVKGVAVESTFNWYWLVDGLQDKGYTMQLVNTTKVQTYSGLKQSDDKSDAFHLAHLQRLNLLPTGYIFPKELRGARDMLRRRMLLVQQRTAQMLSFKSLVERDTGESISTAKIKALEAEDVNQVLDGPESVLMGQANVRMIDSFDEEIAKLEKGAKAKLKLLPDYQRLKEIPGVGEILNLVIMLETGPIERFASAGNYTSYCRAVKSIKTSNEKKKGENNRKCGNKYLAWAYVEAANFAIRYDSKIQMWHQRKLKRCGGKSAVAIKALAAKLSKAAYYMLKNKEAFKTEKLFG

SEQ ID NO: 330586 - protein, 384 aa, unidentified
MNNDSIIFIGLDMHKSFIQVAVLQEQRGATPEHLGRIKSNKSALIKLTQQLQSKYPKATLHFVYEAGPCGYWTYRLLTSLGHCCCVIAPSLIPKKSGDRVKTDKRDAAKLAKLLKAEELTPIYVPEAEDEAIRDLSRARETAMKDLKDAKFQLKGFLLRNNIQATVNDNWSKKHLRWLTDLILPHHSQQIVLQEMIITINERIQRLQRLDNELLHQVKNWRYYPVVKAIQAMRGVRLLVALGTIAELGDLRRFDHPRKLMAYLGLVPTENSSGGKTRRGSLTKCGNSRARRLLVEGAHTYKHKANISVELQLRQEGLPKEIVDIAWQAQQRLCRRYQRLLQKGKHRNVVVVAIAREMSAYIWAIAREVVISDVDPRTRIARLPA

SEQ ID NO: 330587 - protein, 391 aa, unidentified
MDRAWVGIDAGKETHWAHVLDASGEQLLSRKVSNDEADLSKLIDEALSFADKVVWAIDQPGGGATLLLGLLWEREQRVLYMPGLTVDRSRDTYRGEAKTDARDAHVIADQARMRPDLGELTAGEGELAELQILLSRRRDLVTDRSRTITRLRETLLASFPALERALDLNRRGALTLVSHYQRPAQIRRAGRKRLSTFLRNRSVQGADALAEKTLTAAKAQSVTLPAEELTARIVSELAGEALALKERIETLDEELRQRFFAREEAHILTSLPGVGVTLGAEFLVSAGDLSAFESADHLAAYAGLVPAAHDSGKRTGNDRRMRGGNKTLKYVFYQSAFASLRTSPESRAFYDRKRAEGKRHIQALIALARRRVNVLWAMLRDGTTFEARSAA

SEQ ID NO: 330588 - protein, 453 aa, unidentified
MAQHSKRKQKKVQSMPVLQPNAAGVDIGAKEIFVAVDGDRDRNPVRHFSTFTPDIHKAAQWLKEVGIESVAMESTGVYWIPVFEILESYGFQVLLVNARHVKNVPGRKTDVQDCQWLQYLHAVGLLRGSYRPPKEICAVRTLRRHRENLVKTAVSHVQRMQKALTQMNIQIHHVISDITGVTGLAIIDAILAGERDPRKLADLKDPRIHAEKKIIAKALIGHYLPEHLFTLKQALECYRHYQKMIVDCDHEIEKCLQKIENHGKSPQEPYTRPAPKARKKRSHDPNFDLGSYMARILNTDLTQVEGIGATTAHTFFTEVGTRIELLKFPTEKHFSSWLGLCPANKISGGKILSSRTRKVENKLATALRMSAQSLWHSQSYLGDYYRKMKARHGTPKATTAAAHKLARIIYAMVKYQIPYDKSIIEEREKFNKERKLKYLSKQAQSLGFQLVPA

SEQ ID NO: 330589 - protein, 456 aa, unidentified
MQAFYLGCDVSKGYADFVLIDSSKQIVIKNFQLDDTSGGHMKLKDILTDFCDSHSNAAIHAAVESTGGYEDNWHSYLVNLQSELPVRAARLNPCGVCNNSKAELNRNITDRISAENIAKYLIEHPDNVVYQQVERLEPLKRQWGLIRLLIKQSTQLQNKLESLVYIANPEILAYCKHETPQWVYKLLKRYPTAKKLSKARPSTVSMIPHISNQRVKELITAAKKSVASANDEITGELISLTVKEILHKQELVKTQTKRLIKKHPLPEIELLKSFKGIGDTSAIGLLIEIVAVGRFETAKKLASFFGLHPVYKKSGDGIGAMRMSKKGRTVPRHILYMVALSAIKNNPLIREVYIKHTDKGMSGKASLGVCMHKILRILYGMLKNKTKFNPEIDRMNQKKHVLKEAILVNNKDRRFQEFDSAAPISRRQNKKRMERKVSQNGKTVQCGINAPVPTPE

SEQ ID NO: 330590 - protein, 470 aa, unidentified
MDFYYIIPKSFVIGGLSPSRNLTLAAAIEQRNATSAPRKCANESNPLPAAPTLLGETLMDAILECCCGIDVHKDNLKACLIKGSLTKKPSITIKSFSTLTSDLLDLKDWLEQEGCTQVAIESTGVYWKPVFNILEDSLTIVLANARDIKNVPGRKTDIKDCQWIAQLLRCGLIKSSFIPPQPIRELRDLTRYRKKLIEQITAEKNRIQKFLEDANIKLSSVATDIHGASGRAIINALLEGHTDPAELAGLAKGVLRNKLKELEAALRGFLRDHHRFMIKHCLDHIAYLESAIADLGVQIDKLLEPYQAEVARLMEIPGVKKKAAECIIAEIGVDMSCFPSADHISSWAGVSPGNNESAGKFRSGRTTHGNRWLSATLQEAAWAAAKTKGTYFKAKYHRLAARRGKKRASVAVGHAILKTAYYLIKEKFSFKDLGEDFFDKLNEQKTTERLVKRLEKLGHKVILQPLENAA

SEQ ID NO: 330591 - protein, 482 aa, unidentified
MRAKPPEKILKATNPSTRGHWNEMNRKQRREMMRQIQSEDISLEVIHPDAAGIDIGNESHYVAVPRSRDNQPVRCFACTTAELKAMADWLKQCGIRTVAMQSTGVYWIAVYEILEQAGLEVYLVNARETKNLPGRKSDVQESQWLMKLHTYGLLRNSFRPSQEIRTMRTYWRQRNDLVQSAGRHVQRMQKALTQMNIQLANVLSDVSGVTGQAIIKAILGGQRDPHKLAEFRHPRVRASEEEIARSLEGHWQEDLLFVLQQEQDGYEFCQKQMAECDRQLNHYLGQREDRSQGAPLPEEKRKGRRKKKSGNKPQFDLRTGLFRMSGTDLTRIDSIDVMTATTILSEVGWDMSKWETEDHFVSWLRLCPENRISGNRVIGKGRLPTNNRVTLALKMAASSLRLSDTYLGAQFRRFRTRLGAPVAIKAMAAKLARLVYRMLRYGMKYVDKGAATYQAQHQQLQIKQLKWKAATLGYQLIGVPAA

SEQ ID NO: 330592 - protein, 382 aa, unidentified
MSATTRFTDPALPEPPALYLALELSNRSWKLAFSTGHGQKPRLRNVTARDLDALTREIALARTRFGLLDAVPVISCFEAGRDGFWIHRFLQTQTHYHNLVVDSASIEVNRRLRRLKTDRIDATKLLTMLIRYHNGESRVWSVVHAPSREAEDARHLHRELLTLKSDRTRITNRIKGLLAAQGLSVSSLNRRFLDQIDELRLWDDSPLYPQLRQRLEREWLHRCDVSQRIRLIEKLQLQALRSSDNPALDLVRQLMTLKGIGLQSAWLFTFEFFAWRNISNRRQLAGLAGFTPTPYQSGDDSFDQGISKAGSSTVRAMTIQIAWGWLQFQPHSALTLWYQRRFASGGPRMRKIGIVALARRLLIELWRFSQTGALPEGAITSS

SEQ ID NO: 330593 - protein, 344 aa, unidentified
MAHFAGLDVSVKETSVCIVDDTGRIVKEAKVASEPQTLLKVLGNPAYRFKRIGLEAGPLSQWLFNGLAEAGLPVVCAETRHMQAVLKAQINKTDRNDARGIAQMMRAGLYRRVHVKTLRSQKLRMLLTHRKLLQSKAIAIENDLRGTLRNFGLKVGMAGKVRFEARIQELVENQPDLAVLVEPLLIVRRVLREQIVILHRRLLAIVRDDDVCRRLMTTPGVGPVVALTYRATVDVPARFRKSKSVGAVFGLTCSRYQSGEIDWSGKISRCGDEMMRTMLYEAAQSMMHSKKWSWLKAWAMQIARRRGMKKAIVALARRLAVIMHRIWVDGTEFRWTREQAAAAA

SEQ ID NO: 330594 - protein, 405 aa, unidentified
MTSARRIVIGADTHLETIHVAALTDTGQPLGDAEFRTTPTGYYVALRWAQSFGEVFIAGVEGTSSYGAGFTQALQDNEIHVVEVNRPDRSARRRQGKSDPLDAYSAARAVLAGHGLAVPKDPNTGALKALLIARRGAVKARTAAIQQIKDLLVTAPADLRERYRRYTTTVRLVQALARCRPTAHTDPTTIAALIACKALAQRIEFLQRQTDELTAELDVLVTRLNPALRAAYGVGPDTAAQLLITAGTNTHRLRSEAAFARLSGAAPIPASSGKTTRHRLSRGGDRAANNALHRIALVRWSHDSPTRDYVTRQLAAGRSKKDILRLLKRAIAREMFTHITKPCPIDDYSDLRPTRQARNITLTSAATHFGVWPNDISRLERGLKRDDILAANYRRWLNTQLIYAA

SEQ ID NO: 330595 - protein, 361 aa, unidentified
MSGTVTWVGLDVHARSTHAAAIDVLTGELRRARFDGGSDAVIEWLGGLAGPVRAVYEAGPTGFGLYRAAIAAGIEVAVIAPSKTARPSGDRVKTDRKDAELLARLAMAGQLSAVAVPSEFVEAVRHLARVREQVRRDLMRARHRVSKLLLMHGRVYDAGGTWTARHRTWLARQQFSEPATELAFADLVAAVDGLTARKAALDERLSRVATDERLWPTVARLRCFRGIDTLTALALHLELGGDWERFRSPRPLFAWLGLTPSLDQSGQSARQGAITKTGSVYARRLLVESAWHYAREPRIGVTLKSRQQDAPDHVLQIAWRAQHRLHRLHHRLRERGKPYNVATIAVARELSGFLWAAATAP

SEQ ID NO: 330596 - protein, 465 aa, unidentified
MTTAKLWRNRKERKDWARRLRSEDPGLEVVHPRAAGIDVGNSAHYGAVRPDRDPEPVRRFECFTADLYRLAEWLESCGVKTVAMQSTGVYWIPLYEILEDRGFEVYLVNARHTKNLPGRKSDVQESQWLLKLHTYGLLNNSFQPPAEIRVLRTYWRQRAEHVSGAATCIQRMQKALTQMNLQLANVISDLSGVTGQAIVRAIVAGERNPQKLAQLSNPRIEASREEVAKSLEGNWRPELVFVLRQEVEMYDAYQRRIAECDQQLQKHLASFADTELPQSPKAESKEQRAKSTKNAPRFDLSSELKRITGVDLTRIDGIDVMVAQRLLSEVGMDMSRWNTEAHFSSWLGLCPDNRISGDKLLGKGTRHVVNRAATALRLAARNLIRSRSYLGAQYRRLRTKLGAPKAITAMAHRLARLVYRMLKYGQQYVDKGTEYYENRYRQQQIHLLQKNAAKLGLQITVAAQS

SEQ ID NO: 330597 - protein, 347 aa, unidentified
MNITQVGFDLAKNVFQVHGIDERGKGALRKQLKRPQVIRFFTQLPPCLIGMEACGGAHFWARKLTALGHTVKLIAPQFVKPFVKSNKNDAADAEAICEAVGRPNMRFVPIKNTEQQALLGLHRARQGFVIERTAQVNQIRGLLAEFGLVIPVGIRSIESKLPEILEDAENGLSGASRALFARLFDHFRALDRQVDELEREINAWHREDTASQRLQAIPGIGPLTASALVASVGDAKAFHNARQFAAWLGLVPRQNSSGGKTTLLGISKRGDTYLRTLLIHGARSVLLQLKRHPDQAEGWLARVAARRNPNIAAVALANKNARTVWALLAHGREYRAGYRSAAIAAAI

SEQ ID NO: 330598 - protein, 344 aa, unidentified
MKHYAGLDVSVKETSVCIIDEAGKTTREVKVASEPEAILAILMNEALTIERIGLEAGPLSQWLYSGLAETGLPVICVETRHMKAALSAQLNKSDRNDARGIAHMMRVGLYRPVHVKTLASQKRRMLLTSRQLLQAKAFDIENDLRGTLRNFGLKVGMVGVAKFEARIRDLVVDHPDLAAITEPLLIARRVLREQLGVLHRRLLAVVRQDEVCRRLMTVPGVGPVVALTFRATVDVAARFKNSKAVGAVFGLTPRRHQSGEIDRMGSISKSGDAMVRTVLFGAAQVMLTRTIRWSWLKAWGMKIARHRGMKRAIVAVARRMAVIMHRMWADGSEFGWTNPSTPAA

SEQ ID NO: 330599 - protein, 320 aa, unidentified
MTILNSQVVVGVDVAKAEIVVYRSDLQQTDIIANERRALKAWLKKLPAHCAIGLEATGLFHIDTTELAHDMGHDVYIIDGSRLGKYRDSIGIRAKTDASDAHLLARYLSKESDSLRVWSPPPEAYTKLKSLLRRRAKLIQHRVAIKQSWANESQLREQFGEVLASIDQFEKAIQKTLKDLVEEAGIQQHVKRCQAVEGVGALTATATATAFLRGDFSNSDAFIAFLGLDLRVRSSGQKDQQRRLSKRGDSEYRRLLHTSSMTASRSETWKPYYQSYLARGFKPTQALVVLARKLARVMFALMKSQTEYTPNFMSGGCSRT

SEQ ID NO: 330600 - protein, 415 aa, unidentified
MALKIVYKICCGIDVHKTFVVACIASTNDKGVTSYESHRFSTYTSGLKTLLQWLLDRNCKDVCMESTGKYWIPVYNILEKDCSIVLAHPKYVKAIRGKKTDKKDAKWIADLFKHDLVAGSFMPPADIRQLRDLMRYRFKLTCFKSSEKNRLQNCLTVSNIQLGNVVSDTFGKSAQAILDKILENPEDTSFDLEPLVFKSLKKKLPELRDAIDGYITPEQAGKLKIIKAHYESLESRKAELEELILALATPYQQELAILQTAPGISSDFTAIGIISEIGTNMEAFPSAKHLCSWAGLTPTNNESAGKKKSVRVSKAGCYIKPLLVQCANAAIKSKKHPEIRDRYLRIKKRRGHKKAIIAIARMLLTALYYMLKNGENYNAELYRKSDLPPVDREITVEQALMIARNQGYKIKSATA

SEQ ID NO: 330601 - protein, 313 aa, unidentified
MTEVTMIGVDLAKNVFQVHGASMTGELKFRKKLSRLSFGKFMAEQSPAVVVMEACGSAHYWAREMIRLGHEVKLIAPHYVKPFVKRQKNDAADAEAIVIAAQRPEMRFVDPKSAEQQSHAILFRARERLVHQRTELVNALRACLYEYGYVVPQGIHQIRRIAEILDAPNSDLPDLMREECRDLLEQIAEKTGRINARTAKIKALAAEADTARRLQTIPGVGPLTALAVEAFAPPMESFRCGRDFAAWLGLVPRQFSSGGKERLGRISKAGQADIRRLLIIVAGAHGRAKAADARGDRTGQQDGADDLGRTDKR

SEQ ID NO: 330602 - protein, 355 aa, unidentified
MLYTGLDLHRSFSYITTMDDKGYIVGQKKLPSNGEIVDFLKEFDESMEVAIEATPSWYWLYDCLEDEGFKVKLSHPLKTKAIAYAKVKTDKVDSATLAHLLRSDLLPLSYVPEKPIRLNRELLRYRASLVKVQTGIKNKIHTILAKNNITHGYSDLFGKEGMAFLHSLSLPENYKIALEGYLSILEAVRREIQVASRKVQVLAQEDQDAMLLMTIPGVGYYSALLIRSEIGDVKRFPSAKQLCSYAGLVPSTYASGNTCYHGHITKQGSRWLRWILIEAAIHVVKRTGPLRRFYYKVERKKGGKVAKVATARKLLEWIYHMLRDGKTFKEMEGLTEYQSKGELANKPGLYFRPSI

SEQ ID NO: 330603 - protein, 428 aa, unidentified
MDQVNRNRLEEFRQLRQEVRHSGEYLIVGIDIAKDRHHAFLGTATGKTLLRRLVFSNDHEGFRKLLDHAEALRAQHGLKKVVYGMEPTANYHKPLGEYLITLGRTVVLVSGVTVKRNRESLDGRWDKHDVKDSANVADLISQGKCLYYEHPSAELRGLRGLLSLKRRLKKQEHGYKVRIRNHLIAQYFPEMDRDYEQLGAEGLSIVRWCFPASQIVQLDVDPFIERVTSRRIRVEKRRRLEAIWEKAGESIGCDGVPGVEHEAKVMVEGLRQIQELIKQTEEKILGLCKQFPEYSYILTIPGFGPDVSAKVLGAIGDPDRFQNGKQVLKMGGLDLSADRSGKDSDKATPEISKRGKADLRYALYQAALIASVQNRDVMIYYTNKIRGREREKGIHTKMRVKLAAKLLVIAWTLMKKKEAFNPAYLNAE

SEQ ID NO: 330604 - protein, 338 aa, unidentified
MEQVITIGLDLAKNVFQVHGIDAAGKVLVRRQLRRGDVLRFFGGLPRCLVGMEACATAHYWARELTKLGHTVRLMPPAYVKPYVKRGKTDVADAEAIAEAVTRPTMRFVAVKTADQQAALMLHKVRDLLVRQRTMLINALRGHLAEFGIIAARGPGGVTAAIISLHEAQDSLPELARVALHGLIDQLRIVRDEIARVEKRIVAWHRASNASRRLATIPGIGPITASAIAAAVPDATLFQSGRQFAAWLGLTPRAHSSGGKERRVGISKQGDGYIRRLLVTGATAVIRLARQGNASKTWAAKLLERKSARLVSVALANKTARIAWAVLARNQSYVARAR

SEQ ID NO: 330605 - protein, 439 aa, unidentified
MQVELPQYVRLIPQEMESAMRKTGIHANSLLEVHRMYNAVGIDVSKGKSTVAVLQPGGTVIRKPFDVSHTSQSLHELTDYLGSLDGCTKIVMEYTGRYHEPMVKALSEAGLFISVVNPHLIKNFGNNSLRKVKSDPADAKKIARYTLDNWAELRQYSGMDNIRTQLKTLNSQFSFFMKQKVAAKANLIALLDNTYPSVNKLFDSPVREDGSEKWVDYSYSFWHVDCVRRIGLKAFTERYRAFCKKHHYIFQPDKPEKLFNASKELVAVFPKEKTYKLLIQQSIQQLNLASEHVERLRKEMDELASTLPEYSTVMGIYGVGKTYGPQLIAEIGDVSRFTHREALTAFAGVDPGVDESGQHKSKSNRASKVGSARLRKTLFQIMTTLLQNAPQDDPVYRFLDKKRSQGKPYYVYMTAGANKFLRIYYGKVKECLRNLEQAE

SEQ ID NO: 330606 - protein, 321 aa, unidentified
MTYVGIDVSKVTFVVAYSSVKTNKTRTFKNTVNGVHEFVQTISASEHNCVLEATGNYSALLVYLLSEAGITISLENPLKIKNFAHVMLTVTKTDEIDARLIALYGEKMQPAPYKLRSDAILVLKQKRTVLRQLKKQLVATRNLKGSMEVLPFFDPKCKKTIEKTITFLEKQIKEMEEELASLAQGEYKKQMDLLTSIKGIGVTLAAALIVATGRFSYFDNAKQLTRYLGLSPTYQQSGTSVNVKGHINRNGDSSLRSQLYVAAFSSLRCNTECKACFDRLRSNGKPGKVVVIAVANKLVRQAFAVVTQGKPYVDGFKSEKP

SEQ ID NO: 330607 - protein, 346 aa, unidentified
MSPSLAVRPTLRALRSRATARVLEVLESECQRVGAVQVVSCYEAGRDGFWLDRFLHAHGIDNRIVDSASIEVRRRARRVKTDRLDAQKLLTMLHREALGEKDLWSVVHVPAVADEDARSLQREYRTLVKERSRSSNRIKGLLASQGVVAPRIDAQFLPWLAAARLWDGSAIPSGMRARVEREFARWRFTRDQVLALEKERRDRTKDETDRSLEKVRALFALKGIGLGAAWTWGLEFFTWRDFRNGKEVGALSGLAPTPYQSGDSSHELGISRAGNRWVRGLAIEIAWGWLRHQPDSALTHWYNERFARGGPRARKVGIVALARKLLVALWRYVETGVLPEGAVLKA

SEQ ID NO: 330608 - protein, 427 aa, unidentified
MKTEDSRLEEFRQLRNEIRGSEKHLLVGIDIGKEKQNAFLGTATGKTLYKRLIFENNKEGFEKLLTHTEAAKVQNNLNQVVFGMEPTANYHKPLGEYLITRGHEVVLVSGNAVAKNRQLLDGRWDKHDGKDAANVADLISQGKCHYYEYPCREVRDLRGLLSLKRKLKKQAQGLWLRIRNNLVAQYFPEMDRYYGSCTQDNLAIVRNCLSPSVIAGMEYNEFFKTVVSRKKGLRQHKHLYKIWQLAGDSICCEAGDATVCEAEVLVGQLKQTREAIERVDKEIEKRCCLFSEYEFLMSIPGFGPDISAKVLAYIGDPYRFGRASQVVKMAGLDLSANRSGKTTDRAVPVISKKGKADLRYALYQAALIASSHNQHFIKYFTEKIRGREREKGIKTKMRVKLSAKLLIIAWTLMKNKELFNPDYVTVA

SEQ ID NO: 330609 - protein, 351 aa, unidentified
MKSMTKQLQGEKLFIGIDLHKRRWHVTIRTADVEIFSNSIAGRWQELKKVLNRYKGCRIHAVYEAGFLGFWLFDHLTQYGVDCIVTPPSLIPQEHGNRVKTDRLDSRKLARLLAKGLLKSIWVPSVEERFHRQVIRRRRQLVGDRVRTQNRIKSELCFYGIDLPAPHGQWSKVYFENLQRIKFNNRWMQQSFNQLLKQYEFLCTQIDKQTQLLKQLAKLPLYRDRVKILRSIPGIGLLTAMEILLELQDVSRFRRAEQLAAYVGLTPSQYSSADKIRMGRITRMGKNTVRSALVESCWHLIRKDKAMRKKYEQIKARAGGKRAIVAVSRKLILCIRRLLLDNRPYEYEPVG

SEQ ID NO: 330610 - protein, 314 aa, unidentified
MTCIHFIGIDVSKEWFDVAVHAQAAKPQRFQNSGAGFAAFARQFAAELPQALVVLESTGGYETALIAFLLARKVAVHRAHPLTAKHFIRSLRLHGKTDALDALALARYGAERHASLRLCHVPEAAQQALRALLSRRADLLAIRMAEQTRSLHPGYADAALKASLKAMLKLLNAQLAKLDLRIEALIGQSPPLSAKFAVMTSVKGIGKQTALTLLGNMPELGSLTRRQAASLAGCAPHPRDSGKTAGYRRTIGGRAQVKRCLFMAAMAARRFNADLRAFFERLIQNGKKPMAAITAIMRKLIVILNAKLRDHAYA

SEQ ID NO: 330611 - protein, 391 aa, unidentified
MELDKVIKFKANGGGFESFINWTESVAKAHGKKKIVVGIEPTGHYWYTFGRAVIDRGLMLVQVNPYHVKKTKELDDNTPSKSDYKDPKTIAFLVKDGRYQIPYMPDGKYAELRKANNLREEWVQKKIRVKNKVTRWLDIHFPEFLNAFSSWEGKTALMTLGKIALPEKIASKTPEEILCIWRKEVRRGVGIKKAEKLVKEAQNSVGIREGAQMAEYEIKLYIKEYMEIREVLEDMERKLEKIVLTIPGANRFLEIKGVGIKTVAGFFAEIGDIKRFTSAKQIIKLAGLNLRQNSSGQHKGETTISKRGRSRLRALLFRAILPIVATNEVFNKLHHDNISQKERPMKKMQSLIALCCRLIRIVYSLITKDQEFDPDKLIRDIHRDDALQGAA

SEQ ID NO: 330612 - protein, 429 aa, unidentified
MNYNTQNAKIASITEKTLIVGIDVGSETHYARAFDWRNYEYSKKPFAFNNDEAGFAAFKVWMEDIAEKHEKEAVIPGMEPTGHYWLNLGAYLQEQGMKPVHVNPHHVKKSKELDDNNPNKNDRKDPKTIAGLVNEGRFSYPYIPTGIYAEIRNLSNLRIQTQEELTRIKNRIARWFSIYFPEIKDVYKNPDAVSGMMVIEKAPLPCDIKELGVDGVNQVWRDAKLKGAGLKRARTLVSAAEHSIGSTEAPGSARIEIRNLLNDYEVYKNRMDDLMREIEAKLSEIPYIDKLMEINGIGLKTVSCFIAEVGDIRRFDNPKQLQKLAGYAIVADSSGKHNGESRISHRGRKRLRYALYEAAISVIGKNKEFREIHDYYRTRKQNPLKKMQSVIAIACKLIRIFYTILTKGVDYDGQKMLSDIVRPETIMAA

SEQ ID NO: 330613 - protein, 344 aa, unidentified
MTYYAGLDVSLRTVNICVINDQGEFIAETKVDSEVTDVVAYLDGLNLDVLNVGLEAGTMTQFLTYGLQSAGFEVVCMEARQVKAALSAMRNKTDKNDARGIAQLLRSGWYSPVHIKSMASHRIRLLLSSRKAVLSKCIDLENEIRGLFKVFGIKLPPKLGHGSFDPAVRDIIETDVTLSESLLPLLDARLVLYHCFRKLDNRTRHMAHADVVCQLLMSAPGVGFVTALTYKAGVDDPTRFKHSRTVAAHFGLTPRRFQSGEIDIEGHISRCGDRDVRSTLYTAANALMTRSSKWSSLKAWGMQLAKTRGHRRAVIAVARKLAVILHRMWIDDTQFQWGSEGARS

SEQ ID NO: 330614 - protein, 254 aa, unidentified
MIFVVVMTDNKGVTTYKRRRSSTFTTGLRELLQWLLDNNCRDVCMESTGKYWIPVYNVLETECKVVLAHPKYVKAIKGKKTDKKDAKWIADLFKDDLLEGSFMPPKDIRDLRDLMRYRYKLTCFSSSEKNRLQNSLTVSNIQLAKPHQFYIDLILSMPSIKDPFTAITIISEIGVDMSKFPTTKNLCSWAGLTPTNNESAGKKKSVRISYPFFNAIHFFTCKNSTQFSFLAAFFQFGVNRPSCSQGEVHHNERN

SEQ ID NO: 330615 - protein, 359 aa, unidentified
MAQHEVEVTGGVDTHKDTHTAAAIDSAGRVLGSAQFSASALGYRKLLAWLKSFGTLLMVGVEGTGAYGAGLARYLREQDVTVVEIDRPDRKTRRWQGKSDPVDAEAAARAALAGRRTGTPKFRDGRVEALRALRVARRSAVQQRSDVTRQIKNLIVTAPEGVRTMLRHLKDKDLLTICAGFRPSLDQVGDPVTAMKTALRSLARRHRDLGREIDELDELIAPLTQEINPALTELNGVGPDVAGQLLVTAGDNPDRLRSEAAFAMLCGVAPLPASSGRTHRHRLNRGGDRAANAALYRIVLCRLRWDQRTKQYVERRTKEGLSKKEIIRCLKRFVAREIYHVLTITNATAAAPSHLTTAA

SEQ ID NO: 330616 - protein, 248 aa, unidentified
MAMLSFGGIDVSKDRLDVMVLPEEQCSSVPNDAAGWAKLVEQLRGFSISAIGIEASGGYERGAVRALLAAGMSVRQVNPFKLRQFARASGVLAKNDPLNARMIASFIAIMPTRPAQPHAPAVERLAEILTVRRQLSDAKVAAENASRLLEDAMLQRLSRRRIARLAADIDVLDGRLVEIVMADAALVHRYQLLTSMPGVGPVLACTLIALLPELGRMNRKQVAALVGLAPYAFDSGKLKGALPATGRG

SEQ ID NO: 330617 - protein, 344 aa, unidentified
MKKNLFFIGLDIAKADFAASIYQTPDKPIVTKEAIPNDRKGFEMLLLWLYDHHINKKNCRICMEATGVYSQAISYYLLFQDFPVSVEPPLKVKRAFDPVGHKTDPVDSKQIAEYAYRFQDELTSWKPRDEILEKIRQLLSVREQFTKQKVALDNSVQAYSKQRVQVALIKTAQKETLNQLKKQIALIDKELEKLIKQDPEIFQRANNLDSIPGCGMLLAAHLLVITENFTKIQNSKRLAAFIGIVPYQHQSGTSVSKRAKIRHFGPGPSRKLLRLAAQSVATHNATFRHYYLRKLDQGKAKPLVLNNIANKLLKIACTIIRNNTRYIKDYRSIHPMYLKSLKSA

SEQ ID NO: 330618 - protein, 294 aa, unidentified
MKVTTVGLDLAKQVFSVHGVDEHGKAVLRKRVSRGKLLELFAQLPSSLVGMEACSGAHHWARELERLGHRVGIMAPRFVAPYRKSQKNDGNDAEAICEAVGRPSMRLVPVKSTEQQGLLVLHRVRQGLTAERTGAINQLRGLLAEFGIVLPKGRYQLRAHIGAVLEDAENAIPGLARRAFADLNARIGELDQRILAYDRELEGLARHSEAARRLQQIPGIGPITATALVASVADAKLFKNGRQFAAWLGLVPRQYSTGGQVRLGRITKRGDAYLRTLLIHVERRATENARTARR

SEQ ID NO: 330619 - protein, 464 aa, unidentified
MLLKFKFMKKEDLKKAKEKEFVAMAVVHPHAAGIDIGDTIHAVAVPAGRDEQSVRTFGAMSCDLEEIVAWLEKCGVDTVAMESTGVYWKPLATLLIQHDFEVYLVNARHVRNVSGRKTDQGDAEWLQQLHSCGLLKSSYLPDDIQESLRVLVRHRRTLTQESSRFVLRMQKALELMNIKLHTEISDLTGKTGSAIVEAIISGERNAANFLPLVDRRIKADREDLVKSLQGNWREEQLFTLEENYSCYKFFLERIKKCDWAIEAKLQEFAAAENEGELPAPKPEKSDEKAPFKKKNKNAPKFNVRSYLKGIHRVDVLAIYGMNDVGAMEILAETGTDMSKWETVEHFRSWLNLCPNNKITGGKLVSSKLMRKKANPASQAFRKAANACQRSDHWLGDYFRRMKAKGGNKYAIVATANKIATIYYKMISEKIEFNPPDLTEYQEKRKNAKIAYLERALKSLKKECA

SEQ ID NO: 330620 - protein, 462 aa, unidentified
MKRKAKSQATHSGLAVVNPNAAAIDIGATMHVAAVGADRASDPVRSFGTFTADLHRLADWFAECGVKTVVMESTSVYWIPIFELLDERGFEVILVNARDAKHVPGRKTDVSDAQWLQRLHSYGLLRASFRPKGEIVELRAYLRQRERLLDTAASHIQHMQKAMTEMNLQLHHVVSDITGATGMRIIRAIIAGERDPAVLASMRDTRCHSSAEVIEKALTGHYRGEHLFVLEQALALYDVYQQKVAACDIRIESVLKELSSIRGRKEDARADGSGSPRRRSRQSNGPDFDVGKALHSLLGKDLTRIHGMGPYLALKLVSECGDDLSAWPSAKHFTSWLCLAPSNKISGGKVLSSRTRRSGSRAASLLRLAAVTIGRTDTALGAFYRRLSARAGKSKAVTATARKIAVLFYNALRHGMDYVDPGASYYETRYRERVVKNLHRRAKAFGFILQAAEMPAAEQAVS

SEQ ID NO: 330621 - protein, 347 aa, unidentified
MRFYTKEHLFYCGIDLHARSMYVCVLDQKGQTLVHQNMRAEPQSFLRAIAPYREDIVVCVECMFTWYWLADLCSQENITFVLGHALYMKAIHGGKTKNDRIDSRKIAGLLRSGMIPQAYVYPAEMRATRDLLRRRNYIMRKRADLLAHIQNTNSQYNLPEFGRKISHKINRQGVVERFEAKDVQRSIEIDLELIDHYTRLLTNLESYITRAARYHNPQALYLLKTIHGVGKILALVILYEIHDINRFPRVQDFVSYSRLVKCARESAGKRHGTSGKKIGNMHLKWAFSEAAVLFLHSNPDGMAYKKRLEKKHGKSKALSILAHKLGRAVYYMLKRERAFDMNKFLAA

SEQ ID NO: 330622 - protein, 343 aa, unidentified
MQAVTTIGLDIAKSVFQVHGIDATGNVVIRRQLKRRHVLAFFQKLSPCLVGIEACASSHHWSRELKALGHIVRLMPPAYVKPYVKRQKNDAADAEAICEAVTRKNMRFVETKTPEQQSCLMLHRSRHLFIRQQTAVINAIRAHLAEFGVVAPVGRKGVADLLDIVADPRDRRLPEVARACLAALGVQLRLLKAQILEFDRRIMAWHRSNETSKRLDEIPGVGPALATALVASVADPKAFGSARNFSAWIGLVPKQHSSGGKDRLGSISKQGDRYLRSLFTAGALAVIRYAKIRGAKHRPWLTALLARRPAKVAAIALANKIARMAWAMMAKGERYREPAALAA

SEQ ID NO: 330623 - protein, 410 aa, unidentified
MEPIVEQSCGLDVHQATVVACLIIGPAESRPQRVVRTYGTTTSELEALRGWLRDEGCTHVGMESTGVYWMPVFAVLEGDFELIVGNAAHIKNVPGRKTDVKDAEWIADLVRHGLIRKSFVPPKWQRGLRDLVRYRRKLVESETAERNRLMRLLETCNVKLSSVASDVFGVSGRAMLRALIEGIATPAEMASLARGALRKKTDELALALRGRVEEHHRFMLRIQLGRVERIEADIAVLDERIDQVLAPHQAEMQRLKQIPGVDRVVAATIVAELGLDMTVFPTAHHAAAWTGVCPGNNESAGKRLGHGKRRGNVHLATALVQAAFAAGRKTGSYLKERFWRLAARRGKKRAAVAVAHSILVAAYEMLRLRIDYRDLGADYLDQRVKTTVKRRLVRRLESLGYRVTLDVTPT

SEQ ID NO: 330624 - protein, 337 aa, unidentified
MEYFAGLDISMEETHVCVVDREGAVVYEQKTASTPEAIAASLAKAPRCRRIVFETGRMAPMLYHGLAAFGLPVVCIESRQAYQALKTLATHKTDRNDARGLAHLARTGFFKPVHVKSLPAHAIRALIIARKKLVGQRVMLENQIRGLAVVFGVRLPRALSPAFIQQALRASEGIAGLSAAMQGLIAARAAVLSAVAAIDADIKKIAKASTACRRLMTIPGVGHLTALAFTAVVDNPGRFRRSRDLGAYLGLVPRRFQSGEVDYTGSISKCGDRRVRTLLYEAANVMLTRYRGALKLKDWALAIAKRSTMRKARVALARRLAIIMHAMLRHGTEFKAA

SEQ ID NO: 330625 - protein, 338 aa, unidentified
MAIVFVGIDLAKNVFAVHGVNEAGKPELVRPSVARARLHELIASLPPCTVAMEACSGGHHWARLFAAHGHTVRLIAPKFVAPYRMSGARGKNDAADAAAICEAVQRPAMRFVPVKSIDQQARLMVHRARQGYVEARTACINRLRGLLSELGIVLPLKAATVRREAGAALEELPGWANTVVGDLLSELHRLDERIAQYDTHIQTIAREDERARQLMRLSGVGPTTATAILAMIGNGHEFRCGRQFAAWLGLTPGQYSSGGKTRLGRITKAGDAYLRTMLILGARAVLAAAKNKTDAVSRWAIALEQRRGYWKAVVAIAAKNARMAWAMLARGESFKLPA

SEQ ID NO: 330626 - protein, 408 aa, unidentified
MRQLLERCCGLDVHKKSISACARVPDERGEVAELYATFGTTTPDLLELSDWMMGLGVTHVAMEATGDFWKPVYYILEADFELLLVNPAHIKHVPGRKTDAIDAAWIAELLSYGLLRKSFVPPPPIRRLRDLTRYRKALIRDRSREVNRVHKVLEDAGVKLSAVATDVMGVSGRAIMEALIGGTSNPDALASLAKGRLRAKIPELHKALTARFKDHHGFMLQRMLAHIDDLDADIAAISGRIEAEIGPFAEKAKLLPSITGVGPRAAEAIIGEIGVDMSVFPTSGHLASWAGLCPGQRESAGKRKSSRTRKGSELLRTTLVECAHSASHTKDTYLAEFFWQVTRRQGKDKAIVAVAHEILIACWRVLSTGTAYCDPGPGALRARSEEQIRRRAIRQLESLGLRVTLDAA

SEQ ID NO: 330627 - protein, 404 aa, unidentified
MNAVGIDVSKGKSTVAVLRPYGEVVVSPFDVAHTGSDLRALADLIKKLPGETKVVMEATGNYFKSIARYLHEQNIFVSVVNPVLISDFGGNTLRKPKTDKKDSVKIASYALTYWLDLKEYTPQEDLRKSLKLMNRQYQQSIKLKTMMNNNLISLLDLTFPGINKLFTSPSRESDGHEKWVDFVLEFSHCDMISKLTIKAFAKKYKKWSDKNSYHFTESSCEKIYAFAKDCVSSVSSDKAIVFSVVQAAKMLISATENCHAIQSEMNRVASKLPEYDTVMNMYGVGKAVGPQLMAEIGDPRRFHSRKAITAYFGYDSENNDSGQKTTRSNPMTKKGSGALRRTLFIIMQVLLQTKPQDNPVYDFLIKKKSEGKHYYSYINAAANKFLRIYYARVKEVLNVSEQMT

SEQ ID NO: 330628 - protein, 355 aa, unidentified
MNDAKYIGLDVHQATISVAVRDSRGNLVMEAILETKAETILQFIRGLRGSLYVTFEEGTWAAWLHDLLQPHVTRVLVCDPRKNALLKVGNKNDRIDARKLSELLYLNKLSSVYHGEPGIRTLKELARSYLAMTRDLTRVMSRLKAIYRSWAIPCAGKQVYAARNRAEWLAKILEAGVRRRAELYYQQFDALAALRQQARRELLAEARKHPAMKLLRQIPTIGLIRAALLIALMQTPNRFRTKRQLWAYCGLALRTYTSGEYRFVGGQLKRSKKVLAVRGLNINHNHDLKNIFKGAATRAASTVGPFQDFYQACVARGVKPHLARLTLARKIAATTLLVWKKGVRFDAEHLKQQAA

SEQ ID NO: 330629 - protein, 338 aa, unidentified
MAMYCGIDLHSNNNYVAIQDGRHEDVVCRRLRNDLQTVLNFLEPYREEIESIAVESTFNWYWLVDGLKESGYDVRLVNTTKASDYSGRKYTDDRHDARWIAHLLALGILPEGYIMPPEERGLRDLLRRRSFLVHQRTSLYLSVKTIFARSKCQKITTEDIRALDSATVRRVFDDPHVAESVAVMLPVVRVVTNQIKEIEKIALKTGKLRDEFRLLLTAPGIGNILALTIMCETGDISRFQKVGNYGSYCRCVKSEKFSNNKKKGKGNRKNGNKYLSWSYSEAAHHATQFEPLAKRYFDRKKSQNHPMVAARALANKMARACYYVMRDQVPFDVSRTFC

SEQ ID NO: 330630 - protein, 458 aa, unidentified
MEEPQEVLADEEHEQVWERVAAVDIAKASGVVCTRLPDEDHPGKRKTHVWTVQATSGAIIELGDYLRARQVQVVTLESTSDYWRIWFVILEAAGLKVQLVNARAVKNVPGRAKTDKKDAVWLAKLTEKGLLQPSFVPPYEIRRLRELTRLRADLVHDKSRYWARLEKLLERAHIKISAVLSTLDTDTARAMIEALIAGQRDPRALADLAIGKARAKRAELAAALDGRWEDHHSVQARILLDNIATLNQQAEQLTGQISELIAQIPAAWGVDADGTTGPDAGTSPDSPVLSAVAQLDAITGCGIIAAQAIIAELGLDMTVFGTAGRLVSWAKRSPQTRQSGKKTSGGRTGKGNPWLNGILGEIAASASRTGTFLGERYRRIARRRGKRKALAAVARSILVIIFHLLSDRAVRFRDLGADFYDTQISRDRKIRNHLRQLQALGLSPDDITALLGKDKAAA

SEQ ID NO: 330631 - protein, 371 aa, unidentified
MGAYYVGLDVHSQFSAFVIQDDTGAMVARGTVPTTPEGLTGLCRAHELPVGTLVALETGTSSFYVARVLTGLQLRPIVIDAHEVRLQAHRPAQKSDRRDAFELCDGIRRGVYRSIVHVPTPAISRLRTTLSRRRHFIRIQTAEVNATKRLLRGAGWRVGTQASLRSAGSWERLLEGLADLPDLQGYIRLHRVVWQQAGEQVRALDHLLGDLAGEWRDDVRRLEAVPGVGPIVALTAIAVFADVHRFASAKHVASYAGLVPSTYQSGAADRHGHITKRGAAELRTMLCEAAHHARRPSHPLNPYFTRLCARRGYKVAVVAVAHRLCRLLYALLRDATDFDPARLGVEEGPFTHIITRQFRLTPKSAGRLTSA

SEQ ID NO: 330632 - protein, 337 aa, unidentified
MNPATVGLDLAKNVFHVHVADASGKTIDSKRLTRRDLLPYFKALPLCLIGIEACATAHNWARQLQGLGHDVRLIPPSYVKPFVRRGAKNDATDAAAICEAVTRPNMRFVPIKSREDQAFLMLHRARGLLVRQRTMAACAFRAHLAEYGVIVAQGIHRVDALIAKLDEIRADLPNDASFALDALVGQLDTLNRQIDRIDVRLAEIHKTNAICRLLATIPGIGPITATAFAATVPDPSTFRSGREFAAWLGLTPRQNSSGGKHRLGGITKQGDRYLRHLLVLGARTVVRYPKARSRVDGPWIEALLERRRPMVAAVAVANKLARTIWAMLSTGEVFRNA

SEQ ID NO: 330633 - protein, 314 aa, unidentified
MMDAKAEVFVGIDVSKQRLDVHVRPTGESFVVARDDEALVGLVERLRALAPRLVVLEATGGLQVRVAAALAAAGLPVAVVNPRQVRDFARAIGRLAKTDPIDAEVIARFAEAIRPEPRPLPDEAAQTLAALVARRRELVALRTAEKNRLRQAAAAFVRRDLEDSIEALAGRIAALDQEIAQHVESSPIWRAREDLLKSVPGVGPGLARTLIAELPELGRLGRRKIAALVGVAPFNRDSGTMRGKRTIWGGRPAVRAVLYMAAVSATRCNPAIATLYKRLRSAGKPAKVALTACMRKLLTILNAILRDQQPWRHA

SEQ ID NO: 330634 - protein, 458 aa, unidentified
MGRNRSTDKSRRAMPMVHPNAAAIDIGATMHMAAVSADRTPEPVRSFGTFTTDLHRLVDWLAECGVDTVVMESTSVYWIPIFELLDARGFAVFLVNARDAKHVPGRKTDVSDAQWLQRLHSFGLLRASFRPKGQIAELRAYLRQRERLLEYGASHIQHMQKALTEMNVQLHHVVTDITGATGLRIIRAILGGERNPAVLARMRDRRCHATVETIEKALAGNYRAEHLFALEQALALYDTYQQKASACDARIEAVLKELSARRGREAGPLPSPRQNRSRQQNSLLFDVRTALFALLGKDLTQINGLGPYLALKLIAECGDDLSAWPSAKHFTSWLCLAPSNKISGGKVLSSRTRRSGSRAAALLRLAAVTVGRTDTALGAFYRRLSARIGKAKAVTATARKIAVLFYNAVRHGMDYVDPGASSYEIRYRARVIDNLHRRAKAFGFMLQPMAPTPGMAVS

SEQ ID NO: 330635 - protein, 343 aa, unidentified
MQTVTTIGLDIAKSVFQVHGVDAAGQVVIRRQLKRRYVLSFFQKLPQCLVGIEACASSHHWSRELQALGHTVRLMPPAYVKPYVKRQKNDATDAEAICEAVTRANMRFVPTKTPEQQSGLVLHRTRHLFIRQQTSVINAIRAHLAEFGIVAPVGRRGVEELLTVVADPNDKRVPEIARACLSAFGAQLRRIKEQILEFDRLITAWHRSNEMSMRLDEAPGVGPVLATAVVATVADPKVFRSGRNFSAWIGLVPKQHSSGGKDRLGSISKQGDRYLRGLFVAGALAVIRYAKIHGTKRRPWLTALLARRPTKVAAIALANKIARMVWAMMVKGERYKEPVALAA

SEQ ID NO: 330636 - protein, 438 aa, unidentified
MPNNVIFNFDELFISVGIDVGADFSWMSIVLPNQQFVGKPYKILHNSMDSLASAVSKIKEAEEMYSLESRIFLESTGIYHYPLFCYLRDKGFNCSVINPIITKNSTNINIRKVHNDRFDSKKAALVGLKPDLKVSLMPSDLALNCRNLCREYYDLMDNRSAYVNKLQGELRMAFPQYLGIFSKVTINTSLTLLETYTSPSAFLEADKQEIIDIIKSTARFGLTYAQNKYNAIIQAATDANQFGYIIDSNIKRIRLYISFIRKYDEELNSILESLHELVDAHEDADFVKQIHLIETFKGAGFLSAVSIMGEIGDFSAFSKPKQLFAYFGLDPAVKQSGKFEGTKVQMSKRGSAIARRVIHTLTLQSISISRNGEAKNPVLREYYIKKCDSKPKLVAMGAVSHKVCNMIFAILRDNKPFKIIAPQEHIKQYNAAKCDIAA

SEQ ID NO: 330637 - protein, 403 aa, unidentified
MNSVGIDISKGRSTIAVMRPFGEVVISPFEVRHTGSELSKLARQLKSLDGETRVVMEATGNYHASVAKLLHDAGLYVSVVNAKLVHGYGNNDLRRVKTDKKDSVKLANYGLDRWLTLPRYVPEEDTRLLLKNCYRQYRQYSKVQTVLKNNLISLLDTVFPNVNRLFSSPIRGDGSEKWVDFVAEFWHCRCVSEKSERAFTSKYLRWCRKHGYNFREAKAHTIYAEASGHIGVMPKSETTKLLVEQAVAQLRATSTALAALKHEMQSLASALPEYPVVMDMFGVGPTLGPQLIAEIGDVRRFYSKKALVAYAGLDAPPNDSGDVTGRHKSMSKIGASSLRRTLFLVMNVYLQNAPLDEPVYQFMDRKRAEGKAYRVYMMASANKFLRIYYATVKAYLESLEHTA

SEQ ID NO: 330638 - protein, 345 aa, unidentified
MSKLYVGVDWHKRTSTWVAINENREKVYEKVWECTPQAVQAAVMSLPATPTETKLAVEPVCGWRWMTDLCTQIGIDVRIANTIKLRQIADSGQKTDKNDALTLAELLRADYLPEAYKVPDDIYELRMLVRERAHFISQSTATKCRIHSVCTARGGHTTAEQPLHKAGRDTLYTKESGLYEMFLSLEEIDAHVTNLEKQIAETITETRVYKILLSIPGVGPVTAAAIYAEVGDFKRFRTPSALVSYAGIYPKERSSGDTKRYGSISKAGSKVLRYSIIEAAMRIRDTEKSHNLHTHYLAAKDRHKTPKQARIVVAHKLLTIVWYLINRGVNYDDHAVKPAQREITS

SEQ ID NO: 330639 - protein, 312 aa, unidentified
MVYAGIDVHRKRSQVSLIDVDGRELLNRNVDNGSEAMLDILEDLEPGTPVAFEAAYGWGWLADLLEERELEAHLVHPSACKAIASARLKNDKVDARMLAHLLRTELLPEAWIAPKEVRDLRVLLRHRASLVRVRTSLKNRIHAVLADEGLKVEGEKLWSDEGQQWLAGVSVRDMHRLVIDDCCGMLDALAIPIGRLETDIRKQAKTDPRVEALCVLPGVGLITAMTLVSEIGDINRFPTARKLCAWAGLTPSVRNSDNKVRHGHITKAGPAAVRWVLTEAGYHARRFPPFNSTFEAMTKRRGKHIAGVALTS

SEQ ID NO: 330640 - protein, 374 aa, unidentified
MKNVCGLDVHKDSVFMCILKENGDKIEEKFGVLTPELDRLRDLLISHSVGEIAMESTSIYWIPIWRVLYSDFNVKLVNPYFIKQLPGRKTDIKDAQWIATVLQKELIKGSFIPEPIIQELRLYERRIFYLNRNMQRAEQAIDLILQRCNIRLSNYVSDIGGKSMQKVIDALIQGRTEPEGLLALVHKRTRNKQGDDVIKAALTGIVSKADRNMLKLSREETLMYERQIEECYEQMREICKSYFDQEITLLQTIPGIREDAAMRIIAEIGVDMKAFLTASAIVGWAGLKPRNEESAGKIKGRKTLHGNKYLRVLLIQCAWAACRTKESRFFYKYHTLSKRMNHNKALLANTRKLLVIIWNILKKKQIYVSNMGAA

SEQ ID NO: 330641 - protein, 331 aa, unidentified
MTNATHETGADTRPVEYIGVDMAKARFEWGVHGARSTRGASNDPAGFEALLADLRERRVGLIVIEATGGLEHALASVLLQLGLPVAVVNPRAAREFARSMGHLAKTDAIDALALAHYAHTLAHKANQAGVLLSPVPAHLEALQAMVLRRKQLMDMRTAETNRRGGPMRVLRKSIDAVIKTLNKQIDALDKDIGAHLEQHFKELDKRFEDIKGIGPNTCAAVVAFMPELGQIKGGRAAKLVGLAPLNNDSGTSRGKRSTWGGRSIVRSALYMATLSAVRFNPVIKVFYLRLLAAGKPKKVALTACSHKLLRILNAMARSGQAWNPEIHGFTA

SEQ ID NO: 330642 - protein, 441 aa, unidentified
MAMRKRDDDLVFPSAAGIDVGGSSHWVAVPRHTCEEPVREFGAMTDDLGAMADWLLACGVDTVALESTGVYWIPVFEVLEQRGLKVYLVDARQMRYVPGRKSDVQDCQWLQRLMSQGYLRAAFRPTEEVCVVRAVARQRDVLLAEQASWVQRMQKALVQMNIQLTEVLSDVMGLTGQAIIRAIVAGERDPKVLARHRHSRVKASEQDIAKALTGNWRDEHLFVLRQALAMYDDIARYLGECDAKLQGLLSKLGQSKVDLGKTPRVGSKTRAEFDTRQILANWAGVDLTRINGLGLAAVMKILSEIGPDLSRFANVKHFCSWLGLCPGTKISGGKVLSSKTKRAGNRVRQALKMAAMSLSHSDSALGAFYRRLSGRMDKPRANTATAHKLARMVYFMLTRGESYVDQGQQHYEEQQRQRSIAALKRRAAALGFAVMPTTLPA

SEQ ID NO: 330643 - protein, 556 aa, unidentified
MFVGWDWASTTHDVTVLDDAGAVVDQWAPPHTEAGLADTPIRLARHGQPDQLPVAIEQSSGLVVDRLLAAGHPVVPVHASAFHAARPRWGAAGAKSDPGDSYKLADYLRTDGHRLRRLDPLDDATRELQALVRLREDHVKAKTAASNQLGALLDAHWPGAKQVFSRLASEIALAFLEAYPTPQAAARLSEVRLAAFCRRHSYRGGRSPAELLTRLRAAPTPPLGLAPETLTELVRAQVRLLRTLLGTIADLDRALAAGLVGHAKARLLAPMPRIGEVNLAQIVAEVGPILERVDTVEQAIAECGAAPVTRASGKTRTVGSAGPPTGEHEPRRTPSPTTPGTPHPGPPGCMPMPAGAASTTRMRSGSSLVLGCGSSGPAGTPTPPTTRPATAPNNASPPELDSGNSSARSLASCSVSWSGKPRPGSRRDGTSGERRGHAQHGRRSGSSRYTNDPRRSATQTAPPPTASSPRAGCRVMPEGAAPGWMHSSAPPTASGSVTKTAPAAAARPIGRPVGTISRTRPVAASIRATAPAISTIGSVVGPPTQIVPPSAATRSA

SEQ ID NO: 330644 - protein, 348 aa, unidentified
MAVYIGVDFHARQQTISYLTTEGGEIQQLVLGHEDPARVRVFYEQFAGQRVVVGFESSGYAAWFEELLEELGCEIWIGHATYIRQFAKRRQKNDRRDADLILELLVSGDFPRIHRYSRATRQMLQQLRYRQRLVKMRTMIVNMLLFMVGSRGHSFRSQLQSKRGQARLAQLPLPEPLAQQRDELLALLAQLDQKIKTIEGWLEQATAGDAAVQRLQTHPGIGLLTSICVRYTLECVDRFATTRKVSAFAGFDPMEDRSDERRRMGAISKQGSRWLRFFLVEAGQVAMRRDADLARVYQRVSRRGGHAKAKVAVGRRLLVRAFIMLRDEIDYAEFQRRGVAARSSRGSA

SEQ ID NO: 330645 - protein, 310 aa, unidentified
MDAIFVGIDVSKDRLDVHVLPRGEAFGVARNGQGLEELVERLRALSPTLVAVEATGGFETIVAAAIAGAKLPLAVVNPAQVRHFAQALGKRAKSDPIDAFVIARFAEAVKPEPRGIPDEAARLLAELVSRRRQILEMLVAERQREKRAANPRVTKSLARTIKMLEKELVEVDRDIDTAVRGSPVWREKEDLLVTFPGVKNILARTFLAEVPELGSLDRRRIASLAGLAPYTRQSGRWKGKSMIGGGRAVLRSALYMAALSASRCNPDLKLFYQRLLACGKPKMVALIAVARKILTIINAMLRDQKPWQHA

SEQ ID NO: 330646 - protein, 339 aa, unidentified
MGKIAVSMQVFCGIDVSAATLDAALQRMEREQCEHRQFANSASGHRELIAWLRKRGAAVRVALEATGIYSLDLALALDRADGIEVAVLNPKVANDFAKSLKRSKTDKSDAEALCEHSRRMKFVPWRRPSEVALQLRAIGRHLAALGQDRTRQSNRLEAARGSAATPRCVLQDLKRGMDAMEKRIVKLRRQAVQMIARDHELKRKFDLLIAMPGIAETSAVLLLSELAALNPEMTARQWVAASGLDPAHSKSGTSVDKPSRISRSGSKYLRRSLYMPALVGVRFDPHLKTFYRALQDRHKTKLQALIAVARKLLHAIFGIFKNGTAWDGAKLFPNLTPTS

SEQ ID NO: 330647 - protein, 414 aa, unidentified
MIAVGIDIGKRQHEACFMDEEGHEIGPSLRFAHRRGGVRLLQERLDALPESATVALEASGHYWIGLERWLRKGGIPVQVVNPLQVHAFREAGIRRTKTDRRDAWVLADLLRIGRTRPNYVPNDTILQLRELTRFRWGLIDQIGGAKRRVLAVLDQVFPEFADHFSDPFGVSARELLARGASAADFAAIELDELTALLEQASRKRFGREKAESIAKSARESLGVPGLEPVARLMVRSLLAQIAHLETQVAEVDAVAAELLAGVEQHLTSIPGVGPVLAATILAEIGDIDRFPRLTALVAYAGIDPSVFESGDFKGTRQHISKRGSPYLRRALYLATHSAQRQNTDLGDYLQRKLREGKSYKVALVATSHKLLARMYVVLKEGRPFEVRSGERRAHRKRREQSEDLLSLLRNNQQG

SEQ ID NO: 330648 - protein, 364 aa, unidentified
MNATTDSRHYTMVGCDLHENSMLLAIAEDGGEATFATCDKTPAGRQSMLALFARRAAEHGTTVHVVYEASSLGFGLHDEIVAAGWACWVLAPSKLPRSVKQRKIKTDKKDAALLLSVLRGHLLAGNELPAVWVPDRELRDDRMVVRMRLTIADKMTSAKAQIVSLLKQRGVEQPANVRTRWTRRYVTWLTGLSSSGQQGFGFCKGLASLLREIAWLKQEEDTLDAAVAALAETERYARAARALDALPGVGLLTAMVFLTGLGEMARFADRCDVAAYLGLVPTSHESGEANDRKGHITRQGTGRVRKVLCQAAWMMVRKDRAMRARFQAISKRNPNRRKIAIVAVMRHLAIAMWRCVRSVQQTAA

SEQ ID NO: 330649 - protein, 315 aa, unidentified
MMSTQVFVGIDVSKAQLDLAFRPEGQFCAPNDEGGCAQVLERLRAMPPTLVVLEATGGLEIPLTGLLAAAGVPVVVVNPRQVRDFAKATGRLAKTDALDAQTLAHFAEVMRPERRPLPDEQTQVLAAILARRRQLVEMLTAEKNRLGRAAQPVRNSLRTHIAWLERELNHTDHDLARAIRESPVWREKEELLRSTPGVGPVMTTTLLANLPELGTLTGKQIAALAGVAPLNRDSGTLRGKRTVWGGRAQIRATLYMAALVAARFNPVIRAFYQRLCAAGKAKKVALTACMRKLLIILNAMLKHRSPWRAELVHCA

SEQ ID NO: 330650 - protein, 346 aa, unidentified
MKQSNTIGVDLAKNVIQISEVAPSNKELSNRELSRLKFAEFLAKQKPALVAFEACATAHHWARVASSHGHTVKIIPAIAVAPFRQGHKTDQNDALAVAEAANRPNIKVAPLKSIDQQAMQAVHRSRELIIQDRTALSNHIRGLLLEFGIAIPKGFTYLRTRVPLVLEEADNGLPMAYRPTLQRMFQRFLALEQDLVFMDEQIASLVKSNDGCRRLLALEGVGPIGAVLLYATLGTGEAFKNGREFSAYLGLTPKQYSSGGKANIIGIAKRIANRRLRAVLIQGARSYVRQHKYTESSKDAWMFALKVRAGTGRTAVELANKNVRTAWAMLTQGTEYTRRPMKAVAA

SEQ ID NO: 330651 - protein, 348 aa, unidentified
MRIIGCDLHARQQTLAMLDTTTGEMMNLTLMHEGNGVREFYSQLPRPVLVGIEATGSMQWFLNLMDELGIECQVGHPATIRAAEPRKQKHDRRDADLILKLLAEQRFPAIWLPSKELLDLRALLLHRHQWVRIRTRIQNALQAIALANGLRRGPGLWSYDGQAKIAFLPLLPHASYRRSALQVMYRKMEEEIENLTQQVAEQAGQRSGARLLMTHPGVGPVTALATEVFLGDPKRFADGKALASYVGIIPREYSSGQRQRLGGVTKQGSPLLRFLWYEAGAHAVRRDPELKRFYLRKLIQKGLGKARVAVARKLGIRLWIMLRDEVDYQEFCRRGQMQQSGAACGGDA

SEQ ID NO: 330652 - protein, 448 aa, unidentified
MSSTRKKTWSRNENELDIGDTHVVAVSPDRDPNPVRRFQSFTTDLHDLSKWLHDVGVQSVAMESTGVYWIPAFEILESDGFEVILVNAREVKQVPGRKTDYNDAQWLQKLHQFGLLRASFRPSEHIATLRTCLRHRERLIEYSAAHIQHMQKALMQMNLQLHHVVSDITGATGMKIIRDIVNGERDAARLATHRDIRCKESEKTITAALTGNYRAEHIFTLKQAVELYDFYKGRISDCDIQIEQAMAKLNQNKRSPDVSMSKPRNRTKTRHEPDFALRAALYTLTGVDLTQITGFGPYTVLRLIAECSDDMSKWPTEKHFTSWLSLSPGNKVSGGKVLSGKTGRTKNRATTLLRIAAVNVGKTETALGAFYRRLAGRVGKAKAVTATARKLAILFYSLMKHGTSYIEPGAEYYETQYRNRVVMNLKKRAKRLGYELVAKPEPHCAEVS

SEQ ID NO: 330653 - protein, 322 aa, unidentified
MSVTVLGIDIAKQKFDVALLLDGKTKHKTCKNSAEGFESLSLWLGKQGSQKVHACLEATGNYGEDLAIYLHEAGHIVSIVNPARIKGFAQSELIRTKTDKIDAGIIARFCLAMKPETWRPPSLEIRSLRALVRRVDSLVDMRSQEKNRIGTAHESVILLIKEHIAYLDQEIEKIRKQIAELIEQDPNLKQKKDLLDSIPGIGKVTIPTILAELYDLEKFTHVREVVAFIGLAPKETLSGTSIKGKPRLCKIGHVRLRKALYMPALVSIQCNPVMLAFYNRLKEKGKNGKVIVCAIMRKLVHIIFGILKSGKKYDPNYKPAFA

SEQ ID NO: 330654 - protein, 411 aa, unidentified
MDVFCGIDWAEDHHDIALVDRDGGLVARLRISDDAAGLARLLELLAEKGDSAGDPVPVAIETPRGLLVACLRATGRRVYPVNPMATARYRDRHSMAGRKSDHGDAVVLANILRTDLHAHRPLPADSELAQALAVLARAQQDAVWDRVAAHNKLRSHLREYFPGFLAAFAAAKGGIMRPEARAILAAAPTPEAAAKLTLAQLRALLRKAGRSRSIDAEAQRLRGAFRQEQMRQLPLVEQAMGRQSLALLRQLDAACQSADDLEQAATESFSQHPDAGIITSFPGIGALTGARVLAEIGDDRSRFQDARGLKAYAGAAPVTRASGKSRSVTHRRVKNNRLAAAGYIWAFSAITASPGARAHYDRRRDAGDRHAAAQRNLFSRLLGCLHHCLATGQHYDEATAFPARSVTPAAA

SEQ ID NO: 330655 - protein, 410 aa, unidentified
MQVLYPRCCGLDVHKASLTACILINESNGKERRLRRFGTMTRDLNELAAWLTTHGVRKLAMESTGVYWKPIWNLLEDRFELMLVNAQHIKAVPGRKTDIRDCEWIAELLQHGLLRGSLVPREPVRELRDLNRNRAILVQQRATVSNRIEKVLEDANVKLASVASHVLGQSGRTMLQAMVDGISDPIKLAEMARAKLRNKIPELRVAFEGRFEERHRFQMGQLLDQLHFLDATVAEFEQKIEERSRPFQDKIDLLLTIPGIDRITASSMIAEIGGDIDQFPTAQHLASWAGICPGNQESAGKQYSGKTRKGSRWLRRVLCQAAWAASHTKNTYLAAQFRRLAARRGKQRAIIAVAHSILVAAFYILKRNEPYREAGGNYFEQVNPTALRRYLIKRLERLGHRVILEPAAAA

SEQ ID NO: 330656 - protein, 359 aa, unidentified
METQSNDFSYQGEKIYVGLDVHKTNWKVTILGEYISHRTFSQDPSPDLLFQYLNKHFPGGEYYSAYEASFCGFWAHDRLEELGIKSIVVNPPDIPTTDKERRQKEDKRDSRKIADTLRAGKLRGIRIPCVKNRQDRILIRTRSALQKDLQRNKNRIKGFLYFNGIEYPPRFKQRTSHWSHVFMQWVESIPMSEPSGQEAIQALIESSRNLRIQLLDITRKIRVLSKTDFYGQNVKLLCSVPGIGMLTAMTLLTEIEGIEYYQGLDQLNGYIGFVPTSKSSGEREKIGDITPRGKKHLRSLLIESAWIAARRDPVLMKKYHELCARMKPNKAIIRIAKKLTNRIRFVLLNQKEYKILVQK

SEQ ID NO: 330657 - protein, 344 aa, unidentified
MTTFDYIGFDIHKKTISFCAKAQDGKILDEATIPARRDTLVAWAKARPRPWIGAMEATLFTGWIYDLLKPLAKELKVAHPAMLKAIAASKKKNDKVDARTIADLLRCNLLPECYMAPCAIRDLRRVLRYRNLVVRQATRMKNRIAGLLMETGTSYNKERLHGKAYFSELLGSLRDVPRSVVELLRLSRGQLEFFAAIQRRLLKGRGEHPDLSERVARLQSIPGVGEIMALSWALEVGEVDRLPSIAQAVSYCGLTSAQHNSAGKEQRGPISKQRNKHLQTILIEAAKLAPRHNPQLAVVHERELQRGDRNQATLAVARKLVAYLMAVDKSGKPFEVRASGEEAA

SEQ ID NO: 330658 - protein, 322 aa, unidentified
MSQPGSLCVDIDVSKAILDIAASSAIEQFSVGNDSDGFDAIIAELRMYAIALVLMKATGGLETAIVCALQAEGFELAVVNPRQARDFARAMGYLAKTDSIDARVLSQMAEVLNRHPERERFIRALPDTECQVLTAMVVRRRQLITMLVAERNRLHPAHPLNRKSINIIIKALEDELARLDADMNSHIHSHFKELAKRLSSIKGVGTMTAAALLAEVPEQGNLSRREISVLVGMVPVNRDSGTMRGRRTIFGGRAGVRTALYMAALVATRFNPVIKVFYMRLLAAGKPNKVALVTCIRKLLTILNAMLRKNEEWNESYHHVAP

SEQ ID NO: 330659 - protein, 320 aa, unidentified
MTLFSAIDLHSNNSVVVVIDEQDRILLQKRYPNDIQLILSALEPFKNQLHGVAVESTFNWYWLVDGLQAAGIDACLVNTVAVQQYSGLKHTDDHSDAFWLAHLMRLGILPTGYIYPASERPLRDLLRKRLQLVRHRVTFMLSAQCQIWRCTGVKVENTLIKQADGQLLRYHDNPELRMALHSNLAILRTLNAQIEAIEQRVKEQIALKPEFQSLLSVDGIGDILGQTIALETGDIKRFSTVGRYASYCRCVDSKRLSNGKSKGQNNRKNGNVYLGWAFVEAAHSIIRHNKTGFWGLSVLKRHNPLQPLSTVASRGVLTFS

SEQ ID NO: 330660 - protein, 314 aa, unidentified
MRTQVFVGIDVSKAQLDVAFRPEGRFSAPNDEAGCAQVLERLRAVPPTLVVLEATGGLEIPLTGVLAAAGMPVVVVNPRQVRDFAKATGRLAKTDTLDARTLAHFAQVMRPELRPLPDEQTQALAAILARRRQLVEMLTAEKNRLGSAPKPVRKSLRTHIAWLERELRHTDSNLAHAIRESPVWREKDALLRSTPGVGPVMTTTLLANLPELGTLTGKQIAALAGVAPLNRDSGTWRGKRTVWGGRAQIRATLYMAALVAARFNPVIRAFYQRLCATGKAKKVALTACMRKLLIILNAMLKHRTPWRTELVQCA

SEQ ID NO: 330661 - protein, 343 aa, unidentified
MTKISTIGLDLAKNVFQLHGVDGSGAVVLKKQLRRGALEKFFAQLPPCLVGMEACGSAHHWARVIGRYGHEVRLMPPAYVKPYVKRNKNDGRDAEGICEAVGRPTMRFVPVKSVEQQATLAVHGTRALLVRQRTMAANALRAALSELGMVAAQGYEGLRELMARLEEPGEEIPEVMRGALLVLARHWQALDADERLLERQIAKAARSDQDARRLMEVPSVGPIIASTVLAKVPDAKVFRSGRDFAAWIGLTGKDHGTGGKHRPGRISKQGDRMLRAMLICGASAYLRHQKARGVSDPWLRELLARRPYKVVMVALAAKTARIIWAMLAKGEPYRDRASASAAA

SEQ ID NO: 330662 - protein, 348 aa, unidentified
MNYTQNSKIAQVTERTLVVGVDIGSETNFARAFNWRGQELSKKVYRFSNILEGSQGFLEYLGRYQDMASAEQIIVGCEPTGHYWFNLARYLNAQHINLVLVNPYHVKQIKELDDNSPKKTDLKDPKTIAKLAVDGRYSYPYLPEGIYAELREAVSSRNRIVMELNAATNRMKRWLKIYFPEYLTVYKNFSAESGLTVLETAPLPKDVVKLGAEGVNRLWRDKKLRAVGMKRAQTLVEAAHNSIGLDGGACARMEMQMLLEDYRAKQVQPAKVTAVLEAETLEVPYAEKLPSIQGVGLITVAGFLSEVGDIRRFDSPKQIQKLAGLELKENSSGKHHGRSFISKRAEKS

SEQ ID NO: 330663 - protein, 402 aa, unidentified
MFEIGDVGVFLGLDVGKTAHHGHGLTPAGKKVFDKQLPNSEPKLRTVLDKLAAKFGTVLVIVDQPASIGALPLTVARDAGCKVAYLPGLAMRRIADLYPGEAKTDAKDAAVIADAARTMPHTLRSLELTDEITAELTVLVGFDQDLAAEATRTSNRIRGLLTQFHPSLERVLGPRLDHPAVTWLLERYGSPAALRKAGRRRLVEVIRPKAPRMAARLIDEIFDALDEQTVVVPGTGTLDTVVPSLARSLAAVHEQRRALEAQIKALLEEHPLSQVLTSMPGIAVRTAAVLLVTVGDGTSFPNAAHLASYAGLAPTTKSSGTSIHGEHAPRGGNRQLKRAMFLSAFAALHDPASRTYYDKCRARGKTHTQALLRLARHRISVLFAMLRDGTFYEPREPEAAVA

SEQ ID NO: 330664 - protein, 413 aa, unidentified
MEMVRNKVCGADIHKKFLVATILSIDGTKISERFGMKLDDILKFKEWVLENNCEQVAVESTGVYWVPIYTVLEDKIEVIVANAYQIKHTPGRKTDQRDSEWIAELCLKGMIEPSRIFPKEDRELRTLTRARENLVNNSTQMKNRIHQALESSCIKISSVLSDIFGKSGRYILDGLLEGKTIDEILVGIKSKKIRKKDQELREAIKNSLDLAQILVIRICLELMEEIQKKIKNLDTEIMSRIERMKEDVEIAMSIPGIAFTSASSILAEIGNYRDFENGNKLAAWCGLVPAVYESANKRIIGSITKQGSKHVRRMLVQVAHAISRTRNSRLKSFFLRLKAKKGTKVAVVALARKVLCILHHLLVNREMYEESGNLKPKPLKFDRTSSPIQITEQDMIDTLVKAGYIIKKMDIGG

SEQ ID NO: 330665 - protein, 338 aa, unidentified
MNKRDIRRPDDSMRMFAGLDVHKKYTEVAIVDEEGVITEQERIENEPGLIEEFSNRLSNASMVLESSSTWYWLYEILSKRHRVVLSNPAKTKAIASAKLKTDKVDALMLANLLRGGYIAESYVPSRRVMGLRELVRYRANLVRMRGTVKNRVHAYLLMNNIRIGYSPFTKGFLEELRNVKDARVQGYLRIMDGLNLEIHEASKIICSEALNDEGARLLMTIPGISFYSALLLVSEIGDVDRFPDSAHLVSYAGLASSTRSSGGSTYHGRITKAGSPYLRWVLNQCTWVHVRNQPEGGVAMFYARLSKKKGRSKAMVAASAKLLKIVYWVLKEKRSYHG

SEQ ID NO: 330666 - protein, 312 aa, unidentified
MESFVGIDVSKGQLDVAVRPTQKRWSVANDASGLAQLVMELQRLDSPLVVLEPTGGYERELVSSLVRAKVCFVVVNARQVRDFAKAVGKLAKTDRIDADVLAHFGEAVRPEPRRLPDEDTAELDALVTRRRQLVEFRAAEMARKHLAPEVVRPSIDKVIEFISKQIDDVDGRFRKLLRNTPAWREKDDLLQSIPGIGPIVSCTLLAQLPELGSLNRQKIAALAGVAPFNNDSGKRGGKRQTWGGRASIRSVLYMAAVAGARHNPALKRFYQRLIGLGKAPKIALVACIRKMLTWANAMLRDGKKWNPAQLAA

SEQ ID NO: 330667 - protein, 419 aa, unidentified
MTQRKDSKIIEVVHPICCGLDVHKKKISACILFPEKGGSNHCDIKEFGTFTDDLQRLRSWLLEHDCPIVAMESTGIYWRPVHNVLEGVIHVILVNARDIKNVPGRKTDISDSKWLAGLLQHGLLRGSFIPSKAVREWRDLTRLRRKYVQTLADYKKRTQKLFESANIKIDSVVSDLFGVTGRNLMNLLVSDRQRFSLSDIAGCVRGKLKGKENELYRSIQGFFSDHHRFILKQLLKTVAMLEEEIAVFDHQIHQLMEDQKELLERMKKAAGISDVSSCDILAEIGHDLSSFPTGESLVSWSGLCPGNNESAGKRKSGRSPVRKHYLKTIMVEVAWAAIKKKDSYFKDKYYRLKARRGAKRAIVAIAHRILLGIYFVIRDGVEFRDLGADYLTQRQKTQKMSYLRKQAQLMGYNLVPQTT

SEQ ID NO: 330668 - protein, 343 aa, unidentified
MQSITTIGLDIAKSVFQVHGVDADGLVVIRRQLKRRYVLAFFEKLPPCLVGIEACASSHHWSRELQAFGHTVRLMPPAYVKPYVKRHKNDVTDAEAICEAVTRPNMRFVATKTPEQQSCLTLHRTRHLFIRQQTALINSIRAHLAEFGIIAPVGRKGVTELLHVVADPGDKRVPEVARACLAALGTQLLHLKQQILEFDRLIMAWHRSNQTSTRLHYIPGVGPMLATALVASVADPRTFRSGRNFSAWIGLVPKQHSSGGKDRLGSISKQGDRYLRSLFVAGALAVIRYAKIHGTKHRPWLAALLARRPTKVAAIALANKIARMAWAMMAKGERYKQPVALAA

SEQ ID NO: 330669 - protein, 408 aa, unidentified
MDRITCGIDWAEGHHDVAISDSAGTVLARRRIDTGVIGFTELEELFAAHSHEPGTVPVAIETDKNLLVVALQAAGHPVYPINPRAVARYRERYGQAGGKSDPGDARVLADILRTDVHRHRVMPRMSANALAIKALARQHQEAIWAEHQTISRLRSVLLEFYPQALQAFPNLKHKAALAVLAAASTPTQGKQLSRRSLVTLLHRCGRRNDPALVDRVLADLKTPSLHQPAAVETALGLTVNGLVHVIAAMQSTVHSLEAALATEFDQHPLAPVLRSAPGLGPVLAARVLAEVGDDPDRFATAQGLRAFAGTAPITRASGRSRFVNARRVRNKRLADACHWWAFSALTKSTGARTHYDLRRAAGDTHNAALRNLANKNLGRLWWCLIHEQLWDETHAWPSNNDLSQPAAA

SEQ ID NO: 330670 - protein, 397 aa, unidentified
MKGFCISLDVSKGSSFYQGFKGFDEPITKPKKIEHNLEGFKELLNLKEKIRKEYNEECVVIFESTGVYHRSLQTYLDEHDFKYTIISPLLSAKVRKSDIRGTKTDSKDCASIAKVFYLKELRIYSKVDEIYADLKEKSRYYDFLMDEMKRWKIEFRRLLDIIYPGFDKVYDDLYGDFIQTFLLEYSHPEIIRKRRLDTIAKFLEKHTCHKEAYCIRQAQTLKEYAENCASGCSSKSYLVNQFDTVIHNLNAQIKHLKIVLEEIVELAKTLPNYDSIRSIPGIGDSLAARILAEIGDTKRFNNASQLVAYSGIDPQIYQSGQISGLHLKISKKGNKKLRCLLYLAVTCMIRTSRDTVIVDFYKKKKADGLASKSALVASMNKLVRIIYSLCKNGCLFK

SEQ ID NO: 330671 - protein, 382 aa, unidentified
MRCAGLSPRNGLGEDRNHGGADMAQVRTWVGLDVHAAKVVAAIADSESGELGVQRMGGKTEQVAEFCAALPAPVRVAYEAGPTGFGLARALAARGIACTVAAPGKIERPTQDRVKTDRRDAERLARLLMIGGLHPVRVPTPAEEAMRDLVRAREDVRGDLMRARHRVAKLLLRHDLRFDGNNWTQRHLDWLGRVELPEPVAQSVLLDGIGSIDALLVRRESLESQMASLVEGSPWEQQVAHLRCLRGIDTLSALGLCAEVGDFERFTRPAQLMSYLGLVPSESSSGEKRRQGAITKSGSRHARRLLVEAAWHYRRAPRKGRELKRRQEGQPQAVCAISWKAQQRLHRSWVRLDSERGKRRTLCAVAVARELSGFCWAVATAE

SEQ ID NO: 330672 - protein, 353 aa, unidentified
MQYIGCDFHPSFQMIAQLDKKTGELVRRRLGHGEGQGEVQRFYQALPGSWVVGVEATGNTYWFERLLEKLGHQMWMGDAGKIRQQDGRKQKHDKRDARLILRLLLEERFPRIWIPSVAERDLRQLLLHRWHLVRMRARIKNQLQHIALNQGLQKKSKLWTKAGLEQLRKLELEPWARQRRDELLEMLEQMVKRIEPLDQAVEQAAAAQPRTSRLQTHPGVGPVIALATVLTMGEVGRFPDSRSWVSYLGLNSSEKSSGEKRWLGAISKQGNPFLRHLLVEGASSAARGDKDLGRVYARLKARKHHGVAKVAVARKLAVRLYWMERTEKSYPEVVRMQGSLSHPVVSSHGRDLE

SEQ ID NO: 330673 - protein, 342 aa, unidentified
MESAVTIGLDLGKSVFQVHGVDAAGAVVFQRRLTRSKLLAFFAKQPACLVGMEACAAAHHWGRELRKLGHLVRLMPPRYVKPYVKRQKNDAADAEAICEAVTRPSMRFVEIKTCEQQGTLVLHRVRLMLTRQRTQLSNAIRGHMAEYGLVAPVGRNGLQRLITILDNPDDDRVPEMARVSLAPLVTQLGLLNDQVLENDRRVRASARSTEVGVRLMEVPGVGPVLASAIVAAVPDPAAFKTGRDLAAWIGLVPRQNSSGGKEKLGGITKQGDRYLRQLLVIGALAVIRYAQRHGTKKPWLVQLLSRRTPKIAAVALANKMARMIWAMMMTGERYREPTVAVA

SEQ ID NO: 330674 - protein, 427 aa, unidentified
MSYRLAAVDVHKKMLAVVIADVAVEGNYEFERRKFSATPAQFQSLAEWFVERGVEEVVMESTAQYWRPVWATLERYWKPVVQKREGAGPKSGTLHLCQAKSNKGPKGRKNDYGDGERMVKRLVAQELTLSFVPDPEQRLLRTVTRRRYQLTRAKVGFKNQLESLLEQAHLKLSSFVSDLLGVSARRMLKAIAKGETDPAALAAMADRNLRATPEQLRDALGACAEMNGVFRRLIQMALDELDVVESHIEKLNQEAMELLKGQEEVVERVAQIPGFGVASALQVIAEVGIDATAFPSEKALASWVGVCPGNEESAGESQSTRSPKGNRHMRRLLNEAAQSAVKVQGGVFDVTFRRLLPRMGYKPAIWAIAHRLCRVLWIILHKRVRYEERGPAVSAKSKRVRTQRMIRELRKLGYQVVGGPVPANTRA

SEQ ID NO: 330675 - protein, 338 aa, unidentified
MELSVIGMDIAKNVFQLHCVDRQTGEIERIKLRRNEVLPYFARRTPALVAMEACGGAHWWARQLQQLGHTVRLLPAKAVRPFVLRNKTDAADARAIWTAVQQPEMKTVAIKTEYQQSILALHRMRAQLLKFRHMQTNAIRGLLLEFGHPLPESYLALRKAFPTVMATLDKQLPGILIETLREQWARVQSLDNEIALIEGRLKRALAETPTCQMISDIPGVGLMTATAAVATMGEPASFKTGREFAAWLGLVPRQTGTGGRIRQLGISKRGDAYLRTLLMHGARAIIARRTYSDWVAGLIARRPYSVVIAAIANKLARTIWAVLATGKRYDGAAFAAAI

SEQ ID NO: 330676 - protein, 343 aa, unidentified
MHVNTIGVDLAKNVFQVHGVDSAGKVVITRQLRRKQVLEFFSKLPGCLVGMEACGTGHHWAREISKLGHTVRLMPPSYVKGYVKRSKNDAADAAAICEAVTRPSMRFVPIKSTDQQALLMLHRTRDLLIRQRTQLINALRAHLAEFGLVAETGREGLAQLGAIITDESNHEALPSAMKQALQAIVDQLAALELQVGALDRAIHAHHRANDMSCRLETVPGIGVIGATAIASTVTDPSGFKSGRDFAAWIGLVPRQHSTGGKERLGGISKQGDRYLRRLLVIGATAVVRQARLHPQKHPWIMRLLAKKPAKLVAVAVANKMARIAWAIMAKGGYYRAPVLAAAA

SEQ ID NO: 330677 - protein, 343 aa, unidentified
MQTIKTIGLDIAKSVFQVHGVDAGGQMVIRRQLKRRFVLSFFEKLPPCLVGIEACASSHHWSRELQALGHTVRLMPPAYVKPYVKRQKNDSTDAEAICEAVARPNMRFVPTKTVEQQSCLMLHRARHLFIRQQTAVINSIRAYLAEFGIVAPVGRRGIEQLLEVTADTADHRLPELARACLAALGDQLRALKVQILQFDRRIIAWHRSNATSKRLDAIPGVGPALATALVASIADPTAFRSGRDFSAWVGLVPKQNSSGGKDRLGSISKQGDRYLRSLFTAGALAVIRYAKIHGAGHRPWLTGLLARRPTKVAAIALANKLARMAWAMMARDERYREPAALAA

SEQ ID NO: 330678 - protein, 418 aa, unidentified
MEAIHDRVAGLDVHKKTVVACVRLTTGKRMERECRTFDTTTAGLEALLAWLEQTGCTHVAMEATGVYWQPVWRILSEGEFELILANAAHIKNVPGRKTDMNDATWIADLLACGLIRASFVPAPQLQDLRALLRTRKQAVREQTRCVQRMQKALEQANIKLDSVISDLLGASGRRMIEAMIAGESNPEVLASLADRRLKATRAELRDALRGRLSETSRFLLQTHLKNWDAQDASIKAIDQQADRLIGGFEQAARFRLLIMLLCQVPGVSKLAATSILAEIGIDMSRFATAGHLVAWAGLCPGQNESAGKRKSSRLRKGAPWLKTMLVQCAWAAKRQKNSYYRAQFYRLSSRRGPQKAICAVAASMLTAIYHIISRGTAYQDLGADYFDRRSADHKARRLVAQLNKLGFDVQIQPAAEAA

SEQ ID NO: 330679 - protein, 317 aa, unidentified
MDIKLAIGIDVSKKTLDIDVVPQGGPRQFSNDEKGIALLVEHLTELNVNGEVDRVVMEATGGYETPVSMALAAAGLPVVVINARQIRDFAKACGILAKTDRLDARVIARFAQQIRPPVRPLPDEMQREFADLLDRRSQLVVMRAQEKTRLDKAPAVAQKSLKEHIAWLDARIKSTDLDMTHRLRTSEAWKNKVDLLDSMPGVGKVTIFTLLGRLPELGTLNRQQIAALVGLAPFNDDSGRRRGQRYIRGGRADVRKALFMAAVTAMQHNPAITEFYERMRAAGKPFKVAIVGCMRKLLTILNVMVKTGRPWQNNRPA

SEQ ID NO: 330680 - protein, 345 aa, unidentified
MNYIGIDLHKRFSQFTVLNEKGETIDRKKVDNREEEILSHLNNFDLPSKAVIEATFAYGWLADLLSSNRIEVMLAHPQKVKAIASSKIKTDKVDSEILAKLLRADLIPQAYYFSKEEREIKELLRCRGSLVGLKTQIKNKIHSLLHKVNVRDDEKYTDLFGKEGRRFLDNLSLGEKSTFALKEYLSILDFLEEKIKETSKEIKEVFEKDNQAKFLEQLPGLGYYTSLILSKEIGNIRRFRREKNLVSYAGLAPSTFQSGEHQRHGRIKQGNKYIRWVLIEAVPKVIKKDKILRAFYLKILNKKGHNKAKIATARKMLAQIWYLLTYRKIFTDPETGSPVFFSGHS

SEQ ID NO: 330681 - protein, 351 aa, unidentified
MMIIGVDYHPSFQTIAFFVEETGECGEQELNHSDGQAERFYRDLKQRGICVRVGMEATGYSRWFERLLAELGFELWIGHPAQIKAKRVKKQKYDREDARLLLRLMRENNFPQVWVPGPENRDLRQLLWHRHRLVQMRTRIMNQLQALAMNEGYRWKKKLFSEQGRAQLEKLALAPWASRRRQELLELLDRMNPTIEELSAAVEREARKRPEVLRLMTHPGVGPLTALAYVLIIGTPTRFQCGKQIGTYVGMIPSEDSSAGKQRLGHISKQGSSLLRFLLVEAAHAAARIHPDWRRRYVHLAMRRHKNIAKVAMGRRLAIKLYWMWRTGCEYSQSVKCGSYAGQLGTGHGVK

SEQ ID NO: 330682 - protein, 402 aa, unidentified
MRFVGIDVAAERHMVAVVDGTGAILLRATPVTEDTPGYQQLLELLGAAEDCLVAMEATGHYWRNLYAALVTAGFEVALLNPLRTRRFAEEELQRTKTDAIDAVGIARFAAQKRPAVTQLPEPALLELRELVRLKQQVVQQLGDRVRQLHRAVDLGFPEFTRHVRTLGSELATTILAHYPTAAAFRSVSVKKLARLVYDGRHQVGEELARALIEAAPQSVGAHHGEPYRLQVRYACEDIDLLRRRLRALESDIEQRLTQHQVGQLLTTIDGIGPQTAACIMAEVGDPARFASLRALASYVGVIPRLRESGKRKKTRTAPALPLGNARLRRALWMPTLSAVRVNPWLRAYYQRLRAAGKPAKVALVAVTHKLLAAVYSVARHRRPFTLPPGFPPLAGAAVLPAT

SEQ ID NO: 330683 - protein, 341 aa, unidentified
MNTTHVSVDLAKAVFQVAVSHTPGRVHRERRLSKAGFRRFFAEHEPVQVWMEACGTAHHWGRELQSLGHQVSLLPPAVVSPYRTGNKTDRADTKALLEAARNKKIHPVPVKSVEQQAVTALHRLRSGYLATRTARINAVRGHLREFGISIPVGARHVVPRARAALEEDAVPDFLRRVLFEALEEIGDLKEKAESIRKELARLAEHMPGARNVMTVPGIGVLTATALLAFVGDPYRFRSGRRFAACLGLTPREHSSGNVRRLGRITKHGNSYLRMMLIHGARSALRAASLSEEPDELRTWALELKRRKGYNLAAVALANKLARICWRVWCDDRPFESRKAAA

SEQ ID NO: 330684 - protein, 418 aa, unidentified
MGKGWHHFSKFKKQEILKMNAVGIDVSKGKSTIAVMRPFGEVVASPYDVGHTESELKELARFLKSLPGETRVLMEYTGHYYEPIAQYLHEAGIFVSVVNAILAHDYNGNSLRKVKTDKIDAVKLANMAIDRWLQLVEYVPEDEIRQTLKICNRQYNQYNKLKTMLKNNLIALLDQTFPDVNKLFKSPARKIDGHEKWVDFALKFWHCECVCGVSEKQFKDKYERWCKRNGYYYTSDKAEDIYAEACGNIGLLPMCESTKVLVTKAIVQLQAIEETLAAIKHEMQKLASTLPEYNTVMALYGVGEVLGPQLIAEIGDVNRFKSKKSLIAFAGIDSPADQSGQVDNKSKSITKRGSASLRKTLFQVMCVILQNSPEDEPVYTYLDKKRSEGKPYRVYMIAAANKFLRIYYARTKLALVNT

SEQ ID NO: 330685 - protein, 400 aa, unidentified
MISVGIDVSKGKSTVCLLKPYGEIVCKPFEVQHTEKDLEDLANLLQKLDGEIKIVMEATGIYHLPILTFLLEKGFFASVINPLMMKRFSRDNRLRGAKNDRLDSVMIASYGIEKWYKLKKYEVNDRIYTELRLLGRQYYRFMQTHVKLVQELTHLLDYTAPGLKAMFNSWNEHSNRDKLSDFVERFWHFDLITSLSREEFVEQYLLWAKEKKYHQSRSKAEKVYDLASNGIPTLSSHTPSTQLMIQGAINVLRIVNNSLYHILSRMKELAKSLPEYATVRSMGGVGDSLAPRLIAEIGNVKRLRNGHSLVALAGIDPPPYESGQFVGTHRRISKRGSPILRKIGFEVMRMLKSHKEPEDNAVYNYILKKEAEGKNKKLSKIAGLNKFLRIYYARVMEVYQ

SEQ ID NO: 330686 - protein, 339 aa, unidentified
MKLYSGMDLHSNTTHVAIMDETRNRLIDRNLRNDRKLILNFVDPYRANLEGIVVESTYNWYWLVDALQEAGYRVHLAHPVANQQYRGLKHSDDRHDAFWLAELLSLGILREGYIYPKGARPVRDLLRKRLQLVRYRTALILSVKNMVLRNQGVLVEASQIKRLTQDVVAPVLKGDEALALSGRTSKEVIDCLTRQIQQIERWVLQRIRLEEPFLKLLTLPGVGEILALTILLETGPIERFPKVGHYASYCRLVSSQWTSNQKIKGQGNVRNGNRYLAWAYSEGSEHARRYDGACRDFYNRKLNQSGINVAHKALAHKLARAAYFILRDHGLYQEDKMFS

SEQ ID NO: 330687 - protein, 354 aa, unidentified
MRKMQDYVVRGKRVFVGLEDAKRTWRFCVRSERMIVHELSMPGQAANLLEYLRGRYPECEVTVMYEAGFHGFWLHDELVASGYQCVVTPPHLVREAKVSKVKTDKGDARRLAQMLESGDYQACHVPSRERREDRQLSRTLSDVQEDIVRTKNRVRRLLEFHGLDQGLKAGAWNKGDYERVWSMLPTLSEPLRVSLEIYQRGLVSLEASQKELLAQLKTKASERYRLPVELKASCPGVGWLSAIRFTLEWGDLSRFESGKPLAHYLGLTPGEYSSGETKATGHITGQGSPQVRAWLIQCAWRAIRLDPVLLAKFGAVWRSSGSKKKAIVAVAHKLALRLRAVELSGQPYEIGVIQ

SEQ ID NO: 330688 - protein, 340 aa, unidentified
MTWTVVIGIDTHRDSHSACALDRLGRARGEFELAAEPAGYESLWRWACSLGEPAFALEGAGSYGAGLARHLTGCGASVYECERPTRRDRRRGKSDQLDAAAAARRLLSGEGLAELRGGGEREQLRVLLVERRSARQAQTAALNQLHALVITAPPRLRSRLERLRGLPLARRAAGLRSSEGPAPVLRRLGRRVLALAAEAGEVDAELARLVAAQAPALLEECGVGPICAAQLLVSSGDPGRMRSEAAFAALGGTSPVDASSGRQQRHRLNRGGDRQLNAALHVIALNRKRAHAATRAYYERLLASGKTKREALRCVKRMLARHFYRQLRTIRPAALVEAAP

SEQ ID NO: 330689 - protein, 429 aa, unidentified
MSYRIAGIDVHKKMLAVVVSDVEIESEYEFERRKFSSSPEQLRSLAAWLLEQEAEEVVMESTAQYWKPVWEALERYWKPLCEKREGARRKSGTLHLAQALSNRGRRGRKRDFPDAERLVKRLVARELTLSFVPEAEQRLWRTVTRKKYQLRCDRIRLQNQLESLLEEAHIKLSSLVSDLLGLSARRMLKAIAEGATNPVTLAALADERLRATPEQLCDALGACTELHAVYRRLLKMALEELRLIDEQISRLDQEMASLLSEHQDAVQRLAEVPGLGVDSAQQIIAEVGPTAATFPSEKCLSSWVGACPGDDETAGVNYNHRSPKGNRHMRRLLNQAANAAARTKGSIFELAYRRSVPRLGHNQAIGAIAHRQCRLIWLILHQGVRYEERGPAVNKRSKQLRTWRMIRQLRNLGYRIEPPNPQPSQASAQ

SEQ ID NO: 330690 - protein, 381 aa, unidentified
MDATTVAVDLAKDIFEVALANRAGRIIDRRRLTRRQFERFVDGVPTQTEVIMEACGTAHYWGRRCQARDLVVRLLPVQYVRPYVRRNKTDRTDTEALLEAARCGGMQPVPVKTVGQQTLQALHRVRTQWQAARTARINVVRGLLREQGLPVPVGARTVLARVAGILEDAEIALPDLLRHTVALVVDEIRALETRIAAIDRQLAQMARTHPIAVRLQQIPGVGVLTATAMVGAVNHIHAFRRGREFASWLGLTPRESSTGGRRHLGRISKRGDGYLRCLLTYGARAVLLTAQRTARATPQRVTHLQQWAVSVAARRGHNKAAIALANKLARIIWAVWHKEIDFQSQPRDTAAAQGNGAYPTRCSARIHDHGVTGRTGTEPGR

SEQ ID NO: 330691 - protein, 396 aa, unidentified
MYNLFVGIDVSKSSFSVTGLDPKGNVCFSITANMDCNGFSELFKSINSVCNDSSKVLAAMESTGCYHINLFSFLCSKGINTVVINPLLISNFAKLSLRKTKTDKKDSLTIAQFLLVHKDSISQFSIAQDIKDLRDIARERESLCNLIASTKNEIKRILQFTFPEIESLCNVFTQTMLYFLKEFPSARVIKAAKPKAIAQALENFSRGRKINITADDIIKAAKSSVASFSLAKELILPEKISTLLHLMERLDKMTDMLSSFCQSMMIQELEIITSIDGIDTTTGAAFLAEVGNISNFPSHKSLIAFAGIDPSVFQSGKFEGTSRISKRGNRHLRRVIYLMTVNVIRVNAFFKAYFLKRKQDGLPYRKAVLATAHKLVRTIFAMLSHKSFFHVKENSL

SEQ ID NO: 330692 - protein, 258 aa, unidentified
MTDGWVGIDVSKAWLDVDLDGDGGLRVRNDAAGHGELRARLDGAMVAGVVLEASGGYERPVQAALSAAGLAVALVNPARVRDFARATGRLAKTDRIDAKVLADYGAYLRPASSPLPGSARARLHELLAYRRQLGHEIVARASQLRLYGDPTLRERAEAALARLKAERRELEQLMRSAIAANAALATRCALLSTVPGVGLVLAATLLAELPELGTLDRRRIASLVGLAPFPRDSGTRPTGPAFGRPEDRLWPSRDPGRA

SEQ ID NO: 330693 - protein, 456 aa, unidentified
MAHRSKAKGTRRRTKLRVIYTRAAGIDVGSTFHVVAVPPELSAEPVQTFQSFTGDLYRLASWLVDIGVTTVAMESTGIYWIPVFDILEAHGLEVLLVNAQHVKTVPGRKTDVNDAQWIQQLHTYGLLRGSFHPAQDWSALRVYLRHRERLVEYAAAHIQHMQKALMQMNLQLHHVLSDITGLTGMKIMRAIVAGQHDPAVLATYRDARCKASEETIRAALTGHYRREHVFALRQALELYDSYQARIEACDQEIQFTLESLQNDAIAIETLPAARHKKQQSHEPRFAVRAALFRVLGVDLSQIDGFSAYTALKLVGECGMDMRRWPTEKHFTSWLTLAPGNKISGGKVLHTKTRRSANRAAAIFRLSAMNMGQTNTALGAFYRRLGARSGKAKAVTATARKLAVLFYNTLRYGMAYEDPGAAYYEDRYRQRVLKGLHRRAKQFGYQLTEVGTLEGVS

SEQ ID NO: 330694 - protein, 340 aa, unidentified
MQVTTIGLEIAKNVFQLHGVDAAGRVLIRRKVRRNQLLPLLAAVEPCLIGMEACATAHHWARELTVIGHDVRLMPPAYVKAYVKRNKNDAADAEAICEAVRRPTMRFVAVKSADAQSILMLHRTRHLLVRQRTAQISALRAHLAEYGIIAPKGRAHVPGLIASINDGACAIPQMARQVLRLIAETIAGLSAQIRAIEAELMTWQRSHKICQRLSTIPGIGAITATALAATISDAKVFRSGRQFAAWLGLVPRQNSSGGKERMGAISKMGDRYLRHLLVVGATAIVRYTRQKTTTVSRWACSLLERKPARLVTVAVANKMARIAWAVMAREENYRDAPDAA

SEQ ID NO: 330695 - protein, 336 aa, unidentified
MFQLHGVDSREQPVLRKKLKREQMLSFFRTIAPCLIGMEACSGAHYWARELQKLGHTVKLMAPQFVKPYVKANKNDAKDAEAICEAVSRPTMRFVTIKTIAQQDLQASHRIRKELVGQRTAKVNQIRGLLAEYGIVVGQAIEVLRKALPCLLEDAENGLSADFRILLKGLQEDLLALDERVAELDKRIHTLAHTHEDAKRLLQIPGVGPLTATAIISAVGDGSQFKRGRDLAAWIGLTPRQNSSGGKEQLLGISKRGDHYLRTLLIHGGRSVLRMAGSKDDPRSRWLKGISERRHKNIAAVALANKNARIIWALLTQKTDYEQKAGELSSGESVCA

SEQ ID NO: 330696 - protein, 357 aa, unidentified
MKRDIKVISYVGKDVYIGIDVHKKTYVVVARVEGEVVKKWTTAASPQSLVEQLLKYFAGATIYTAYEAGFSGFVLHRELDKHGIHNLVVNAAGVEVAVNDRVKTDKRDALKLSTLLEAKRLKGIRIPSEEEESHRILSRTRQQLVEDRTSVKNKIRMKFHQFGLIEVDETHSMTHTLVKELLAKAPSKELTIAINAYWSVWRSLDEEIKKIENELKNQAKEDGYEKTYQSVPGVGPQSARILSNELGNMSQFKNERQLFSFTGLTPSEFSSGEMVCRGHITRQGNSRVRGILIEIAWRAIDKDPALAKFFNGLFPRTGKTKAIVAVARKLIGRIRAAFKKARIINWDIHVLSLRQFN

SEQ ID NO: 330697 - protein, 462 aa, unidentified
MPGREDSETGESSRRQLQGLPVIRRNVAGIDLGSERHWVCAPTRDGSGREIASFGATTAELLRLAGWLKARQVESVAMESTGVYWIAPHEVLEAQALQVLLVDTRQLARVPGRDKKSDPSDCEWIQRLHSCGLLRGSFRPEEAVCMLRTLVRDKANLVAESGDWLRRMQKSLDQMNVRVHRAVSDIDGVTGMAMLRAIAAGERDAQKLAQLRDRRCSKTQQEIAEQLTGHWREDHLFSLQQALKMYDAVQERIAAYEQEILRQLGEMEEPGQQGQTAPPLHNANKTKAIKKRGQESKRQALYRMSGVDITQIDALGVETVEVVLSEYGPDLSRFPTEKEFVAHVTLAPRVPSSGGKPLKKKKRNSASTRVAAALRMAALSLRHSQTALGAYYRKLAQRLGGDVAVFATARKLATLIYRLLRWGQPYVDEGAAAYENRYLQQRIKSLTAKAKQLGYELTAVNA

SEQ ID NO: 330698 - protein, 416 aa, unidentified
MTDERRWYAGVDWASQSHHVFLTDRDGRKLGEKVFRHGGEGLADMATWLMAASGADDPGLIHVAIEVPHGPVVETLIERRFGVHAINPKQMDRFRDRFTLAGAKDDSRDAETMASALRTDPRCFRRLAAGDPIVIELREWSRITEDLGAERIRLTNRMREQLRRYFPARLGLDSDLGAPWLLDLWEAAPTPGKAARIRETTVARILKRHRIRRFDAAHVLSVLREPAVTVADGTTRAAQAHIITLLARIRLLNRQIDDAHRQLDRLTAQLAQSGETEPGQLKQHDATILASLPGVGRIVLATLLAEAWDALQRRDHAALRSLTGVAPITKRSGKSRIVIRRQACHPRLENAMYHWARVAVQRDAVSRAKYTALRTRGKTHGRALRPVADRLLNVACAMLKAGASFHPSQAVGKTPC

SEQ ID NO: 330699 - protein, 371 aa, unidentified
MRAKKVSAKFSAAATDRQARGPKTVGEQGSSRRLNPIIPNSCLDSKSASYKAGRGKQMAEPIFVGIDVSKLTLDIALSSGEYWSCANREGDFQALIERLKSLKVELIVLEASGGYEGAVTGSLAAANLPVVVVNPRQVRDFAKATGKLAKTDRIDAQVLARFAQTIRPELRPLKDEQTQELDALLTRRGQIMNMLVAERHRLAMAAVNVRQDLREHIHFLVKRLKDTNRALDELMRQSPLWREREELFKPVKGVGPGLLRTLCAALPELGTLSRQKIAALAGVAPYACDSGTLRGKRICWGGRATVRSALYMGVISAIRYNPVIKVFYERLLKAGKPKKVALMACMRKLLTILNAMARDKAPWDEKRHATA

SEQ ID NO: 330700 - protein, 358 aa, unidentified
MAQHVGVQVLAFVGNPNSYLNSFRMLQGRDMTNADVRELTSLAFVGVDMAKESFDWAVHGEASRHTLPNDDKGFEGLLVALKAYRVGLVVLEATGGWEKRLARFLLGYGLPVAVVNPRAAREFARSMGHLAKTDAIDAMALAHLAQTLAAKADQAGVAFAPPPAEVERLQLLVTRRAQLIDMRTAETNRLSGAGRALQRSITAVVKTLDKEIARVEGDIDAHLKSHFEEQARRFDAIKGIGPITCAVMLAFMPELGRVSNARAAKLAGLAPLNRDSGKERGQRHVFGGRSIVRRTLYMAMCSAVRFNPVMKTFHDRLIVAGKPKKVVLTACAHKMLRILNAMARKGQPWNEDLHPVAS

SEQ ID NO: 330701 - protein, 348 aa, unidentified
MIWIGVDAHKRLHEAVAISESGVVGSRRIHNDPPQWAQLLEWATQWPQRVWAVEGAWYLGRGLAQFLAEHGEEVHEVNGRWTAQRRRGMRRPGKSDRLDAHSVAQLLREERATLPRVYAEDDELASVQLWSRLEAELTEDRTRLLNRLHDLLLLCDPRYATALPDLTTQAGIAAARAYVAPGARAVAREREQAVRVTAEQVALLDAQIRDLRRKLGRASKSSFRALRAIEGVGALTACTIVAELGAPRPGFGDEQLAALAGVAPLEASSAGVTRHRVNRGGNRRLNLALHRIVLTQARMYEPARSYLARRRAEGRTDREARRALKRLLCRRIIQAWRACFDQPLAAAA

SEQ ID NO: 330702 - protein, 416 aa, unidentified
MPFKIFRKNCCGLDIHKTWIYACIGITDTNGRTEYKQARFSSFSKGLRELADWLAKYSCKEVCMESSGKYWIPVFNILEKTCFVTLAHPKYTKPQKGNKTDRKDAKWICDLFMCDMIKPSFIPPPDIRQLRDLLRFRMKLTYQITGMKNRALNCLTVSNLKLDDVFSDVFGKSSRSIIQHILDHPGETFDVTPFIDRRCKHSVEEIQAAVDGAVSREQAAKLKICLDFIDEQQKRISELDKEIFRLAEPYASALELIRTVPGLSKDPLTAIRILSEIGADMSVFPTSKHLVSWAGCCPRNDQSAQKVKSTRISRAGSFLKPILVQIANALLKSKDHPEFRERYRRIKARRGHKKAIIAVCRMLLTAIWNILSKVEPYSDKGYLADKLTEHSVLITKAQGLELLRKRGYIFRDELVD

SEQ ID NO: 330703 - protein, 401 aa, unidentified
MQETQQHDAIDVFIGVDVGKGQHHAVALDRHGKRLYNKALPNDEAKLRALIAELKTHGRLLFVVDQPSTIGALPVAVARAEGILVAYLPGLAMRRIADLHAGEAKTDARDAAIIAEAARSMPHTLRSLRLADEQLAELTMLCGFDDDLAAQVTQTSNRIRGLLTQIHPALERVLGPRLDHPAVLNLLERYPSPSALAAASEKTLANRLTKLAPRMGKNLATEIVQALSEQAVIVPGTQAATIVMPRLAQQLAALRKQRDEIAAEVERLVLAHPLWPVLTSMPGVGVRTAARLLTEVAHKAFASAAHLAAYAGLAPVTRRSGSSIRGEHPSRRGNKVLKRALFLSAFAALRDPVSRAYYSRKIQQGKRHNQALIALARRRCDVLFAMLRDGTIYQPKSAPNA

SEQ ID NO: 330704 - protein, 367 aa, unidentified
MWTATPRTHTYAIIDASTKRQVACEQFPTTSAGISRALAWVGRRSDGDMACLWAVEGIGSYGARLARAVTDAGYDVAEAPRMNARGRRGIGKSDPLDAAAIGTAVLALEESQLRAPRRDEGTRAGLRVLSASRDQLTRERTMNVNALIALLRAYDLGIDARKPLVPAQIATIARWRERQEQLELSIAREEAVRLARRVLEVTTQLTANQKRMAELIQQSPAAPLLEMVGAGAVTVATVLTAWSHPGRVRSEAAFASLAGVSPLPASSGNTVRHRLNRGGDRRLNRALHTITMTRMVHDPGTRDYVTKRTEEGRSYREIRRSLKRYIARTLYRQLNTLYATAAQAPSPTLPGQTLGDYLINGVSGGFL

SEQ ID NO: 330705 - protein, 344 aa, unidentified
MEYYAGIDVSLECSSVCVVDANGKIVRETKVASEPEVLIGWFASLGFGPARIGLEAGLLSQWLYVAMNQAGLAVELLETRHVSDAFKAMPVKSDRNDARKIAQLMRLGWFRPVHCKSITAQEIRAMLTARKLVQSKLLDLENSLRGILRGFGLKVGKTTRTNFAGRIEELVKGHPKLQSIGQALLRVRAILLAEFNGFEKQVRATSRLHEKARLLMSTPAVGPIVSLTFACAIDDPSRFSSSKQVGPYLGLTPKKYQSGETDYTGRISKHGDASVREALYEAAHIMLTKPTKGCSGLKSWAMRIARRAGTNKAKVALARKLAVIMLRMLKDNVPFNPAAKAAAA

SEQ ID NO: 330706 - protein, 408 aa, unidentified
MNRYYGGVDWADEFHQVWVSDAEGKKVAEMKVEQSPKGLSEFGRWLHERQGEQIELWAAIEKPQGRIVDFLLDHGVVVYPVNPKALDRARDRFRMSQSKSDSFDAYVLAEFLRTDHVHLRALEPDSEQAQELKMLTRDHHRLGRHKTRLLNQIEVTLKEYYPRPLEVFSDLESQIALDFLEHYPTPRALSELSRRQWNRFAKREHHLGEERCKELWEKLSQPQLKIPEHVVRAKTQLLLVLVIQLKSLAEAVKNYSEEVERFFASMPAAELVKTLPGGKSGTTVPMLWAELGDAKSRWQSFRHLQAEAGGVPVTKASGKSRVVQFRFACNKLLRYASYWFSFNSLNRCEWANKYYRDQRGKGHGHPQALRALGAKWLKIIFVMWRDHKPYDENYHLSNIARQQMRQAA

SEQ ID NO: 330707 - protein, 335 aa, unidentified
MKKIYVGIDISKEKLNLCYREGLEIVLEEECMNDIKALKKGFKTALKALEATNDEVLVCAEYTGRYIYPLTVACQELDIFLWMDDPTRIKNSMGITRGKNDKIDAARIAEYAYRYSDKAVRYAIAEEAMVSMKNLLADREFLLIDKKRYQSQITDQKKYMAPGDFKHKDSRWKKVIKAIDDQIKAIDAEIENIIAADPVLTRQKELLTSIDGIGDRIAINMIAITGGFTRFENARHFCSFAGLTPYKYDSGTSIRAKAKISKRANQTMKALLHLAAVGAATHMKEGDYRDYYERKTKEGKHVMCVLNVIRAKLVHRMFSVIRRDEMYTKNYQPAS

SEQ ID NO: 330708 - protein, 373 aa, unidentified
MSNCTRYLGLDVHAESISAAIAEGRGKVRSLGKFPNRPEPMRKLIEKLGGPQGLKVCYEAGPTGYALYWQLTKLGVDCEVIAPSLIPKKAGDKVKTDRRDAEKLAQSYQAGDLTPVWVPTPEHEALRDLVRQRGAAKADESRAKHRLVKHLLRRGLRSPDESGAWTRPWWRWVQALKFDHEAQQVAFADCIAEVLHMGQRLDRLDKAIDRLVLSAPPHMRAVIEALQALRGVAKLTAVTIVTEVGTFKRFRRPTEMMGYTGFVPSEYSSGARESKGRCTRAGNAHLRHVLGEAAWHSRHRPWLNLRMKKLLPSLPAGVAEIAWKAQERLHRKFTRMTYCRKPAGKVAAAVAREMVGFVWAIGTLVESQQPAKK

SEQ ID NO: 330709 - protein, 400 aa, unidentified
MLKIVYRVCCGMDIHKSFVVACIASTNEYGVTTYKRKRFSTFTGDLRRCAVWLAENNCKDVCMESTGKYWIPIYNILEPTCNIVLAHPKYVKAIHGKKTDKRDAKWIADIFKHDLVAGSFIPPADIRQLRDLFRYRWKLTSFTTGEKNRAQNCLTISNFKLDDVFSDVFGKAASAITARILENPTEKITDVSGFRTKGMKATNEQVLAAVDGEMCEEQAEKLRIIRSHMDSLELCKLNLESLILSTAEKYLPQLNLVMTAPGIQSFAAIGIISEIGVDMSVFPTSKHLCSWAGLTPQNNESAGKKKTTRISRAGAYIKPLLVQCALSAIRAKQFPEELRSSRKSVIATWLSKSAEVTRKPSSPLPGCSLQLSTICSRRMSRTIRNSTARGNLLQRIVKFL

SEQ ID NO: 330710 - protein, 440 aa, unidentified
MAIRKREDEVFPNAAGIDGGASSHWVAIPAHLSEESVREFGAMTDDLSALADWLLACGVDTVALESTGVYWIPVYEVLEQRGLKVWLVDARQMKYVPGRKSDVQDCQWLQKLMSLGFLRAAWRPDREVCVVRAVARQREVLLTEQASWVQRMQKALVQMNIQLTEVLSDVMGMTGQAIIREIVAGERDPKALARHRHSRIKASAEEITKALTGNWREEHLFVLAQALAMYDDIARHMAECDVKLQSLLVELGQRKIDLGKVPRAGSKLRQEFDARQTLANWAGVDLTRINGLGLTAVMKILSEIGPDLSRFANVKHFCSWLGLCPGTKISGGKVLSAKTKRSANRVRQALKMAAMSLSHSGSALGAFYRRLCSRMDKPRANTATAHKLARMVYFMLTRGEGFVDQGQQRYEEQQRQRSIAALKRRAAALGFQINPTSSAA

SEQ ID NO: 330711 - protein, 411 aa, unidentified
MEQIHDRVAGLDVHRDQVTVCVRVPGPRGGVQTQKARFGTTTGGLAALAEWLAGHAVTLAAMEATGVYWKPVYYALEDRFVVWLCNARHVKNVPGRKTDMSDAEWLADVAAHGMVRPSFVPPPPIRELRELTRYRKTQIDVRAAEIARLEKVLQDAGIKLTSVASKVLTQSGRAMVEALIAGERDPAALAGLAKGKLRPKIPQLTEALRGHFGAHHAIVAARILAHLDFLDDTITELDREIGARVAGRYQQAARLLAEVPGLERRSVEVIIAETGADMSCFPSPAHLASWAGLCPGNHESAGKRRRVATTPGNPWLRRTMIESARAAARTRDSYFGAQYRQIARRRGPNKAAVAVAHSLLDVIWHMLTTGEVFADLGADFFTSRHDKEHQTRHLVRQLEKLGYTVELVTTA

SEQ ID NO: 330712 - protein, 358 aa, unidentified
MAQGSWVGLDVHARSVLAGVIEEATGELRVQPVGPECDSIVEWLCGLPAPVRVAYEAGPTGYTLARACQAAQIDCLVAAPSRIARAPGDRVKTDRRDTERLVRLLRLGELTAVRVPDEQEEAARDLVRAREDARGDLMRARHRLSKMLLRHGRLYPASAWTKAHAAWLARQRFDQPALALAFEETHAAMLGVRARRDGLDAAILALASEPRWAAQVGRLCCLRGVSVHTALALCTEIGDWERFSGASIGAFLGLVPSESSSGQKRQLGPITKTGNAHARRLLVEAAWHHRRPMRASAELARRRQGQSAAARDRAERAGRRLHHRWAELEGRRGKRSTVVAVAVARELAGWCWSLAVME

SEQ ID NO: 330713 - protein, 399 aa, unidentified
MLDDGSQPVKLFNVDNNQLGAEVLVERVYSIAKEHCVSDILIGTEATSMYDWHLLEYLAESKLALEFNLKLYRFNAKWIKNFKKSLAPRGKTDPIDSFAIAERLRIGRLPKEYVPDSKYQPLRKLTRFRFHLMQQIAREKDFFLANLFLKASAYSRVAPFGSTFSATSLSVINDFFSVDELAAMPIEELTEFILEKGKAHFSKPSEIVDNLKRVARESYRLKPELAPTVNLILASTFNNIRCYKEQVKLVDSAIAENLKAFKHTLDSIPGIGPVYAAGILAEISDVHRFSNDSSLAQFSGLTWPKHQSGKFQAEETRMSHTGNQYLRYYLVEAANSVKRCDATYKAFYEKKYAEATKHHHKRALVLTARKLVRLVWTLLTRQVLYQPGYCSFEDLSKIG

SEQ ID NO: 330714 - protein, 350 aa, unidentified
MERYKEFREKQVFFVGIDVHKKTYHVTGVWEDGREEFSKSMPADKEILVKYLDRWRLSRIFAVYEAGYFGYALHDYLIEHGIECRVTPPSLIPGEYGNRVKTDRRDSRKLALYCAKGFLKGVYVPTVEERSHRQVIRTRRQLVNDRIRKQNQIKSFLTQYGIPLPDVVGKWSKQYMEKLNCLRLHDRWLQKSFTELIRAYEFVDGQIEEQTNLLKELAKEERYRDRVVILRSIPGIGIISAMEMLLELQDVERFSTADQLAAYVGLTPSQYSSGDRIRMGRITCIGKQHLRALLIEAAWVFVRKNASANEIYTRIRARAGSKRAIVAIARRLLIIGRRLLIHKKMYTQIA

SEQ ID NO: 330715 - protein, 319 aa, unidentified
MHCIGVDVSKQELVTFDGKTERIFPNDRGLPEFRRFVKRTEDAFIVFEPTSTYSRKLETLCRTNHILCCQLNPRVVPHLRQVGRGRSKTDSSDAELLYRYGIERGHNEASELRQDSLSESIQARLACYRVAQKARVAYQGLHEALENDPATPRTLLAEIKAEISALKNREERYLVAAQRNAEEDEQTGRRLVALLSIPGIGPITALTLLALFRKYPGATRSQIVALAGLDPIQFQSGTSVHGKTRISKRGNRELRKRLYQATLSAARYNPSVKALHRRLKEQGKPDKVARIAAARKLLLIAHAIYKSGEEFRSPTEEVT

SEQ ID NO: 330716 - protein, 352 aa, unidentified
MTVTNLARSITDGVDTHLDVHVAAALDERGALLGVESFATTTDGYKLLLGWLSDFGPVELVGVEGTGSYGAGLTRHLQTERIRVVEVDRPNRQRRRRKGKSDPQDAISAAHAAQSGEANGEAKTRDGNVESMRVLRVARSSARKGRTQALNQMRSLISTAPEPIRAELRGLNVFHLLERASTYRPGAKRDVASLTKFSLRMLARRAITLEEEIAEIDSILKPLVKETAPELVASLGVGTDAASTLLVAAGDNPERLRNEAAFAHLCGASPIDASSGKQHRHRLNRSGDRQANSALWHIVITRMVYDPRTAEYIDRRTKEGLTKKEAVRCLKRYVAREVFSLLPHEKLGLDSP

SEQ ID NO: 330717 - protein, 310 aa, unidentified
MIIAPGFIGIDVSKNHLDIFDAAAGHVIRLDNTPPAFAALIEGWAQRNAFVLFEATGRYDLSLRQALAGAGVRFARVNPSRARDFARAAGFLAKTDAVDARMLATMAQCLRPPPDQTTTKEREQLALLNKRRDQLVATRQQERTRRHEVSDPLLVDSILAHLAWLDAAIEALEAQIAALIAKTPELDNARRLLVSVPGVGPVTAATLLALLPELGRRSPKQLAALAGLAPFNNDSGARRGQRSIRGGRKRVREALYVAAFSAARHAPRFSDFYKTLTKAGKPAKLATIAVARKLLTVLNAILRDQRPFQA

SEQ ID NO: 330718 - protein, 359 aa, unidentified
MTENTNMESPLLWIGVDVSKKTFTAAARLPWEKKTVYPKGRDGFENNRAGARGFCKWLGELEKEFGGPFGVAMEATGTHSIRLHDNLERVRPGLHVSICNPLSVSYYMRSLGTNKTDRADAAVIARFAAHRRPARYAEPSADQSELRRLSRDRTFLVDSRTEYRNRIECERDPSSRRRMKNVIATIDRQIDDIDAEIEKYLSTKASLECRQEVELMQTMPGVGRLSAAIIYAELGSLAGYSRKQLSAMSGVCPTTLQSGTSLHKGGLSRRGSKWLRRILFLDSGQAILRCPAVKAFHERMLAKPESSRMSAKVACMRKLLLILRGIVVSGTPFDPNHISVRPALTDKKLENPEKSEVTA

SEQ ID NO: 330719 - protein, 301 aa, unidentified
MFPVGIDVSKNTLDLCMLYDGIKGRIKTRNIQNNRHSVENILRWLRLQHCCPEDVHVVMEATGVYHERLATELHDAGFRVSLANPHRSREFARGMGIMTKTDKVDAYMLACYAFLKKPHRWEPPAPEIRYLGALLRRRDVLLGDALREENRLEKYLSTDTPADIISSCRRMAQLLREEVSNIERQIKAHIKASPALRRDYTLLTSIKSVGPQLGMHMLVVLRSHNFVSAEQAAAFLGVVPIEKRSGTSVRSRPRMSKIGPPQLRAKLYFPPCAEKSTISECVIFTMRCVCGVNLKWWPLVR

SEQ ID NO: 330720 - protein, 328 aa, unidentified
MENTLYVGIDIARHKFDAAFFTSTGKAKHDTFHNNAGGFAAFLQWCGAHSARLHLAMEATNVYHEELAQYLYEQGHTVSIVNPRCIHAYAKSQNLRSKTDKIDATLIARYAAKEVPPAWQPPREPLRVLLLTLRQLERLKTVEQQQRDLLGTVKEPGCVESIKRLHAFLQGEIKRMGKEVKAIIAADERMQHNAKLLHTIPGIGERTVPWLLAYLHDGKRFANGKAAATCAGLTPMLHQSGTSDGKAHISKIGPSEIRKVLYMPAVVYSFGIYRDGPYKSFADSMLANGKAKKSVITALMRKLLTIAQAVLQYRCPFDLQRYEKATKK

SEQ ID NO: 330721 - protein, 392 aa, unidentified
MEPVVGVDVAKGSSVIQAFQKRNEPVGKAIVIEHVASGFEQFTEMLGALQAETGVAPVVVLEATGHYHRALVSCLNRSGYTYYIVNPLQSKRAKGTQLRKVKTDAADAWHLAEMYYRGDVKPHRNWDETFTELQHLTRQHEFVTGIFVQAKLNSRALLEQVFPTYEQIFYNVFSTTSLTVLSHCLEGSVTNWNEVIQGNSGRSHSKRWTNEKARKLEEVLDEWREIRRSPAQSKALLGMVSLLLTMIRQLEELEKQMEELAENLPEVGLVRSIPGIGTKLAAAIVAELGDVKQFSDAKQLVAFAGLDPGIFSSGKFTATSTRITKRGSKRLRRSLYLAVQCGMRKNANARIRSYYEKKRNEGKPYKVAVIACANKLLHHIFAILQKGQPYQV

SEQ ID NO: 330722 - protein, 339 aa, unidentified
MELYAAIDLHSNNNVLVILDERDRVVYERRLPNDLPAILTELKPHRKRIQGIAVESTYNWYWLVDGLMDVGYSVKLVNTAAVKIYDGMKYTGDEHDARHLAHLLRLGILPTGYIYPREERAVRDLLRKRAQLVRCRTAQFLSIQNLVSRNSGHGIAANDIRQLDEEGISELCGGDQTRALAMQSNLTVLRCLDEQIRGLELAVLKQAKLKPQFEKLLSVDGIGNILGMTIMYEAGDMERFAKVGQFASYARCVSSSRWSNGKKKGEGNRKNGNKYLSWAFLEAANFAIRYNQRIRAFYQRKQAKTNRIVALKTVAHKLARACYHVLADQVEFDLTRAFA

SEQ ID NO: 330723 - protein, 400 aa, unidentified
MLSIGIDVSKGKSTVCGMKPGGEIVYTPFEVQHTREGMSELVSLLRSSGEEVRAVLESTGSYHCPVVAALLENGIFVSVVNSLRMKRFCSQSIRKVKTDRIDAMQIALYGLAYWQELQPTKLPEDTYRELQLLARQYYQMTSLLIKAKVDFNAICDQVLPGMQELMNDHAGRHKLSDFVLRYHHTTHILEMGETRFRKDYCKWAEKKGYRNCERMAALIFATAQNGIPVLPNAPSTQIVITEAIRVLHTVEASRDTILAQMQALAKTLPEYSLVREMPCIGDTLAPRLIAEIGDVRRFHSKRALIAYAGIDAPPYQSGKFCANNRHISKRGNRYLRKTGYEVMQSYVMHKPANDPIFTFIEKKRGEGKSGKLAMVAGLNKFLRIYYGKVTELYRSSSAIE

SEQ ID NO: 330724 - protein, 423 aa, unidentified
MPYRIAGIDVHKKKLAVVVADVEVEDEYQFERRWYGSNPEQLQLLAEWLIQQQVEEVVMESTAQYWKPVWGALEQYWKPSCEKREGAGRMSGTLHLAQALSNRGRRGRKKDFRDSERLLKRLVSQELTLSFVPHAEQRLWRTVTRTKYQLRRNKVRLHNQLEALLEEAHIKLSSLVSDLLGASARRMLQALAEGETDPAALAALADQRLRATSTQLRDALGACTELNPVYRRLVKMVLEELQWIEQQIGQLDQEMASLLRQHQDAVQRLAEVPGLGVDSAQQIIAEVGAKAATFASAKNLSSLVGACPGEEESAEVNYSARSPKGNRHMRRLLNQAANAAVKVKGSIFEIVYRRLGPRLGHNKTIGAIAHRICQLIWIILNKGVRYEERGPAVSENSRRARTSRMIRTLRKLGYRVELQADPA

SEQ ID NO: 330725 - protein, 338 aa, unidentified
MNVSVLGIDLAKTVFHLYGSDKSGKCLAKKKTNRAKLLQTIEALNPQIVFMESCGSSHYWAREVEKLGPKVKLISPQFVKPFLKSNKNDYLDAEAIVEAGTRANMRFVPIKQTWHQDLQLFHRIRERLIRTRTALCNEIRGFLLEYGFEIRVGRAHLTKELPAILENRTGKLSGISRSEISELYDELVVLNQRISDYDKKIKLYASQNEDCVRMQKLRGIGPIIATAIIAATPDPAMFKNGREYAAWLGLVPRQHSSGGKDRLLGISKRGDSYLRKQLIHGCRSTIYRSSDTGDDIQQWAFKLKKRRGNNRATVALANKNARMLWAVLTKKEDFKFAA

SEQ ID NO: 330726 - protein, 376 aa, unidentified
MKSKNNNTSQQIETYLGVDLGDRKHFVCATDKDGTILDEFSISNDRPALRQLCLDYPHSSVAIEVGTHSPWISRFLTTEGMVVTVANARKLRAIYQNNRKCDRLDALMLAKLLRVDAELLSPIQHGSEQAQRDLVAIKVRDTLVRQRVHIIASVRGVIKSMGMRIPASSTGSFHSKAEAFLCEHPELQSAIAPAIISIKSLTEQIRVYEKMIQQSAREHHPQAIDLQQIPSIGPITSLAFVLGIEDPTRFKKPRDVGPYLGLVPRRDQSGDNDQELPITKAGNKYLRKLLVQSAQYLLGHFGPDCALREHGLKLAAKGGRGAKKKAVIAIARKLAVMMVAIWQKGSSYEPYPGRKDHEPDTESKTSPNNVKQIATC

SEQ ID NO: 330727 - protein, 418 aa, unidentified
MSEEENARTPRRYVALDIHKYYCVVAGVNHDGQVILQPVRVEHADLEGWLQKNLQKTDDVVIESTTNAWHVYDLLAPLAERVVVANPIKVKQIAAARVKTDIRDTLILARLLAANLVPDLWVPPMHVRQMRQLLSQRRQLVETHTQILNRMHSVAHRHHLKHERGKRFNEQNTGWQKDASLSKIEQFQLELEMENRKYLEKQIERISLEVGKICHQKPWSSEMGYIMSLPGFGMITAMTVLAAIGEIERFETPKKLSSYSGLTPGLEQSGTKNRGKGITKEGRRELRWALVEAAQQAVKSDPLMKHRFNELQKRMHRNQAIVAIGRHLLELIWHMLTRRQPYRGFTQEHIAYKYLSWSWHVKEEARNGLTHQQFARYYLMKIGLGKELTRIALDPKHPYRLASEAEVLALCPELRQIK

SEQ ID NO: 330728 - protein, 410 aa, unidentified
MQTLVERGCGMDVHQATVVACLLVVLKDGKVQKQIRTFGTTTRELLTLREWLLSEGCTHVAMESTGVYWKPIYAILEGAFQIVVANAQHVKKVPGRKTDVKDAEWIADLLCHGLLRSSFVPPQPIRELRELTRYRRKLVESRSAERNRLLKLLETANIKLASVATDVFGVSGRLMLQALAQATTTPQEMAELAKGLLRKKIPELKLALEGKFEEHHRFLLGVQLRRLQAVEEDLRLLEQRIQEKLKPYAMQLALLQEIPGVDWTLAAVIISELGVDMSVFGNVSQLASWAGICPGNNESAGKRRSSRIPKGNVYLKTALVEAANAAAKTKGTYLRDKFYRLKARRGYKRAAVAVAHKILVAIYHMFSHQVCYHELGDLYLDKLNQHHVTRNLVRRLQRLGYSVTLEKKAA

SEQ ID NO: 330729 - protein, 376 aa, unidentified
MQDSTFIGLDVHKATISVAVARDERGGEVRHWGTLPHRPDHVRKLAEKLAADGGLLHFCYEAGPCGYGLHRQLVEMGHECIVVAPSLIPVKAGDRVKTDRRDAVMLAKLHRAGELTAVWVPDVAHEAMRDLVRARATAVRVVGKARQHLQGFLLRHGRIYPGKKGWTVAYRRWLTTVRFQHPAQQIVLQDYIDAVTDAEARVERLTGQIADLLPSWSLAPVVAAVQAMRGVAFIVAVTVVAEVGDFNRFENPRQLMAYLGLTPSEHSSGATVRRGGITKAGSGLARRALIEGAWSYRMQARVSRKLHDRLEGLPKAVRDIAWKGQLRMCQRYRHLMAAGKPKVVATTAIAREMVGFIWAIARLVTSPHDAPARTQG

SEQ ID NO: 330730 - protein, 339 aa, unidentified
MWYSGIDQHKAYCVITTYGPDGPRVKQTRVASTPLAVQQYFAAFPGPHKAVVESTGAWYWLADTLAGVGVELVLAHATRLKAIAAAKVKTDKVDSNTLALLLRADLIPAAHMIAPAQRAPRDLMRTRLRLVAKAVSAQNSIDRLLEKFNARDVDELDKLYQLQANCHAAQMQLLEDQIGTLERALHPHLLPSAEVQRLLWVPGLGKVNAFTIYTEIDGIARFPSERQFFSYCRLVPGADNSGGHTRHRSGSKAGNRYRKLAFSHAGIRAVQYYPEIRGFFKAKARKKPIRIARTLVALELARIVYHVLTKQEAFNGRFKDRPLSRHKHAQWPRRASPPV

SEQ ID NO: 330731 - protein, 395 aa, unidentified
MSAISKTTDRVVIAIDPHKASWTAAVVDASSQPVATIRVPVSRDGYRALRRFADRWPDPTWAIEGASGLGAPLTAWLRTDGIDVVDVPAKLAARVRMLSTGHGRKNDDADAVSVAIAARSARTLNSAAVDGAVTALRAIVEHRDDLVKTRTQTVNRLHVVLTNLIPAGASRDLTAERAAELLRGIRPRDTAGRTLRSLATDLVAEIRQLDRRIAKAAADIQTAVTDSGTTLTELCGIGALTAGKILGRVGTIDRFRSAAAFATYTGTAPIDVSSGDVVRHRLSRAGDRQLNLCLHVMALTQIRQDTPGRAYYSRKRTEGKSHKEAMRCLKRRLSDVVYQQLRHDANWMEAGPEDTRGRLCRPARPAQTPHTDASDKSLPGPTTSHPTTDGHALLT

SEQ ID NO: 330732 - protein, 415 aa, unidentified
MALKIVYKICCGIDVHKTFVVACIASTDKHGVTSYERHRFSTYTKGLKNLLQWLLEHNCKDVCMESTGKYWIPVYNILEKDCSIVLAHPKYVKAIRGKKTDKKDAKWIADLFKHDLVSGSFMPPADIRQLRDLMRYRFKLTCFKSSEKNRLQNCLTVSNIQLGNVVSDTFGKSAQAILDKLLENPADTSFDLEPLVYKSLKKKLPELRDAIDGYITPEQAGKLKVIKAHYENLESRKAELEELILALAAPYQQELTILQTAPGISSNFTAIGIISEIGTNMEAFPSAKHLCSWAGLTPTNNESAGKKKSVRVSKAGCYIKPLLVQCANAVVKSTKHPEMRNRYLHLKKRRGHKKAIITIARMLLTALYHMLKNGENYNPELYQKTDLPPVDREITIEQALMLIRNQGYKIKSATT

SEQ ID NO: 330733 - protein, 318 aa, unidentified
MAYTQQQTALYVGIDGSKETLAVATYPTLKVEVIPNDAAHCEALADALAQQSVQRVLLEGSGGFEKSIVHALQQAGVPMAIVPPQRARYFAKSLRGNLKTDRVDARVLARFASCYPAPEATEVPAVQASLKELWARREQLVQALEAEQKRLQVATHPLVRASLERTIAGVHEEVAQIEAAIAALVASDEALAQKAALLQTVVGVGWVVASGLLAELPELGQVSRKVIAALAGLAPGRRESGRWRGYARIGGGRGRVRRLLYLAAVVAVAHDARWRAVYAGLLGCGRVKKVALCAVARRLLVVMNAMVRDGRAYERVQA

SEQ ID NO: 330734 - protein, 354 aa, unidentified
MSQTQNAAIAVVGIDIGKNSFHIVGHDERGAIVLRQKWSRGQVEARFANMPPCLVGMEACVGAHHLSRKLNSLGHNARLMPAKYVRPYSRGQKNDFRDAEAIAEAVQRPTMKFVATKTAEQLDLQALHRVRERLVSQRTGIINQIRAFLLERGIAVRQGQRFLRAELPRILATPPDVLSPRMVRIIEDLAGDWRRLDERVESLSNEIETIARQDAGCERLMSVPGIGPIISSAMVAAIGAGNVFTKGRDFAAWLGLVPKQISTGDRTILGKISRRGNRYLRVLFVQAAWVVLIKPKIWERHGLKPWIEAARKRLHHNVLAIALANKLARIAWSVLAGGRAFEVRKINQAAPEPT

SEQ ID NO: 330735 - protein, 334 aa, unidentified
MEKVTTVGIDLAKSVFSLHGVDSAGGVVLRRTVRRDQLHEVVAGLSPCLIGMEACSGAHEWGRRFQGHGHTVRLMAPKFVVPYRKSGKNDGNDAEAICEAVTRPSMRFVPVKSIEQQALLALHRVRQGFVVERTATINRLRGLMSEFGVVLPLRSVTVRRQAAAAAEGLPDLARRVIGDLLEQLRVLDERIGGYDREIEAQARLCEPAQRLMKIRGIGPTTALAIVASVGNAREFKNGRQFAAWIGLTPSQYSTGGKPRLGHISKRGDSYLRNLLVQGARSVLNSAGMHQDRMSRWILELQPRRGYYRTLVAIANKNARIAWALLAKNETLRSA

SEQ ID NO: 330736 - protein, 412 aa, unidentified
MQDILTCAMGLDIHRDVIVACLAKGELGTDPEIEIRSFSTLIPEMRKLRDWVLEAECRYVAMESTGIYWQPIYEMLEPCFDGQISILVVNARHMKNVPGRKTDMRDAQWIATLLRAGLLKGSFIPDKTFRELRHLTRYRKSIVHDITAQKNRIDKFLQSSGFRFTAFLSDAFGASGRNIIRHLMEYGSISREALDRCLKTQTRKRIDEILIALNGSLSEHQRNFLRMIFGHLEALEQHRHTVEDAITEEITKHEEALRLLCSIPGIDVTAAAAIIAEIGTDMSAFPDSQHICSWAGLSPGNNESAGKRKSAHINKGNPYLKSMLCEVGWVISGKRTLHLSGWYWKIKQRKGAKRATIALARKLLALIYTMLKTGSPYSEECFETRRKQSERKRAYRMVNELQKLGYFVLPPD

SEQ ID NO: 330737 - protein, 374 aa, unidentified
MNFIGIDLHTNRFTCCYRDERSPADKPAQGRVIKTFELDAQGLAAFYRTLTCDTYVLVEATITTFSFVRLFKERVKEVIIANTHELKQVSLARCNTDKIDADKLCRIIKMQVLSGETSVSPVTLPPEEIQVLRGLFTTYRLLQKRNVQLKNRIHSLLKEQLYGFTQEEIFDQRNRKKIRAIAPGTALYFQVNLLLDQLERDEADVETLKDRVLLEAAPFMAQIEILTSMKGISVFIAIAVIADIIDVSRFKNSKAFTSYLRSAPSVANSNTSVRIRGTNKKGRKLSATLLTQSLNHVLDSSLKLRLWYERLCEYKKPGLVRTGLRRRVLAEIFQMLKKGEYHYGRDEKKHEAKMAQYKRFLEKQKNNEISKKIA

SEQ ID NO: 330738 - protein, 417 aa, unidentified
MALKIVYPVCCGIDVHKSFVVACIATTDDKGITTYKRRRFSTFSGDLRLLAQWLADHECRDVCMESTGKYWIPVYNMLESTCTVVLAHPKYVKAIRGKKTDIRDAKWIADIFKHDLVSGSFIPPFAIRQLRDLMRYRGKLTNFSVGEKNRAQNCLTVSNIKLDDVFSDVFGKSASAITDQLLLHPDGSFDVAPFMDRRCKASPAKVQAAIDGLMCSEQAQKLKIIRSHMDSLELCKSNLESVILSLAEQFLAQIELVMTVPGIQLFSAISIIAEIGVDMSVFPTAKHLCSWAGLVPQNNESAGKKKSTRIARSGAYIKPLLVQCALTVCKSDKHPEIKNRYLALKKRRGHKKAIIAICRMLLTAIYAILKKSEVYNPNLYRKVVSLPANRAFTIEQAVAFVQRHGFLVVDSDGVIAS

SEQ ID NO: 330739 - protein, 337 aa, unidentified
MTDVHILAIDLAKRSFQVCATAAGGAVLFNRMVSRAKLETVLREQAPCIVAMEACATSHFWGRFAQGLGHEVRLIPPIYVTPFVKRQKNDAADAAAIAEAALRPNLHYVAVKSAEHQARAVAFRTHQSFVGQRTQLINALRGHLGEFGLVVAQGPTGLKAVAGMIDDDTTELPDAVRDIVRLYLDQIAVLTQKIDELHFKLRAATKVDEAMRRLCTVPGVGPVTAGAIMAFAPDLRVFASGRSFAAWLGLVPRQRSTGGKTRLGGVSKMGQADIRKLLIVGAMSRIRWIIRRGVLPDNWLGRVLGRKPRMVAAVALANKMARMIWAMMTREQNYRTA

SEQ ID NO: 330740 - protein, 339 aa, unidentified
MQAVAYVGIDLSKSVFQLHGVDRHGHAVLRRRLRRGELAAFMARLPGCVVGLEACGGAHYWARVFGRQGHTVRLIAPQFVKPYVKGNKNDLNDAEAICEAVSRPHMRFVPSKSIEQQDVQALHRVRSRLIGARTALVNQIRGLLAEYGIVLPKSIGQVRRGLPGVIEDAQAELSVAGRQLFRSLYEQLADLDRRVTELDDEVQRLYRSNPVCQRVAAVEGVGPLVATAIVSAIGDGRAFKNGRQLSAWLGLVPKQDSSGGKTRLLGISKRGDPYLRTLLVHGARSVVYRSKAKTDSRSQWIADKQRRLGTNRACVALANKNARIIWSLVANDCTYRRAA

SEQ ID NO: 330741 - protein, 390 aa, unidentified
MTYYVGIDIAKYKHDCFIADDSGCVIRDSFSFTNDKDGFNVLLSILKVLKPKGQIKIGFESTGHYHFNLKLCLEANGYDYVEFNPLLVHKFSSTQTLRRTKTDKKDAQLIAKYLMTVDYKPYVNPFYHINNLKSLTRLRETLITDRTRFLNQITSYLDQIFPEFKPLFENGLNESAFYLLTHYMTPAKLSKLDSNKYSKMKSELKRPISYQKICQIKDAAINSIGHTSKALEYALRSSLNVYLYLDNQIDDLESKIIEIYDSLNCHIHTIKGIGKLTAAGILAEIGNFSKFLTPAQIQAYAGLEPSKNDSGTHDGLGIMVKHGSSYLRKYLMNSAETFYVYNPSISDFYWKKRNEGKHHRVALSHVARRLINTIFYLEKHNQDFDSKLVK

SEQ ID NO: 330742 - protein, 367 aa, unidentified
MKKQTSAATETDIKGRNIIDFIGKTIYVGIDVHHKDYQVAKVLNGICLGNHRMESSKEKLIEHLVSHYRGATFKCVYESCAWGFTLQRTLQAAGMECMVVHAADVGTTDKEKRRKTDKVDALKLAHQYASGNLKGIHVPDEEIQKARNLVRYRKRLTGDINRSKNRLKGLLKYQGLDLPPQYAGNNWSRNFLNWVEQQAEKDALLKDTLILMLEQIKLLRQLLLKAERRLREMRKSKYAEKAELACSVPGIGPTTAMIFLLETGDINRFKGFDALNDFVGLCPDTDSSGDVHRDTGITTRRHKQLRSALIEAAWQAVKTDPALMDSYQTLLKRMKGSQAIIRIARKLLRRLRAVLLSGRPYQKGVIA

SEQ ID NO: 330743 - protein, 445 aa, unidentified
MTKHKRVHAGGEVQAFEIVIPPPTRGSLRQQEIRRRKLARVHGRLVVGLDLAETKQAVTFSYQGQQLKRMRMDCAPQHLARTLQPLIHHFCAQVGARDGVIALEPASYFWELAAEGFEAAGLDYVLLHTLAVKREREATRYTPEKLDPRDADLACELAESGRFTEARLPKCAKRAALDGLAREYLLLRQKSSAEVTRLKSFWGRMLPELGELLKEVDGVNAMAMSRALLPFRELAALSDAQWVERVRAHADGRIQPTTAILLLERVRAAYADPHRRSDEGLALRIAMCAERRRMLERQKADVATQLLQRYHAFEESVLLDSIPGSSELYNAITLGLVGDFRDYDCARAVVKLAGSEVNQYQSGEWTGRSRISHRGRHRLRTAAYLQAKLLVSGNEAFRTRYAQLLSRPLQKQQAYIALADAYLRTAHTLVVQGEPWREEARSRRR

SEQ ID NO: 330744 - protein, 359 aa, unidentified
MEQKRFVGIDLGKRTYEMKIIGINGKVTGTNGQTNPSGRKLLYRKLLATDRVAIEVCSLGMVMAKEIQKEVGCEVVLLNPSQLVLIYRSLKKNDKEDALKLARLVQKYKNEELPKVELPTEHEENLRQILTEIRQLKNDRTKEINRLHAIFVECGITEIKKKDLATIDNRIKCIKMLKGIALAQAERILKKLELVETQTEEVEELLDKEIDGDKNIGKLTEIPGVGKQLASAYVAFMGDGSRFSNASKIGAAIGLVPRLDMSSTVCKLGHITKCGNKNLRTLLILAAWSHIRSKEGGALKDKFLYMTRFQSKGKKIAIVAVARKLAELMYILLKNDTSYEKRPSPTISQLVDEALEKAS

SEQ ID NO: 330745 - protein, 443 aa, unidentified
MSTFPAPLAEPVFAAFAAIDWASKEHVVASVPAAGGRIEISKLKNTPEAIELWAASLRQRFAGAPAAVAIEQKRGAVIYMLSKYDHLVLYPVPPTMSSSYRHAFFPSGAKDDNGDTLLLLDLLRHHRDRLSPLQQDTPDTRLLRFLTEDRRGLVEQKVSVVQQLTDCVAQYFPQVRTWFGPLDSPLSEALLERWSSLQQLQRSHPGTLKRFFTEHRSWDNDRIAEQIRHIYAAVPATRDEVVLEACSRKAAACLAQLRVLRDQVAAHDKRIAAVTADHPDAPIFSSLPGAGAALTPRLIAAFGTDRKQWRDAADLQRFSGIAPILVRSGNCSRVAMRRACPKFVRQTFHEFAAHSIRFCPWAKLLYEQHLKGDKKNHHRAVRVVAFQWIRIVYRCWVNREPYDERIFLAAQRRRNSPFAGKNAADARIEFQNHAGFQKLTEKA

SEQ ID NO: 330746 - protein, 385 aa, unidentified
MEVLYQSCAGIDVHQANIVVCILHGPLTSTRPKREMATFDTTTKGLRACHDFLSQFHVEAVGMESTGVYWRPVWHALCDDFELILAQPAHMKAIPGQKTDKKDAHWIAKLTRIGLLPRSFVPDETIQELRELTRQRKHYVESRNRETNRIHKILQSGGIKLTTYIEDIMGLSGRNLLQLLVDGTPITPRIVHQSVYTSLKKKVPQLLEALDDYFSDHHRFMLKQSLEIYDFYQKQIELLEERMNVYLSQYEKHVEILDSIPGIDVITASVIISEVGVDMSQFPTFGHLASWAGLCPGNNESAGKKRSTKIRHGNSYLKKCLCQAAFAVKRQKGSPLAERYYQIQSRRGSQKATIALAHQLLKIAYILLKEQMTYPEFLAQKKKDY

SEQ ID NO: 330747 - protein, 385 aa, unidentified
MGSQAFIARDYDVFAGLDVDKKSISVTFTDHQGLLKSMRMPYSVDHLVNHVRKHYGDKKVAFAYEAGPTGYGLYDGLVAQQYPCLIASPSMIPKAPGQRVKTNRLDSRGIAENLRGGQLKSIHIPTTLYRELRHLTQLRDALVSEMVAMKQRIKSLLLMEGLEFPPAPPGSQWSFLVKAKLRKLPCSSVVRFKLDQLLDNLEFGEKQILKTTREIRRFCHNDPELSQCIDYLKSLPGIGWIVASQMMARIGDWRQIKNIREVPAFLGLVPTESSTGERTTRGSITHSGDPRLRSKLIQASWSAIRQDGELLKFFRTVAKKHPRHLGPRVAIVAVAHKLCVRAAVVLMKQRPYEIREKVQSAPLTQEETVPQGTTRRRRVPGEKIS

SEQ ID NO: 330748 - protein, 353 aa, unidentified
MNTIYIGVDFHARQQTVCSLKTEEGVVVSHNLKHQDKDEVRAFYQQFHGRVVVGIEASGYSPWFEQLLEALGHEVWLGDATEIRRRARWRQKNDRRDAELILDLLVHDEFPRLHRPSPQSREILRMLRYRQKLIKIRTMGKNSLQALALQSGLAKRSYLFSKAGQQELRQARMSPAMQWQREQWFQLLEPLNERLLETMLWLKQQSQDDARIKLLRTHPGIGLLTSLCVVHTLWPVSRFRNQRKVVAYAGLEPMERSSAERKHFLGISKAGSRVLRYLLVEAAHTAVKKDDDLKRFYQRLVTRRGRPKAKTAAARKLLIRSFIMLRDEIDYAEFRRRAVAARLARQSTRPECL

SEQ ID NO: 330749 - protein, 436 aa, unidentified
MSERLVLERALVVGVDPHRESLDVVGICFPEEVILDEAFANTQAGHEALWSKAKSLAAEHDLSLVFGLEDGSNYGYSLARCLLRHGCQVKEVNPRMTNRQRDFYGQDKTNRLDALATAAIVMRAHQQLPDLAAVEEATEATQELSRYREQLVRDQTAAVNRLHGYLANQYPGYKSFFHEVHGVSALHFWASYPTAAHLQGVAPQQLADFLYDKSHHRLTRTACLQKATHILHSLDDAPLHEPDLLAQAQAAIISDLAQRLLQLRHSIEEVEAQLQKTLPATGQHLETLRGIGTVLAAVFIGETRDIARFHQDKDRFASYNGSAPATRGTGKHVRQVQNHWCNRRLKSALDHVAHTAYRQDPLSAEYYQSCLNRGLAPSEAHKRLMRRLSDVIFAMMRDRAPYDPEVHRRKQEERKKGKAWHPPSPAVKPCALPSLL

SEQ ID NO: 330750 - protein, 354 aa, unidentified
MQIIGAFDVHRKQITFKWLNTGTGEVGRGHITPALREKVREFLGPFKGLDAHFALEATTGWRFVAEEVSRAGLTTHLAEPAETATLRGTKRRAKTDRLDCDHIVDLLGSGRLPESWIPPEHVLEIRTLVRLRKALTDEHREWQQRLQAQLFHQGVQNIRVTDTQGRGQLAEATLSVAGRKVITTGLEVIDHLDHQLAPLDAYLVRFSRIQPGCRALKQRLFGVGHLTAVFIWTELGNCRRFSSSDDAVRYAGLDVTVYESANKRPPGHLSRQGPEALRWALYEAAQSAARSTSPDRAYYLEIKKRLNHKRACLSVARKICRRAYHILRSLGAEAFAPVDMSVLPSFEQPVSEPA

SEQ ID NO: 330751 - protein, 351 aa, unidentified
MRTEYFITMDTHCRTTDACIKTSGGKLVRRQHLPTGIPQLRQLIESVPRPRRLCFEESSMAGWLYRNLTECVDELIVCDPRRNAHVAKDGDKDDAIDAEKLNDLYRGGFLKPVHQLDCVRRVSIKQTIALYHDRVAHRVSEGNHLLSLGKRWGVMLQRHRLLDADGQAWLQGILEQAGVPCEIVSIAQDLRQSLVRAAEQEDSLREQVRRIASRDPMMTRVAELPGYGPIRAATLISYLDTPWRFKSKSALWKYVGIGLRREKSGDGMAIVKVEQSCNRLLRNVVIGAARSAIEQKENVFAERYARWIQAGLSSRNARRNVARDQVTAVWGMWKSNRAFDAKWIGNASAKE

SEQ ID NO: 330752 - protein, 441 aa, unidentified
MTQATPLTRGDRRRNEKLARLRSIVRHDLAIVAVDLASAKQAVVVTDHDSVTLGRRMFEGSPWRVDDILDWAAPLARKAGFAGIVLACEPTGYRWKPLLDRTRTRGVGLVCVQPMLVHRGREGEDFTKDRSDFKDATIIARLVGELRCYVPHAPEGHWCRLRHLGARRAALLVTAGAARQSVRDLLECAWPAVLGTARKPLKSLTWRAAMTVSADPQAIVAMGFDAFASAVAAELPRWGTKRRHLPILRAIFAAAQVPGGVAWEREAATERASFALSDWHRALDELAEVERRMVEVLDALDLSELVTTIPGLTPVTGAAILAEVGDPARYDCARTWVKHAGLCPRANESGTFKGRTKTSGRGRPGLRTAAWRAIWGAVRVNEVYAARFAYLTTRPRNRLEPGQARAAIGAALLRQLFVVVTRRVAWNPAIAAGAEVMTEAA

SEQ ID NO: 330753 - protein, 445 aa, unidentified
MEVTFTHCAGLDVHKKTVVACCITPDAQGQKVVETRTFGAMTADLLALSDWLSSRGITHVVMEATGEFWKPVFNILEGSFEAWLANAHHVKNVPGRKTDVKDAEWLAELLRHGLVRPSFIPPLPQRDLRDLTRQRTIHVQERATVVNRLHKVLEWANIKLTSVVTDVTGVSARAMLEAMVQGQSDPQLLAELAKGQLRKKRAALQQALSGRVREHHRFLIASHLSHMDYLEEQIALYDDQITQHIEKQTAPPEGDPGSTSDKSQDTDTSAKAKALPPLSWADAVVLLDTITGIGPASAKQLLAEFGTDMSRFPSDAHMASWCKICPGNHESAGKRHSGKTGTGSRWIKPVLVQAALAAKKVKDSFPALLYSRLVGRRGHKRAIVAVAHHIVKAMYHVLLNHEPYREPDTTHLDRHLKEKKMDRMCREFARLGYNVKLEPIVAAAA

SEQ ID NO: 330754 - protein, 370 aa, unidentified
MEKCKFVGLDVHKETIAVSVADGDGGETRYLGEIPNTPDAIVKLVRRLRKEAARLSFCYEAGPCGYCLHRQLKELGQDCQVVAPSLIPRKPGDRVKTDRRDSLNLARLHRAGELTAVWVPDGAQEALRDLTRAREDMKHLQRQAKQRLLGFLLRHGKRFGGKDNWTQAHYRWFEEVKFEQPLQQIVFQEYVDSVQAMTRRVEALDKQIEIAAGESVFGPLVEGLMALRGVGLVTATTIVAEIGDLRRFATAPQLMAYLGVVPSEYSSGESKSRGGITKTGNGHVRRVLVEAAWKYRYPVRKTAVLQRRAERASEPVQDIAWKAQKRLCARFRLLEARGKLKVQVCIAVARELAGFIWAIGQAMPQPAARA

SEQ ID NO: 330755 - protein, 439 aa, unidentified
MRLAPSPGAHDSDGILRRRRRPRVDKREPEHRQRGSRSTPAERLRMRFVGIDVASERHMVAVVDESDRILLKATPFTEDADGYAKLFGVLGAPTDALVAMEATGHYWKNLFAALVAAGFAVALLNPLRTRRFAGEDLQRTQTDAIDAVGIARFAAQKRPPARRLPDRATEELRELVRFRDRLRQDFGDRVRQLHRLVDLGFPEFTRHVHELGSELATALLRAYPTAASFQGVPVRRVAGLRYDGRHKVGDELAAALIAAAAGSVGRHHGEVYRIQVRYTCEDLEVLRRRLQELEGDIDRLLEQHEIGRLLTTIDGIGSQTAARLVATFGDFSSFPSARAVASYVGAVPALKQSGKRTFQRASLTPIGAARLRAKLWMPVLTAVRTNPWRRAYDEQLIARGKLPKVALVAAMRKLLHAVYSVATHRRPFVANRLTAEARP

SEQ ID NO: 330756 - protein, 354 aa, unidentified
MRRSTKYVALDVHQATTVASVREERGRVIARSVVPTEEAALLEFFGGMRGSIHVAMEEGTQAQWLHELLAPRVDRVVICDRRGQARRGTKGDQVDADQLSEELWRGGLRAVYHGSGRRAVLKELTRTYQNLVEDSSRVMLRLKALFRARGIRAPGQRVYQPAGRAEWLARLPEDGARFRAEVLYAELDVLRALRPKAKTAMVAEARRDPAWELLQTISFFGPVRVALLLATMQTPWRFRTKRNLWAYAGLAVVSRSSADYELVAGRPVRRRRAPLTRGLNQNHNRVLKDVFKGAATAATARPGPLQDFYRAMIARGMREDLARVTLARKLAAIALRLWKKGERYDPTQLTMQAY

SEQ ID NO: 330757 - protein, 311 aa, unidentified
MYYIGIDVSKKDLSVFDGKDLNFINQEGLKSFKKYLKKKYSLSEIVIIFEPTGVYSLYLKEFCAENGIKAYIVNPKKSHNFARALGIRPKTDKIDARTLYQFHKLIDLKDIQVPKIDQQAKTLSSYLTSYEFALKQRISLSHHLESLRDKQLITLIKKELKRAQRLEDKIFHDIKEYLGKNQNLKEDYQRLSTIPGIGEKAAIALLTLFKTYPGTNRAQITALAGLDPVKRESGTSVRYKVKISKNGKGIYRKILYLPTLCATVHNQKIKIFYQRLLANHKNKKLAVIASMRKILLIAHAMYQDKTEYIAV

SEQ ID NO: 330758 - protein, 343 aa, unidentified
MGEVSTIGLDIAKSVFQIHGVDVDGAVVIRRRVSRAKVSEFFAALPPCLIGIEACPTAHHWSRKLQALGHTVRLMPPNYVKAYLKRSKNDANDAAAICEAVTRPSMRFVPTKSEQQQSGLMLHRGRQLLVRQRTMLSNAIRGHLAELGIISAKGRNGTVELLEVIANQEDDRIPAVARFSLEVLARQYAAIAAEIGVIEKRIHAWHRSCEESRRLEEIPGVGPIVATALVAEVGDWRAFVSGRSLAAWIGLVPRQHSTGGKERLGGISKQGNRHLRWLLVAGAMAVIRYARQHGTKRPWLARLMATRPIKVAAVALANKIARMAWAMMVRGERYKEPTLMIAA

SEQ ID NO: 330759 - protein, 389 aa, unidentified
MIYIGIDVAKNKHDCFITNSDGEILFKPFTIPNNLEGFDDLYHKIESTTNDPSQVKVGLEATGHYNYNLLGYLIDKGLTTYVINPLHTNLFRKSQSLRQTKTDKVDARTIASMLMSDVNLKSYSDTSYHNEELKSLTRYRFDKVKERSALKVSISRLVCILFPELENLVPTLHMASVYALLSEFPSATHIASAHLTRLTNLLKTASKGRYDKETAILFRNTARSSIGSNMPAKALELMHTIRLIQELNSEIAEIESVIQTIMDKLNPPILSIPGISYRMGAMILAEIGDFDRFESPDKILAYAGLSPSTYQSGQLNNSHSRMEKRGSRYLRYALYNATKYVCHWDPLFNAYLSKKISEGKHYNVAMSHATKKLVRVIFHLQKTGQLYAS

SEQ ID NO: 330760 - protein, 346 aa, unidentified
MKVLIGVDPHKASLAVAAIDEAEGEFLERASFPQNRAGLRALERWARRFPERRWAVEDAGALVRYLAGMLATSGESVVDVPPKLSARVRVLSSGNARKNDGLDALATALAASRNERLAAVDPQDSSEVLRLLSERREDLVAERTRALNRLHGLLRDLVPGGVSGTLSADRAALILRGIRPQSSSSRVRRRLASEVLRDVRTLDRKIADLNGRIEVELEASGTTLTEIFGVGPILAAKIIGTLGSVARFPSRGHFASYSGTAPVEASSGEVVRHRLSLAGNRHLNYALHMVAVCQARSDARGGAYYRKKIAEGKSRKEALRCLKRRISDAVFRSFVADSQAHSRSAA

SEQ ID NO: 330761 - protein, 408 aa, unidentified
MKDSRKRYIGLDVHKHYLIAIGVDDELNVVLPVRRVEFSYLETWMKKTLTKQDDVVLEMTTNTWQLHDELCAHAGSVLVVHPPHVALITRSQVMNDKIAASILARLLDKGLLVGIWVPPQEVRELRGLVAQRKKMTGLATQAKNRLHAVLQRHHLLPPEGNPFHESQQDWWLALALGTLEKVNVLSDLETLRFAQAQQVRLTSIMEEITNQQEQITSMLQLPGFGVVTAVTVWAAIGDIQRFADPQHLVGYAGLGTRVHDSGMSTRTGRITKAGRRDLRVILIEAAQVAANSHPHWKAELARLEPRLGRNKAIVAIARKLLVAVWYILAQHKTDRFAQPEAIAQKFLKFAYQLGKENRPPGQSAAHFVRQRLDALQLGQELTSIAWGSKRPIPLPPSKNKVSDVPHTK

SEQ ID NO: 330762 - protein, 461 aa, unidentified
MLIIRLCGGLFKNLVLMEETLSTIHPHAAGIDIGSASVFVSVAGQAVESFGTFTSDYAMLISYLHLQQVETVAMEATGVYWYCLYEMMERAGIEVYLVNGAHSKNVPGRKSDVKDSQWLRRLHSYGLLRKSFIPEEEVRQLRTYTRLREDHIESASSHVQHMQKALTSMNIRLHQVISQINGVSGMRVLKAILAGERNAEHLLQLCDAQIIKKKGAQVILSLEGHYKVEHLFALQQAVEGYEFYEQQRLACDAQIEVLLKQINEHLPVPPDCPTLEQPKPARHNQPRIENLHALLVTANGGRDVATISGFSDKTVLKLMAEIGMNVDAWPTAAHFTSWLGLTPVTAQTGKTKRKKKNRARTRAGQIFREAAMALAESKYLAIGSFYRRIRAKRGPKIAVMATARKLAVQYYNLMKHGLQFVEQGIQKYEEKQKERMEKFLFKKAQELGYQLVDLKTAEVVH

SEQ ID NO: 330763 - protein, 342 aa, unidentified
MGIAVLGIDLGKTVCSLAGLDADGVVVFRKRIQRFRLLGFLANLGPCVVAMEACGGAHHVGRFCKQHGHEPRLMSPLYVRPYVKVHKNDDRDAEAIAEAATRPTMSFVAVKSAEQLDLQALHRARERLVHNRTGLINQARGFLMERGIRVSTGRHVFQRALSQLMVKKETDLSSSMISVLLEMAAELASINDRVSALDAKIKAHARADADMCRLMEIPGVGPTIASALVAAIGDGSSFAKARDLSAWLGLVPRQVTTGGKARLIGISKHGNSYLRKLFIHGARTVLHLVKDRTSPLTLWIDGLRERAHANVAGVAMANKLARIAWAVLTKGERYRPAALAGA

SEQ ID NO: 330764 - protein, 370 aa, unidentified
MFMFAEQPSAGATVAEVYRYVVGVDTHARAHQYALIEAATGRVLDQGGFPTSGAGLARAASWIARRTGGDLDAVLISCEGTGSYGARLAKVLGEGGFRVVDAPCPKRDRGQDKDDAIDAIKAARGVLGKRADRLADVRAGELQEALKVLLAARDRMATESTRSVNALTALLRGIDLGIDARRKLTATQVRQVARWRTRSESPAAAIARTEAVRLATRIRHLHTELLANKRQLRQIVHAHAPVLLDSYGVGPVNAAIVLSVWSHSGRIHHEAALARLGGVCPIKIESGQSAEHRLNRGGDRQLNRALHSIAKTRMERDPHTQAYVQRRTQQGLSTRRIRRCLKRYIARQLFRTLANPNTDQPNKQTLPTAA

SEQ ID NO: 330765 - protein, 384 aa, unidentified
MEKSITLHVGLDVHKDSIEIATAEIGRDGEVRHVGRIGGDLASLDKALRKLTSKGHRLHVVYEAGPCGFVIWRHLTALGQSCDVVAPSSIPKRSGERIKTDRRDAMLLARLDRSGDLTAVRIPGPADEAVRDLVRARDDGVRECRNARHRLKALLLRNGITYTGKSSWTGAHLRWLATLKMEHPAQQIGFQEYLHSITEATARIQRLEQAMRDALVDWTLKPLVQALMALRGVQLIAAMTLVAELQDFLRFESPRKLMAFVGLVPGEHSSGPKRRQGSITKAGNSAARRMLVEMAWHYQHAPRVSPVIALRQDQLPKEITDIAWKAQLRLNAKFKRLLARRLMKNKAVVAVARELAGFVWAIGCEVQTSGWQGIAAEPASTAVR

SEQ ID NO: 330766 - protein, 342 aa, unidentified
MSVYVGIDVHRKRSQVAVIDAKGEVLANRNVPNGVEPILKVIGGLPPGTPAAFEAAYGTSWLVELLEDYGFAPHLVHSLRCKAIASARLKNDKVDAAILAQLLRADLLPEAWIAPPPVRQLRALLRHRVALVRLRTLLRNRIHAIVADYGHDRPAGAYWSGPGRAWLACLEVPAVSRELIDDDLALIDALQDRIDRLDWEIRQRSRSDPRVKVLTQLPGIGPFTALLILAEIGEVNRFGSARKLASWAGLTPTVRGSDRVAHYGHISKEGSVWLRWVLCEAAQTAKRHPQFAASYQAIAKRRGKKIATTAVARKLLTRAWHLLTDAEHTQAPQSATPQTAAR

SEQ ID NO: 330767 - protein, 344 aa, unidentified
MNKNWFIGIDVSKKTLDASIFVAGEVINRFPHIQVRNDKQGFKDLLRWAKEQGVKTKDTLFGLEFTGYYSDALEQFLTKKQISYTMLPTTVVRHYQRGPHDKNDKIDSAKIADYLFRFNGTECIRLRVLPSKAMQQLKDLKSERKFLVQQRVACENRQKVAKSKSEERHLQKLIELYKTEIEQVEQQIADVIVQDEEIYTTYRLLTSIPGIGFVNAVNTIANTQNFTAFETARQYAKYVGVAPSEHSSGTSVQWRRRPSPHADLQAKADLSMAALHAIDLSREMRQLYERKSGNKPKDKDMQKKGLNAVKFKLIREMFSVVKQERNFELRGLDKAQDETHNTEE

SEQ ID NO: 330768 - protein, 311 aa, unidentified
MATSSKTYIGIDVSKDRLDVAALGESREKQVSNTKDGIAQLVKQMMDLQPELIVVEATGGYQRAVVDALFHAGLSVAVVNPARVRQFARACGLLAKTDKLDAQVLAEFGQRVQPRRYEGKSEAEKQLSALLVRRKQLEEMLKAEKNRLRTIFPSLKSSVEQVIACLQEQKKGLEEQIQQFLQEHQAWQEQREILSSAPGVGMVTTSTLLADLPELGKMDRKKIAALVGVAPMNYDSGKKRGYRKTKGGRGDVRSVLYMSTLVATRYNPVIQSQYQHLLKRGKVKKVALTACMRKFLTILNAMVRDQQPFRI

SEQ ID NO: 330769 - protein, 334 aa, unidentified
MNPTINPVLLALDIGAKNHAFAWEINDRKTTGSVANEPKALRAFLSDLIHRHGSLRLLVEATGIYYLDVALIAAELGAEVSVVNPKAAHNFAKAMQQRSKTDRLDAAMLLDFLKRMPFTPWTAPRQPLLELRHYGRYLVQLTEESTAARNRLHALTSTRSSPAYLRADLKRFIASLERRIARIRTQALGLIKADDALKARFDALVTIVGVADVSAIALLSELMVMPASLSSRACVCHAGLDPRLHESGTSVHKAPRISKHGNKYLRRALFHPAMTAGQHDPLAKAFKQRLLDRGKKKMQAIVALMRKLLTAAWAIVRNPQPYDASMLYSVVERA

SEQ ID NO: 330770 - protein, 316 aa, unidentified
MSEPVYVGIDVAKASFEVAVSGEAQTLNLGNDEAGHAELCQVLVPLAPRLILLEATGGHERLLALALAAAGLRVSVINPRQARDFARCTGKLAKTDRIDAQVLRGFAALLDAQGHEPRALLDEQQRELTALVTRRRQLVAMLVAERQRLALAHPKAKASILAIMDAIAAQLHDVDGQLREHVQAHHADLAKLLTSVKGVGPTTASTLLAQLPELGHLNRKQITSLVGLAPMNRDSGTLRGQRHIFGGRADVRRVLYVAALVGTRFNPVLKAFYAKLLAAGKPKKVALVACMNKLLIILNAIARSKSPWSQEIAGIA

SEQ ID NO: 330771 - protein, 323 aa, unidentified
MNKYKEIFGVDISKDVFDVYGSHSGHDQFKNDALGFKSFLKSLPKESLVIMEATGYYHYRLAQFLYKQSVLVSVVNPLSVKRFIQMKLAKVKTDKSDAKAICEYGEINKVPLYTALTNVQSECFQLFRLLDSYLKKRTITKNKLHGENVLGIPSKHVYRSLNRNKKHLDVEIASIEAKLLSLVKQEQQVQLTLLKSIPGLGVKTALFLIVVTDGFTKFETAAQLCSYVGITPTIRQSGSSVRGRSRISKVGNKKLRNLLFLCSFSACKHNKACREIYERIVNKGKSKKLALIAVSNKLLKQAFAIAKSGHPYDETFVSVLLSK

SEQ ID NO: 330772 - protein, 374 aa, unidentified
MGDYSEVFVGIDTSKLRNAVAIAQGERNGEVRYLGEIENTEAATGKLVKKLAAQHRRLTFCYEAGPTGYGLYRLIKTLGHECVVVAPSLIPKKPGDRVKTNRRDALNLAKLLRAGELTAVWVADARHEAMRDLVRAREAAVDDLKSKRQQVLSLLLRLGRHFTGKRTWTRAHMNWLVSQKLAHREQRIAFEEMLLAVRQANERVIRLERAIAAVVPDWSLATVVTALMALRGLDLISATIFLAEIGDLSRFASPRQLMAYLGLVPGEASTGDRVWRGGITKAGNHRARRILVECSWSYRHPPRVGKKKLAKVEAAPPAVQEIAWKAQARLTARYRALARRGKRPTLVVTAIARELSGFIWAVSRAVGAPATPAR

SEQ ID NO: 330773 - protein, 380 aa, unidentified
MTSKGVEKMQNDTIGVDVSKDHLDAHRLADSASRRFANDKCGRKAFVKWCAETPIVRVVFEPTGPYHRAFEHALGAAGVPFVKVNPRQARRFAEAIGKLAKTDRLDAATLARMGAMLELKTRPPRSEALLKLKELHLAREALVKDRTAAKNRGKILTAPLLKRHNAQRLEQIKRHIAAIEAEILKQVRPDPELAQRFAILTSIPGLSALTAFALLIEMPEIGDLEPGQAASLAGLAPMTRQSGRWSGRAFIRGGRAEIRQAVYMPALVAARFNPDMKAKYSQLTCAGKPAKVALTAVMRKLIVLANALLKANRNWAPNTLDQNGYSRSQTHKRRQESRIASDVIQAPKRELGDGALRTERSGMGGDQTASSQQAARRAAR

SEQ ID NO: 330774 - protein, 414 aa, unidentified
MLFVGDDWAEDHHDVELMDAAGRRLAAARLPEGVAGITRLHEMIGAQLGEDAGAGEDAGAGEVAIGIETDRGPWVSALVAAGYTVYAVNPLQAARYRERHGVSGAKSDKADAHTLADMVRTDAHQLRPVAADSPQAEAIKVVARAHKTLIWERTRHTLRLRYVLREYFPAALEAFDDLAAPDTLELLAKAPDPASAAKLNRSQIRAALKHARRRDIDMKTTRIQAALRSQQLGRAPVITAAYAATTRSIAAVLATLTEQINTLRGQVETHFGRHPDAEIILSQPGTGVLLGARVLAEFGDAPGRYADAKARKNYAGTSPITRQSGKRKITRARFVHNDRLVDALMSQAQSALLASPGARAYYDKQRARRLDHHAALRQLANRLVGILHGCLKTRTLYDEATAWSHHNQDQRTAA

SEQ ID NO: 330775 - protein, 335 aa, unidentified
MEFTYFIGTDVSKNELDFAVMRGKELLFHKEVANTPESIRAFLKDLLRLPGFSLRESVFCMEHTGIYNNHALACLHKKKANICMEAASQIKSSLGNIRGKSDRVDSIRIAEYAYRCREDLRLWQPKREVVQRLAHLAATRSRLLDAQTSIGTPLKEKKAFVHKRVLSQEAQLCKGTLGAIAADLKKTEQAIDTVIESDPELKRLFALVTSVTGIGSVTATQIIVSTNEFRDIKDPKKFACYSGVAPFTRESGMYKGRAKVSHMANKKVKELLHMAAIVAIVYNSDMKRYYERKVNEEGKNKMSVINAVRSKLVLRVFACVNQNRKYDKIYTNALA

SEQ ID NO: 330776 - protein, 434 aa, unidentified
MLGGDIVKKSDYLSTLFVGIDVAARENVVCVLNFEQEKLLQFAVPNAQSGADEIADKLSILLSANTFNRVIIALESTSFYGIHIANFLSSSALLAPYNTYVYCLNPKMVANYKKSFIGMAKKDPIDAFVIADFARVGRITCEPWRGSQYLALQRLTRHRLHLVECLAREKTYMLSNVFLKFSEFATLSKADHPFANKYGATASAVLTEYLSNEQIAEASMEELIDFICDKGKNRISKPDEVASILQAAARNSYRLEKCLYEPLTIAIASSFNCLKAFEQEIKSIDKAIERTVNGLNPLEYLCLLSIPGIGPVYAAGILAEIGSIKAFPNHDALAKYSGIVWNENQSGDFESEDTRMSKAGNKYLRYYLVEATGSVIINLPEYKAFYQKKYDEVKTHQHKRALALTSRKFIRLVFGLLAKNQLFVPQGVDSTPNL

SEQ ID NO: 330777 - protein, 351 aa, unidentified
MKYYTSTTEFNCGIDLHAQQMYVCVMDREGNKLVHTNIQGNDFAFFLKRVAPYRHSLTVVCECTFNWYWLADACFEAKLPFVLAHALYLSLIHGGKNKNDRIDSEKLAHLLRSNLIPPSYIYPSDRRPIRALLRQRMSYVWQRSALMTHVSMNQTAEGLVPAAKGGHNRDVWVERILAQYENPLHRMAVTCEMDMIRAYDTQIQTLEDEIIRQAKQHEGRDYHLLITVTGIGRILAMTILFEIDAIERFPSVKNFLSYARLVKGSVASAGKIKGLTGGKMGNAYLRWAFGEAAVICKRNHPLLTPYADRLIAKRGKFKGNAILAAKLARAVYFMLQKGTAFDAEKLIATSL

SEQ ID NO: 330778 - protein, 277 aa, unidentified
MEQVIGIDLAKRVFQLHIVSPLGKTIKNTVIMREKLTEFIAQQPPSKIVMEACGSANYWSRQFKRFGHEVKQISPQYVAPFRMGSKNDKNDAAAIVEADSRPGMRYVPEKTQEQQDIQCLHRVRQRLMKNRTALINQIRGLGLEYGIAIPESAHKVEQCLPDYLENAENDLTPLSRELFQELLRELKEQQQRLNVLDKRLDQLNAQQEDIRRLLTLPGIGPLGASALMVALGDSKDFKNGRHFASYLGLVPREHSSGGKVRLLGITKRGGIATCVEY

SEQ ID NO: 330779 - protein, 302 aa, unidentified
MEIHTVGIDLAKTVFHFVGLNARGEVVVQRKCSRSQLLRFTSNLRVCLIGMEACGGAHFLGRALRDQGHDVRLMPAQYVKPYVKTNKNDYIDAEAIAEAVGRPRMRFVPIKTDDQLDLQSLHRIRERWIVRRTAVINQIRGLLLERGITIRKGRLYIEASLPAILEDADNKLSGILRVLLAQLQLEMQYLGRQIDESDKLILGIAKGMDSCRRLITIPGIGPLTATATIAAIGNGAAFKKGRGFAAWLGVVPGEHSTGGKQKLTGTSKRGNKYLRKLFVQGAHTVLLQKNKQSASTRLRTHA

SEQ ID NO: 330780 - protein, 346 aa, unidentified
MEQYVGLDVSLKMTAICIVDRAGKIQREGTVASDPAAIAAFVRQHAPNVARIGLETGATSTWLWTELRKLELPIICIDARHAKAALKMQINKSDRNDAVGIARIMQCGWYKEVRVKSLDSHAIKALLVSRALLVKIKRDLENQVRGLLKNLGLVIGRTKMNAFVVRTAELTEDQPELAVAIEPLLKAREAVEKQIADLDRKAMRLARSDVQVRRFMTVPGIGPITALCYLATIDDPTRFKRSRSVGAYVGLTSRRFASGEVDWTGRISKCGDIMMRSYLYEAAGVLLTRVAKWSVLKAWGMRVAKRSGLRKAKVAVARKLAVILHRMWIDGTEFKWSSKEEAVQPA

SEQ ID NO: 330781 - protein, 326 aa, unidentified
MQGKEAPEQDAKAKCSVGIDVSKEKLDVCVLPSGECLTVANSREGIRRLKRWLAHFDLALTVVEATGKWHRQLWRSLHSSAIPVAMVDPFKVRMFAKATGILAKTDRLDAAVLARFAAVMTPAIRPPPPQALEELAELVTARDAAIAEQTSLKNQLSVAKVAMLQRQLGKRIDRIAKDIATLEREILARIMANQSLARRYQILTSIPSIGPAVAATLIARLAELGALTDKQVAMLAGLAPIADQSGSHDGRRVVFGGRAGVRRMLYLAAVAAIRWNPQMSVFYRRLRQAGKPAKTAIVAVARKLVILANKLIADNRTWSPNAPTPA

SEQ ID NO: 330782 - protein, 340 aa, unidentified
MTEIKRIAIDTSKSVFTLHGVDDAGRAVLRRNLRRGELLRYFEKLPPVEVALEACGGSHHWGRALAALGHRVRLIPPQYVKPFVKRGKNDRNDAEAIAVAAAQPSIGSVPIKSVEQQAAAMLLSVRELLVRQRTQLVNAVRGHAAEMGAVAPLGEKGLKELQAEIAAADEAAVPAAAKQAIALLSREAERIEIRLRAIEAELLQQHKANPVSRRLAAIPGIGPIGALNLALRVDQTQFASARHFAAWLGLVPRECSTAGRQRLGGISRAGDERLRQLLVLGATAVIQHAKPGRPATSQWLLNLLSHKPRKLAAVALANKMARIVWALMTSGKTYRPAPAA

SEQ ID NO: 330783 - protein, 340 aa, unidentified
MNTSTKFFIGIDVSKPHFDVSLMAVINHEKQAIETAHFDNTHAGMKAFDKWLKKNKVSFDVNTLLVIENTGIYHRLLWSFCSNKNLPIHIGNAAHIKWSFGIARGKNDIIDSMRLCQYAFKESDTLKSTPALNPILMQLKDLMTARTKLVSQINSIKTYIKELKSVNDKAIQKLLEQAHRKAIEGIEQSIKDIEVQIKKIITENPTLKTNYDLVITVPGIGHLTAVYLICCTNNFAGKISGKQLACYAGVVPFEHTSGISIKGRNRVHPMANKDLKKMLHMCALSAIQYCQEFKTYYNRKKQEGKHSMSVLNAIRNKIALRVVAVVNNQKPYVNNIKIAA

SEQ ID NO: 330784 - protein, 360 aa, unidentified
MFTERTSVGLDVHARSVVAHALDTITGEVLRARLCPDPVEVTRWVKGLPGPAAVIYEAGPTGFGLARVLGSEQIRTVVAAPSKLQRPAGDRVKTDAHDAEHLATLFRLDAFTPVTVPDEATEAARDLVRAREDCRADLMRARHRLSKLLLRHGIVYSGGKAWTGTHQAWLRRQRFGSVLTQAAFDEAYDTVASITARRDRLEQRINVLAGDSQYTAVVRRLGCLRGISTLTGLGLAVEIGDWTRFSGNSIGAYLGLIPSESSSGQSRSQGPITKTGNSHVRRLLVEAAWHHRVRYVPGKTMKDRFDLASPAARARGDLGNRRLHQRWEQFQARKKRPTVANTAIARELAGWCWSLAVLDP

SEQ ID NO: 330785 - protein, 334 aa, unidentified
MYKYIGLDAHSSTCTFCVVDEKGVVIDSTRIRTNGRLIRNFIRSIDGKRMLTFEECEMSGWLYGLLAKEVDEILVCNPVHNVGYKGKKTDKFDAQNLAQLLRGGFLSPVFHDGSEREQFRDLMSAYTDLVVDAVRCKNRYKSLFRKTGNRIKGELLYSDESLLKGLRRPDLNFIGAHWYESLQRYEESRKAFIKEIRKQSKNFKEVRRLQTIPGIGLIRAAQISAQVIDPFRFVNKYHFYSYCGLVRHVLESGEREYGSSLIWGNRTLKCVYKMAAQNAIRGENGLRLYYERLLKKGITETNARNAVSRKIAAISLSMWKKKTNYDEKKLITVI

SEQ ID NO: 330786 - protein, 367 aa, unidentified
MRKHNTVGKSSVTRKRANRKLTVGIDLGDRSSRYCILDEQGEVLAEGSVATTKKGFAQIFGSKPRSRVALEVGTHSPWVSRYLADLGHEVMVANPRRVRLITDSTRKDDRLDAKTLARLARIDPELLSPIRHRSERAQADLMVIRARALLVEARTMLVNAARGLTKSYGERLGSCGTGQVGEELARSLSEPLQNALKPLLAEVESVSAHIREYDEQIENMGKSRYPEIELLQQVHGVGTLTALTYVLTVEDPYRFRRSRDAGAYFGLRPRRRESGDSRPQLRITKEGDAYVRKLLVQCAHHILGPFGADSDLRRWGLELAARGGKNAKKRALVAVARKLAVLLHKLWVSGEVYDPLHVRRHSKIEAA

SEQ ID NO: 330787 - protein, 406 aa, unidentified
MNPVVGLDISKGESQVQAFLDKGKPYQRSFKITHTVEGLNLLVAFLEDVKKESGQKPSVVLEATGHYQAPVVHYLEERGYLLIIINPLISYKARGSSLRKVKTDAIDAYLLCELFYKEELEPYKKRGVQLLNLRNLTRQHENITGVMIQTKLQFQAVLEQVFPEYKGVFGDLYSVVSLLTLSEDILKASEEAMTARIFELCKSRSIKWANEKAIQLKAAAARNPFEKTVYQSHILSLGMYINILLQYKEHLSKLEAEIDALAKEIEEYTILKSIPGIGEKIAATIISEIGEIDRFNNPKKLVAFSGVDPSVFESGKFTATKNRITKRGSSRLRHALYMAVRCAIRDCRKSKTTDEIIPRNKKLRVFYDKKREEGKPYKVAVIACVNKLLHWIFALLKNKMTFQDIV

SEQ ID NO: 330788 - protein, 349 aa, unidentified
MSHKSALPTVSTIGVDLGKNSFHLVGLDQRGTIVWQLKCSRAQLERRLANFPRCLIGMEACSGAHYIGRQLAALGHDVRLMPAQYVKPFLKGHKNDYRDAEAIAEAVQRPTMHFVAIKTPEQMDLLALHRVRSRLVSQRTGVINQIRGFLLERGITVRQGVVPLRKALPDILSSNTPALSPRMVNLIAELVQDWRRLDERIAAVSAEIESLAEQDEACQRVMTVPGVGPIISSAVVAAIGNGAGFTQGRDFGAWLGLVPKQESTGDRTILGKISKRGNKYLRTLFVQAAHVVLARRPSAAMRGLWPWIEQASRRLHRNMLAIALANKLARIAWAVLARGRSYQPRIVAI

SEQ ID NO: 330789 - protein, 439 aa, unidentified
MSTLTSTAPTTEFAARVGIDWADQKHVWAMRTADGKLQRGELDHTPEAVQAWAAKLEQDFGGRPVAVALEQARGALIAMLCKYAHLVLFPIHPNTVQNYRQAFYPSGAKSDPCDGDLILELLVSHPERLRRMEPDTEATRSLQFLTEERRGLVNRQTSETQRLLNWLKQIYPQILEWFPEPACAMVGEWLLRWPTLQAVQKVKAHVLRNFLRKHNCRSAERIEERIQQIGQAVPATNDAALLRVGVLCIQHSVRILQQFRQGIAEFDELIASTYRDHPDRPLMESFPGAGSALEPRLIAAVGTLRERFPSAQSLASYAGIAPVKAASGKSARTHWRFACPKFIRQTFHEWAGCSIRFCDWAKQHYESQRAKGKKHHAAVRSVAFKWIRIFYRCWRDRVPYSDQLYQKARQARAATAPSAGVNFEWKSCGGFSKLTAISS

SEQ ID NO: 330790 - protein, 338 aa, unidentified
MKLYAAIDLHSNNNVTVVIDEEDKVVYEKRLPNDLGVISQQLSAYRSSLEGIVVESTYNWYWLVDGLMDKGHTLHLANTAAIQQYQGLKYTDDKSDARWLAHILRLGVLPQGYIYPKAERPVRDLLRKRGQLVRQRTANLLSIQNLLTRNTGSAMNSNRIKTLDAKQVDQLLTNPDLSLAVQANLAMMQCGNQQIDLLERTITDRIKLREEFSFLKTVPGIGQTLALTIMLETGDIGRFAGVGNYASYCRCVGSQKISNGKKKGKGNTKNGNKYLSWAFIEAANFAIRFSSRIRSFYQRKKAKSHGVVALKAVAHKLCRACYYIMKNRVAFDVTKAFA

SEQ ID NO: 330791 - protein, 354 aa, unidentified
MSRKTTNLEAVATIGVDIGKNTFHLIGFDEKGAIVLRQKLLRGQVVTRLANMPLCLIGMEACVGAHHLGRQLKALGHDARLMPARYVRPYSKGQKNDFRDAEAIAEAVLRPTMKFVAIKTVEQLDLQALHRVRERLVSQRTSVINQIRAFLLERGIAVRQGLRALRTEIPIVLAMTDKLSPRMIRMIEDLCTDWHYLDERIETVSDEIATLSEQDEGAKRLMTVPGIGPIISTATVAAIGRGDVFSKGRDFGAWLGLVPRQMSTGGRTVLGPISKRGNRYLRMLFVQAANAVLLHPQSWEKHGLKSWIEAAARRLNRFKLAIALANKLARIAWGVLHGGRNFEVRSMKSAAQAA

SEQ ID NO: 330792 - protein, 345 aa, unidentified
MERYLGLDMHRDSCTAVVLSAGGKKTGQQVVPTEAAALVQYVKSLSGELHVCVEEGEWSEWVVEILSPWVDRVVSCTAPGRRGPRSDAMDARELAERLRTRQTGPPVYKASREWSRLREAVRLEGKLLQDEVRAKQRLKSLYRRRGVACVNEEVYSPQLRVAWNAKLPASVRPSAELLGQELELLLELQQTAEQQMFAAAKEFPMWKTLRTVPGIGRKRAAQLLAIVVTPHRFRTKRLFWSYSGLGIVTRSTSDWIRQKNGQMVRSPVYQTRGLNKACNRQLKDIFVGAARAALRCRRPNPLLDAYERMVEAGTKPNLARLTIARKIAAVVLAMWKTESEYRIMS

SEQ ID NO: 330793 - protein, 403 aa, unidentified
MNAVGIDISKGKSMISIMRPLGEIVSKPFEISHTPSELDNLANYLKSLEGETKIIMEYTGKYYQPIAQFLIEKGFFVSIIHAKLIHDFGNNSIRKVKTDKADAIKIANYGLTNWQELRAQTNEDKSRILLKSYNRQYNQYMKTKTALKNNLIAILDQTFTHCNNLFSSPRKPDGHEKWVDFTNRFWHAECVTKQSLNAFTKTYNSWCRKNGYYQNSKKAAEIYKLAQDCLPTLPYNNFTKQLVKLAVKQVNEVAITISTLQKEMNQLASTLPEYPIVLSLGGVAETLGPQLIAEIGDIRRFNKKQSLVAFSGVDAPPFQSGTFESKSRKISKRGSSNLRKTLFQVMICLLQTTLVNDPVYQFLDRKRQEGKNYYVYMVAGCNKFLRIYYARVKEYLISTEEFL

SEQ ID NO: 330794 - protein, 411 aa, unidentified
MEPTDYLFVGVDTHKNQHTAAVMNCFHQSLDTIDFPNNTNSFPDLISQIKAIDNNDRKLIFGLEDTQGLGRSLAQWLVQKGYIVKDVNPALTKRERHHSTNPDKSDEVDAKAIAEILFANQDKLPTIKEDKIYISIRRIYNCYNRLIKQSTEIKNELHTLLHQQYPEYEKFFSDPFGKTALAFWSEFPHPSKLKHYGIKRLNKFLKKQVKSISNDKAELILSLVDKDTQNDFATKTNNQLIKMAITHLKTIKQNIEKTKEKLENAIENTDYQLTSMPGIGTILAATFISNIKDINRFSSASKLARYAGIAPAQYSSGKSSHYRSKKYGCRDLNKAFHQLAIQQIGKTSNNLAKNLAGYSYYLKKIDEGKCHKVAITCLKRRLVDIIYAMMRDRSKYRIPEKSDNIIQNQAV

SEQ ID NO: 330795 - protein, 311 aa, unidentified
MAYRIEDQVISTKVYRNNKKGVKSFLKTIDGNCWCIMEATGVYHLLLALAISKKEIDVSVVNPLQIKRFTQTKLSRTKTDKADAMLIAEYGYRMKPKLYTAPEEFVQELKQLRSLVRMLKRNNRALLNQKHVLQRRDNTSKMALKICKSTIKSNNTQIKKIEDEMECIVKEHCKDIYDQLCSIPSISRITATEFIIVSNAFKNFNTAKEFACFIGISPCINEPGSSIRGYRGISRVGDAHTRSTLYMCAMMAKVCNKACKETFDRLVERGKPKKLALIAVMNKLIKQAFAIVKSGNMYSENPQTKLIQNFS

SEQ ID NO: 330796 - protein, 387 aa, unidentified
MQKPHDDSKACLTAFVQDSTLTAVIEMSLGSWLVAGMIPGINRQPRKKIGPNPELLLQLLYRWRDEAIKAGKEVTRIAVAYETGRDGFWLARWLRARGIDAHVIHATSVAVSREHRRVKTDRIDTAILQRGFLGWLRGERGHCSMAIVPTVEEEDGRCPHRERETLVRTRTSTVNRMKSILIQFGVRNFNPMLRKAPEKLVAVRTPEGIALPPNAVAALRRHMERLRVTKEQIKAIEQTRLQRLQRDPADKSNAMVFLLGRIIGLGIETAEQLVHEILSRNLRDRKAVARYAGLTGSPDESGATRRDKGLSRSGNARVRKILIQLSWRLLKFQPESALVLWFNARTANAKGSRKLMMVALARKLIIALWRYANMGLVPEGFQLRPVA

SEQ ID NO: 330797 - protein, 395 aa, unidentified
MRRPVSGRDAERSQVIDVLKAQIKRRPARKKVSTVGTQQRRNISQQKLTIGLDLGDRNSWYCVLDEAGQIQLEQRVRTSAKTLGEVFGAMPRCRITLEIGTHSPWISRLLSELGHEVIVANARKVRLIGESRKRDDRLDAQTLARLARIDPQLLCPVKHRSAQAQADLMMIRARAGLVRARTGLVNAARGLAKSYGERLRGCKVRNMNPEKAEGLSPELQRALEPLLSAIEELNERICEYNDRIGALAQQSYPQVALLKQIKGVGTLIAPTFLLTLEDPHRFGKSRDVGCYLGLQPGRRNSGQSEPQRPISKEGDPYLRTLLVQGAQHILGPFGVDCDLRRWGLKLAERGGRKGKKRAIVATARKLAVLLHHPWVSGEVYEPLHNSRQTTVAAAA

SEQ ID NO: 330798 - protein, 338 aa, unidentified
MKKTVIGIDISKKSLDWCVIDGKEVVDYHRTTNEMDAIVKKMAEILSNGDRDIMDVLVCAEYTGRYIYPLVLACYKCGVDLWLESGYNIKCEARKERGKDDRTDARRIAEYGRKNQDDARIYHLPAKSIATLRDLISERALYCSQRAAHKGQLRDERQYMDPKAYTARAVRQLSLVKELDRLVEEVDKNMAEIIASDPELQRQKELLLTIPGVGIICATALIAVTAGFSLFDNGRELCCFAGLAPFAYTSGTSIRSAKRVSGRADHELKALLHMCALVAATRRKTGHFAEYYKRKIAEGKNKMSVLNAVRAKLMLTAFAVVRNNRPYEENFKNNFVKS

SEQ ID NO: 330799 - protein, 344 aa, unidentified
MTYYAALDVGLRTTAVCIVDGNGEIQLEKSLPSEVDDIVTCLRGFGAQIAAVGLEAGTLTQWLTYGLRAADFRPVVMEARHVKAALGAMRNKTDRNDARGIAQILRTGWYREVYVKSLESHYVRTLLASRKALLRKCIDLENEVRGLLKVFGIKLRAGIRHGAFDAATREPIEANAMLAHALIPLLDVRLELYRAFLELDRRVRALAHGDDICLLLMTTPGVGYITALTFRAAVDDPRRFRRSKNVAAHFGLTPRRYQSGERDSPGRISKAGDTEVRSALYTAANIILTRSTKWSSLKAWGVRLARSKGRKRALVAIARKLAVILHAMWIGGTPFSHQAPEVAS

SEQ ID NO: 330800 - protein, 381 aa, unidentified
MKVVFPTCCGVDVHKTFVVATIITTPADSLQPHYQKKRFSTFNSDLNRFADWLLEHNCLDVCMESTGKYWVPVFNILEKRGIQVVIANPKWVKAVKGNKDDTKDSKWIGDLFRIGLVKSSFIPDRNIRILREFTRYRYKLVSMKSSEKNRFQNAFTVCNVALDCVVSDMFGKSATAITDYLTSDGSFDPEHCVSLLQCSLKKKAEQVLESIEGFSIADEQKARIKIVREHYDFIEKLIAKIDTCVNEMVAKYEGEINLLCTIPGIDRKSAITVISEIGTDMNQFGSSKRLCCWAGLTPGNNESAGKKKSVQIAKAGAYLKPMMVCIYHMVSEKKPFSPTDYEELMNPRNHVERVVLNEDNVFAYLESLGYDSSKLVKRNDN

SEQ ID NO: 330801 - protein, 425 aa, unidentified
MGTSKVPTFTQGGDLMIYVGIDWADDHHDVAITDDSAQTLSTFQISHDSSGFALLQAKLASFHQPPDQILVALETNRGLLIHELLRSGYSVYAINPKAVNRYKDRYVLSQAKSDSLDALALAHLLRTDRQRFKVLKPFPEDYRLLDRLCQDLRKLVDEKSRISNQITSVLKEFYPQALELFSVDSNIGIAFLRAFPDPQALSTCKKKSFEAFSKKHHYSRPQKVEELWKLVQSPALQSDPVVLKAGRFRLLALLDQLVPLREHLIRYEKEVKAILDKLPEAKSVSSLPGMGDRLAPELTAALGPKASDSKTRFQSAEEIMRLSGCVPVTRQSGKWKAVSLRYACVKSLRRTFRDWAFASLSQSIWARAYYDFYKAMNMPHSTILRNLGKKWARILFAVWVKGIPYDEALYIQSLKNHNVRWALAL

SEQ ID NO: 330802 - protein, 333 aa, unidentified
MEKKYYIGLDVHKRQTTYAVKDWNGVTLDSGETATQFADLQSVLVKYIKRGVFVMEACTNYYHLYKEMKEKKIDVHVANVLQLRKLIGKNDKLDSERLADMLRLNAMPESYIPEERIQNLRILIGLYHSEVIARVRYNNQIDAVLDRNGINLPVKNPFSKKGLVCINQYLQENNNFAIRTLLEGMKTLNERIEHLSSEILVYIKNNFLQEYELLKSIPGVGDVLAGYLIAEICPIDRFANKRKLRRYAGVVPVREQSDKKIYATYLPKHASRKLLRYALVLAANCAVRTDCRPRKYYQKKKKGRNHGHAIMCVASSLSDIVYMVLKTKQPYNL

SEQ ID NO: 330803 - protein, 347 aa, unidentified
MRFLSQTAASYVGVDLHARTLFVCVLDAAGTVRLAKNLPARPEPFLTAVAPFRPDLLVGCECMHCWYWLADTCREQDIPFALGHAWAMKAVHGSKTKSDRKDAEAIARLLRGGNFPLAYTYPKEWRGLRDLMRTRLRLVRQRAELYGHIHTVRRQLNLEPVGSDVKYVSRRDAVAADIPDEHTRRGVEARLNLLGPLDTEIRRLERDIEIAAEEHYPSELAVLRTIPGVGRIISLTILLEIDTVTRFDSRQQFCSYARLITPKQESGGKIVGVGNARSGNAYLKWAFSEAAVLSAQKDEKMKACLAKLQSRHGSGKGLSIFAHKLGRVVYHLLHTKRVFDVDRFVRH

SEQ ID NO: 330804 - protein, 358 aa, unidentified
MVQRKELNFEGQNIYIGIDVHLKTWHVSILTESGCLKKHSQQSSAQALFEHLKKHYPNGNYLSAYEAGFSGFSTYYSLLDFGIECLPVHAADIPTGQYESVMKTDAIDSTKIARALKSGLLRGIYIPKKEVLDDRNVMRLRITLKRQLSGYKSRVKHLLYNNGVIYPECFQNSKSHWSKRYLKWVHEDVQLLSESRNSLDLLLRQVELFRKSLLEITRLVRTLSRNGRYGEAYENIVSIPGIGMITGMCLLTEIGDIHRFRNERQFASYLGLVPTSHSSGEKTSHGEMMFRGNKRLGPLLVESALVAIRQDRALAAAYGEYCKRMLPQEAIIRITRKLSNRILIILKSGKKYEHDRCY

SEQ ID NO: 330805 - protein, 349 aa, unidentified
MKLSKKSSDSQTQQMYDYYIGIDWSLEKASIAHMKSNSIEPKVRDIVSPDIRSIKEYLQELRGTKILTIEETTGSQWLYVELKESVDKIIICNPLRNKLLDEGPKTDKIDSRKLCQLLRGNLVKEVYHTDNEQYKIRKLASGYEDLVKSRARVKNEISALYRSIGIRDKKGRGYDKSDETLNFILGQKKRVLETLELESKEYEELFKGIAKKNAVIRSIKKISGFGPILSVEGYSIVIDAGRFKNKYKFWAYSGLVKIKRESGKTSYTRNSKQYSRKLKCIFKMATKAALIGKNDIREYYEYLLQNGNTQKESRNAVTRYIATSFYAVMKHSVNYEPYYWRKKIEQKAA

SEQ ID NO: 330806 - protein, 420 aa, unidentified
MSLPVGDAACFVGIDWAAASHSVCVLGPDGERRAAFTVEHSAAGLAELSRRLGRLGAAESVPVAVERPDGRLVDALLEAGHPVVPVSPNAIKTWRESEVASGAKPDAGDAQVIADYLRCRARRLTAATPYSAETKALRTVVRTRDDLVDMRVAATNQLCALLETHWPGGKAIFADVESPVALAFLTRYPTAAHAERLGEKRVAAFCAKHGYSGRRTPAQLLARLRAAPAGTTDPTLCEAVRDAVLALVSVLTALGAALKDTGRSVAATLGEHPDAEIFTSLPRSGQINAAQMLAEWGDCRQAYDGPDAVAALAGATPVTKESGKHRAVHFRWACNKRFRLAVTTFADNSRHASPWAARVYADARARGCDHPHAIRILARAWIRVIWRCWTDRTPYDPDRHGAARRLTGQDQPKSEDQHAA

SEQ ID NO: 330807 - protein, 342 aa, unidentified
MTITTIGFDIAKGVVQAHGVDAGGRAVVRKRLSRAGALAFFERLEPCVVGLEACGGAHYWARELRRFGHEARLIAPHYVKPYVKRSKTDAADAAGICEAVSRPHMRFVPIKSVDEQALAQAHKARSLLVAQRTALINALRAHLTEFGVVAPMGPAGSARLIALLRSGDAPIPDLAVEALVDLSDMIEATSAKIAAFDTRLKAIASADEACRRLMKVPGVGPVAAGAIRALAGDVTRFANGRDFAAWLGLTPRQNSSGGKVRLGGITKAGNRDLRALLVLGQMAVFRHASAHPEKASPWVAALIKRRPPLVAAVAMAAKTARIIWAMLARGEAYRPRLAAQAG

SEQ ID NO: 330808 - protein, 321 aa, unidentified
MGEIFVGVDVSGKRLDIAVRPMGERLRFEVSEPLSDVLEQIASRSPTLVVMEATGGLEKPLATALCAAGVAVAVVNPRCPRDFARSLNRHAKTDTIDAEVLAHFGEATRPKPYEAPSETVEKLRALVTRRRQLASMRGQERAIKSSPGATHAALESSFAQLSQCFDALIRELDRAIVRVVGDDERTRAKHALLRSVPGVGPVTASTLIAALPELGVLDRKQIAALAGVAPFNCESGTRKGQRVCWGGRADVRVALFMATMVGVRGKGVNKPIHEMFVRLCARGKKPIVALVACMRKLLTILNAMVRDDRHFVRTTAPQLAA

SEQ ID NO: 330809 - protein, 364 aa, unidentified
MAAFGLSLEAPKEALMLHVGLDLSRKRVDVCVFDTEGEVRCRLTVPPDADGLRQLAARFPGERVRAVVESMTGARFVHDTLEGCGWVVEVADAQRVKALAPLTAKTDRIDARVLAGLSYRDLIPAVWLPPPEVRGMRELARFRLHLVRHRTGLKNRIHSSLITWGIAVPVSDLFGLGGRNLLGRLELPPAWRETTQATLEAIDHLDGQITECDRQLRHAGQGDPTVRLLQTIPGIGPILGFTIAAEIGDISRFPTAKHLVGYTGLCPRVHQSGDSDWRGPLAKHGPRWLRWALIEATTWASQHPAYHQRYQTISRRLGRQRGPAVARVDCARQLTTAIWWMLTRQQPFQPASPTPPSGRLTTHP

SEQ ID NO: 330810 - protein, 402 aa, unidentified
MNCVGIDVSHGKSIIVVMRPFGEVVVSPFEVLHTDSELSKLAGLLKSLDGETRVVMESTGYHHTPVAWLLHDAGLYVSVVNAMLVHDYGNNSLRRAKTDKKDAVKLANYGLDHWLTLPRYIPEEDTRLMLKICYRQYQQYSKVQTMLKNNLISLLDTTFPDANRLFTSPPRADGSEKWVDFVATFWHCECVCGRSEKAFTTQYQKWCRKHGYNFSEDKALDIYASACRHFGVIPKTDTAKLLVEQAISQLQTTSSALAALKQEMQSLAASLPEYPVVMGMFGVGPTLGPQLLAEIGDVRRFHSKKALVAFAGIDAPPYQSGQIDVRSRSISKRGSASLRRTLFLVMSVILQCAPIDEPVYQFMDKKRSEGKPYRVYMMASANKFLRIYYASVKAYLESLEHD

SEQ ID NO: 330811 - protein, 337 aa, unidentified
MKITTIGLDLAKSVFHVVCFDARHQEVSKRMLRRSQVLAYFAQLEPCVVAMEACAGAHYWGRELEKLGHTAKLIPPQFVKPYVKGNKNDYNDARAIAEAATRPGMRFVGIQTVEQQDIQALHRLRAQQVKQRTALCNQLRALVAEYGIVMNKGVAALRRGIPRLLEDAENGLSEAFRALLSRGYEQLLEREGHIDDYTRRVEAHSRQNEQTRRLQTLPGYGPIVASVFASVVGDGSAFKRGRDVSACLGLVPRQHSSGGKEVLLGISKRGDKYLRSLLIHGARSVVLHARNKEDALSRWVNRVRERRGTNKAAVALANKLARRGWALLRHETVYRPA

SEQ ID NO: 330812 - protein, 300 aa, unidentified
MKHYAGLDVSLEETALCIVDEVGRIVRETRAPTEPEALVTTLREIGLPVERIGLEACSLTAWLHDELRAADLPAVCIETRQANAAMKTMPNKTDRNDARALAQIMRTGWFRQVHVKSRPCRLWRSLLVARRTVLNEMRAIENVVRAVLREAGLKLGTPARAAFAQRVCELAGEDRAVMPIIEPLLAILETMLAELARLTKQVLALARNEEVCQRLMTVPGVGPITALTFRATIDRPDRFRRSRDVGAHLGLTPARYQSGETDIQGKISRCGDELARTALYEAAHTLLVRSRKWSSVRAWA

SEQ ID NO: 330813 - protein, 436 aa, unidentified
MNKKIRYRTVPVEQFDATGALEGWSPTVTVVVAIDVAKTKFVAAISASAGDTPDLVAWEHPRQTAVFLELIGTLATAGRQVVAVLEPTGTYGDALRHQLSSRSVEVRRVSPKQVHDAAELLDGVPSKHDAKDARLISWLHFQGKSHPWPPANKAQRMLRALVDERELYFRPMQAALGMLEALNARHFPELGRAFDVPRRRSLWAVLEAFPAPADIARDPEAVRSVLRKASHGQLTRRADELVAIAMSSTGAPMDEHDKRLVQHVVREVRRCQLELDRVDAEIKGAVDVPPLAPLRDVLGPVTTAVIVAHLGSPADYGSAAAFQKACGLNLKERSSGQHIGKLHITKRGPGIVRKYLYLAALRLVQSDPVVRAWYLARAAHRAEAKSKAVIAVVRKLALALVHVARGAPFDAARLFDTRRLDSSASPDTPTFTEAAA

SEQ ID NO: 330814 - protein, 421 aa, unidentified
MKFKSQDKQNQLIENITVSHLVIGIDIAQEVHVARAVSFRGIALGTPLEFGNHREGFNQFERWIQDLLKSYKLSSIIVGMEPTGHYWFSLARWLLDQGIEPVLVNPHLVKKNKENRDNTPSKSDHKDALVIADMVKNGYYSPVRFHPEAYEELRILMANRETVTKRLNAAVNQIHRWVDIVFPELRQVFKILTCISAIATLRLFPLPKDISRLSTEQVLGGWKQYVKRHAGVKRAELLITLAKSSVGTTQALHAYKLHLGQLLEEYDLAQRQLEQIEHELRLILEHIPYAQQLLEIRGVYVTNLAGVLGEAGDLSGYAHGNALLRHAGLNLAEASSGKWRGKMVLSKRGRPRLRHFLYLMTMSMVMTNPEIRAAHRYNVEEKRLKKMKSIMKLCGKVARMLVALAKNNSSYEPIKVFPKAV

SEQ ID NO: 330815 - protein, 355 aa, unidentified
MPSKADTAVARTIGIDTGKNTLHMIGLDEKGAIVLREKVSRTRIAARFVNLPPCLVGIEAGMASHHVARELVALGHEVKQVPPAYSKPFRQGHKNDFRDAHAVAEAVERPSTRCVPVKTDGQLDLQALHRVRSRLIGNRTAVINQIRGFLLEHGIPVRQGYRFLRQQLPQILATRTDVLSPRMIRIVGDLMADWKYLDERIEGVTDEIEALAHADEGCQQLITVPGIGPIISSAMVAAIGNGAAFCKGRDFAAWLGLVPKQMSTGDRTILGRITKRGNRYLRMLFIQGARAVLLRPASWAKHSFGSWLTAATRRLHRNVLTVALANKLARIAWTVLAQGRRYEARVEPRVEPAAA

SEQ ID NO: 330816 - protein, 387 aa, unidentified
MISVGIDVAKRTHEACFMGQDGREVSKPLRFRNTLAGVRALLEDVQRLPQPVTIGLEATGHYWLALHDALVRAGLQVQVLNPLQTHAYRRTTVRKVKSDRGDAWLIADVVRIGRGRAAYVPDETILQLRELTRFRWGLIDQIGDAKRKALTILDRVFPEDEGLFSDVFITSSRALLRQATTAAEFAAADLDELAALLRRTSRGKLGRPKAEAVQAAARDSLGLERLGAVAGFELRALLDQIAFLEQHVAATEREIEALLATVEQHLTDIKGLSAVLAASLLAEIGDIGRFPRLESLVAYAGLDPTVFSSGEFTASQAHMSKRGSPYLRRALWLAALSASRWNPDLDAYLQRRLAEGKPWAVAMGAVARKLLARISVVLKENRPYEVR

SEQ ID NO: 330817 - protein, 352 aa, unidentified
METAYDGRQVVGIDLHRRRSVLVRMTEDGRRLGTAKITNSPQELRREIARAGKAPKVVLEATYGWYWAADTLAAAGAEVHLAHPLGVKAFTYRRVKNDERDSADLADLLRMGRLPEAWIAPHEVRELRELTRYRIKLVRLRTSCKDQVHGVLAKLGVTVTCTDIFGKAGSAWLDQLRLPQPYAGKVTSLRHLAGELTTEITMLSEVIASLLAGDRGYQAIQQLPGIGPVLAAVIVAEIGDVIRFRNAGQLCSWAGLTPRHRESDTKVARGHVTKQGSRLLRWALIEAIQRIPKDCVIGGVKDAIIARRGKEARNIAKVAAARRLLILVFYGMRDGQIRCLTPPAAARTARAA

SEQ ID NO: 330818 - protein, 406 aa, unidentified
MSMNAVGIDVSKRKSTVAILRPGGEVVASPFDVPHLSGCFQPLIQHIRALNGQTRIVMECTGRYYEPVARQLSQAGFFVCAVNPQIIHGFQGQDNPLRRVKTDKADSIKIARYTLDNWANLKQYTLMDELRTQLKTMNRQFDFYMKHKTAMKNNLIGLIDLAYPGANTYFDSPAREDGSQKWVDFLDTYWHVDCVRKMSCNAFTLHYQKWCCRKKYNFSRLKAEEIYETAKELIPVLPKDDFTKRIIKQAIQQLNAASQTVEQLRILMNETAAKLPEYPIVMAMKGVGPSLGPQLMAEIGDVARFTHKGAITAFAGVDPGVNDSGDYSQKSVHVSKHGSPALRKTLYQVMDVLIKTKPDDPVYLFMDKKRAQGKPYYVYMTAGANKFLRIYYGRVKEYLASLPALE

SEQ ID NO: 330819 - protein, 466 aa, unidentified
MKPFYMGIDVSKGYADFMIIDAQKKPVIKGFQLDDTFYGHQSLYNIVGRFLSEHSNAMLFVGLESTGAYENNWYNSLTAFQGSLDIQTARLNPLGVKRNSQADLKKNTTDKISAQNIAEYLVAHPEKVTYQQQDQLAGLRKQWGFIQMLTKQRTQFLNQFKGLLYTSNPELLRYCQTETPAWILKLVAQYPSAARLKKAKAKTVAKIPYVLKEKAQRLVADAKRSVASATDTATEELVVATARQITHLNKTIDEQTRRMIKTCDVPEIELLKTFPGISDKSAIGLFIEIQTVKRFASAKKLSSFFGVHPVYKISGDGIGGIKMSKQGRKHPRHILYMVALAALQYNPLIKHIYEKHQKNGKHNMAAMGICMHKILRIIYGMLKHNKPFDPRIDIANSHRSVPSKKASPKRNPSRRFQAYDFKAPVSRRQNKKRLEQDESHSVNNTNSGITEPVPAGDTIANILPEL

SEQ ID NO: 330820 - protein, 347 aa, unidentified
MLALHQDLDVVIGVDTHKDTHTAAAVSATGAVMEHLTVPADPAGYRQLIAFGRRHGATLWAIEGTGSFGAGLTTALLSRCARIVEVDRPQRPARRGGVKSDDIDAVRAARQALAGVGLSEPRRRGDREAIRVLLATRAQAVTFRTRAISALHALVASAPDGLRERLRTLPLGQLLQTCAGLRDSSRRSVEESATVLAMRSTARRALACEREAAELEVQLDRLVRRLAPELLGKLGIGPVVAGQVIASWSHHGRVRSEAAFAKLGGAAPIEASSGIITRHRLNRSGDRQLNRALHTIVLVRMRQDGATKDYVQRRLAQGKTIRDIKRCLKRYIPRKLFRQLEALSSTT

SEQ ID NO: 330821 - protein, 342 aa, unidentified
MGRKIGVDLHKNSFRVCYYKSDDCYDFETHRVSIKGIEGFKRALKKTDELAVESTGNTGHFVRAIEGAVKRIRVINPIQFKIISESVKKTDDEDALKIAKFLSKDMIPEVRMKTKAESQLGSLIGTRDKLVKLRTALKNKVHNILNVNGIVTKTELLTSDKSLDKVLGKGLDASYQFELEIIVGEIRHLNEAIAKIDGQIKDRGRALKGFENVTSITGVGDLSGTILLNAIGDVKYFRDEKALAGYFGIVPRIRASNETVHMGRITKMGNKIARTALVQSTLIAIRYSQYLRTFYDRLKAKKGSGKAIIATARKLLGIVYNTLKNNWVFEDFPNYKLVPSCS

SEQ ID NO: 330822 - protein, 440 aa, unidentified
MTEFGKINLHAAGMDLGTEQIFVSTDGETVKAFGTFTSDLHDLKTYLIANGVTTVMMEATGVLWVPIFDILESAGINVCLVNAAHAKNVPAQKSDPADCRWLYKLHVYGLVRASFIPDEAIRELRIYIRQREDNKDIAASHIQHIQKAFELMNIKLHNVISDIMGVSGLSIIEAILAGEHDAEKLTALCNKQILKEKKEKVLESLKGNFKREYIFMMQQAYDAWCFYQKQIENCDIKIGELLKKMTENLPKPPQELLGKPKPSRHDDLNVDNLHDQLVCINNGRNATSLPGFSDSAVLKLTAELGTDFSKWATDKHFTSWLGLSPRKYQSGKTNKTRRSLKKNTKAGQIFKELSMSIAGSKHLALKGFYNRIKSRSGSKAAIKAVARKLAKLYYDYMTRGFTYVEQGLIEYEKKFKAAMIKGLEKKAKNIGYQLVPIGVH

SEQ ID NO: 330823 - protein, 425 aa, unidentified
MNSNTQNAKIEAITEKTLVIGIDVGSETHYARAFDHRGFEYSKKPFQFSNDEAGFESLQEWILDIKEKHEKENVVPGMEPTGHYWFNLGKYLQDNDMKPVLVNPHHVKKSKELDDNNPTKNDRKDPKVIAGLVKEGRYMIPYLPEGVYADLRSVSNIRFQLQSELTRIKNRISRWFNIYFPEYKKVYGNPEAISGMLILKQAPLPKDIQALGVEGVNRIWRDAKCRAVGIKRAKILVEAAEYSIGSQEGVVAARMEIRMLLEDYESRITRLQEVMALIEELVGKIPMAEKLLEIKGGGLKTVSGFLAEVGDISRFSNPKELQKLAGLALVENSSGKHKGETTISRRGRKRLRYLLFEVAMSLVSKNREFASLHHYYTTRKVNPLKKMQSLMAVAAKVIRVFYAILTKGVDYNPAKMLGDIKRPAV

SEQ ID NO: 330824 - protein, 379 aa, unidentified
MFKFIGVDLHKNNFTACFYRQGKYSFGKFPVSEVGLAQFLSKVNPKDHIALETVGNSRFFQKSVEPYVSSVSLVPTSAFSVIRQSTKKTDMNDAALIAFFLSKNMLPVARPKSDLHMHLLSIIKLRQHMMIVDNRFLNILNGFLSSEGIIVPKQKLKTKSGFAKYTTAKDWDEISKIEIDNIKDIHIVLKEKIAHLETEIGKYSQSLVGYEELLSISGIGHLSAPIFLCSIGDIRNFASPSKLASYFGIVPSVRISNGKKEFGRMTKRGSKLARTALIQCAWVRIKVNKKSKKLYEHHKKKKGAKRAIVVCARELLNIIYATLMEKSQAVAKAKSKKRVTLASVSRVQPISSTISKKRVPATKTRGMLSHARKTAPRPG

SEQ ID NO: 330825 - protein, 343 aa, unidentified
MQAITTIGLDLAKSVFQVHGVDAAGNVVVRRRLKRRYVLPFFQKLPPCLIGMEACASSHHWSRELGALGHTVRLMPPAYVKPYVKRHKNDVADAEAICEAVTRANMRFVPTKTPEQQSCLVLHRTRHLFIRQQTAVINAIRAHLTEFGIVAPVGRRGVEQLLDVVADTNDRRLPEVARACVAALGAQLRMLKARILEFDRLIMAWHRANQTSKRLDEIPGVGPALATALVASVADPKAFRSGRDFSAWIGLVPKQHSSGGKEKLGHISKRGDRYLRSLFAAGALAVIRYAKIHGTKHRPWLTALLARRPTRVAALALANKIARMAWAMMAKGERYKEPVALAA

SEQ ID NO: 330826 - protein, 416 aa, unidentified
MSTSQYQRTANLALVAAWPPTFCSSCTGKKMRPTLLCNGGSVACASSFNPRMAFGQSVAQPEPRTPGAPNSNRCQSVGFHRQLVYVRMSPNTIITMQTVPVTVYAGVDVAKASLQLHLQGRQAEFTNQPAGLAQLCQKLKTIPHVHVVCEATGGYERLLVQAMHQAQIPVSVTNPAQVRAAAQAQGKRAKTDRIDAALLSDYGQRYQPKPTPPTTSSQDQLVALTQWLTQLVQAQALAKTQAEHHQAAFVCGRHAKLMAHFRSQIAAVEKQIRALLAKDAQLQQRVDCLDEIKGVGHRTAWLVLAHMPELGQLNRQEVAALAGLAPWTRESGTMKGMRCIGGGRPEVRLALYMAALCAARCNPVLQPFYQRLRAKDKPAKVALTAVMRRLLVYMNYQIKALQAEQPAMQIDHAKIP

SEQ ID NO: 330827 - protein, 475 aa, unidentified
MKPHRRPHRKQPASGPSLLERLNPNAAGIDCGSAMHYVAVAPDRDATPVRAFTTFTTDLHRLADWLTACGVTTVAMESTGVYWIPLYEILEARGLDVVLVNARHVKNVPGRKTDVVDCQWLQELHSVGLLRGSFRPTAAIAALRAYLRHRETLVQGAATHVQRMQKALVQMNLQLSIVISDITGVTGLRIVRDIIAGQTDPHALAQHRDRRCQASAAEITGALTGHYRPEHVFVLQQNLELFDAYQRQMAACDAAIEAHVHALAAQAPAPARPVPAPRTKKKPRDNEPRFEIRSPLHQLTGVDLTQIDALGPYSALRLLGEIGTDMSRWPTEKHFTSWLTLAPHNKISGGRLLSSKTQPSANRAAAIFRMAAMNLGRTETALGAFYRRLAYRVGKAKAITATARKLAILVYRTLKDGLHYQDPGAAAYDAQHRTRVLHRLRQRAANLGFSLLNRETVNGHPIFPRCGHRKFPTPG

SEQ ID NO: 330828 - protein, 386 aa, unidentified
MHKPNDLSRSLTVLNGDSTLIAVIEMSQSSWLVAGVVPGVERQPLKKVVVDEIVLLKLLNRWREQAEKAGRRIERIAVAFEAGRDGFWLARWLRARDIDAHVIHASSIAVSREHRRAKTDRLDTELLKRAFLGWLRGERDHCKMVAVPTITDEDAKRPNRERESLVGEQTRVVNRMKAALARLGIRGFNPKLKKAVERLAGLRTPEGEPIPFNTLAELKRDMERRRLIRSQIRDIEKTRVERIEQAPSDRPHLMVCLLARVIGVGIETADMLVAELLSRNLRDRRAVARYGGLTGSPDESGKKRREQGLARSGNARVRRGMIQLAWRFLMFQKDSALAHWFYERTKNAPQTRKTMIVALARKLLIALWRLVREGTIPAGVVLRPAA

SEQ ID NO: 330829 - protein, 297 aa, unidentified
MKRVQSNKLDFSGQNIYVGIDVHLKSWSVAILSEYSALKRFSQSPEPEALHKYLVSNYPGANYFSVCDAGFCGFWTHEKLTGLGITNIVVHPADVPTMSEEKLRKTDAVDCNKLARELRSGSLEGIYVPKADVLEIRSLIRTRNMIVKDSTRTKNRIKSLLRFHGVDIPEEFTRSSIGRWSKRFLAWLHSIELSTEYGKKTLELHLEQFVRLRNMLLQETRAIREISRKAPFEKPMRLLTSVPGIGVTTAATLMVELDDIVRFKNADHLASFIGLVPMCHSSGESNGTGDITIRSFN

SEQ ID NO: 330830 - protein, 347 aa, unidentified
MTEAYDGRQVVGIDLHRQRSVIVRMTEDGRKLETVRITNSPAALRREIAKAGKNPKVVIEATYGWYWAVDVLEEAGAEVHLAHPLGVKAFSYRRVKNDERDAADLADLLRMGRLPEAWIAPPEIRELRELTRYRHQLVKARTSVKDQVHGVLAKLGIPVTCTDIFGVHGQAWLDELPMPQPYAGKVASLRQLAGGLTAEIGLLEQVLGDLLAGHEGYAAIQALPGIGPVLAAVIVAEIGDIRRFPGPGQLGSWAGLTPRHYESDTKVIRGHVTKQGSRMLRWAVTEAIQRQPAGTRPRQVKDGIIARRGKEARNIAKVAAARELLTLVFYGMRDGHVRRALQRGQAA

SEQ ID NO: 330831 - protein, 311 aa, unidentified
MDAVFIGIDVSKDRLDVHGRPGVTPFSVARNGDGIAELVERLRPLEVKAIGLEATGGFETVVVAGLAAAGLPVVVVNPAQVRSFAQALGKRAKTDLIDAAVIAHFVEATKPEIRSLPDDETQALSDLVTRRRQIIAMIGAENQREKRASSRMKKSIQRLLRALQKELDAVDKDIDDAVRGNPVWKQKEDLLISVPGIGPTIARSAIAELPELGCLDRRQIAALVGLAPWTRQSGQWRGKSFISGGRAGIRSALFMGAMVAIRHNPILKAFRDRLVAAGKPKLVALIATARKLLTIINAILRDNQPWREENA

SEQ ID NO: 330832 - protein, 343 aa, unidentified
MKRITIGFDLAKHVFQVHGIDESGAVIIRRRLRRSEVSGFFRGLEPCLVGTEACATSHFWARELLALGHEVRLMPPSYVKPYVKRSKNDAADAQAICEAVTRPTMRFVPVKSATQQSVLMLHRVRDLLIRQRTMLVNALRAQLSELGIIAAQGMANIKVLTAIVRDEGDGRVPPLARMCLTAIIEQLGDLEARIGVIERAIHSWHRTNETSRRLETIPGIGPITASAIAATVTDPTLFSCGRQLAAWFGLVPRQNSSGGKERLGHISKQGDPYIRRLLIVGAHGVLRYARGKGRTPTPWLDGLLARRPYKVAAVALANKMARIAWAVLATGETYRRPQLAQPA

SEQ ID NO: 330833 - protein, 309 aa, unidentified
MEIVVGIDVSKERLDVAILPQEEVFAVGNDHAGIDELVERLKGIGVDAIALEATGGFEMLAVAGLSAAGLTVLVVNPAQVRAYAHAIGRRAKTDPIDAAVIAAFVLTTKPEIRPLRDAETQALSELVARRRQIVQMVVAEENRLRMALAKQAQKSIKRLLKALRRELESLDADLDSHIRKSPVWRVREALLTSVPGVGATTARTLLAELPELGSLDRRQIASLAGLAPWTRQSGKWKGKSFIGGGRGKVRAVLFMAALVASRYNPDLKAFRDRLVAAGKPKIVATVATMRKLLTILNAIIRDGRPWQNA

SEQ ID NO: 330834 - protein, 365 aa, unidentified
MSRLTKVESFYKNVKLTSDDEVYVGVDVHKKSYHVSFYLNDTPSIDFSMTADPKQLNKKLQPLAQSIKDVSYETGPTGYGLVRYLRKNKLPANVVATSRIPRTAIADDKTDRLDSRKLAEYSAKGMLRPITIPTARQEADRQLYRIRHRQALQFAKVKVQIKSFLLMHGISEPEGLKDWNKAGINELRSIRLLDTLRLSLDELLSDYDYLNGRLKELRKILADNLDKGVLGHRIALLKTHPSVGPVVACQFATELYHYKDFSSTRQLYKYLGLSPKISQSGEKKSTGPINKAANGRLRNNLIQAAWSWVRTDIEAKKCFWRIYENNGGIKQKAIIAMARKMAGHLWSMLMNDQPYDANKAKCRCN

SEQ ID NO: 330835 - protein, 350 aa, unidentified
MNVQHYIGFDVHKKSISYCVKLADGTIVEEGKLPARHSALRQWASKRTEAWHGAMEATLFSGWIYDVLEPFAGKLEMGHPVMMKAISASKKKNDKLDARKTSDLVRCNLLPACWVAPSEMRELRRMLRYRNLVVEQAVRMKNKISGLLMESGAEYNKKRLHGEKYFAELLENLEEVPESVKELLKLSRGSLESFQTIQQELLVKLQKHPKLVERLKRLRSIRAVGEVTALTWALEIGDPHRFPSIGDAVSYCGLTSALVESADKQRRGPISKQRNAHLQTVLIEAAKLAPRWNPQLAELHERELQRGHRNRATLEVARKLVAYLLAVDKSGKDFEVRTPVKTEGEVKPAA

SEQ ID NO: 330836 - protein, 385 aa, unidentified
MPAFDDLSRSLTALNQDSTLMTVIEMSKSSWLVAGMVPGIERHPMKKLDPDPVALLNLVGRWRCEAEGKERRIERVALAFEAGRDGFWLARWLRERGIEAYVIHSTSVAVTREHRRAKTDRLDTAMLMRVFLGWLRGERGHCRMVAIPTLEEEDAKRPSRERESLVGERTRIINRMKGALARMGIRGFKPELRRAPKELIALLTPEGQPLPPNLLEEMRREMTRLSLIREQIAAIEQARLARLQQASPSRPNAMVALLARVIGVGIETADMLVQEVLSRNLRDRRAVARYAGLTGSPDESGSRRREKGLAKAGNARVRRGLIQLAWRFLMFQKDSGLAQWYRARTAQGARKTTMIVALARKLLIAFWRMVTVGEVPAGVVLRPGM

SEQ ID NO: 330837 - protein, 417 aa, unidentified
MMYFVGIDVSQRQVSICVLDQEGKRLWRGKCLTDPAAITATLHDRRGGRLRSASMCHDRVVQPDEEPSTMTLTTIGLDVAKLVFQVHGVDENSRAALKRKLHRHEVVTFFEELPRCTVLLEACGASHYWARLLTALGHEVKLIAPEAVKPFAKKGKKNDAVDAAALCVAGSRPEIQFVPIKSVAQQAVLALHTARSLLVKQQTMLANAIRGLASEFGLVVPQGLHRLEELMVQVTAEASVPAEGRQALIVLHAQLQAAAERIVMLEEQIVVHARQNASARRLATIPGIGPITASLIAATMGDNITAFTSARHFAAWLGLVPRQHSTGGKPRLGRITKAGNTEIRRLLVLGATSMVRRAETWNSAAGIWLRGVLARRPVRLTTVALANKMARIAWALLTRNDVYRAQGRSKVAAGAAA

SEQ ID NO: 330838 - protein, 411 aa, unidentified
MADSYDFYIGIDWGTERHQVCVLDAAGRRVAEQTIAHSGAGLAAWLAELAGYAPAERLAVAIEVPRGAVVDALLAHGCHVYALNPKQLDRFRDRQTVAGAKDDRRDAFVLATAVRTERGAFRTPPPEDPRLAPLRELTRLTRELGTESLRLTNRLREQLVRVFPQVLTLCPAADEPWLWTLLEQAPTASQAARLRPPTLRALLAAHRVRRFTTEELYACLHAPPLPAAAGTIAAASEHIAFLLPRLRLAFQQRGRCHRRLEKLLDALAAEAPAPGQPLEHRDVTILRSLPGVGRVVAATMLAEAWPALATRDYQRLRTHSGVAPVTRQSGKTRVVRMRRSCNGHLREAVFHWASNSLRLDPRCRAHYDRLRQQHGHARALRGVADRLLGLLVTLLRAGTLYDPARRHVAAA

SEQ ID NO: 330839 - protein, 360 aa, unidentified
MNSDKYVGVDVHEATLVVHVMDGRGKFVMQSIIEPNATRIRDFFRALRGTIQVAFEEGTKAAWLYDLISPLVAQTVVCDPRSNKLLHSGNKSDKVDAKKLAELLRLGDLKPVYHSDTSTRALKELVRGYGCLVVDCTRVMNRIKSVFRGRGVRCRGSNVYRKDVRNKWVEQVKESARRDRLNRLYKELDTLKELRDEARKGMLKEARRHSDYQIIKKVPGLGPVRAAQIIAIVSTPHRFRTKRQFWPYCGLAVVTHSSADYEIVGEEVRRRRKVIATRGLNRNFNRTLKNVFKSAAQSAIRNEVFKKYHQGLMDKRMRPEMARLTVARKIAAITLALWKKKEEFDPERMKQAEQSAGDLN

SEQ ID NO: 330840 - protein, 441 aa, unidentified
MDTTPTMVRLGVDVACRAAHQASLADATGTLIFSGRKFFTRPAELERLWAQLPDGAQVMVVMEPTRNAWVPLAAWFRARGAQVVLVPPEQSADLRDYYNKHTKTDRLDSRVLARLPLLHPDGELVELDNLGPTWAEVLGTGEYGKAALAVLERYGDPRALKRAGRSRLTAMLIRHSRGAFREAKADQLLAAADETLTLWAAGGLDFAQLAEDLAGEARLARQLSEEITALEERIAALYHDVDPAGIVLSAPGLGVTLAAGILGRTGDLNRFRNLSGVRAYTGLVPKIDQSGTSHRHGPPTKKGDPGLREALYLATEQARKVDPTLAARYQRLIVEDGKHHVSAICTLAPVLMTRIAACWRNGERYILRDLDGHQITDAQGRAICRERYTVTAEQRHQRRQPTTAKQHKGRTDRRDQKSTEAAPAASPSRPKPTRKKDPIPA

SEQ ID NO: 330841 - protein, 351 aa, unidentified
MNDHSENTDIEVVAIDLAKKSFQLHGADANGHKVMGKKLTRKKLAVFMVNLPPCLVVMESCSGAHYWGRLFQSFGHEVKLIAPQFVKPFVKSNKNDAADAQAIYEASQRPGMRFVAIKSDEQLDMQAIHRVRSQLVKNRTAAVNQIRGLLLEHGIDIPKGRAHVLRKLPGILEDADNGLSGRFRSVLHDLQEELRHIDQRIGRYDTQIDQIVRDSDQARLLLGIPGIGPKTATALLSSIGDIGQFKNGRELAAFLGLVPRQHSTGGKPTLLGISKRGDVYLRTLLIHGARAVLRYVDNKPDHTSRWAKELMQRRGVNIAAVALANKMARTVYALLSKGERYNINHVAITSA

SEQ ID NO: 330842 - protein, 323 aa, unidentified
MFAALDLHERSVQCVLKDDVGRIIKESKLAKDPDQILQFLADTDASVVMESGYNHQYIHDLLKEKGYHVTVAHPLMVKAIAHAKVKGDKVDARKLADLLRAGMIPEAYVPNRNVREVRDLVRRRHYHVKLRTMLKNKIHAELATRWIKYDGDLFTEAGTSYLRSLNIPAVNDYLDTIGFLNGKIRELDEKVKPLAESAPYAKLLMTIPGVSHYSALLISSEIADINRFPDHEHLCSYATLSPGVHQSGNTQYTFNAAPKTMLNWIMIQCTRIHVRRCDSTITGFYKQVAARRGEKVAIVAAARKLMRAMHIMLKEEEPFRLDG

SEQ ID NO: 330843 - protein, 345 aa, unidentified
MKKIAIGIDFAKEKFDVTVKNVETGASEYGQYPNTPAGGRSMVRMVRKFAKGIDSSEWLFCGEDTGYYSQTIARYLTEKGYFMWLQNPYSIKHSEGDIRRGKDDKADSAAIADYAHRYEDKARKWELPSKVSEELHLLLTRRDAYVRAKRVIQSGASEIPKRDKQGESVSLIKSSAKRLLREIDEEIERLEEQMKKIVKEEEAMQKNYEILRSFTGIGLVNSMCFIAYTDNFKKFDLNARKIATFWGVAPFGKDSGKTVHVDPHVSQFCNHWLKAIISNAANSALKWNPIIIAYNERLVKRGKCEGIRRNNVKNKIIQTVVAMIRKGEKFDPEFKFTNKMVPVEC

SEQ ID NO: 330844 - protein, 414 aa, unidentified
MEVIHNRCAGMDVSKKDAKVCVRVAGAGRRKTVETVRTWGATTNQVLALRDHLVAEQVSLVVMEATSDYWKPFYYLLEDAGFELMLVNARHVKNMPGRKTDVTDAAWLAQLGAHGLVRASFVPPAPIRELRDLTRARVMLTRERGREIQRLEKLLEDARIKLSSVATDITGVSGRLMLQALIDGHRDPGALADLAKRRLRTKIPELTEALTGRFTEHHAFLAGIFLETIDQRTRQIDELNQRIDQAMTPFRAFCDLICTIPGVGRRTAEVVVAETGADMTVFPSPKHLASWAGVCPGSNESAGRVKSTQTRPGNPYLKAALGTAALSIAATHGTFLAAKYRRLAARRGGKKALVAIEHTVLTTIWSMGNTGAEYDDPGPDYYIRHNPERVLRNATRQLERLGYSVTPSPTAQTA

SEQ ID NO: 330845 - protein, 426 aa, unidentified
MGISKPAGLKSPCGEVKIVNPLFVGIDVSSKNNVAYLMKPDGSKHSSFSVQNNLGGAKLLSERIVSALGSMQLERVVIGLEATSIYGDSLVYALREDGRLGRFQRKIHVLNPKQVRKFKEAYSDLPKNDWVDAFVIADHLRFGRINREVYMDDYRYKALQTLTRARFDVIQNLTREKQRFANYLFLKCSGMAQDKDIQNTSATTIALMEHFETVDDLANADLEELTAFITETGRGKFADPDATAKAVRAAAKGSYRLPKTVNDTVNQAMAVSIASMRALKGQVKVLDKAIEQQFEIIPNTLTSIPGIGKVYSAGIIAEIGDIHRFDSQASVAKYAGLVWNRSQSGDFEAEHSRMIKSGNRYLRYYLLEAANSVRRCDSEFRRYYDLKFKEVNKYQHKRALALTARKLVRLVFRLLKDNRLYIPPEG

SEQ ID NO: 330846 - protein, 309 aa, unidentified
MEVLLEHCAGMDVHQETIVVCVMTTDATGEVHHEIRTFGTMTKHLFELLKFLESQEVTHVAMESTGIYWKPVYNILEGYFTVVLANAQRIKNVPGRKTDVCDAEWIAKLLRVGLIEPSFVPSEDLRELRDLCRLRKKRIGSLTAEKNRIQKYLEACNVKLSTVISDVFGVSGRNLLRQLIQQGYVDAEDVDACVKGSIKNKKDQVADSLFGTMTPHQISLIKDCWEHIEYLEKSITRLEDEIHAHLEPYRTEYELLQTIPGVSERTAAALIAEIGVDMAQFPTADHLSSWAGVAPGNHESAGKKKVQKA

SEQ ID NO: 330847 - protein, 371 aa, unidentified
MKYYTSTTEFNCGIDLHSRQMYVCVMDRAGTKLIHTNIQGNDFAYFLKRIEPYRHSLTVCCECTFNWYWLADACQREGLTFVLAHALYLKAIHGGKNKNDRIDSEKLAHLLRSNLIPPSYVYPGAKRPVRALLRQRLYYVWRRAELLARIQCHQLAEGHEPVKQSRPNRDPWEERLLAQYDNPFHKSALEIDLHMIRAYDEMLLRLERELLAATRQLASRDFALLNTVPGIGRSLGLTILYEIDTIERFPTVKDFTSYCRLVKGSVASAGKLKGHRGAKLGNPYLRWAFGEAAVIGKRDHPLLRAYAQQLEAAHGKFRGNAILAHKLARAVYFMLKNGTGFDVEKLVATSSGPRRAEVAKVTQAGGAMKAA

SEQ ID NO: 330848 - protein, 381 aa, unidentified
MRTVALDLGSKISFCEVKDGQVVERATEKSVADLKRLLGPNTPPAKVAFEACREAWAVYDQLAEWGHEPLMLDTTRVRQLGIGQHKRKNDRIDAETMARALEIGRIPLAHVLSPHRRELRQQLGVRRALVGTRAEYVTQIRGLARAHGKRLPTCDTENFLEHLRETPLDEATRMLVEPLAKVLGELTPQIATVERKLEQLCAVEPVIQRLRTTPGVALIVAAAFVSVIDEAKRFRRAHDVEAYVGLVPSENTSVHRRLGSITKQGNSYLRALLVQAAHAVLRLRTDDPLKRWGEAVEQRRGKRIAVVAVARRLVGILWAMWRDGSVYHPTKLGLATATGLASHAGELAAEAGEHRAAVTRTGNRRSTPQTARKTPREVTMS

SEQ ID NO: 330849 - protein, 337 aa, unidentified
MMSMKSANNELDKHYVHFVGIDVAKKSFVLATSLSPKTKNHDNTAQGIDQAICFIKEEHKQCDNGKTLVVLESTGGLEVPLAKAIHLAGICVMIANPRQTHQFAKSQSLTKTDNKDAKMLAFYAKMMAQRDDLATLLYCPPSQSQELLTALINRRNQFVQMCVAEKNRLEQSHHSQISSIQAHITYLTEQIHELDKQIKTHLDDDNHPDLKQTSSVIQSVKGVGQTTTATLLAMLPELGTISHKQLASLVGVAPHPKQSGETKFKGLCQAGRPEVRKALYMATLVATRFDEKIKTFYQRLRANGKPFKVAIVACMHKLLTILNARVRDELQKQVVVR

SEQ ID NO: 330850 - protein, 351 aa, unidentified
MIIIGVDYHPSVQQVAFVDTQTGETGERRLKHSDGEAEHFYRDLQRRQVEVRVGMEATGHARWFERLLAELKFELWIGDPAKIKAARVRKQKTDRQDAQLLLRLLVEARFPRIWVPSAENRDLRQLILHRHRLVQMRTRAMNQIQATAMNEGMRRKKTLWSKTGRKQLESLTLPPWATRRRQDLLELVDRLDSAIGELTAAIEQEARQRPEVLRLMTHPGVGPITALAFVLVIGSPDRFACGKQIGSYLGLIPCEDSSADRQRLGHVTKQGSSLLRFLFVEAAQAAVRWDTDWRRRFVHLAMRRDRRIAKVAMARKLAVSLYWMWRKGYDYQQHLKFGSHAGEPGYVHGVK

SEQ ID NO: 330851 - protein, 402 aa, unidentified
MNAVGIDVSKGKSMVAIMRPFGEIVSTPFEIKHTASDIRSLVELINSVEGESRIVMEHTGRYYEVLAHQLSEANLFVSAINPKLIKDFDNDSLRKVKSDKADAVKIARYALDKWQNLKQYNVMDELRNQLKTMNRQFGFYMKHKTAMKNNLIGILDQTYPGVNTYFDSPARSDGSQKWVDFASTYWHVDRVRKMSLNAFIDHYQNWCKRKKYNFSQSKAEEIYGKAKELVPVLPKDAITKLIIKQAVDQLNSASTTVESLRTLMNETASKLPEYPVVMAMKGVGTSLGPQLMAEIGDVSRFTHKNAITAFAGVDPGVNESGTYEQKSVPTSKRGSADLRKTLFQVMDVLIKTHPQDDPVYQFLDKKRAQGKPYYVYMTAGANKFLRIYYGRVKEYLSSLPES

SEQ ID NO: 330852 - protein, 335 aa, unidentified
MKHYAGLDLSMETTQVCIVDESGRKIASMKVESAPAMIAQALREGGGVERAVIETGRMSPAICHGLRALGIPVVCIDARQAHQSLKALKANKTDPHDAAGLAQLARTGFYKEVHVKSPAAHGVRSVITTRNHLVESRMRLDNMIRGLCATFGFKPGPGQGKAFIDRVMEAANIPGLGQSITALLAVRTGLMKQIREMDLVLREFALRSQSCRQLMSIPGVGVQTSAAFAAAIDEVGRFRQSRTAGPYFGLVPRRHQSGEIDWTGRITKQGDSMVRKLLYEAANSILTRSRGSFALKAWALKVAKRRGLRKARVALARRLAVIMHAMLRDGTLFEA

SEQ ID NO: 330853 - protein, 367 aa, unidentified
MSNYVTAIGLDVHARSISACAFDPMTGEVVRARFGYDPASVAEWVLGFESPKAVYESGPTGFHLCRALRALGVDCAVGAVSKMHRPAADRGRKNDRRDAEWLARLLACRNVVEVWVPDDRTEAARDLSRALEDARDDLQRARQRMSKFLLRHGLVFDETTPAGRRRSNWTEAYWRWARSIEFGEADDAAAYEHYMDAVERCAEAKRELERKVEEAAARPEWAPVVDALCLVKGIDVASAFLLAAEAGDFSRFPTAPSFASWCGLAPSERSSGETESRGGITRAGNGHVRRALVEASWHVPMSTRHPKKPRPGHGVAPAVSRHAAKCNRRLQDRRDAMSQAGKRPCVANCATAREMACWVWAIALMAR

SEQ ID NO: 330854 - protein, 427 aa, unidentified
MSLPTDLSRSLVPFEQESTLVAAAGEETALLPRSNAKECPMSLPNDLSRSLVPFEQESTLVAVIELSQASWLIAGVVPGVERQPLKKIEPDEEALLRLLHRWRDEAIQKGRTITRIAVALEAGRDGFWLARWLRKHGIEAHVIHSGSVAVSREHRRAKTDRLDTAMLIRVFLGWLRGERGHCAMVAVPSIEEEDAKRPSRERENLVGERTRIINRLKAVLARLGIRGFNPKLRKAPQRLDSLRTPEGFPIPPNTLDEMRRDFARLALLREQIKAIEQARLERLQQAPQTGPNAMIRMLASIPGVGLETADMLVQEVLSRNLRDRRAVGRFVGLTGAPDESGAKRREKGLSKAGNARVRRGMIQLAWRFVRFHKDSALAVWFRSRTEGPSGGRKTKMIVALARKLIIALWRMVNTGEVPHGVVLRQPA

SEQ ID NO: 330855 - protein, 370 aa, unidentified
MSVRRILAKTIDTDLEYEAIGIDLAKNCVSAALLTTDGEVVCIDRLDYSELEKSAQALSSTTFAMEPCTEMNYLVQKLEAWGHRCLVIGGKNVQNYVENHFSGQKTDLNDAQALAFLAQDTQLRTIKAKDVEQQKYASLTTLREQYIKQYRQTIVSLKGICQAWGLNISKGISGKARLKDLIENHAAFPEELKESLVDMVTHAQTAQKALNKITKTLEELAKSDKVCQLIQTIPGLGSICSCRLRATVGDIKRFKSPKDFPAYYGLVPRSIATGHNERKGKITHRGDRTMRSLMVQGAGCVIRLATCGKLKSKQLTKWILKKQKEKMPWGKLVCAVAAKLLRIVRAVLISNKPYNSKIAGVAKCSLPKGS

SEQ ID NO: 330856 - protein, 342 aa, unidentified
MSISYVGVDLGSSNFHQVAISERGVITLNRELATSEANLVKAFSGMRGEIHVHLEAGELAPWASEIIRPLVTRVVCSHPQKNAWIARDRDKSDRVDAYKLASLLRLNEFKEVRYPQSQLRRDFKAVVQHYDELTQQQARLKTKIKARLRMQGVITRGQLVFSAGGRKAGLQAVKSVLVRTAIQQLYEMLDQSLESQAEARLLMLRAAQALPEINIMRTAPGMGPIGACRFSAYVHAPERFSSTRKLWKYCRLSVSHRSSNGKPLRRPRIDRSGCGRLKDVSRKAFEAALRRKDNNGFQRAYYRALAQTHDATHARLTVQRKIVSTLRAMWINQSPYGDQMTP

SEQ ID NO: 330857 - protein, 346 aa, unidentified
MKIIGCDFHPSFQQIAVFDTETGEIIEHKLVNGNGDAERFYRSLAVGSLIGIEACGNSHWFIDLLGRLGHRVWVGDAAKIRASYVRKQKTDRRDAAHILTLLLEKRFPKLWTPSRQERDQRQLLIHRHKLVQIRTRVKNSLQHLALNQGVQKKQKLWSKEGQKLLVRLPLEGWTAVRRQDCRELLACLDERIAKLDKAAEQAAEAHPQASLLMQQKGVGPITSLAFALTIGDVSRFPHANQVASYLGLIPSEHTSSNKRRLGSITKQGNSFLRMLLVESAQSVTRCDPQFRKHYLHLCRNKHKAVAKVAAARKLAVRLYWVLRTDQNSQNAVHIESSPRVPLVGAS

SEQ ID NO: 330858 - protein, 423 aa, unidentified
MQLQNIMNSDSAHCSDQFKVLIGLDWGDQRHAYSLSQPDGQVQRGLLDQTPEALHQWFNDLQQRFPNTQIALAIETTKGPLINALIEQVFLTVFPIHPATSARYRRAFTPSGAKDDLPDSQVLLEILLHHRQKLRPLSLDDVPTRKLAGLVEVRRKTVDRRTQLSNALKCRLKSYYPLAIELAGEDLFTPLALDLLDRWPDLASLKSAKPATLKKFFYAHNLRRPEHLEQRLQRIASSRPLTTDEAIVFVAVSEVSALVAQLRVLQEHIERFEAQIATEFKAHPDCELFRDLPGAGPTLAPRLLVAFGTDRSRYPDASSLQKFSGIAPVRQKSGARQWVHWRWNAPRFLRQSFHEWAGQTVVWSAWAKEYYRRQQRAGKGHHAILRALAFKWQRILWKCWITRQAYREELYVAMLQKRRPTAV

SEQ ID NO: 330859 - protein, 457 aa, unidentified
MSQRSQIRRRKFKVQNLPKQLQHINVNAAGIDIGAEQHMVAVPEGRAEVSVRQFGTFTADLQAIADWLAQCGVTTVAMESTGVYWIPLFELLERRGFEVKLVDARHVKNVSGRKSDVLDCQWLQQLHTYGLLNGAFRPPDEICVLRSYLRQKEMLTQASAQHIQHMQKALQQMNLLLHNVVSDITGVTGMRIIKAILGGERSPQVLARNRHGCCQNSEETIAQSLVGNYRDEHLFALRQAVELYETYQAKITDCEAAIIKQLNSYPDTTDGPPPPDTKQGNARTRIRHGVDVRDLLFKKSRVDLFAIPGLGADTLLTVTSEVGFDMHPWKTIKHFTSWLNLCPGTRISGGKVLTKKFKRNANRAAQAFRIAAATLGRTQTALGAFYRRMKARSGGKHAVTATAHKLARIYYTMLTKGSAYVELGQKAYEQKYQERRVAHLQRQAKTLGFQLVPCAVP

SEQ ID NO: 330860 - protein, 368 aa, unidentified
MKKNSTCLKSPKRNKSRERSITIGMDLGDKTSHYYVLDSEGEMVRESTVATTKKGMKQRFGHLPKCRIAIEVGTHSPWVSRLLSSFGHEVIVANARQVKLISASSRKDDRLDAQTLARLARMDPELLRPIRHRGEKTQGDLMQVRVRAALVDTRTGLVNTARGLAKAMGERLPKCDADQMGVEKMQGLPAVLVEALTPLLETVQSLTQQIKASDQKLEQLAGRDYPETELLRQVSGVGSLISLTFVLTIEDPNRFRKSRDVGCYVGLRPRRSESGESRPQLGISKEGDVYLRKLLVQGAHCILSQKSPDTDLKRWGLKLAGKGNKNAKKRALVAVARKLAILLHHLWVNGEVYEPLRNSRSLEPKAAA

SEQ ID NO: 330861 - protein, 349 aa, unidentified
MVVIGADLHKRSHTLVAVDESGRKLAERTANATPEGHLELRRWLSRWSDRTVALEDCRHLSRTFERDLLRAGEHVVRVPPKLMAGARRSSREPGKSDPIDALAVARAALREPDLPVATLDGPEREVRLLVDHREDLVATRTRDQNRLRWHLHELMPGDEPAPRALDRVHVLAELERRLADQPGTVARLARDLVARIRELTLAIDGLEREIERLVGELAPSLLTLTGCGPLTAAKLVGEVAGIGRFRSKAAFARHNGSAPVPVWSGNTVRHRLSRGGNRQLNVALHRIAITQMQRPGPGREYIDHRRSVGDTKTEAIRALRRRISDEVFRRMRNDEAGQAAKRDPLALAA

SEQ ID NO: 330862 - protein, 503 aa, unidentified
MSLRIDLSKKSATAFQQDSTLVAVVELSQSKWLVAGIVPGIDRHPLKKLSADESRLLALLFHWRNQAFKARREIKRIVVAFEAGRDGFWLARWLWARDIEAYVIHPNSIAVSREHRRAKTDRLDTEHLKRAFLGWLRGESDHCRMVAVPSVEQEDAKRSNREHSALVGERTSIINRMKACLVRFGIRNFNPTLRKAPQLVAAVVTPEGVPLPPNTLAEIRRDMARLRLVREQIQAIERDGLERIKKAPTAQPNATVLMLARVIGVGIETADMLVHEILSRNLRDRRAVARYAGLTGSPDESGKRRREKGLARAGNPRVRHGMIQMAWRFLRFQKDSALVQWYRKRAADGRGATRKTMIAALARKLLIALWRMVNTGHIPAGFQLRAARKNVGCCTTSKVSRFRQAVHETDCRSRSEVVVIPSACLAPKPLYKMGLPPRSFAVDAYGCIMVWIQADPTEYKILWGQAARQFVYYRRFNQQPLTELPYAEAPRRQQGLPHRLRSG

SEQ ID NO: 330863 - protein, 394 aa, unidentified
MKLIGIDIGKNKHFFCVMDQQTGEIISQPVSFSNDKEGFDFLVQKIKSYPKDSILIGMEDTGHYHFALLKYLLELQYTVALINPKTTDFNRKMQGGITKNDKLDTINICDVLDTPERKKQYRITKVNSFDLYEQKQLTRHHHNLKEEENVYKNRLQKCIDIVFPEFNKLFNSKYGIVYMNILKMFGSAENIANTDIRTIRKCFEIEGRGNRISLTPERLKEYARSSIGISSSAEVIQIKHLTAQIELIEEQLTEIDKKIEEFSIQNNSPILSIPGISHFSGTSILAELGDISNYSKPSQIIKFAGVAPLHYESSQFNAQHTAITKKGSKYLRKTLYQIILPVIRHNPVFNKYYQLKISQGKGHRCAQGHCVRKLLRIIYHLLKTNQQFNPQLLR

SEQ ID NO: 330864 - protein, 353 aa, unidentified
MTDIVTHNDRIATIGMDLGKRSFHLIGMDARGNVIMRQQLSRGRLERHMANLQPCLVGVEACAGAHHIGRRLSALGHNVRLIPGQYVKPFRKGQKNDYRDAEAIAEAVQRPTMRFVPIKSAEQLDLQALHRIRSRLVGHRTAVINQLRSFLLECGVIVPQGPARLREILPSVLAQRTDVLSPRMIRLIEELADDWRRLDDRVDAVTSEVQALARQDECCRRLTSVPGIGALTASAVVATIGNGAAFTKGRDFGAWLGLVPKQLSTGDRTILGRLSKRGNKYVRTLFIIGARAVLAKPGSWAKFGLQGWLAAAAKRLHHNVLAAALANKLARIAWSVLYHGRSFARDFDPQSVS

SEQ ID NO: 330865 - protein, 320 aa, unidentified
MSETSVVVGIDVAKDQVDVSVLGAELGAEQFDNSSEGHTALAAALKPLKVSLVVLEATGGYEAALVCALQAAGLAVVVINPKQARDFAKSMGRLAKTDRVDARMLAELASVLLRREDLARFIRPLSDTHQKDLAALVTRRRQLLSMLTFERQRLQLAPQLIRPGIEAMIKTIRAQIDDLEAQMERHLREHFAELDQLLQSTRGIGLVASATLIAQLPELGKLDRGAICALVGVAPMANDSGTTRGRRRVKGGRFEVRRVLYMAVVSAIRFNPLIKAFYRRLRAAGKPPKVAIVACMRKLLVTLNAMVRDSTRWDPNHSRA

SEQ ID NO: 330866 - protein, 358 aa, unidentified
MMYVGVDVHKKVCRAAMMNDEGEMADEFSFKNSKRGIEEFVMKIELFRDTVQVAVESTGNLWIRLYDCLEERGIRIVLSNPYKTRLIAEARVKTDKVNARILAQLLRADMLPLCFVPTRLQRDRRQFIRHRVHLVKMRTEVMNRVHALLDKHGLRSPFKTMFSKKGVEWLRSLKLGFTDDAVLRSELALLSVLDEQIGFMEAKIAALAVNDERVKLLMTMPGLGYFTASLLVAEICEINRFSSDKKLVSWAGIAPGIHQSGDTMVGGRISKQGNNLVRWAMVQAAHTARLHDERLRGFYERYARRKGDKKAVVAVAHEMLRIVYFMLKRNEPYRGGKGELSERKLKMLGMKSLIGLRA

SEQ ID NO: 330867 - protein, 345 aa, unidentified
MRYYAGLDVSLEETAICIVDEVGKIERELRASSEPAALIDAFAALALPIERTGLEACSLASWLHQGMARAGLPVLCIETRAAKAAMGAMPNKTDRNDARGLAQIIRTGWYRAVHVKSPPCRSARALLGARRMVLNKQRDIENEVRAVLREVGLKLGTPGRKRFAPHARELASADAGITDIVEPLLAILATMAIELARLTKRVLDTVRVEPVCRRLMTVPGVGPLTALTFRATVDQPERFRRSRDIGAHFGLTPRRYQSGETDIQGRISRCGDELARTALYEAAHTLLTRCTKWSTLKAWGMRIAQRRGLAKARVAVARKLAVILHRMWSDQTDFRWGKASAVAAV

SEQ ID NO: 330868 - protein, 342 aa, unidentified
MLIIGCDYHPSVQQIAFVDTETGDCGEQRLKHSDREAEKFYRDLKLRAESVRVGLEATGHTRWFERLLAELGYELWIGDAAQIAAMRVRKQKTDRQDAQFLLKLLLEDRFPRVWVPSLENRDLRQLLWHRHRLVQMRTRIMNQLQSIAMNEGIQRRGGLRSEQGRKRLEQLVLAPWATKRRQDLLGLLDQLNDSVEELSAALQQEAEKRPEARLLMTHPGVGPVTALAFVLIVGDPERFRCGKQIGSYVGLIPEEASSGVHWRLGHISKQGSTLLRFLLVEAAQAAARFNPEWRSKFLHLAMRRERRIAKVAMARKLAVSMYWMWRKQRSFQPSIEVGSHAG

SEQ ID NO: 330869 - protein, 352 aa, unidentified
MNTTRYVGVDIGKKKCNVAVMDQQGLIADEFMFTNNHEGIEWFSSKLSMDDRVVMESTGSVWTNLYNHLDSKHIPVVLANPLKTKAIAWARIKSDEIDARILAHLLRSDLIAESYVPPQELREIRALIRHRLSIVKIRTMVKNKLHALIDKNGIETELPNIFSKKAGMQWLRSLQFQSSLDRLMLDNYLEHLDSLQRQIKTVDQEILSKASQDQDVKLLLSLTGVSIYTALLLKSEIGDIKRFPNYKKLVSWAGLAPSMHQSGSVEYYGSITKQGSKMIRWIMVESARVAVNHDERLSAFYERIKHRRGDQKAIVATASKMLKIIWTMLSRREAYESRNEKSYERKLNSIDE

SEQ ID NO: 330870 - protein, 350 aa, unidentified
MDSAYDGRQVVGMDLHRRRSVLVRMTEDGRRLGTARIINSPAELRKAIAVAGTNPRVVLEATYGWYWAADVLQDAGAEVHLAHPLGVKAFAYRRVKNDEKDAADLADLLRMGRLPEAWIAPVEIRELRELIRYRLKLVAARTSCKDQVHAVLAKLGIPVTCSDIFGVWGNTWLDGLPLPQPYAGKVASLRKLTGELAAEIGLLDAVIADLLAHHEGYHALQALPGIGPVLAAVIVAEIGDIRRFSCPARLCCWAGLTPRHRESDTKVTRGHITKQGSPVLRWAVVEAIQRQPATSPVRAVKDRIIARRGKQAKNIAKTAAARHLLTAVFYALRDGQARSLAKRTAAQDAA

SEQ ID NO: 330871 - protein, 388 aa, unidentified
MQVVAERAEAPTAIQTDLRAIFVSLELSRSTWLITSLSPGGGEKMSKHSVQAGDIAGLLRRFAQLKEKARARTGRDFPVITIQEAGLDGFWIHRVLQSEGIESHVVDPASIATSRRRRRAKTDKIDGETLVRTLLAYKRGEPRVCAMVKVPTPEEEDSRRLCRERKVLTAERVLHVNRIKGMLFCQGISGYEPLRRDRRERLEELQTGDGRPLPPHLKAQVNRELDRLELLLKQIKAVEAERDALLVAAHTPAAVPASMLLNIKGIGPEFAAVLWSEGLFRHFDNRRQVAAYAGLAPTPWQSGAVDREQGVSKAGNPRLRTTLIQLAWLWLRNQPHSALTLWFHERVNRNGGRLRKATIVALARKLLVALWKYVNAGVVIEGAAMTTA

SEQ ID NO: 330872 - protein, 353 aa, unidentified
MRIIGCDLHSRQQTLSMLDAETGEVEEHVLEHEGEEVREFYAGLPGPVRVGIEASCATQWFLQLMEELGVECWVGHPAKIRAYEPRKQKNDRRDARLLMHLLEQDIFPRIWVPSVEQRDVRALLMHRHQWVRMRVRIQNALQSIALGHGLRRGSGLWSKDGQLSLLALSLSPHTDARRNELMTLYRQLEADIEVLDRRVAETAEERPLSRLSMTHPGVGPNTALATEVYLGDPTRFPDGKAIGSYVGMIPEEKSSGEKWRLGKLTKQGNTMLRFLWCEAARHAVRHDAELKRFYTRKLAQKGLGKATVAAGRKLGIRLWIMLRDEIDYDEFCRRGRQCGEAHAERPGRERGPA

SEQ ID NO: 330873 - protein, 407 aa, unidentified
MLFVGDDWAEDHHDVCLQDAAGRVLAARRLPEGVAGIGRLHELVAGYLDDDDPGQVVLAIETGRGPWVRALVAAGYRVFAVNPKQAARHREVVAVSGKKDDTFDAAALADMARTRRHQLREIAADSDEAEAVKVAARAHQKLVWERTRHALRMRSALREYFPAALEAYAELTLTGPDTLELLAKAPGPAAAARLTRAQISAALKRARRHDIAGRATRIQAALREQHLGQPEIVTEAYAAGVTAAAAVIAALNEQVKKMEAKVESLFRRHPDAGAYLSQPGIGVITGARMLGEFGDAPGRYADVKARRNYAGTSPLTIASGKKKTVHARFIHNDHLVNAMHDQAFAAISASAGARAYYDELRSREIDHTDALRRVASRLAGILHGCLKTGTAYDEHTAWGHRSQPAAA

SEQ ID NO: 330874 - protein, 312 aa, unidentified
MTETNSVVHAGLDIAKAQLQLHLENRQHVLPNTVTGHQRLIRLLRVVAGVHVVCEATGGYERKVVSALHSANLPVSVVNPAQVRHFALAQGQRAKNDPIDAALLTAYGHALRPNATPVPQAVLAELRELVQWRDHLKEQLVRARQPAEHATLAFVHRQQSKEVTHLEKQMAAVEKELAAALTRHPRWREQVQRLAELDGVGTLTAVSVLSQMPELGQLNRGQAAALAGLAPWTRQSGPWEGQRHIGGGRAVVRRALYMSAVALARQTGSILGKFYARLRAAGKPAKVALTAVMRKLLLQMNQVLKYHVPDPA

SEQ ID NO: 330875 - protein, 415 aa, unidentified
MDILYSSVAGFDVHLRSVYVSVRRVSASKAARVREEVRTFGTMTNDLLQLRDWLQTMGVTHVAMEATGVLWKPIWNLLEGHFTLLLVNPRHLKQVPGRKSDVRDCQWIAQLLQCGLLRSSFVPQRPQRELRDLTRHRAQLQDEHTRVANRVHKVLEDANIKVGAVASDLLGKSGRKMLRALLQGERDPVKLADLAEKKLRQKIPQLQSALVGHFTEHHRYLIASLLDHLEYLERQIDAFSIRIAAGLEPFLSAEEVDRLDKMVGVNRCTIENVIAEIGVDMGQFPNEDHLSSWAGVCPGTEKSAGKLKRNRCTPGNRWLKRALTEAAWAASHSKTSYLAAQFHRLAGRRGKKRALLAVAHSILVIFYHLLKRPVEYHDLGRDYFDRLQPERLRRYLVKRLESLGYEVTLSPREVA

SEQ ID NO: 330876 - protein, 346 aa, unidentified
MNTLKQVIGIDVGSKELVVCLGKIFANLDKKLCDYGNFRNTDKGLVKLHGWVQAHTSSESPIHFVMEATGVYHEKLAYFLESKGYTISIILPNKISNYFRTLEIKTITDKTCSEAITLFGLERHLEFWRRPDPTYKRLKQLTRERDQLVQERTAVKNQLHAEQTEAEPNTNSLNRIKERIAVLQKQEKEVLTEIKLIVKENSVLRQETDNLISIPGIGLLTAVTVLAETNGFEMIRNKKQLVSYAGLDVKEKQSGISILGKPTISKRGNRYLRKSLHLPALAAIRHDEHYSNTFTRLVSKHGIKMKAAVAVQRKLLELMFIIFKSKQRYDSQYHIQKQTYNQVATK

SEQ ID NO: 330877 - protein, 295 aa, unidentified
MKRCVIGMDIAKKVFQLHTVDSCTGKIERIKLRRDGVLAFFANYPSSLVAIEGCGSAHWWARQLQQQGHEVRLLAPRSVRPFVLRNKTDAADAQAIWTAVQQPGACLVAIKQPDQQVILSLHRIRAQLLKFRIMQSNGLRGLLYEFGIVLPEGYANLSKAVPEAFVDAEHRVPSMLLDILRDQWARVIQLDEEVRRIELRLKQCMRESADCQKIAEIPGIGLLTATAAVASLGNATTFHSGRQFAAWLGLVPRQTGTGGRVRQLGLSKRGDTYLRTLLMHGARSILNRGQAISLG

SEQ ID NO: 330878 - protein, 351 aa, unidentified
MLSQTTATPKLFIGMDVHKKGWTVHFKTDLFDNKTVTMPAETEALINYVERNFSDHAVSCCYEAGCCGYWIARALLQKGWEVRVVNPADVPRNNKQDWQKTDRIDSRNLCKHLSDGNLKGIYIPGEQQEQLRALFRRRIHLARNLRSIKNHIKSQLLYFGIRLPVQFDNPNWSREMKNWIANINWKYNSAAESMRSRLKQLEFIWYEELHISNELRAYCRKHYKKDYYLYKSVPGIGGITAAGILSELGDLRRFNRIDELAAIVGLVPGIYQSSENKINLGLTKRSNHQLRSLLVEASWVAVRDDMALQQYYRKHAHKEPNKAIIKVAHKLLSQIRAVIQSGIPYQAGLIK

SEQ ID NO: 330879 - protein, 370 aa, unidentified
MSDAITFVGLDTHKQTISVVLAENDRAGEVRYVGKIANRPEAVARLVRRLAKQHAKLRFSYEAGPCGYGLCRQIVALGHDCVIAAPALIPRRPGDRVKTDRRDGAALAKNDRAGELVQVWVPEPADEAMRDLVRARQAAVETMGQQRQRLLSFLLRQGRIYEGKKHWTKAHRHWLAGLAFDAPAHRVVFQEAIEAIGEAEARRDRLTQQVEALLPGWRWHAVVLALQAMRGVALVTAATLVAEIGDFRRFAHPRQLMAYLGLVPSENSSGPRVRRGAITKAGNARVRRVLDEAAWSYRHGPRVGAALAARRAALPKRVRDIAWKAQLRLTARWRHLLAKGKKPPVAVTAIAREMVGFLWAIAIAATPADA

SEQ ID NO: 330880 - protein, 457 aa, unidentified
MPQPKRSRSRTGLSAVHPAAAAIDIGATMHVAAVGPDRDTEPVRTFQTFTDDLHRLADWFARCGVKTVAMESTGVYWIPVFEILEQRGFEVMVVNARDAKHVPGRKTDVSDAEWLQRLHEYGLLRPSFRPQAEIAGLRAYLRQRERLLDYAAAHIQHMQKALMQMNLQLHHVVSDITGVTGMNIVRAIVAGERDPNVLASHRERGCHASVETICQALVGNYREEHVFALSQAIELYDVYQTKVAACDKQIEVILKRLKKSATPPASKLLPPKHRSRQPNAPSFDARAALHAILGVDLTQIHGLGPYLALKLVGECGINLTAWPTAKNFTSWLGLAPRNKISGGKVLSSKTPRTSNRAASLLRLAAVSVGRTDTALGAFYRRLAARAGKAKAITATARKIAVLFYNTLRHGMSYADPGATYYEERYRRRVLGNLQRRAKSLGYVLQQADRDPTQVVVS

SEQ ID NO: 330881 - protein, 335 aa, unidentified
MKWRILETLGIDISKLDFHANLITEKGEAKKSFPNSLAGYKQLDVWLRNRRAQQVHACMEATGSYWEALALHLHELGYAVSVVNPARTKAYAQSELLRAKTDKVDAGMIARFCRAQKPPVWEPPAPEIRMLQAFSRHVQNLKETRAEQLTRVQTPHLPEFVVKSINEVIAALDVEIDETERLIDEHIDKDPGLKRKRDLLTSIPGIGVTTATSILSEMPNISDFRTASNVAAFAGLSPRIAQSGTSVRGRGALCKTGNARLRKALYFPAITAQRFNPVLKAFADRLAANGKHRMVILGAVMRKLLVLAWGVLKSGCPFDPNRPAETRSKIALSTA

SEQ ID NO: 330882 - protein, 356 aa, unidentified
MATYYIGADVDSKMTELAIEKNEKIVRRYRVPTSIPAICEVLSSIDGKKHLTFEEGPMAGWLYRNLKDSVHELIVCDPRRNNLIACDGDKDDSIDSGKLAELLRGGYLRAVHQSQDMGRVVLKQWVSLYHDRVREAVRQINKIRGRCRMYGIGIPRRALRDQVIRCQWMTELKERALAEQLSVLWIGFDTAAKQVQMSKRQLIRHSKAYEIIRYWSEVPGIALIRATTLLAYLDTPWRFSNEKKLWKYCGVGLQRTASGTDRRGRPNRGKLKLAWAVNRRLKAVVIGAVMSAINQKQNIFAFEYERMICKGLTASNARHAVARKLLSVLWAMWKTTNRFNESLVCYSPATVNGKLI

SEQ ID NO: 330883 - protein, 335 aa, unidentified
MELTKQSVGIDVSKDSLEVKFKEKSTIGIKIKGSSKFDNTSTGFINLLEWCNKREKGENVIYVLEATGVYHEDVLYFLFGQGKKVSVELPQRIKYFAKSKGVKTKNDLIDSGVIADYGLERELKVWQPPGKEFKTLRDLSREHNTLTNSKSEAMNRLHAAKHSHDKNARVIERLQSTIKFYTNQLDEIEKDIKSTVNADKELSGKIKKVTTIKGVGVMTVVKIIAETGGFYLFQNINQLISYAGLDVVENQSGNHEGKTWISKKGNADLRTSLYMPALSAIRFNEKMKSFNERIMETHSYKKQGIIAVMRKLLILIYTLWKKNEEFSLDYKWGQA

SEQ ID NO: 330884 - protein, 345 aa, unidentified
MKIIGCDFHPSFQQIAMCDSETGEFQERKLSHADGQAERFYRELVGPVLIGIEATGNSQWFLDLVAQLGYEIRVGDAAKIRASYVRKQSTDKRDAHHLLTLLLEKRFPQLWTPSASMRDQRQLLRHRDKLVEIRTKVKNSLQHLAMNRGMQKKSRLWTRLGMEQFQQLAMPGWAGVRREDLSHLLKQLNGQIEALDRAVEQAARQHPQAQLLMSQPGVGPVTALAFVLTIGEVTRFAGSKQLSSYLGLVPSEHSSGSKRRLGAITKQGNRFLRKLLVEAAQTAVRKDEGFRKEYQHRCHRRPKGVAKVAAARKLAVRLYWMLRSNVSYPEIVRVESNPRVPLGDV

SEQ ID NO: 330885 - protein, 372 aa, unidentified
MAQDRLRPGSVIETVRQLDLRRYLRSKPEQSLGPVMSRARIYKDGNPTVQPNSNARCWVGIDVSQEWVDVVVLVEEQKAEQLRCNRSVEALTQLAQKLLPYGPQGVVLEATGGLESLVITALAAGGLGVMRMNPKRVRDFARAQGLLAKTDVLDAYALALFGARMQPPLRAWPEAERQQLAAWVARQQQLIVERAAERTRLQQSSEPQLRKSVERVITFLGKELALLEKQLSAWVAQSETWKEQEALLRTAPGVGPKTALRLLAQLPELGQLNRRQIAALVGLAPFACDSGKWRGKRRIRGGRGGVRATLYLASWTVIRTKGALQQFYLRLLAAGKPKQVALIAVARKLLLALNEMLRTNQPWRVAKIPILP

SEQ ID NO: 330886 - protein, 462 aa, unidentified
MQDSQKRKSSSGNPREIEGLPVIRRRIAGIDIGSERHWVCAPTIEESGREVADFGATTPELIRMAKWLKERNVESVAMESTGVYWIAPHEVLEAEGLEVMLVDTRQLARVPGRDKKTDPVDCEWIQRLHSCGLLMGSFRPPEAVCMLRTLVRDKGNLVAEAGDWLRRMQKSLDQMNVRVHRAVADLQGTTGMAIVQAIVEGERDPRKLAKLRDHRCHKSEAAIAEQLSGHWREDHLFSLRQALKMYHSILERISDYEQELLKKLAAMEREECRGQEVPKVNNPQKARAIRRRGEEPMRHALYRMSGVDLTGIDAIGVATVEVVLTEYGPDMSRFPTEKQFVSHVTLAPHRPTSGGKPVKKKKRNSASTRVAAALRMAALSLRHSDTALGAYYRNIARRKKGDVAVFATARKLATLIYRLLRWGQPYVDEGAQAYERRYQQTRIRGLMARAKELGYQLTPTTA

SEQ ID NO: 330887 - protein, 347 aa, unidentified
MRFYTQQHKYYCGIDLHARKMYVCIIDQRGKAKVHKNIKTNPELFFELVFPYLEDVVVGVECVFCWYWIADLCADHKIDFVLGHALYMKAIHGAKTKNDKIDSFKIAMLLKGGNFPTAYPYPAKLRATRDLLRRRMYLSRRCSELVAHIQNTNTQYNLPAFKKKLSRKYNHAGVAERFEDPSVCKSVEVDLEIIESLNQILKKLEWYIEKTARQHDYHTLYLLRSIPGVGQILALVILYEIHDIRRFPRVQDFSSYARLIKPTKISDGKWAGHSNKKIGNHHLKWAIKEAAILMLRDSSEAKQYVGKLDRKYNKGKALGIFTHKLGRAIYFMLKNKEAFDMKRFFEQ

SEQ ID NO: 330888 - protein, 447 aa, unidentified
MKKEAAKKSVVNLPLVNPNAAGIDVGDTMHAVAVPDGRDEVQVQSFGTMTCDLQTIIDWLNKCGVDTVAMESTGVYWKPLFSVLLKAGFEVYLVNSKQVRNVSGRKNDEDDAAWIQKLHSCGLLKSSYLPDDEQETLRTLVRYRRTLTMDCNRFILRMQKSLEMMNIKVHTVIRDITGKTGTRIVEAIIAGERRPENFLPYVDRNIKADRDTIVKSLEGNWRPEHLFVLTECYHGYKYYKERITVCDQEIERQLAKYQAELFPVAKADSNSKSKKRATKNKPNFNTTSYLKSILGVDTLAIYGISDISGLEILAETGTDLSKWETEKHFVSWLNLCPNNKVSGGKMISSMLMKKKPNAASQAFRQAANAVQRSDHWLGDYFRRMKAKGGNKYAMVATANKLATIYYKMVRFKKEFNPPDLQQYQQRYRKAKIAYLERKLLNLKCEAA

SEQ ID NO: 330889 - protein, 350 aa, unidentified
MVTVGIDLGESSSYATVITNEKSETFSFTMNEEGYQALREKIPLDARIAFESSGSAYPFDRQLRQMGYTDITVAHPKELTWIVKSKKKHDRVDSVKIGKLHSVGMIPEAHLLKREDQILRDLLLQRVKLGQEISRLKNSIIGYLKREGLYDSLPKSTNGFSALRRKTMKSIAFGDERDLVLSTMILQLELVEKLTEPLEGKIRERARVNDDVRLLMSIPGVNFYLASLLCTYIGDVNRFPDADHLASFFGIVPAERNSSSMRRVGRISRDGPSTPRWALSVMVDTVGKFKGPIHDYYAKSKARTGKGSLAHVLGMKKLVRMIYHMLKTRERWKWENESVTARKLEALESE

SEQ ID NO: 330890 - protein, 345 aa, unidentified
MELHTIGIDLGKTVFHLVGLNLCGEVVVRKKFSRKQLLHFTANLQVKLIGMEACGGSHFLGRALREQGHEVRLMPAQYVKPYVKTNKSDYIDAEAIAEAVGRPKMRFVPIKSDDQLDLQSLHRVRERWVMRRTAVINQIRGLLLERGITLRQGRGHVDAALPGILEDASAMLSGALRMLLAQLKLELDHLQIRIDEADAMINKAAGENEACRRLVAIPGIGPVTATAIIAAIGNGAAFKKGRGFSAWLGIVPGEYTTGGKQKLLGISKRGNSYLRRLFVQGARAVLQQSAKQSSGLSAWLAQLTSRTHRNVAAVALANKLARMAWAVLAKNEPYRPPMLAAAATT

SEQ ID NO: 330891 - protein, 335 aa, unidentified
MDGQYVGIDLHRRRSLIVRKNGDGVTQATTRIANDPMRLAEVIGEAGSHPSVVVEATYGWYWAVDLLQELGCDVHLAAPSGLNWGQRRVKNDERDATDLIDLLCVGRLPEAWIAPPETRELRELVRYRFKLVGLRTGLKAQVHAVMAKNGVLPSRIDMFGPGGTAQLDALELPVAYTTRLESLRGLITTLDNEVSTMERQVHELLRGDAGYQAIQHLNGVGRVLPAMFCAEIGDVHRFRSAKALCSWAGMTPRHHESDTKVIRGRVTKQGSRLVRWAAVEAVAHMRGGPKLQVDYHRIAERRGVNKARVAVARKLLTLVYYGLRDGEIRALREAA

SEQ ID NO: 330892 - protein, 370 aa, unidentified
MLDTTTFIGLDVHARSIKAVSLDVMTGEVRAATFGYDAGAVAEWVRSVDPRARCVYESGVTGFDLQKRLSGLGVDCVVGAVSKMIKPSADRRRKNDRNDAEFLARMLSVGNVVEVWVPDDECEAARDLTRALEDARDDLSRAKQRLSKFLLRHGLAFDERTPTGRRKGNWTRAHWSWIESIRFAERADNDVLAYYVDAVRRAAEEKARLEGLVEAEARKPRWRKRVDSLRCLKGVDTASAADLVFEAGEFSRFRNARSFAAWVGLTPSEHSSGESDRRGAITKAGNKHLRKTLVEAAWHYLTCSGRPKDLAKGQAPDRGARRHAAKGVRRLAERREALLARGVHGNKANVATARELACWVWAVGLMAEEA

SEQ ID NO: 330893 - protein, 351 aa, unidentified
MPRTATVHAVTAIGIDMGKNTLHMVGLDTRGTIVLREKVSRGRITSRLANLPPCLIGIEAGMATHYVARELAVLGHDVKQVPPAYSKPFRQGQKNDFRDAFAVAEAVQRPTTRFVPAKTNEQLDLQALHRVRSRLVSERTAVINQIRGFLLERGIIVRQGLRFLRQALPDILAKRTDVLSPRMVRIIADLASDWRQLDERIEPVTDEIETLAKSDSSCRRVMTVPGIGPIISSAMVAAIGSGAAFARGRDFSAWIGLVPKQMSTGDRTILGRISKRGNGYLRTLFMQAARVILLRPASWPKHGFGVWLARAAQRLHPNVLAATLANKLARIAWTVLAQERSYEAPVTKAAA

SEQ ID NO: 330894 - protein, 342 aa, unidentified
MEHTTIAVDLAKSVFQVAVSHRPGHLDEERRLSRDRLVPFFAQRPPATIVLEACGSAHYWARQLQPFGHTVRLLPPHDVRPYVRRNKTDRTDAKGLLEANRNEEIHPVPVKTIEHQAMASLHRLRSTWLATRTARLNTLRGLLREFGIFIPVGAQHVVPQVRALLVDPPTVPVLLHTTLAAACDEIAMLETNMRAVERQLGALASEMADVTLLQTVPGVGVITATALVALVADIRRFPSGRHFASFLGLTPKEDSSGSRRRLGAISKQGDVYVRMLLTHGARSVVWHAKTATRPTSLQQWAVQTEQRRGRNVAAVAVANKLARIAWAVWAQHRPFAADHRPG

SEQ ID NO: 330895 - protein, 342 aa, unidentified
MSYNFIWIDVSNNTLDIHIKQSNTWLQVQNHYKTIFSFFKKEIKTFDNIVVVSEATWVYSSSLVKVCSDLNIKHYEINPKAMNQLWKNIWDRNKTDKIDAEKIANVWQMMYEMNKNWFWKSRLTSTSNNEIKFLKSILSAIHSCKYDIQKSKQRISALKKDIYAPNSFLKDLNKTITSSQKVKDNLVEQAIEIISNLNMYYKFLNIMTIPWISNEVGLELIIFFIDLSDKWIGINDRSKVKAFAWIDVSIKQSGSSIDKKRISKQGNKHVRSILQVGSRCWFSLVKMDKYKNTNLWLFFGRMIDKFSTPSKLNWNSISTAMSRKILLIAWWIFWNDTTYNWS

SEQ ID NO: 330896 - protein, 341 aa, unidentified
MEQATTIGLDIAKHLFQLHGADAAGHVLFRKRITRVKLLSFLAAQTRCVVAMEACAGAHYWAREIAKLGHHVRLIAPAYVKPFIKRQKNDAADAEAICEAAQRPSMRFVPVKTEEQQANGIVFRARDLLVRQRTQCVNALRGHLMEYGYVFPKGITHVETLIAVVEDLQSSLPDSVRVILKLLIDTFTTLEAQIAVLDAEINQRSKSDPTARRLMTIPGVGPIASTAITALVPAAEGFPAGRDFAAWLGLTPLQKSTGGKQKLGAVSKRGERTIRRLLIIGASAVVQQASRRGAPKGSWLAQMLARKPKMLVTVALANKMARIIWALLVKGGTYRTPAAAA

SEQ ID NO: 330897 - protein, 341 aa, unidentified
MATIALFGLDIGKHSFHLVGQDANGKPVFKRQFTRSSLIHYLAQHPACRIVMEACCGAHWLARQLAGFGHQVQLIAPQYVRPFVTGNKNDFLDAHAICEAASRPSMRYVGVKTPEQQASSALHRLREARIADRVQTANQIHALLLEFGIVLPLGARGIKQVPDIVMNASADLPHAARRILSAQYEHYRYLAELIAGLDSQIGAQAKADALTSRLMTIPGIGPITASQLAADAGNAQSYGSARHFAASLGLVPRQHSTGGKSKLLGISKRGDKSLRRLLVQCARVVMQNAAKWQSAVAQWTQQLMTRRHSNVVACALANKLARIVWAVLVKGEEYRPNPNAA

SEQ ID NO: 330898 - protein, 388 aa, unidentified
MEHVIIGVDPHKLSATIEVVNRHEQMLGSGRFTTDRAGYAGMRAYAKKWPDRVWAVEGSNGTGRPLAQRLLEDGEQVVDVPAKLAARVRLFDTGHNRKTDAHDAHAVAAVAVRTKTLRVLQLDGELEALRMLTDRREALTRRRVQTVDRLQALLAELLPGQAKRDITTAQAKGMLASVRPRDIAGKTRRRIAAEELAELIAVEAKIKKATAELKAIVLARGSRLMDLPGVGPVVAARVLADVGDVTRFADRNRFASWTGTAPLDASSGEQNRHRLSRAGNRRMNHMIHIAAISQIRLNTDGRAYYLRKRAEGKKSLEAIRCLKRRISDAIYRQLLEDAQQAALQSDGTGPGGHCRASQESSAADLPLLIDTSDQPLPGPADKTLRQTG

SEQ ID NO: 330899 - protein, 346 aa, unidentified
MMLIGCDFHPSWQQVSWLDVETGETGEQKLVHARGEAKQFYEQLAAPVLIGMEATGNSQWFIELVEDLGHEIWIGDAAQIRASYVRKQKTDKRDAAHILKLLVEGRFPRLWTPDREQRDLRQLVLHRHKLVLIRSRVKNELQHLSLNKGMQRKRRLWSQAGQKLLRELPLKKWAACRREDLLGLLTMLDEQIGKLDGAVQHAAEENPQSKLLMTQPGVGPNTALAFVLTLGDVGRFPRGKQVASYLGLIPREESSGGRQKLGAITKQGNRMLRALLVEAAQVAVVHDPGLRKQYRHRCHQKPKAVAKVAVARKLAVRLYWMLRTNVAYPEIVRIESSSGLALVGAS

SEQ ID NO: 330900 - protein, 319 aa, unidentified
MLIGIDVAKAELVVAARPSGERWTVANDEHGVRALVERLRVEAPELIVLEATGGYELLSVAALVAAALPVVVVNPRQVRDFAKATGQLAKTDRIDADILALFAERVRPVVREIPDADAQELEALLSRRRQLLEMLGAERNRLGQVFGRGKQKVRKSLKGHIAFLERELRIADTDLGDMVRRSSAWREKDDLLQSVPGVGRVVSFTLLADLPELGRLSRREIAKLVGVAPLSRDSGTFRGRRFVQGGRASVRAVLYMGALVATKRNAVIRAFYQRLLTAGKPKKLALVACMRKLLTILNTMIRTGQRWSIDQSAPVLISA

SEQ ID NO: 330901 - protein, 344 aa, unidentified
MADNTLVAVDLAKTVFQVAFSNHPGQVSKNKRLSRTQFAELLGQLPQSTIVMEACGSAHFWARRMQALHHTPILLPAHAVTPYVDRNKTDRADTKGMLEAHRNEAIRPVPVKTVAQQALCSLHRIRAGWIAERTARINTLRGLLREFGIIIPVGAQHAVPNAWLHIEDAESEIPDSLRPALAEICTEIRELERRVKMVETQLGALAEQTPAVARLMTIPGIGLIIATALVAFVGDIHRFPSARHFASYLGLTPKEHSTGSRRRLGAISKKGDVFLRTLLIHGARSVLNAARKKTSPDRLHAWALSRHAARGHNRAATAVANKIARIVWAVWKRDQPFISAPPVA

SEQ ID NO: 330902 - protein, 423 aa, unidentified
MSKKKQTVAGLGAIYARVCGMDVHKEVVVACVRILDMQDGTVQSTLRRFGTMTADLLELRYWLAQEQVTHVAMESTGVYWQPIFNILEGHFEVWVVNAQHIKKVPGRKTDMKDAEWIAQLLQCGLLKPSFVPDREQRELRDLTRQQTKLVQQRNAVANRIQKVLETANIKLGSVASDVLGVSGRNMIEALIGGERDVSKLADLAEKRLRHKIPQLQRALEGEVREHHRFLLRRLLDQYDFLEKEIARISERLAAIAPPSFRGAVERLDEVAGVAERGAQALLAETGTDMTRFPSHKHFASWAGRCPGNRESAGKRKSGKTPSANRHLDAVLTEIAHAAVRKKDSYFKSQYHRLAGRRGKKRAIGAVKHSILVTIYFMLRDNKSYTDLGPDHFDKLNPQQQIRYHVRKLNELGQNVELSLRPAA

SEQ ID NO: 330903 - protein, 414 aa, unidentified
MIIAEEPTGARVCAGVDWAKDDHAVCIVGAEGEALQRFMVTHDRAGLTNMVHRLLRAGVDEVGIERPDGPIVDALLTAGLTVLVIPPAQVKNLRSRYGSAGNKDDRFDAYVLADVVRTDRRRLRPFERDTVATSALRTTVRARRDLVIHRVAAANQLRAHLQIVFPAAAGLFDSIDSEVSLQFLERFTTQGQADWLSVKRLSSWLASIGYSGGTDPGVIYARITAAPRGTIGVEAATHAVMTHAYIAVLRTLNTQIRTLAVNIGAQLDVHPDAKIFTSLPRSGCVRAARLLAEIGDARGRFPTASSLACLAGVAPSTRQSGKVKAVTFRWGADKELRDALCDFAGDSRHSNPWAADLYAKARARKCDHPHAVRILARAWATIIWRCWQDHTAYNPAEHGGLQRILTQDQQTVAA

SEQ ID NO: 330904 - protein, 343 aa, unidentified
MQVTTVGLDLAKRIFQVHGVDAAGKVVIRRRLQRSEIAAFFADLPACLVGIEACATAHHWARLIGASGHQVRLIPPSYVKPYVRRSKTDAADAEAICEAVGRPSMRFVPVKSAHQQAALLHHRARDLLVRQRTMLINAIRGHLGEFGIIAPAGRHRVSDLVNLLQGADDAEVPALAREALQSLFAELSALEIRIKVVEAVIMREHRSNAVSRRLTTIPGIGPITASALAGTIADPFAFKSGRELAAWIGLVPRQHSSGGKQKMGRVSKQGDRYLRRLLTVGATAVMRRLPGKTDGLSLWVRALLDRRPFRLVSLALANKMARIAWAIMVRPETYKASAMTAAA

SEQ ID NO: 330905 - protein, 458 aa, unidentified
MQTCPPGTAAGFASVSGSSAHELVERRDEVPTKPAMRQGPGCQGAPLVPHNTSTSASEVFAGIDWGGSFHQVCLINAHGDVIVQQRVQHDLAGLAELDRLLLVHRNAAGRLRVAIERADGLLVEHLHTIEVEVFCVSPKISARARERYRLAAAKSDAFDAFVLADTLRHEHRHWRALSPASPALAELRAISRDRDRVVIAQQATENRLRAVLEAYHPAPLHLFSSLDRDITLDFVTDYPTPEQAARVGEARMQQFCRRHGYSGRTDPTVLVERLRPHLLSAAKGTEAGKAFSATMFTEELRLLNAHLRAYDKRLVELLDQHPDAPIFTSFPGIGPVVAAALISEMGEDRGRFPAPEALLAEAGLSPVTRASGRTRQVRFRYAANRRMRHMIDWWAFVAAREDAWSRRIYDDARARRQGKYRALRGLGSRWTRILWRCWTDHTTYDPAIHHKQQEPAQA

SEQ ID NO: 330906 - protein, 349 aa, unidentified
MKKIIIGIDVSKEKIDASAIDVRNSQLGVLKLDYQAFENRTMGFRRMLVWARRLLKGITLEEILFCCETTGGYDRSLCDYIYAKGLDIWRESSLQIKKSSGLRKGKDDKADSLTIAEYAMRHIDKAVSYISPSETVRELKALLLYRRKLEQEKTSKKVRVAELKSTAAKSRSVSFILRDAQKSIRVLEKSIKDCEKQILALYDSDEELKKSYDQLISIRGIGIVNATAMIAYSNNFKNITSSRKLASYYGIAPFRERSGTTIDKKAMVKCYSSSMLRAYLTQAAENTIREHGIYHDYYTRLSARGKCHGIALNNVKNKLLHLSLSLITNDMDYEENHEVLRAIRKVQAG

SEQ ID NO: 330907 - protein, 483 aa, unidentified
MTERVYRFEGFGGECMNSAIGIDPDSTGFVCALVKDSKAQVITRRFSVSQNGLSEFLRWVKAEGKPIVGIEGTHGQSRPIEKVLREAGVIFHSFKPADTDRFRKAVLGQNKNNERDAESVARYALALEAQGKLAQYRRLWSADMELQLLTRRYESLSDQLTGEVNRLWKLLRYACPDLYLLLGGKNGENGQRGKVLKNQGILTLLISTPDIGEWKGLSQTDMREAMGGGNYKGRDELIAELREAAESFPSISAGIGLVIRSSAQQIQRFKEEQSELVRMLDRLTEGNLAVQCLKSRRGIATLTAAKMISEIIDIRRFAREDSLACYSGLGMREHTTGNTTMMIPTRLFNHRLKDAFMTAARNVVFYDPDSHLAGYYRNLVKAGMQPLEAAKRAARALVRVIFRELSALNESKANDLDQERQKGGEGDMASGVTRGDQGRKSNISPSSPRSSKSKSTKKVKNGKLRGARTNGGRKKQAVTNKTA

SEQ ID NO: 330908 - protein, 392 aa, unidentified
MVVSVGIDVAKDKHDCFIHSSEGEVLADVFTISNNMDGFHTLLEKIQACTAPQDKIRVGLEATGHYSYNLLGFLLDNGLATYVLNPLRTNLYRKSLSLRKTKTDRVDARTIAAMLLSDAGLKPYTDTAYHNEELKSLTRYRFDKVKERAKLKTSVSRLVCILFPELEKLVPTLHMASVYALLEEFPGAKQVAGAHLTSLKSLLEKASKGRYKRDMALSIRDAARMSIGSRMPAKSLELQHTIRLIRELDAEIHEIEAEIETMMDEIRSPIMTIPGIGCRMGAMILAEAGDLSRFDSPDKLLAYAGMSPSTYQSGQLNNCYPHMEKRGSRYLRYALFNATKYVCLWDPAFAAYLAKKRAEGKHYNVAISHAAKKLVRLIFAMEKSRQPYRSAA

SEQ ID NO: 330909 - protein, 341 aa, unidentified
MKNKSFIGIDISKNVIDVSIFCEETPIKDFPHAVFNNSHKGFGEMCTWLKKNHVVLSNCLFGMEFTGSYSMELEKFLNARKYQFCMLSTHVVKHYPMGPKDKSDKIDSAKIADFLYRYNGTECVKPYKMPDKTMQRLKALMNERKFLVEQRTCFMNRRQLCTTKEDAQLYDGYIKKLSHDIENIELEEQKLLATDDSLLSTYKNLLTIPGIGFVNAINVIVMTRNFTAFETARQYASYIGVAPHFHTSGTSVRWRPRPSARCDGQAKADLSMAATVAVQYDAELQSFYNRKLGGKQDSDTKRKALNAVKFKLVLRMFAIGKQNRKWEPLDSKSSNEKLAIS

SEQ ID NO: 330910 - protein, 354 aa, unidentified
MAKTREAAVAVIGIDIGKYSFHVVGLDRRGAIVLRQKWSRGQVEARLANMPSCLIGMEACVGAHHLSRRLKALGHDARLMPAKYVRPYSKGQKNDFRDAEAIAEAVQRPTMKFVATKTAEQLDLQALHRVRERLVSQRTGIINQIRAFLLERGIAVRQGRLSLRAALPHLLAAPPEIVSPRMLHLIEDLAGDWRRLDERIRALSDEIEAIARQDVGCERLMSVPGVGPIVSSAMVAAIGAGDAFAKGRDFAAWLGLVPKQISTGDRTILGSISKRGNRYLRVLFVQAAWVVLVKRKSRERLGLDRWLEAAKKRLHRNVLAIALANKLARIAWSVLAQGRNFEVGMFAEAHGQTA

SEQ ID NO: 330911 - protein, 419 aa, unidentified
MKIVYPICCGVDVHKSFLVATLITTEGIVPTYRKKRFSTFNKSILEFKQWLISNNCFDVCMESTGKYHVPIYNMLEDALRVTVANPKWVAAVKGNKDDKKDSKWIGDLFRLGLVPGSFIPEKRVRILREYTRYRSKLISCKSSEKNRFRNAFTVCNVALDSVVSDMFGKSALAVTDYLVNCDSFDPEHCVSLLHRSLKKKADAVVESIEGYQMTEEQKTRIRFVKEHHDFIQTMVGKIDQSIAALAAPFESAVALLCTIPGVDRNTAFTIISEVGTDMTQFSSSERLCSWAGLTPSNNQSAGKKKSVRISRAGVYLKPALVQAAHAAVKCKDSAYYRIKYEHISKRRGKKRAIIAIARMMLTAAFHMLSTGEVFNPSDLLQIDMPHELRDKQRDKAIKQAVKLLVSQGIVLPENLSLPA

SEQ ID NO: 330912 - protein, 398 aa, unidentified
MRKPKLKKHRTPKQRKPNDLSRSLAAFDPDHTLVAVIEMGAASWLVAGLVPGVERQPLKKVEPDVLALRRLLDRWRDEALRSGSAVTRIAVAYEAGRDGFWLARWLRTQGIEAHVIHAASVAVSREHRRAKTDRLDAELLKRSFLGWLRGERDHCKMVAIPTVDEEDARRPGRERESLVGEATRTINRVKSALARIGIRGFNPKLKKAADKLSDLRTPEGQSIPPNTLGEMQRDLERRQMICVQIHRIEQDRLGRLQQAPETGPSAMVRLLARVTGIGIETADTLVREMLSRDFRDRRAVARYGGLTGAPDQSGSMDREKGLARSGNTRVRKCMIELAWRFVRFQKNSVLVKWFELRTTHARGTRKTMIVALARKLLIALWRLVNEGVIPDGVVMRPA

SEQ ID NO: 330913 - protein, 373 aa, unidentified
MPKYSTAFGMDVHLRSTTVCALDADTGEAVTRRFPGNPWGEIAGWMDGFPGPSLAAYESGYLGFAPQRELAGLGVECVVAAVSKIPRSAADSASKNDRNDAARMAKAILAHDISPVWIPSPEVEGIRDLAGAYDGATARLATAKQRLLAFLAKRGFVYGGTTPAGNPRKYWTYDFLRWLDKVRPEDDGGVRTLAALRNEVEAAAEARADLLSEYRAAVDASPIAAEVAALQSIKGCAFALAAAFSAEVGDFTRFRSGRRVTAYFGLAPSQRSSGDSVRLGGISGAGNALVRKLAVEGSWCYAAARHQPKLMPRDTGVPLEIRMHGRKGSERLLRRREEMLARGMPAAKANAATAAELVRWLWALGMMCREGAE

SEQ ID NO: 330914 - protein, 339 aa, unidentified
MKKISTIGLDIAKRVFQIHGVDDTGKVVVQKQVGRSELLDWFGKQEPCLVGMEACATANYWARELSRLGHDVRLIPPAYVKAYVRRQKNDRADAAAICEAVSRPSMRFATLKTTTQQVVQVLHRTRELLIKQRVQLGNALRAHLAEFGHIFPQGAAGLDKTLGFVTENAGDLPEELMGILRVYVEQITRLRETLKGLERDMLLWHRSQQDSLRLATIPGIGTVTASAIVAAIGDGQQFHSGREFAAWIGLVPRQNSSGGKERLGRISKQGNAYLRQLLVTSATNYLRGERHARAVGGTWFSQLLKRKPGRLATVALANKMARVAWAVLTKGETYHAMPA

SEQ ID NO: 330915 - protein, 438 aa, unidentified
MSNKVIFNLDELFISVGIDVGADFSWMSIALPNQQFVGKPYKILHNSIDSLTTAVSKIKEAEELYSLESRIFLESTGIYHYPLFCYLRDKGFNCSVINPIITKNSTNINIRKVHNDRFDSKKAALVGLKPDLKVSLMPSDLALNCRNLCREYYDLMDNRSAYVNKLQGELRMAFPQYLGIFSKVTINTSLTLLETYTSPSAFLEADKQEIIDSIKSTARFGLTYAQNKYNAIIQAATDANQFGYIIDSNIKRIRLYISFIRKYDEEISSILESLHELVDANEDTDFVKQIHLIETFKGAGFLSAVSIMGEIGDFSAFSKPKQLFAYFGLDPAVKQSGKLEGTKVQMSKRGSAIARRVIHTLTLQSISISRNGEAKNPILREYYLKKCDSKPKLVAMGAVSHKVCNMIFAILRDNKPFKIIAPQEHIKQYNAAKCDIAA

SEQ ID NO: 330916 - protein, 399 aa, unidentified
MTPDDIDVWVGLDVGKSAHHAHALDHDGNTLYDKPLKQDEKAIRTMLGKLSKHGRVLLVVDQPNTIGSLPLTVARNMGIAVAYLPGTAMRRTAQLLPGDAKTDRRDAHVIAWAALKLPETLRDAGPDDETLAALKLLAGHDEDLAHESTRHVNRLRSLLLQTHPAFERALKGERITRDATLALLERYGGPMGVKRAGIEDVKDWAKSNGLRAGRIIDDMFKAIGEQTVTVPGTLMAETIIPSIAHDIKTIRDRRREVGRQVEKLLEDHPLLTVPASMPGIGVRTASNILLGIGGDIANFKSSAHLAAYAGISPVTGQSGTSIKGERPSRRGNKRLKNALWQTAFVASTKHPPSVAYYKRKREQGKHHNAAIICLARRRCDVIYSMLKNGTLYQEPALVA

SEQ ID NO: 330917 - protein, 338 aa, unidentified
MKLYCAIDLHSNNSVVVLLDGADKVIYQKKLNNDLTLILEQLSVYKSRITAIAIESTFNWYWLVDGLMDAGYTVKLVNTAAVQTYSGLKHTDDKDDARWLAHLLRLNILPTGFIYPREARAVRDLLRKRSQMVHQSSTNILSLQNILVRNTTQSLSSYKIKKLDDEQAEKRLTDPNITLALKCNLNVIRCLQRTIAQIEETVLQQVRIRAEFKQLLKVSGIGEILGLTIMLESGDMRRFAKVGNFSSYARCVKSERFSNGKKKGEGNRKNGNKYLAWAFIEAANFAIRYNDKINAFYQKKKSKTNGIIAIKAVASKLASACYHILKDQVSFDVDKAFS

SEQ ID NO: 330918 - protein, 347 aa, unidentified
MNYIGVDCHISTLDFAVVSERGTVKNKARVRTSVKGFMEFIKTVPKPRKIFIEEGTLASWLLETSMRYGEKLIITDPKTNKWIGKSMAKDDEIDAEKLAHLARGGYIKAVYHPVNKKRRFKELVFAYHDTVKSQIRIKNKLKARFRTEGILCNGTTVYSENYRNEWRDKLPKDPIARLIADELWNQLDQLHEAKKTLKKSIGTECRQHPEIKRFMKVPGIGLIHASTIFAIIDTPYRFSNKKKLWMYAGIGLAKRGSGGKVYSIKLTREYNRQLKNAIKKAVESAIFAKDSQFKRQHLRLTLKQGLPSHKAKLTVARSILATLYGMWKSGEEYDPDIDIKRKEGNKK

SEQ ID NO: 330919 - protein, 351 aa, unidentified
MACKITSNEAATTIGIDIGKNTFHLIGLDKKGAIVLRQKLSGRQVDSRLANMPPCLIGMEACVGAHHLGRHLKAFGHDTRLMPARYVRPYSKGFKNDFRDAEAIAEAVLRPTMKFVAIKTVEQLDLQGLHRIRERLVCQRTSVINQIRAFLLERGIAVRQGVRALRSEMSMILAMTDKLSPRMIRMIEDLCADWRYLDGRIESVSNEIKTLSEQDDGAKRLMTVPGIGPVISTATVAAIGNGDVFSKGRDFGAWLGLVPRQMSTGGRTVLGPISKRGNRYLRMLFVQAARAVLLRPRSWEKHGLKSWIEAAARRLNRFKLAIALANKLARIAWGVLHGGRQFEVRSTTPIS

SEQ ID NO: 330920 - protein, 318 aa, unidentified
MHAHSEDQVFVGIDVAKAHLDVRIIPGDQRGRWNNDASGVAALVSILRQNAPSLIVLEATGGYEKLAASALGAAALPVAVVNPRHVRHFARATGQLAKTDRIDAALIAEFARAIRPPAQSLKDERSRDFEDALARRRQLVGMAAAEKTRLAQASSQAARDIRAHVTWLEKRIKRIDVDLEDLVKQNVTWRDRHALLQSVPGVGKGLANTLIANLPELGVLNSKALAKLVGVAPLNRDSGTMRGRRSTWGGRADVRRALYMSVISGIRFNPQLRAFYARLRAAGKKPKLALVACMHKLLMVLNAMAHAGTHWRVVEVAA

SEQ ID NO: 330921 - protein, 345 aa, unidentified
MKITTIGLDLAKDVFQIHGVDGRGKRVVSKQLRRRQVLGYFAQLEPCLVGMEACAGSHYWARELSALGHEVKLMAPQFVKPYVKTNKTDAADAEAICEAVRRPNMRFVPVKDVEQQALLSLHRARAGFVKSRTAQANQMRGLLSEYGVVLGRGIRQVRVGVPAIMSEAQGALPEMFRKLLGRLYEHLVVLDDAVAALESEILGWHRSNADSQRLAQIPGVGVLTATALVASIGDARSFHNGRQLAAWLGLVPRQHSSGGKPLLLGISKRGDAYLRTLMIHGARAAERVAQRGRCATDRWSVDLGRRRPRNVVFVARANKNARIAWALLAHQRDYDANYQSMAAAA

SEQ ID NO: 330922 - protein, 408 aa, unidentified
MEVVHPRCSGIDVHQASLAVCVAIKEEGNSEKHKLRCGTTTAELLRLADWLHGHQVTHVAMEATGVYWKPVWHILEGQFELLLANPTQVQALRGRKTDLKDGERISDFLQHGLLQGSFVPPKPIQQLRDLTRSRTTLKQEQVRIGNRIRKVLEDANIKLSSVMSDVMGVSGRAMLRAMVRGESDAETLAQLARKRLRGKIPLLQQAAAGSLNEHHRFLLEQWLAHWDELAERIAKFDERIEEQIRPFAAAVETWNSLPGIDRITAWTMVAEMGADMNQFPTAAHAASWAGLCPGQEESAGKRKSGRTRRGNVWLRRALTQAAWGASMTKGSYFKAFYHRLAAHKGKKRAIVAVAHALLSTGYMLLWTGRTYSDLGEGYFDRLDRERLTKRLLKRLEKLGHHVLIQPAA

SEQ ID NO: 330923 - protein, 342 aa, unidentified
MIRYVGLDVHKRVVEACIVDHAGKVVQRERFALYRSALETFAKCVLRPGDHVALEATTNCWAVADVLRPHVTRVLVSNPMATKAIAQAKVKTDKVDAHVLAQLLRCDFLPEVWQPDEATRRLRELTGRRSALVGQRTMMRNRIHSVLAMRLIAAPVPLFNAEGLEWLATVELDAQARLLVDSDLRQLEFLQKEIGGLDAELARRGHASDPVKLLMMLPGVDVATAEAMLAAWGDAKRFPDGDHAASYLGLVPSTKQSANHCYHGPITKRGSWRHPAKGYRVRHAALSSFARLVRASRGTSPLPLHPLPLLRSRAGEPTEKPPPPVDTDRGKLSHLSADAKGR

SEQ ID NO: 330924 - protein, 343 aa, unidentified
MYYIGLDVHKKTISYCVKDAAGHVHREGKIGSTRCELDAWIKTLPQPRMIAMEATIFTGWIYDHLLPHAEKVKVAHPLMLRAIAAAKKKNDKIDAGKIADCLRCDFLPECHMVSTEIRDRRRTLRYRHLLVRQMVQMKNRVSGLLMETGVEHNKQRLHKVGYFHELLATNKEVHPCILPLLKISRETIVRCQKTDYALVSSLQRDPLLAERIKRLRTIPGVGPITALTWALEVGDVARFRTIKQAISYCGLCGEEKSSADKVMRTPLSKQRNKHIQHVLVEAAKLAPRQCHELAVIHDRELQKGNRNRATLAVARKMVAYLLAVDRQQRDFVPVEDRRRATAA

SEQ ID NO: 330925 - protein, 347 aa, unidentified
MRFYTKAHKHYCGIDLHARSMYVCIVDREGAVLLHRNLPCDPVRFLMVIRPYREDLVVGVECIFSWYWLADLCAKEGIAFVLGHALYMKAIHGAKAKNDRIDSQKLAGLLRGGLLPQAYVYPAEMRATRDLMRRRLHFVRHRGQLLAHIQMTHHQYNLPSPGKRITYRSNREGLEDVFEDVSVRESIAADLTLADQYEVVINELELSVLRQARGHDLNSFQLLRSIPGIGKVLALTILYEIHDIHRFERVQEFASYSRLVKCQQSSAGKVVGTGGAKIGNAYLKWAFSEAAVLFLAKCPQGKALLARIENKHGKAKALSILAHRIGRAVYFMLTNQKAFNLERFMRS

SEQ ID NO: 330926 - protein, 431 aa, unidentified
MLKINPLSTLYVGIDVSSKSNYVCALDFYKNKYINSSFANNQPGAEELALKILECLNQHPDLTMVVAALESTSVYSIHIANYLSSCEELMRFKPYVFVLNPKCTANYKKSYIGLGKSDPIDAFVIADYARAGNIESEPWRGSQFLALKRLTRHRLHLVECMTREKTYLISNLYLKFSELQMLEGDDQPFCDIYGATSSSVLMEYLSPEEILASSEENLIAFLAEKSCNRIKDISKTADLLKKAARDSYRLDKALYEPLNVSIASSFNCIETFKREIKVIDNAIEKEIKGLNPNAFIILQSIDGIGPVFAGGIIAEIGDITAFHSSDALAKYAGLTWKSNQSGDFDGEDTPMIKAGNRYLRYYLGEAANSMRKHNVEYGTYYRKKYNEVPKHQHKRALALTSRKFVRLVYGLLARNQLYSGVSLDTSIKDSN

SEQ ID NO: 330927 - protein, 339 aa, unidentified
MNLYAGLDLHSSNTYIGVLDQQFNRIFKKRVSNDLDLILKTLEPFRARLKGLVVESTYNWYWLVDGLMDAGYACVHLANPCAIKQYEGLKHSDDQHDAFFLAQLLILGILPQGYIYPKETRPVRDLVRKRLFLVQQKTAHILSLQSLLARCCCQRVSSNQLRKMTSHDLRQWLKEEHLVLSAQANLDNIVFLKQQIGRLEAAIQKQVKLSDAFNCLLTVPGIGKILAMTIMLEAGDIRRFATVGNFASYCRCVSTQRLSDGKSKGSGNRKNGNRYLSWAFTEAAQMARRFNSRFRSYYDRKAAQTNSILAHRALSNKLARVCYYIMRDQVEFREESVSH

SEQ ID NO: 330928 - protein, 299 aa, unidentified
MRIIGLDIHRAFAEAVAWDDGKLKRLGRVDMRRHLLEAFAKKLAKEDVVVVEATGNASSVAAVIAPHVKKVVIANPKQVRIIAHAKIKTDTIDASVLAQLYASGFLPEVWIPDEPPQALRRQVTRRNQIVRQRSRLKNIIRSILHSHLIPSCPHADLCGPSGRAWLFHQILPDDERLAVERHLREFDRLGEDLKVIERDLARSALGDESVKRLMTIPGVDMIVALAIVAAIGDVGRFGQSQKLVSYLGLNPSVRQSGPGPAYHGRITKHPVRCTRSICACAPAAARQCRALRRTGSPGR

SEQ ID NO: 330929 - protein, 331 aa, unidentified
MQRKTIFVGIDVSKETLDLVINGTKSHNRIPNNSEGFKQLLSWLKSLEIIVEDCWFVFEHTGGYEYRLVQFCSSKAIPFSRISGLEIKRSLGLQRGKNDKIDAKRIGQYGYEKRERLQADNPSSPAILRLRQLLTQRSGFVKQRKANEHRADELLAMMDIKKNDPILKRYRQSAASAEKMISKTEAEIRKLISQNELLNKNFSIITSITGIGEVNGWITIAYTENFRRFSNARKYGAYSGLVPYEHQSGKSIKGKSRVSHLANKEIKANLDMAAKASIGHDPEMRSYYHRRQQMGKHHRSIMNEVKFKLVLRMFAVVNKQELYVKKSVLAA

SEQ ID NO: 330930 - protein, 343 aa, unidentified
METYVGLDVSLKRTSICVVDQTGKVLCEGTVNSTPEAIVEFVKLKATGAIRIGLETGPTLTWLWTSIRGLGLPVICIDARHAKAVLKMQINKSDRNDALGIARIMQCGWYKEVRVKSLDSHAMRALLESRALLVKMKRDLENQIRGLLKNVGLLIATARGQGLHARIQELVEGKPHLAVAVLPLLETRNGVVRQIAEFDRKVLMLARNDSQVRSFMTVPGIGPITALCYRATIDVPSRFKRSRSVGAYVGLTTRRYASGEVDWTGRISKCGDAMLRSYLFEAAGVLLTRVQKWCALKAWGLRLAKRVGLRKAKVAVARKLAVILHRMWTDGTQFQWSTDKVAA

SEQ ID NO: 330931 - protein, 412 aa, unidentified
MEILYANCCGLDVHKDTLTACLRRLGADGQVRKELRTFGTTTTELLALLDWVTAAGCTHVAMESTGVYWKPVFNILEGHVEQLLVVNAQHIKALPGRKKDTLDAEWIAQLLQHGLLRGSFIPPAPLRELRECTRYRKQLIRTRADEANRIQKLLEGANLKLGSVASDILGVSGRAMLAALVEGETNAAALAALAKGKLRRKHPELVAALTGQMRPVQRELLGHQLAHVAFLDQTIAALDAQIATLLAPYQAAADRLRTTTGIEQRTAEVLIAELGADMTVFPSDRHCASWAGLCPGHDESAGKRRSGKTRKGSQWLRAALIEAAWAASHTSGYLAAQYRRLVRRRGRKKATVAVAHSILVIAYHILKDGTTYRDLGHDYFDKRDTVRLQRRLIARLEALGLRVTVDPLADAA

SEQ ID NO: 330932 - protein, 319 aa, unidentified
MQALEQTGISVGVDVSKDRLDVAFDPPREPLAIDNNDRSCRTLARRLLTIRPDRIVLEATGGYERPLAAALMEAQLPVAVVNPRQVRDFARAIGRLAKTDALDAQVLALFADRVRPEPRPIPDSETRALQDLATRRRQLVALRTAETNRAHSATNAKVKGSHRRLLKIIGREIAQVEAQLDERIDQRAEWKARRRLLISVPGIGPQISRTLLGELPELGSCSRQQIAALAGVAPINRDSGKLRGRRMIWGGRPKVREALYMATLVASQHNPVIRARYRRLVKSGKLKKVALVACMRTLLVTLNAIVRNGEAWRTEPKTA

SEQ ID NO: 330933 - protein, 334 aa, unidentified
MEQITTVGIDLAKSVFSLHGVDASGKMVLRRTVRRDRLVETVASLSPCLIGMEACSGAHEWGRRFQEYGHTVKLMAPKFVAPYRKSDKNDGNDAEAICEAVTRPSMRFVPVKSVEQQALLALHRVRQGFVVERTAIINRLRGLMTEFGVVLALRSVTVRRQAAQGAEALPELARGAIGDLLEQLRRLDERIEAYDKQIEAQARLSESARRLMKIRGIGATTALAIVATVGNAREFKNGRQFAAWIGLVPGQYSTGGKARLGHISKRGDAYLRNLLVQGARSVLQTASQHSDRLSRWALELQARRGYYRTLVAIANKNARIAWALLAREQTLRQS

SEQ ID NO: 330934 - protein, 483 aa, unidentified
MAAKKNAKTGTDRTSAAAAAERGGDAAEVAEDRVQVVERAAAIDVAKGSGMVCTRVPGSRPDRRRQQVWQVGAAYGEVTALMDHLRCQGIQRLVLESTSDYWRVWYYLAESAGLEVWLVNARDVKHLPGRGKSDRLDCVWHCKLNERGMLRRSFVPPEEIRDLRALTRTRARLAQDQARHQNRVEKILEDALLKISVVISDLFGASGRRFLDALVAGERSPAALAALGDKRLKATRRELEDALTGRFRDIHAFEIKTHLRLIDAINEEIARLDEAIGQQLAQVPRTAPCCIACGLAGGDHAPGCAGQGTPLLGLAGRLDEITGVGAVNARAIIAELGTDPSQFPTPGHAAAWARLTPRSRQSGETVRPGRTGKGNRYIRGALGQAAMATARTDTRLGAMYRRIARKRGKQKAIVAVSRVICEIAWILICDPAARYEELGPDYYRPRSPARQTRDKIREIERLNPGKKVILAPIGPGPEASAAA

SEQ ID NO: 330935 - protein, 377 aa, unidentified
MKNAITYVGIDAHKKDLYIAMLVGTGNTPVTWQIANEPTAVKRLARKLERESPGGVHVFYEAGPCGYALQRQLKSARIDCEVVAPAQIPRRPGERVKTDRRDARKLAELGRAGLLTAVRPPTPEDEAVRDLARARDDARDDLQRCRHRMGKLLLRRGHHYSGRNWTRAHRQWIATLEWGHAAERAVVEDYLLAMDQAEARRDELDARLAEIAQAEPYREAVGWLRCFRGIDTLRAMLILAELHDFRRFGSAPELMSYLGLVPGEHSSGGTHRRGRITRTGNVLVRRLLVEAAWHYQHRPGTGPALARRRQGQPGHVIAIADKAQQRLCRRFRKLTAEHKPAPKVVVAIARELAGFLWAALQTPPAGGKSTTPRQDND

SEQ ID NO: 330936 - protein, 410 aa, unidentified
MNRNRTVAGLDIHKDSVYLCIMGHDGTIIFEKTYGVLTPDLRQMSQDMEARGVTEAAMESTAVYWVPVWNELCNSMELKLVNPYFIKQLPGRKSDIKDAQWIAECLLKNLIKGSFVPGPVVQDMRKLNRRIMDLNEDLTYNTNKLDAALQRCGFRLSNYVSRIKGKSYQSVLSCIIDGERDPGKLIAKVHGRTINKHGRQTIMAGWSARMCLIILERIMCCGTTDIIIFRQTKAVIDLIEAQMAECQKELTALCGKHFPQQYRRLQTIPGVKERAATAIIAETGVDMKMFVTAASLVGWCGLKPRNDVSNGRYKSRKVTHGNRYLREILIEIAWVASRTRNCFFSNFSYVQTTVKKKSRMKIQVAIARKILVAIWHMLSKEQDFIDIYLKRLEQQRLLEEQLKSLESKMA

SEQ ID NO: 330937 - protein, 345 aa, unidentified
MESMYYIGLDVHKKTISYCVKDGSGRIHAEGKIPATRFDLDRWMKTLPQPWTVAMEATIFTGWIYDHLRPHAAAVKVAHPLMLRAIAAAKKKNDRIDAKKIADGLRCNFLPECYMAPTAIRERRRTLRYRNLLVRQTVQLKNRISGLLMEAGVNYNKEKLHKVGYFRELLKSNPDIDESLRPLLQLCRETLVRLQKTESALIRSLARDRFLVERVEHLMTIPAVGPITALTWALEVGEVSRFSSIKKAISYCGLCGDEQSSGEHVKRTPISKQRNKHLQWVLVEAAHMAPRLSPELALLYDREKQKGNTNRATLAVARKLVAYLVAIDRSQRDFLLVEKENQAAA

SEQ ID NO: 330938 - protein, 343 aa, unidentified
MNQPYHYIGLDIHKRTVAFCEKRADGKKVASGTFRTDAASVVRWARERTTPWIGGMEATIFTGYLYDTLSPFAAELLVGHPLRIKAISAAKHKNDSVDAETLSNLLRADLFPESYMASPRVRALRRALRFRNFLVRMAVAMKNKTTGILMETGIPYEARRIHGKRYFQEFLGNLDEVPEFVCEMLHTNRALLELFEQAQNDLVNALATHDELCERVTRLRSIGGVGDITALTWALEIDDPARFSNLKKVQSYCGLCSGQNESAGTSKRGPLSKQRNANLQRCLIEVAKLAPQWNAPLKAVQNKSLEQDKNRNRATCAVARKLVAFLMAVDKSGKDFEIRTPTR

SEQ ID NO: 330939 - protein, 418 aa, unidentified
MQIETDEPEIIERIAALDVSKGEVVCCARVPGPRGQRMQEIRTVSTMTAALLGLGDWLAGLGVTRVVMEATSDYWRAPFYLLEDRFETWLVNAKDVKHLPGRPKTDRLDAVWLCKVAERQMLRPSFVPPPAIRELRDLTRYRVDLLAVRTAEKQRVEKLLEDALIKLSVVVSDPFGASGRAMMAALIAGERDPAVLAALARGSLRSKTARLTEALTGRFTDHHAFLLTQMLQRVDAVTADIATVQARIDAQIGELAPAVVRLDAIPGLGPVAAQMILAEIGTDMGRFPTPAHLTSWARFAPGVSESAGRPKGKAGTGKGNRYLARVVGEAAVSAARTDTFLGERYRRIARRRGKKRAIVAVGRSILVIIWALLSDDEAQFVDLGPDYYASRTNPERKVRQHIRELQSLGYSVTLNPAA

SEQ ID NO: 330940 - protein, 339 aa, unidentified
MVAHFSARSIQVSIAGRRATPASGERLIAEPLFIGIDVSKSWIDIADTCGRALRVANEETAIAAAFKGPWSSCADMVCEATGGYERALMRVAKQRGLPLRRVHPNRARAFGQMTARLAKTDALDARMLAEFAAFTASEPRPPLPTAPSLELADMVSRLGQLTDLHQSETCRIKLTEGARIKASITAVLKVIKAQIDAMQDAIDAFIADDPTLSQNVKLLRSCKGVGPKSAQAILAMAPEIGALNRRQIAALVGVAPITRASGSSIHHASITGGRKALRDILFMAALTASKHNPTFKVFYERLRANGKPHKLALIAVLRKLVTTLNAIIKSRQPFKIALT

SEQ ID NO: 330941 - protein, 393 aa, unidentified
MHSVGIDIGKRQHVAAICRAGQRTADKPVLRFGADRAGLADLERWLARNGPVDRVVMESSGHYWLPLAAALHRASVPVAIVNPVRAKAFGTRRLQRVKSDPADARTLAALGMADQPRIREPLAGAELREAARFAMHLVEEQSRLDNKICRLIELGVPELGQAYDDPTCRSALAVLRLAPTAAAVARKRIATLADANRAPGHRAVGTKKAEQLSALAKDTMAPPELAAQIGFEMELLIAQHDLLEQQLAQAEARVASLLDGELARRLQTIPGVGPAICATFIAEIGDIHRFSEFDKLVAYVGVHPAEKSSGQKGGPETSWRMAKTGNAYVRAALYRMSVVGLQHNPTIAAHYARKRAQGKSKMNALGHCMKKSLAIVWGIWRGGHDFTPEPPIA

SEQ ID NO: 330942 - protein, 411 aa, unidentified
MNPVVGLDISKGESQVQAFLDKGKPYRKSFKVSHTVEGLSSLVLFLEDVKKESGKKPSIILEATGHYQTPVVHYLEERGYLLIIINPLISYKARGSSLRKVKTDAIDAYLLCELFYKEELEPYKKRGVQLLNLRNLTRQHENITGVMIQTKLQFQAVLEQVFPEYKGVFGDLYSMVSLLTLSEFPSSEDILSASEEIITDKINGLCKSRSSMWAKEKAIQLKAAATRNPFEKTVYQSHILSLGMYIKMILQYKEHLAKLESEIDALAKDIEEYNIIKSIPGIGEKIAATIISEIGEIDRFNDPKKLVAFAGVDPSVFESGKFSATKNRITKRGSSRLRHALYMAVRCAIRDCRKKKTTDEIIPRNKRMREFYDKKRDEGKPFKVAVIACVNKLLHWIFALLKNRTTFQDIA

SEQ ID NO: 330943 - protein, 315 aa, unidentified
MRSTVAQSVGVDISKDALDVAIHPAGESFRITNNPEGHRAVIKRLKGFDIARIVFEATGAYHRLFQQALVEAGLPWVKVNPCQARRFAQATGKLAKTDRCDALMLARMGAALELETRAPASKTVEALRELVNARDALIKDRVAALNRQAIAVSPLIKRQLAQRLRQIDRQIEAIDRRLKTLRNADADLCQRFDILTSIPGVGEVTANVLVVETPELGRLEHAQAASLVGLAPVPRDSGQTHGKRSIRGGRSRARQALYMPALNAIRLNPEFKAKYQAMVKAGKPAKVAIVAIMRKLLILANALIRDQRKWTPANP

SEQ ID NO: 330944 - protein, 337 aa, unidentified
MSVFTVGIDVSLQTLAVGIKAPGSAPTFLGSFPNDPAHFEQLASALREQAQQHQVTVIHLVLEPTGGYEQLLAHFALRQGWRVSLPNPKHVRDWAKGVGIRAKTDRQDALKLTRYGAEQELPSWAPLPENVAALNTLLERRNDLVGMLRQEENRRHALQAREEYHGPAAQSLEKSIAWLQQALAEIDAATREHIDQHPELQEQLRRLRQVPGVGERNAPFLLVLLFRWGALTDYQGSSKGLTAYVGLDPQPFESGSSVRKPSTTSRQGDPTLRSLLFMSALGGIRGDNALRAFYQRLVEGGKRKKVALVATARKILIWSWAVFRDQTSFDPKLAGAA

SEQ ID NO: 330945 - protein, 442 aa, unidentified
MSNHLQVGIDFALKQAVFYLASPDGHPVATHKSYANSAVGYAQVKDLLTTTMQRRGFDGLDIAGEATSTYWMPYFLQLASDADLTAAGLRLVLLNPRWVYWHKKSFGDENKADPSDAYYVTEYLRTHPAAAGWSPQLGTWPLRCYTRLRFRLAHQVAGQKCYYLTLLFLSNSAYSQRKPFSDLFGPTSQQVLSHWPELDALAEEDMVELLETWSKHRLSDPLQTAQRLAEIRAESFVVPEPLQTAVQRCLDLTLQQIRVGEEQIATVEGWIAQEAAQHPDVAHLATIPGIGPVCSSGIVAELGDVERFVNGERWDAHRQQMVPRNLRNAEDAVAKIAGLWWPRRESADFAAEDRRMAKTGNRYLRYYLIEAADRMRLSLPDYRLYYEAKYREATKHHYKRALVLTARKAVGLIVGLLHRHEPYRSREERQAAQTPPASANNP

SEQ ID NO: 330946 - protein, 448 aa, unidentified
MAHKEDVMRVMYERSCGLDIHKSSIAACALITEKGKPQEETRRFGTMTEDLRELAGWLQQKGIRHVAMESTGVYWKPVWNILEPAGFELLLANAQEVKIVPGRKTDQKDSQWIADLHKHGLLRKSFVPPRAIRDLRDLTRTRAILTQEHTSVCNRIQKVLEDANIKLGSVASDVFGVSGRAILRALMKEEKDPEVLAELSKGTLRKKIPQLRRALEGQVTAHHRSLLTGHWNRMEFLERQIADFETQIAQRMKPTPEEMALTTQNAAEESPLSLSPREEAIQLWMEIPGVGWTAACSMVAELGVNIDQFPSAAHLASWAGLCPGNNESAGKRLSGKTRKGNVWLRRTMCEVAWAASHTKDSYFAAQFRRIASRRGNKRALVALAHSILVTAYHMLKHKRHYMELGGHFFDVINSDKVRNRLVQRLTKLGFEVKLTPMGAVDNVTSATN

SEQ ID NO: 330947 - protein, 410 aa, unidentified
MEVLYPHCAGLDVHKETVVACVRHMTDGTVRREVRTFKTTTTDLLALSEWLASEGCTHVVMEATGVYWKPVWHILSDGDFALTLANAAHVKNVPGRKTDTNDATWLADLLAHGLVRASFVPDAATQEQRGLLRTRKQLVRERASHVQRLQRTLEDANIKLDSAISDVTGVSGRAMIEALIVGETDPARLAELAHRRIKSSPETLREALRGRVTKHHRFLLHLHLKQIDALDEAIAGIDAEVDAHVEPFRAAIAQLKTIPGIGDLGACVILAEIGTDMSRFPTQGHLISWAGLCPKNDESAGKRRSNRMRKGAPWLKTTLIQCAWAAARKKGSYPQAQFQRLRARRGAKKAIGAVAASMLTAAYHMLKDGTFYQDLGADHFDRRAKGTATKRLIAKLQSFGYDVQITPIAA

SEQ ID NO: 330948 - protein, 469 aa, unidentified
MAIRIGIDVACRAVHRAACADATGSLLWKNVRFRTSAEDLEALWQRIPAGEDDITVVMEPTRNAWVPLAAWFRRHGAKVVMVPPEQSADLRDYYNKHAKTDRLDAELLARLPGLHPDGLHIEQGLGCAEPLRRAVKIRSTLVRRRVTCTQRLDALLEILGPDWTCALGTVMTATVLLFLTRWPDPQQVLRLGHKRLTDWLARHSRGIWGAQKAEAILNAAAATLRLWGTDGMDFAALAADIALEAQLARDLDRQIKAIDKRIATYYDQADPEHIALSAPGVGQVLAAQIVGRLGDPQRFTNLAAVRSYSGLVPRQNSSGVASAAGGPTKQGDACLREAIFLAADHARRSDPTLAQRYHRLMVENGKHHTSAICSIGAVLLTRIAACLRKGESYVLRDVDGTPITVQEGRATIKERYSVPEAVRKARRTVHRSDSQQPIDVMMGGRGSSTKKGVARRSKVSTTPQPACIG

SEQ ID NO: 330949 - protein, 359 aa, unidentified
MSCYYVGLDVHKASICIAVLNADGKLVMESVVETSAATILDFLKALRGHVEVTFEEGTHATWLYDVLKRTKAKVIVCDPRKNRLLHEGNKSDKVDARKMAQLLRAGLLSPVYHGEHGVRDLKELVRSYEYLVEDSTRVMNRIKAIFRGRAIACAGADVYKPRQREEWLERLPEPGVRARAARLYCELDHLTGLRREARQEMLAESRRHEACKILRQVPTLGTVRIAQLISAVSTPHRFRSKRQFWSYCGLAVRTRSSADHHFVGGDLRRSAKATTRGLTQDHNRTLKYVFKGAALTASRCEPFKSHYAELLGRGLRPELARVTVARKIAAVTLAVWKKGEAFDADKLIKHASSADSTVG

SEQ ID NO: 330950 - protein, 383 aa, unidentified
MQPINTVINPTIYLAIELSASTWLIAARLPGSEKPHLHRIDGGDTAALFALISSLRARVARRLDAAIGVVCCFEAGRDGFWLHRLLTAHGIANYVLEPTSILINRRARRAKTDRLDAIGMLRVLAAYLRGDRQSCSMVRVPTPEDEDAKRIHRERENLVQEKLRIENRIEALLFTQGIRKRPSLRSWERDLAVLRTGDGREMPRHLRAELDRLRRRLVTILELIREVEAERDEVVTTNPEHQTSRKIVALCRIRGLGENFAGVLTREVFYRSFDNRRQIASYVGITPMPYQSGSMDRDRRISRAGNPRARTTMIQLAWLWLRYQPGSELAEWFRKRVGTLAGRTRRIAIVAMARKLLIALWRYVETGVLPAGAEIRLESVAAA

SEQ ID NO: 330951 - protein, 340 aa, unidentified
MHATMIGLDIAKTVFQVYGEDAARRPVLRKRLSRAALTGLFAKLPPTVVGIEACGTAHHWARTLTAMGHTVRLIPAAYVRPFVKRNKTDARDAEAICEAMQRPSMRQVPVKTVEQQAGRGLETARDLLVRQHTQLMNSVRGLLAELGIVAAQGRRGFAVLCTRIEAGDPAIHPVLLPALQTILEQWHGTGRAITELEARLVARAKADATMRRLMTVPGIGPLSAHAIVAAIGDGRQFSAARDFAAWVGLTPRQHESGNRRHSGRISRQGDQGVRRLLTLGASAVMRQARAKPQRATAWQRGILARRPVKVAVVAQAAKTARIAWAMLRSGHSYRAAGAAA

SEQ ID NO: 330952 - protein, 364 aa, unidentified
MHRNRTSVGLDVHARSVVACGLDGQTGELFERRLCPDHSEIISWIRGLPGPVGVTYEAGPTGFGLARFLTGQGIDCQVAAPSKLQRPSGDRVKTDVRDARHLARLLHLGEIVAVTVPSVEQEAARDLVRAREDVRGDLMAARHRLSKLLLRQGIVYSGGTAWTGTHDRWLRAQRRASVFATAGLGTAFDIAYDTLLATTARRDRLDAAIAEMAAASEFTPIVTRLGCLRGIATLTAFGLAVEIGDWHRLTGRSIGAYLGLVPTEYSSGSSRSLGPITKTGNGHARRLLIEAAWHHRPPNRIGAELRRRQDAASPAARDRGQRANRRLHDRWVQFNLRRKRAVVANTAIARELAGWCWSLAVLDD

SEQ ID NO: 330953 - protein, 340 aa, unidentified
MSEITTIGLDLAKHVFQVHGIDAEGATVLRKQLRRGQVLAFFSRMSPCLVGLEACATAHYWGRELAALGHEVRLMPAQYVKAYIKRNKNDAADAEAICEAVQRPRMRFVPVKTAEQQASQLLHRGREQLVRQRTMLVNALRAHLAEFGLVAAQGLRNVGELIAIVRDDDDRRVPDMAREVLQVLANQIEQIEAAIAALERQLLAWHKTNAVSQRLASIPGIGPIIATAIATTVADPNVFRSGREFAAWLGLVPRQNSTGGKPRLGGITKRGNRYLRRLLINGASANLLRSKATKADPWVIRLRQRRPPLVVAVALANKTARIAWAVMLREREYQPRALAA

SEQ ID NO: 330954 - protein, 349 aa, unidentified
MVIVGIDAHKRTHTAVAIDEAGRKLGEKTTHATTTEANLELVRWAGGFDPERRFAVEDCRHLSRRLEADLLAGGEELVRVPPKMMAHARDSARTYGKSDPIDALAVARAALREPKLPIARLDGPSRDLRLLVDHREDLVRDRTAQINRLRWHLHELDPSWDPAPRALVRFKHLDGLAARLVGLEGTVAFVARDLVARIRELTVAANDLQRLIVEKVARLAPALLEIAGVGALTAAKIVAEVADVRRFRSKDAFARHNGTAPLPVWSSNRIRHRLSRTGNRQLNAAIHRIAITQMRIHDDAKAYLERRIGMGNTKMEALRALKRQLSDVVYRALMADALSTQAARFGEAA

SEQ ID NO: 330955 - protein, 352 aa, unidentified
MEMIALDCHKHYSVASVETPGGDCLAERRIEHRRGSIEAFLGPYSAGCPVAIETIGNWYWIVDEIERAGKVPRLVHARKAKLMLGSINKTDKLDVRGLNRLQRSGTLPLVWIPPGGIRDPRELPRTRMVLATMRTRLKNRIHSVLDKYGLQEEVPQVRDLFVPGVRSSLQECLAQLPAQAAYTTGLLLKQLDRVQATIGTLEKRMARVFRPTPEVQWLQTLPGVGRILSVVIASEIGDIGRFACAERLASYAGTVPRVHSSGGKTQYGRTRSDVNHYLKWAYTEAANVVAVHHRQRPDLHVSQLYSRIRHRRGHASAVGAVARHLAEATYSMLSKKEPYRERGVPEVSSQQG

SEQ ID NO: 330956 - protein, 344 aa, unidentified
MGEVSTIGLDIAKSVFQVHGVDDSGAVVIRKRVSRLKMLEFFGELPPCLVGIEACPSAHHWGRELQALGHTVRLMPPSYVKAYLKRSKNDANDAAAICEAVTRPSMRFVPIKTKEQQTALMLHRTRQLLVRQRTMLSNALRGHLAELGIVSAKGRNGIGELLKLIADGADNRIAPAPRAILDVLARSYSAIGVEISSIDKSILTLHRSCEASRRLEEIPGIGPIVATALVAEVGDWKEFRSGRNLAAWIGLVPKQHTTGGKDRLGSITKQGNRYLRWLLVAGAMAVIRYAQKHGTERRPWLGRLMGRRPTKVAAVTLANKIARMAWAIMVHGERYKEPTLLKAA

SEQ ID NO: 330957 - protein, 387 aa, unidentified
MRRPKEKLIAGLDLHSNNVMIGVINQDGQRVTHRKLDCDLDAIVEFLQPLKPQLQSMAVESTFNWYWLVDGLRARGYPIDLANPAKIEQYSGLKHVNDTDDAFHLADLQRLNILPQAHVYDPELRPVRDLFRRRTKLVHQRTGLLLSFKSLYAHTTGQALSLSEAKSLEPKEASKLYEHPANRLIAQVQAEHIGALDKSIARLEKAVLACAREIPIYEKLLSLPGVGRILGMTITMEVGDVKRFKSDGDFASYCRMVDAKRLSNGKCKADNNQKCGNKYLAWAFVEAANFARRYDENCRRWYDRKAAKTSKVIATKALGCKLAKAAWHVMSQRADYDQSRMFPELAVKKSKDLESRRQPAKGLDQEPSCLIGGGGSRHPRKQTMKPS

SEQ ID NO: 330958 - protein, 415 aa, unidentified
MALKIVYPICCGIDVHKTFVVACITSTNSQGVTTYKRHRFSTFTKGLNELSQWLCEHDCKDVCMESTGKYWIPVFNILEPSCNITLAHPKYVKAIRGKKTDKKDARWIADLFKHDLIAGSFMPPLPIRQLRDLMRYRFKLTNFSSSEKNRFQNSLTVSNIQLGNVVSDTFGKSSMNIIDKLLDNPTDTSFDIESLIHGSLKGKLPELELAIDGLITSEQAGKIRVIKQHYEDLESRKADLEAIILSLAESYSKEINLILTVPSFKNPFSAIAVVSEIGVNMDVFPTAKHLCSWAGLTPTNNESAGKKKSVRISRAGCYIKPLLVQCATAVVKSEKHPEIRNRYLQLKRRRGHKRAIIAIARMLLTAIYHILKNKEPYNPVLYKTSDVRPVNREITVEQAILLAQAQGYRIMTVAT

SEQ ID NO: 330959 - protein, 413 aa, unidentified
MLKIVHLICCGIDVHKTFVVACIASTNEKGVTTYQSKRFSTYTKNLRELSSWLAANNCKDVCMESTGKYWHPVWNILELTCRPILAHPKYLKAIRGKKTDKKDAQWIADVFKHGLVQGSFIPPAKIRELRDLLRYRFKLTNYMTGEKNRAQNCLTTSNIQLDHAFSDVFGKSATAILNHLLEHPDDKNFDVTPFVDRRCKTPIAEIQMSIDGNISYEQTEKLKVIRSHIASLELCKANLETVILTLAKPFLPQINLVSTVPGIREFSAIVVIAEIGVDMSVFPTAKHRCSWAGLAPQCNESGGKKKSSRVSRAGAYIKPLLIQCANAAVKSSKHPEIRNRYLSIKKRRGHKKAIVAIARMFLTAIFHILSKNEPYNPDLYRSKDTPAVDREQQAIILLEKRGFSVSRIDSTVK

SEQ ID NO: 330960 - protein, 321 aa, unidentified
MEVLYPRCAGLDVHKATVVAAVRLVAGGKVAREVRTFATTTAGLLALAAWLGENGCTHVAMEATGVYWKPVWHVLAEGGFDLVLANAAQVKNVPGRKTDVNDATWLAELLAHGLVRASFVPDAPTQELRSLLRTRKQLVRERASHVLRLQKTLEDANVKLDAVLSDLLGRSGRAMLEALVAGETDPEKLAAFAHPRLAPTPERLREALRGRVTAHHRFLLRLHLDQVDALEAAIGRIDREVEERLAPFSTAVDLLASIPGVGALAARVIVAEIGLDMGRFPTAGHLVSWAGLCPRNDESAGKRLSARLRKGAPRRTGRGWS

SEQ ID NO: 330961 - protein, 350 aa, unidentified
MGGTISVLGVDIGKNLCSLVGLNACGKVVFRRRAKRETLIALAAKLPPCIVAMEACGGAHHLGRIFGARGHEVRLMSPEYVRPYVKAQKNDDRDAEGIAEAATRPTMRFVELKAQSRLDLQTLHRARDRLVGERTALINQLRAVLLERGIVVAKGKHKLATFVAGLLEGLEDHGLSERMRALVADMQLQWAELDRRIRAFDAEFTRFLRENSDARLLSTIPGVGPLIASALIAAIGSGEAFDHGRDLSAWLGLVPRQSTTGGRPKLLGISKRGNRYLRRMFIHGARAALPSIAEYETPLGSWLKGLLARVHRNVAVVALANKLARIAWAVLQRKEAFFAKQQLSRSFAAA

SEQ ID NO: 330962 - protein, 332 aa, unidentified
MENFYFIGVDVSKKKLDFCVMFEGKVVHEEETSNNQGAIMSLLHHLEEDYGIASGQMLVCAEHTGQYTFPLACACKAVECKLWLENAAEIKYSSGVQRGKNDRVDAKRIAIYASRFQDKVQYYERPTEDIERLKQLESERTLYVTDLAKYKGQMKDQKEYMPKSLYERKMKRLQALMDDLEEAIQSITDEMDEVIASCPVLFRQRELLMSIDGVGRVVATNMIIATEAFTRFGDPRKFNCYAGVAPFSYSSGSSLHSKARVSHRADKVMKRLLHLAAVAVTHRIGGELKKYYERKVAEGKNKMSVINALRAKIVARMFAVIKRNERYKPILS

SEQ ID NO: 330963 - protein, 364 aa, unidentified
MKKISTTTAKAFRKMEKLTIGLDLGDRSSCYCVLDERGELVLEQKVSTTPKAMEEVFGGMPRSRIALETGTHSPWVSRLLSELGHEVIVAHARNVRLIGESRRKDDRLDAKTLARLARIDPQLLCPVKHRSAKAQAHLTVIRARAGLVRARTALINVARGLTKSYGERLRGCSPRNLNKRAEGLSVELRTALGPLLEEIESLSERIREYNQRIEGIAQEHYPETALLKQVKGVGTLVALTYMLTLEDPHRFSKSRDAGCYAGLQPGRRNSGQSQPQMRISKEGDAYLRGLLVQSAHHILGPFGADSDLRRWGLKLAERGGKNGKKRAIVATARKLAVLLHRLWVNGEVYEPFHSSSRRVLVAAA

SEQ ID NO: 330964 - protein, 392 aa, unidentified
MKKNNKAEMSVKAETSVKTEKKQAKAKKVSNKVSGEKLTIGIDLGDKTSRYCSLDAQGEKVAEKSVATTKEGMTKAFGAMEPCRTVLEVGTHSPWVSRLLKSFGHEVIVANPREVRLISGSNRKNDKLDAYTLARLARVDPDLLRPIQHRSEKAQTALLQIRVRAALVETRTGLINTARGLVKALGDRLPKCDADQMGVKQAATLPAEIQQELKPLLEQVESLTEKIKASDAQLERMAETEYPETKLHQQVWGVGTLISLTYVLTVEDPKRFEKSRDTGCYVGLRPRQRDSGDSRPQLGITKEGDEYLRKLLVQGAQRILCQKAPDTDLKRWGLKLCERGGKNAKKRAVVAVARKLAVLLHSLWVTGEVYEPLRHSNARAAAAAAAQSRVAA

SEQ ID NO: 330965 - protein, 418 aa, unidentified
MNMNAAGIDVSSSKSTVAVLRPLGEVVKLPFDVRHSAEELASLAKQLKSIEGETRVVMEHTGRYYESIAKVLHEAGLYVSAVNPLLIKEYGNNSLRKVKTDKADAIKIAKYALDNWSELRDYTPMDTIRYDLKTINRQFQLAIKQKTATANNLIALQEQSFPGIRKLFDSPVRSDGTQKWVDFTHDFWHTDCVRSGSLNAFTERYRKWCKRNRYQFSTEKAAKVYALAKSAVVLVQKTSVTKTLVQEAANQFTAISRSAETYRSEMNKLASQLPEYSIVMEMYGVGESLGPQLMAEIGDVRRFERKQSLVAFAGIDPAPSESGDYCSRSNRTTKRGSPYLRRTLFNIMKVHLQRAPADEPVFQFIDKKRAEGKPYYVYMTAAGNKFLRRYYGKVMAYFSSLEDLPPVDMESTGLHLTK

SEQ ID NO: 330966 - protein, 389 aa, unidentified
MSQPFEASRSLTALEQHNTIIAVIEMSQAKWLVAAVVPGIKRQPLKKLDADQEWLLKLLHRWRKEAEQAGHPIKRVVVAYEAGRDGFWLARWLGRRGVEAYVIHPNSIAVSREHRRAKTDRLDTELLLRALLGWLRGEKRHCSMVAIPTIEEEDAKRPNRERDSLVTEQTRIVNQIKAILTRFGIRTFQPKLRKAEEQLKELRMAEGSLLPENTRAELFRHLARLHMVREQIRAIEKARLQKLKADHDRQKNPPAMVHLIARVVGIGVETADMLVNEVFLRRFRDRKAVARYAGLTGSPDESGKRRREKGLARAGNARVRTGMIRLAWRFLRFQEGSALARWFQIRTADGRGNTRKTMIVALARKLLIVLWRLVTTGEMSDGIVLRPAS

SEQ ID NO: 330967 - protein, 412 aa, unidentified
MELVNARCAGLDVHKATVVASVREPGPQPGERRTETKTFATTLRSLKELLAWLTAHGVTQVAMESTGVYWRPVFAVLEGAVQVRLVNARHVKMLPGRKTDVHDAEWLAQLLECGLLRGRFVPPAAVRDLRDLTRLRKTLIRERGHHVNRIAKILELANIKLGTVVTDIMGKTGRAILQALSAGLDDPEQLAACAQGSIRQKQDALREAVEGRLTPHYAFLLQQHLALIDTVEAHITTLDARIEAALAPFIETVTLVQTMPGVAARAASAILAEIGMDMAPFPTAAHLASWARLCPGTHESAGKRRPTTTGKGATWLRATLQEAAWAAVRTKKSYYRALYHRLKARRGPKKAIVAVQHAMLVALWHMLKHRVPHQDLGADYFDRRNTARLRRHHIRRLEKLGYNVVLVEKPAA

SEQ ID NO: 330968 - protein, 407 aa, unidentified
MRLFVGDDWAEDHHDVEVMNEQGKVLARRRLPEGVAGIAQLHELTGRYLPEDAADAEVLIGIETDRGPWVAALVAAGYAVFPVNPLQASRYRERHGVSGAKSDQGDAHMLADMVRTDSRQLRPAAGDTPEAEAIKVVARTHKTLIWERTRHIQRLRHQLREYFPAALDAFDDLAAPDALELLAKAPDPARAARLTRAQISAALKRARRHHIADKTTAVLAALRGEQLGQPPTLTAAYAATVRALISVIITLNEQISSLEEQVKDHFGRHPDAEIYLSQPGMGAILGARVLAEFGDDPHRYTSAKARKNYAATSPVTRASGKRKVVAARFVHNDRLIDALMSQAFSAMKASPGARAFYDDLRNHGIEHNDALRRLANRLVGILHGCLKTRTLYDEATAWSHRDKSLAA

SEQ ID NO: 330969 - protein, 361 aa, unidentified
MTDGSKEQPRTTAGLDLGNKYSYLCLIDQQSGEVVEEGRLRTTPEALRRRFSSEEPMRIAIEAGTHSPWVSRVLEEECGHEVLVANPRKTRLIYSNKRKTDEIDAENLARLARLDPKLLYPLKHRGEDSQAHLAIIRSRQALVGCRTQLVNHVRGTVKSFGGRLPKCPAVSFHKRAAEHIPEALWPALEPILAQIDSLTQRIRDYERQLEAICKEHYPQETDLLRQVEGVGLLTALTFVLTLEDPYRFEKSRSVGAYLGLVPASDQSGDRDPQRRISKEGDEMLRKLLVGSAHYILGPFGSDSDLRRHGEKIASRGGKNSKKRAAVAVARKLSVLLHSLWINAEVYEPLRNTQRSTRGQAA

SEQ ID NO: 330970 - protein, 371 aa, unidentified
MNSIVYVGMDVHKESYTLCCYYYDTDRVEYKQTIPSDYKLILKYIESMRKVYGENADFVCGYEAGCLGYSLYHQLREHAVECKILAPTTMAITNTSRVKTDKRDAANIARCLAFRTYSEVYVPDDEDNSVKEYIRMRDDQKLMLKKIKQQILAFVLRQGKKFEGGKTYWTVAHMKWLKALDLTGLAKETLQEYLVTYEYLMDKIERLDNRIEELASGEKYKETVKNMTCFLGVKTHTALSMVVEIGDFKRFEKAPKFAGFLGLVPSEDSSGDKVNRFSITKTGNSHLRRLLIEAAQSFTRGNIGHKSIALKQRQQECATEVVAYADKANERLRRRFYKMTLNKGVNRNVATTAIARELACFMWGMATGNIG

SEQ ID NO: 330971 - protein, 418 aa, unidentified
MIDDVQWFVGIDWATQSHRVGLLDIEGRHVSERDFAHGGAGLTELRDWLLEKTKAAPGQIAVAIETPHGPVVEMLLDHAFLVFAINPKQLDRFRDRFTVAGAKDDSRDARVLGSAVRTDRQAFRRLVVDDPVVIELREWSRMADELQQERTRLANRVRQQLWRYYPQAAELTDDVADDWFLALWQQVPTPATAAKVSEKTIARILKDHRIRRLDATTVLLTLRKTPLFVAPGTTEAACAHIRNLAARLHLVNQQIKEAHRALDGLCARLEAATENPSGQIREQHDVTILRSWPGIGRIVLATLLTEATEPLRRRDYHALRALAGTAPVTRRSGKQCFVIRRLACNKRLQNAVHHWSRVAIQHDTAARRRYDALRRRGHGHARALRTVGDRLLYALCTTLKRQTLYNPDCQAAQMTASL

SEQ ID NO: 330972 - protein, 430 aa, unidentified
MSSTDSTNQKPVAAFIGIDWADQKHAIVLRAAPNAARVEHRSIGAEPDALAEWVLEVRERFASAGRILVCLEQSRGALIHFLMGYECFELYPINPKQLASYREALRPSGAKDDPIDAELLCRFLSLHYPQLRPWHPDDVLTRKLALLCEKRRQAVDARTALSNQLKSELKQYYPLALAVLDNDLTTAFAADFLLQWPHFESLKKTAPHKLRKFFYGHQSRSEQKLQARLERIQAAQPLTRDAAIIEASTLTVQMLAQQLKALVPYIARYEKEIAQLFDVHPDSALFNNLPGAGPTLGPRLLAAFGTDRERFQSPLDAVTFFGVAPVTEESGKSKWIHFRWACPKFLRQSFHEFAGQSIRFCDWAAVYYQQQRARGKGHHAAVRALAYKWIRILFRCWKTHQPYDPQLYLTALLQRGSPYSSPVKNSSPKT

SEQ ID NO: 330973 - protein, 367 aa, unidentified
MFNERTTIGLDVHARSVRAAALDTSTGEVIEARLPPGSDAVARWVAGIAADHGPVAAAYEAGPTGFGLARQLTAVGVPVTVAAPSKLIRPAGDKVKTDARDALLLARLLRMDELVPVRVPSVAEEAARDLVRARDDARTDLLSARHRLSKLLLRRGIVYDGSVTWNRPHDAWLRRVRNDGLGEAGHGTLAAFDAAFDAVTMTLARRDRLDMQIAGLAADSEFTAVTNRLGCLRGISTLTGFALAVEIGDWDRFTGRTVASYLGLVPSEHSSGGSRSLGPITKTGNTHARRLLIEAAWHHKARYVAGKTMTDRWAKSTPGAAARGDAGNRRLHHRWQVLTAHKKKHTVANTAIARELAGWCWSLAVMD

SEQ ID NO: 330974 - protein, 373 aa, unidentified
MYRTFGNAEGSASVDGVVLGVDTHLDLHVAVAVDQLGRRLGELTLPSTTRGYERLLRWAEGFGPMGCAGIEGTSSYGAGLSRHLRAAGVSVVEIERPKRRHLRRKGKSDPIDAEAAARAVLAGEALGEPKSGEGQVEMIRVLRSVRQSAVKARSQAANQLKALLVTAPEVLRERLREFSTKELVASCARFRPGDDPDNIETATRFALRSVARRHEILSEEITELDAQLKRLVAEVGPGLISLPAIGTHHAGTLLVVAGDNPQRLRSEASFASLCGVSPVEASSGKVVRRRLNRGGNRDANRALHMICVVRMGSDKRTREYVARRTAEGKSKWEIMRCLKRYIAREVYRILLSSTATKPPPIQAVSRVLEADIA

SEQ ID NO: 330975 - protein, 369 aa, unidentified
MKDTTFVGMDVHKDSIYVAVARAGMSPTDLGSIRNEPEAVARLVRKIGDVADLRICYEAGPCGYGLYRQMVTMGARCEVVAPSLVPERAGDRVKTDRRDARKLAGLLRAGELTAVWVPGEEHEALRDLMRAREDAADDLLRKRNQLSKYLLRLGMVPGAGVRAWGSAHKRWLESLKMPHPAQQIVYAEYLKAIDEVESRIERLDKEIEAFAEISEQAPVIRALQSLKGVRVHTAATVVAEMGDLRRFESAGQAMDYVGLVPSEHSSGQSRYRGGITKTGNSHARKVIVEAAWHYRHIPHLSEELKRRQKALPESINQISWKAQSRLNRKFRKLLARGKPVQVAVVAVARELVGFMWAIARQARSTQRTA

SEQ ID NO: 330976 - protein, 413 aa, unidentified
MDWIACVGVDWGDREHAYEVRGRDGASYRGRTDSSPEGLHEWVRRLRESFPTGTIVVGVEHGRWSLLYLLAAYEFLVLVPINPRASKAYRDSLRLSGASSDPADAALICEFVMKHLSELRAWQPDDTMTRKMRLLVEHRRTLVDQRTALTHTLADTLKQYFPQALQWFGGEKTPLLRAVLERWSTLDLLRTASVEELAAVMSSKRCRKVAARAKATMEKVHAAVALTTDKAIIEGHAIYAKALAAIIEPLDLQIAKHDQVIAAEWAAHPQYELFDSLPGAGKVMAPRLAVAFGLDKTRYESADEMQRYSGIAPIIEQSGRHWWTHARWGYPKFLHQTFHEFAQASIPHSAWAKAVYDEHRANGCGHHSAIRALAFRWIRILFRLWQDDELYDEQQHIDSLRKNQSPVLARLAG

SEQ ID NO: 330977 - protein, 418 aa, unidentified
MKVIKTKKQRIVNGKALVVTVDISKDRHFGYWRCPDGTDVKPFSFPNSGTGFFEFWERISRAREIHRLDEIVFGYESTGPYGEALVHFMKARGVRLVQVNPMHTKRVKELQGNSPNKTDQKDPKIIADIIELGRTLTVVIPEGPAAELRRLTQARERSTERHAALVNQLQALLAIIFPEFLQVVKNVKTVTAHYLLKHCPTPQGLVAYGLDNLAKTMWNVSRGRFREDRAKALYEAAEASIGVVEGQASILLETQAILAAMEASEKFTEGLEKEMSRQLKQIPYSDSLLSIKGIGEVTAAGLIGEVGDFRKYSTLGEIMKLAGLDLFEVSSGKHQGTRRISKRGRPLMRKLLYFAAMNMVRQGCIMERQYQRYLDRGMLKTKALIAVARKILRIIFAIVRDNSVFDCSRTAFQFKEAA

SEQ ID NO: 330978 - protein, 423 aa, unidentified
MGQWGARGVVSLTDRTSIDGNTKVDKAQTAWAGIDVGKTHHWVCVLDAEGNKLSSMKVANDQTEITATIATVGALADRIVWAVDIIGAPSAMLLALLIQAGQSVRYASGRVVAAMSAAYSGEGKTDAKDAYVIAETARIRRDLTIIDPGTDLVRNLELLTGHRADLIADRVRMINRLRDVMTSVFPSLEREFDYSSCKGALVLLTGYASPERLRRVGETRLAGWLQRRRVRNYAAVAARAIAAARAQSVTLPGQEIAAAMIAELATNTLALDQRLTELDAQIAATLDEHPQAEIIQSMPGFGPILGATLLVAAGDLAAFPQRRSPRPAAGLVPVPNDSGRRTGNLHKPRRYSRPLRHVFYLSAQTSMMRDGPNRDYYLKKRDRGRTHTQAVIALARRRIDVLWALLRDERIYTAIPPTLAQAA

SEQ ID NO: 330979 - protein, 354 aa, unidentified
MLGEMVDHVVGIDPDRDWITAAVLEAGTAAVVATGRFPANDVGYRDVVAWADEYSTDTERAWAIEGTASYGRGLTAALGRCGEWVIEFDRAKEKPAKDGSKTDELDAIRAGRETLGRAKLASPRAHQGLREALRVHAVARDTAVRARTAAINELKAFVVTADDTLRSELRGLRTPALIKRCAGFRHSTNRSVDQACTRAAMRAVAQRITHLNEEITIHEQALTSLVDQAAPQLVAEVGIGPITAAAFYIAWSHPGRCRNEAAYARLGGVSPIPVTSGQTQDRHRLNRRGDLQLNKALHQVAVTRLRYHPPTQDYKTRRSAEGKTDREIRRCLKRYIARRVWRLLEHQTPPETTT

SEQ ID NO: 330980 - protein, 342 aa, unidentified
MDYYAGIDVSLECSSVCVSDGSGQIVREAKIASEPEALIDWFGSLGLALTRIGLEAGPLSQWLYAAMKQAGLAVELLETRHVAAAFAAMPVKSDRNDARNIAQLMRLGWFRPVHCKSLAAQEVRAMLTARRLVQSKLLDIENSLRGILRGFGLKIGKATRASFGERVEQLVKDHPTLQTIAEALLRVRSVLLAEFKGFEKRVRQTSRLHAQARLLMSTPAVGPIISLTFACAIDDPSRFTSSKQAGPHFGLTPKKYQSGETDYSGRISKVGDASVREALYEAANLVLVKPIKGCTQLKSWAMRIARRAGMNKAKVALARKLAVIMLRMLKDNTPFNPVAGAA

SEQ ID NO: 330981 - protein, 424 aa, unidentified
MKNSAANKMKQVPDGFLIVGIDPHKKKHAAVAITQDLTVRARFKFDNTRDGLEAMAGRARTEMVKCGCRGVMFAIETGGHYWRNIAYFLDEQGIPFRFINQYTLKRRREGKDLNRRKNDYRDSEVAAQLLCTGEFVESTLPQGVYAELRTAHNAYRRLVKERTRITNLIKALLDSLFPEFTHVFKDPCGMTAIRVLSMCAVPSEISEMTEEEFVAAIEARHEGRRLMRRKLRALHEAAKGSIGIAAGARSLSSELSFLCEKAALIRRHISAIDKDLAKLVHQTEEGKYLLSVRGLNYIAVAGLLAELGSFKSYRSAKQMIKMAGSNPTESESGGRRSAHTPMSKQGRPVLRYCAWTCVIPMLRLNPDFKAWAKQRRERPVHANPLNGRETVGAAMNRLFRLSFAMVKNRTYYQSSNTPLTPSVV

SEQ ID NO: 330982 - protein, 387 aa, unidentified
MYYIGIDISKFKHDCAVIDDSGEIVTPSWSFTNDAEGFSQLKLLLNSLDTETRIGLESTGHYGMNLKLFLESNNFSFMEFNPLLINRFVKSKSLRKTKSDSIDCMMIAHYLMTVEYKPYPTLLYHTEKLKSLTRFRDSLIRLRSRQLVELTNILDKVFPEFKPFFGGKFSVTSLYILSNYSSPEKISNMNSKSYETLRKLSRGRFSTVDFAKLKQLAKNTVGNTEDYLLQEMQIVLELYKQLDSKIDETEASIKECVSAMNPPMLTVPGIGVESTAIILAEFGDFSKFKNASQMLSFAGLEPGYFQSGTSETTGKMVKHGSSYLRYALMNCAQTVVTYEPTFAMFYAKKRAEGKPHRVALSHVVKKLLRVIYTLHTKNIVYDADFVR

SEQ ID NO: 330983 - protein, 366 aa, unidentified
MKSILDCCCGLDVHKDKIEACILKTAEQTAIRSTFGSKSSELDQLCKWLNENECYHVAMESTGVYWQPIYDRIEEKCPGILSLMVVNAHHMHNVPGRKTDVKDAEWIAELMQHGLLTNSFIPRKEIRTMREISRARRKYVQERATHLNRLEKYLQSHGFKLSSVISNILGASGEKILRKLAVQGSLSLSEVASCCNQRLRKSPEEIYEAITGKLEQLDCLFLQTELDWLDNLNSHIDRLSVLLKEITKDFREKVSILDTIPGIDEDSAIEVLAEISDSPKDSFATAANLSNWAGLAPRNDESAGDIKSRKILHGNPYVKSILVQCAWAAVKARNSRFSIWFWKHSGRLGRKKAIIAVARKLLVTSV

SEQ ID NO: 330984 - protein, 426 aa, unidentified
MELEEKEQEKPIRAWIGIDWADEKHDVSVYDVASGKQEGLVIRQTPEALQEWLGQLRSRYEGGYVAVVVEQGRGGLLNALMGCEFLVLYIINPKSLSNFREAFYGSGATSDPVDAELMRDMVRQNPNRFRAWRPDDVMTRSLRLLTEGRRNLVNQSTALTNQLTALLKGYYPQALAWVGTLDTAWACDFLQQWPTLQSLQSSSRRQIRRFYEKHPRSSLNLIEQMKQIQDARALTQDEAVLESSALMVQALVSQLRPLLASIAEFDRKIAMIFRKHPDRPIFESFPGAGAALAPRLTAAFGTDRDRFQAAKEMQQLAGIAPVTEKSGKKSFVHWRYACPKFMRQTFQEFADHSRRWCKWAKAHYELLRRRGKSHNAAVRALAYKWIRILFRCWKDRQPYQDQIYTKALLKHGSPLSPLLADSVENS

SEQ ID NO: 330985 - protein, 417 aa, unidentified
MNTTTLFVGIDVSKTTNVVRLMDGGGDTLSLFSVPNSGDGAARLQDKLRYTLLHTDYSKVTIGMESTSVYADHLAAYMRNDEFLRKWECKVYVINAKNIRRFKESYPELPKTDNIDTFIIADYLRFGRLPKSVSHDEKYLALRNLTRARFQAAQNLSREKTRFLETLFQKFSSLDSAKVFSDTFGVTALAAACDFLTIDEIIYKPIGELVDFVNRKGKGRFTDPEAVAAALQAAARSSYRVGKTVNDSLNQLLAIRLIGIRSIEEQIKSLDKAIESYMGAFQNVLISIPGIGPVYSAGLIAEIGDIKRFDGQASLAKYGGLAWSKHQSGGFEAANTKMIVSGNKYLKYYLLEAANKVRMHDAEFARYYRIKFREVPKHQHKRALALTARKLVRLVYSLLSTNRIYTPPSNREAPASL

SEQ ID NO: 330986 - protein, 349 aa, unidentified
MHARSVLGCALDGDTGEVFQRRLCPDHREIVGWLGELPGPVAVSYEAGPTGFGLARALAAAGITCEVAAPSKLIRPAGDRVKTDARDAAHLARVLHLGQVTAVTIPSASQEAARDLVRARDDCRGDLMTARHRVSKLLLRQGIVYSGGRAWTGDHERWLRAQRFDNPALQLSYEAAFDAMLACVDRRRRLDSAITAMAADSEFTPVVHRLGCIRGVATLTAFGLAVEIGDWHRLTGRTIGAYVGLVPSEYSSGDTRTQGGVTKTGNGHVRRLLVEAAWHHRTRYRPGTELRRRWDLASPAARARGQAANRRLHNRWTGFDARQKRPVIANVAIARELAGWCWSLAVMPD

SEQ ID NO: 330987 - protein, 444 aa, unidentified
MSTNYNEALLIVRLLKQENCLANTILKEKGTAMKEQIYVGIDLAKGDSKVAVIDDSGEAICKPFNITNSKEGIRKLLSKLSSYKTGQIVCGMEVSSNYWENMCSYLKEKDLTPILLNPYQVKKYRQAMGFKIKTDPIDAIAIAGLILGRKYESLYISDDSMVELRELVRIKYSFQRRVKDLKKSVLSLLYLVFPEYNKIISYPFSKVSIEILSKYPTSRHMAKASVSKLVKIFRRYQGCNFNLDKAKDLISAAKDSFYSGKAFKSRGMTITMQLDEISSLSLKVKDIEDEIRSILDPGDPSGGSSAYNILNSIKGVGIGTIATFIGYVGDVTRFSSSDKLISFIGFYPNIFESGKYRKKNPTIQKAGPRELRYMLYLASVACIKHNSQLRKYYHDKVSAGMPAKKALIKVAVKLARMMYSMLKHKTEYESSRVSMQSLPLKKAA

SEQ ID NO: 330988 - protein, 361 aa, unidentified
MAGTMTWVGLDVHARSTHAAAIDTVTGELARARFGPGFDGPVGWLAELPGPVRACYEAGPTGFGLYRSATAAGIDMQVIAPGKTPRGPSDRVKTDRKDAELLARLLLAGSLTGVVVPPPAVEGARDLTRAHDAARRDLMTARHRVSKMLLRHGRVYPKPSTWTQEHRRWLGRQQFEQPASELTFADLVAAVDGLSARKMAIAGRLSQLALDEQWWPTVARLRCFRGVDTLTAFSLHLELGGDWERFGRAPQLAAWLGLTPSLNQSGESSRQGAITKTGSTLARRLLVESAWHYSREPRIGATLRNRQQGQPDHVLAIANRAQQRLHRVHHRMRARGKPANVTVVACARELACFQWAAATAD

SEQ ID NO: 330989 - protein, 400 aa, unidentified
MLSIGIDVSKGKSTVCGMKPGGEIVYTPFEVQHTREGMSELVSLLRSSGEEVRAVLESTGSYHCPVVAALLENGIFVSVVNSLRMKRFCSQSIRKVKTDRIDAMQIALYGLAYWQELQPTKLPEDTYRELQLLARQYYQMTSLLIKAKVDFNAICDQVLPGMQELMSDHAGRHKLSDFVLRYRHTTHILEMGETRFRKDYCKWAEKKGYRNCERMAALIFATAQNGIPVLPNAPSTQIVITEAIRVLHTVEASRDAILTQMQALAKTLPEYSLVREMPCIGDTLAPRLIAEIGDVRRFHSKRALIAYAGIDAPPYQSGKFCANNRHISKRGNRYLRKTGYEVMQSYVMHKPANDPIFTFIEKKRSEGKCGKLAMVAGLNKFLRIYYGKVTELYRSLPAIE

SEQ ID NO: 330990 - protein, 359 aa, unidentified
MSSVPVFVGLDYHQDSVQVCVLDRKGNQLYNRSVENNARAIQQVATRYGIPRRIALEACCGAADLAEELVTRQGLPVQLAHPGYVNRMKRSPDKTDVSDAQLLADLVRVNYLPSVWLAPRAIRELRRLVRHRARLVCRRKDVKLRIRGLLRENRQKCLHARAWTKAWYSWLAKRAQLSDSDRWVLEDHLQELVSLSGRIAAVEAKIQLHVQDDPVVAKLLTLSGVGLVTAVTLRAEIGRFDRFDTGKQLARFCGVTPRNASSGARQADAGLIKAGNPEVRMVLIELAQRLTWRSDGRWGKFAHDMLVRGKPKNVVIAAVANRWVRWLHHELRRNQGDQSTAALPRRQRTAPHVRPVASI

SEQ ID NO: 330991 - protein, 338 aa, unidentified
MKELYYIGLDVHKKSISYMIKQADGGIVGQGQVEARRAALSAWAGTIRKPWVGALEATLFTGWIYDHLRPFAEELQVAHPAMLQAIACGKKKNDRLDAEKICDLLRCNLLPRCYMAPAEMRELRRVLRYRQLLLSEAVRMKNKISGLLLEVGEPYVKQKLHRRGYFQELLGNLRDTPASVLEMLAISRGSLELFDGLQRKLLRGLRRHPLLAARVERLRTIPGVGEVLALSWALETGSPERFSSLRRAISYCGLCSAQRESAGKNRRGPISKQRNKHLQHVLIEAAKLAPRWNPPLRRLHERELQRGSRNRASLAVARKLVAYLLAVDKSGRAFVPQA

SEQ ID NO: 330992 - protein, 415 aa, unidentified
MVERCAGLDVHRDNVVATTRVPGQGRRRFEQQTETFKTTLPGLAELAAWLAAAGVTLVGMEATGVYWKTVFQALEDRFECWLLNAHHLRNVPGRKTDVKDSEWICQLVQHGLVRPSFVPPPEIRRLRDLTRLRTAQNNERTRTIQRLEKVLQDAGIKISSVASTSYSKSARAMLEALLSGVTDPEQLADLAKARMRNKIPQLREALQSRFMIERHGVMVAQLLAHIDTLDTELQHLTERIELALCPHAHIIELLSTIPGVQAQAAQVMIAECGLDMSVFPTVGHFASWAGACPGHHQSASHRKSGRTRPGPSWLTSQLTECARAAVRTKETYLASHFAQLRGRRGEQKAIGAIRHDLLVAYYHIVRDQVPYRDLGPNWQRKRYSVEHRAKRLQRQLEALGYTVTLEQTEATEQAA

SEQ ID NO: 330993 - protein, 461 aa, unidentified
MFKNVTLPGTDRADAADPGTVRVQVGIDAAVVANHHVCVREYRADGRVAPTRFHVPPTLAGLSQLRDRLAPYPGVVAVAEPTSMTWLGLSIALGQAGLDLSLLGARHAARLRGAITGKDKSDVIDADVLAMASDVFTLTPLRVPSPDQLALRRAVTRRGKLVVDGNRAKRRLISLARWAFPDVWSAFAGSMPTATAVLTRWPNLNCLAAARRSSLTAVVAAHTRGVPDVPARAERIRSAAAGWATFWDGHLDLDALAWEVTEHLDDMRASEQRIDRATGQATRYWALLYGDDPLLLSVPGMGPMTAPTVRAFLGDAAAFSTAKAAASYVGMTPSTWSSGTISQPSRAITKEGPPVLRLAFYQAANGARRTDPQLAAYYQHLMLERGHCHTQATVAVARKLIERTWTVLSRGEPYQLRALDGTPVTAVAGRALARTVYAVPDDVRARARARSAATHRAKLTK

SEQ ID NO: 330994 - protein, 344 aa, unidentified
MDYFAGLDVSVKETSICIVDDTGKIVREARVASEPEALLQVLTNTIYRFKRIGLEAGPLSQWLYSVLAEAGLPVICVETRHMQAVLKAQINKTDRNDARGIAQMMRAGLYRPVHVKTIRSQKLRMLLTHRKLLQSKAIAIENDLRGTLRNFGLKVGMVGKVKFEARIKELVENLPDLAVLVEPMLIVRRTLREQIVILHRRLLAIVRDDEVCRRLMTTPGVGPVVALTYRATVDVPARFRKSKAVGAVFGLTCAKYQSGEVDRNGRISRCGDEMMRVMLYEAAQSMLRSKKWSWLKAWAMQIARRRGMKKAIVALARRLAVIMHRIWVDGTEFRWTREQATAAA

SEQ ID NO: 330995 - protein, 450 aa, unidentified
MGRPRVIDDEEHERVYEKVAAVEVAKDSGMVCTRMPHPSRPGARQGTVWTVQARMGAIRKLGRQLARDGIEVVTLESTSDYWRIWFFVLEACGLGVQLVNSFQAKNLPGRPKTDRLDAMWLARLTEMGLLRASFVPPAAIRALRGYTRARTRLTQERTRCWQRLEKLLEGALIKISSVASKLTTLSAQDMVRALIAGERDPQVLAALARGKMKAKHDDLAGALDGMFGDHHGELAQLLLDQIAFLDGKIAELTARVEQQATAMPAAWGVNADGTTGPHAGTAPGDPVLPAVQRLAQVPGISEDLARSIIAETGLDMSRFPDAAHLVSWAGLCPRARQSGTRARTGKKGRGNGYLRGYLGQAAIGAAATATFLGERYHRIARRRGKAKAQVAVARSILVIIWHLLASPEARFTELGYGYYQARTDKDRKIKNHIRQIEALLGHPVTIASAA

SEQ ID NO: 330996 - protein, 424 aa, unidentified
MKVTYQTCCGVDVHKSFLVATIVKTTGGIEPSYQKKRFSTFNNSILEFKQWLLDNDCHDVCMESTGKYWIPVFNLLEDEINVVIANPKWVKAVKGNKDDTKDSKWIGDLFRLGLVKGSYIPCKKVRILREYTRYRYKLVSCRSSEKNRYQNALTVCNVALDSVVSDIFGKSSTSIIDYLLDQSGTSINHEEIASKLLRNLKSKEDAVIKSVEGYQMTDAQKYRMRLVRAHMDYITAEINDVDKMIENMISSNPDFENAVQFLCTIPGVKRDSAITIISEIGTDMFQFSSSKRLCCWAGLTPGSNESAGKKKSVRITRAGVYLKPALVQCAHAAVKSDKSPYYKKKYESLVKRRGKKRAIIAIARMILTAIYQMLSTGEQWNPSDLYKIDMPVALVEKQKAKAIKQAKKLLQREGLLPPDEPLAS

SEQ ID NO: 330997 - protein, 370 aa, unidentified
MTPDHAGNVVGVDPHKRTLTATVADARGGILASAHFRVSGEGHRELEVWARQFGQIARWGIEGSASWGRHTAVFLIGRGHDVRDVCANRTPRSDRARQRGKSDTLDSERIAREVLAHPLLPKAFKRAGPEQGPDEQHQLLVLWHNRRRSILTTRQHLVNGAESLLCELPLELSEQLPDTKAVKPRLAALAGRNRRRRYDAPTKLRLELLDGYRTQIKALDLEEKQVVAQLDALVDQSGSTLGELSGLSTRSVAELLVEVGDARRFTEGGFARFNGTAPLPASTAEGPGEPVRHRYNPGGNRRVNAILHRMAVTQLRYEPRAQRIYANARAGGHTKKEARRVLKRHLSNVIYRRMIRDLHTQLPDQSLLAA

SEQ ID NO: 330998 - protein, 312 aa, unidentified
MLTPSVYLGADVSKLTIDLGCPHFAVPTSITNDPAGHRTLMKILRRSPSPIHVVCEATGPYHKALVAALHQAGVGVSVVNPRLPRDFARSRGQLAKTDRIDALLLADYGRTMQPAPTPQPEAQMTLLDDLVTRRAQLVEDRAREKNRLQQTTNAEALASLRLHLRHLDGQIEKLLARIAEVVESTPALRAKVARLVAVQGVGALTASALLAALPELGTLSKNEVTALAGLAPFNRDSGAFRGTRSIRGGRSEVRHALYMAAFCASRRNPILKAVYQRLRANGKAHKVALTAVMRKLLIHLNSLLKRLPSSPV

SEQ ID NO: 330999 - protein, 367 aa, unidentified
MTDGITYVGMDVHKKGTKVAMLVPGQQEPVEFSCATEPIRLLRGLRKHATTSMVCCYEAGPCGYWLKREMDRQGIRCVVVAPSLIPRKPGERIKTDRRDALKLARLLRAGDLTEVHPPSPDEEAARDLCRAREDARDDLKRSRHRLQKYLLRRGMHWSKSSWTLAHRAWLRGLRLPGETEQAVLDDYLCTVEWHEERLRGLEQKLAELSQQTPYAEPVSLLRCFRGIDTISAMTLVTELHGFMRFQSPRELMAYLGMVPSEASSGERRRQGAITKTGNAHVRRILVEAAWQYRHRPYVGRGLRARRAGQPGQVIALADRAQQRLHRRYWRLVSRGKEKNKAVVAVGRELVGFLWAALYPQSLEAQKA

SEQ ID NO: 331000 - protein, 347 aa, unidentified
MRCYVGLDVSQEVCAVCILNEEGTPVFEGSCPTDPSAILKTIADQAGMAEKIVHESGPLSIWLTRELNKRGAPVACIDARAAHKALSARMNKSDRSDAEALAHLARTGWYREVHVKSAASDRLRLLLSARARLVHIRMDIEAQARGILKTFGLRLGPVRAGWSRRDFRDQLSEVVSGDPILETVFASLIAVHETVCHEATDLDTELRQIAKESPLARRLTSVPGVGPIVALSFIATIDDAGRFRRAVDVGAYLGLTPRRYQSGETDWSGRISKRGDGAMRKLLYEAANVLIQRVPRFSPLKAWATRLAARRGLKKATVAAARKLAVIMTRIWRDGTVFAWTKEELPA

SEQ ID NO: 331001 - protein, 410 aa, unidentified
MEVLYPHCAGLDVHKDMVVACLRHTVDGTIKREVRTFKTTTAALLDLSEWLASEGCTDIVMEATGVYWKPVWHILGDGDFALTLANAAHVKAVPGRKTDVNDATWLADLLAHGLVRGSFVPDAQTQEMRGLLRTRKQLVRERTSHVQRLQKTLEDANIKLDSVISDVVGLSGRAMIAALIAGETDPDALASLAHHRIRAPAAQLREALRGRVTKHHRFLFRLHLQQIDTLDAAIVEIDQEVDANVEPFRAAITILTTIPGISELSARTIIAEIGTDMSRFATDGDLVSWAGLCPRNDESAGKRRSNRMRKGAPWLKTTLIQCAWAAARTKGSYLQAQFHRLRARRGAKKAIGAVAASILTAAYHMLTDGTLYQDLGADHFDRRAKAAQTKRLVNRLQSLGYHVQITPAAA

SEQ ID NO: 331002 - protein, 396 aa, unidentified
MISVGIDVSKGKSTVCIMKPCGEILESPFDIGHTADELDSLISLIKSFDEETRVVMEDTGHYHLPVATYLSSHNIFVCCVNALRMKKFCSQSIRRAKTDKIDSIKIASFGITYWNELVKAYPSNVIYDELKFLARQYYQVTGMLVKSKVNFSNLLDQVMPKINDVLSNQGENHKLTEFVSRYIHFQNILDMGEMKFTSDYCKWAKKKGYRLNERKATEILALAQNGIPTLPNSQSVKIAVSEAVKLIHSIEESRNTILAQMQDLCNTLPEYSVVKEMDCIGDTLAPRIIAEIGDVRRFKNKHSLIAYAGIDAPPYQSGAFHASERHISKRGNSYLRKTGYEIMQSLIKHKPADNAVYDFIQKKRSEGKCGKEAMIAGLNKFLRVYYGKVMEFYSEH

SEQ ID NO: 331003 - protein, 422 aa, unidentified
MSYCPVAGIDVSKRFSDMCILSPDNKIFAQEKIYHDETSINRANALLQKAERLFFSKPVIVMESTSHYHLILFQFFSEHGYDVIVVNPLQSNSMKDFSIRKRKTDRVDAFKLAMMYRTKTLRPSQIPQTATRALRQLCRHRAELLNDVSSYKSRLTALLDQTFPGYDKVFSDVGGVTSCAVLVRFPTPTILLVEEESELVEVIAAASKSGYSFAKKKARLLISAAQKAQTLGIHSCADETLIVCTIQMLRTLSESVLQIETAIDNLLAQIKGMRNNVSLLQSIPGIGSHSAALLLGEIGDISLFKKPKQLAAYFGLDPTERQSGSFRGTKNKLSKRGSSYARAALHMGIVNSICKRGKDSAANPVLLSYYEKKCKNKPAKVAQAASMHKLVFIIFAVLRDQKPFELKTPEQHAVEQGFVKAA

SEQ ID NO: 331004 - protein, 346 aa, unidentified
MGTDTLVAVDLAKSVFQIAVSDRPGRVTRRERLQRDQLLEFFAQLPPSVVIMEACGSAHYWARRIEELGHVVVLLPPQYVRPYVLRNKTDRTDTDAMLEAYRNKQIRPVPIKSVTQQVLGTLHRLRSGWLGERTARINALRGLLRELGFFIPVGRRQVLPHAFEIIQGADSGLPDALRPSLGALCEEIARLSERIEETEEQLKALAKQIAAVSRLYSVPGIGLLTATALYAFVGDISRFPSGRHLASYIGLTPREYSSGLRRRLGRISKRGDSYLRMLLIHGARAILWHAKRMKEPDRLRAWALRLEKTAGHNKAAVALANKLARIAWAVWKNDHDFVPIPETQAA

SEQ ID NO: 331005 - protein, 342 aa, unidentified
MQVTTIGLDIAKNVFQVHGIDANETVVVRKRLRRSQVLAFFKALPPCLIGMEACATAHYWARELTKLGHRVRLMPAKDVKAYVKRNKNDAADAEAICEAVRRPTMRFVQVKSAEQQGQLMQHRTRDLLMRQRTQSINALRAHLAELGIVAAQGDKGVKELLSIVADEKDARLPIDARASVIVLAAQLQAVQTLIGSIEKRIKTQHRSNEASKRLETIPGIGVIGASAIAATVADPTVFRSGRNFAAWIGLVPRQDSTGGKQKLGPISKQGDRYLRRILVVGAHSVLRRAKQNPEKYLWLTQLLARRPFKVVAVALANKMARMAWALLAHGGTYRAPELADAA

SEQ ID NO: 331006 - protein, 349 aa, unidentified
MRNCSKSQAEVTVGLDLGDKHCNLHVLDAAGDTIEESRVKTTTEALRQRFGPMPPSLIALEAGTHCHWISRLLLDCGHEVLVANPRQLCVIYQNHKKSDKADAEYLARLARSDPKLLQPIRLREPGARLDLAVVRARDSLVGARTKLINHLRGVSKSFGARIPRHSSATFHRHAPESMPPELRSILSGVLESLEKITTEIQKYDKVIEKQLSKKYPQTEILRQVKGIGAITALAFILIIDDPVRFKQSRTVGAYLGLTPKKSDSGESEPQLRISKRGDALLRRLLVGAALAQRGGKNAKKRAVVAVARKLATLLHRLWLTGEVYEPLRQADRKRRVAARIGPPAQGAGR

SEQ ID NO: 331007 - protein, 315 aa, unidentified
MIVGIDVSKQSFDANWQKSKQAHHQHFAYTDEGITELLACTPEDAHYVMEATGIYHTRLALRLHQAGRKVSVLNPLVIKRYAQMQLSRVKSDKADAALISQYGRENALTEWEPSGAEILELQQAHSWLDDLIRERTRLTNRCEAHQHHPHPSAFVTQQMQSQQHQLDKQIRHCEQHLEKLAKKFFPELYQRLQTIPSIGPKTAIELIIITNGFSRFDEVKALCAYVGVSPTTFRSGTTVRGKGGIAKLGQGRMRQLLYLCSWTAKRCNPGCRRLYERLREQGKPPKVINIAIAHKLLRQCFAVATKQCAYSEKFV

SEQ ID NO: 331008 - protein, 391 aa, unidentified
MPVSNDPRCALTPLAPDSTLVAVIEMSQLGWLVAAIVPGIERQPLKKLAPDEAALLRVLERWRDEATRAGHTVRCITVAFEAGRDGFWLARWLRAQGVEAHVIHPASVAVSREHRRAKTDRLDTALLKRAFLGWLRGERGHCSMAAIPTLEEEDAKRPTRERENLVAERTRVVNRMRSCLARLGIRGFKPTLRGAPKRLEGLRTPEDTALPPNTLAELRRDMARLRFLADQIRELEHARATRVDHAPAQGPNAMVLLLARVVGVGIETADMLVHEVLSRRMRDRRAIARYAGLTGAPDESGTKRREKGLAKAGNARVRRGMIQLAWRFLRFQEASALAQWYRARTADSRSGTRKTLIVALARKLLIALWRLVSTGETPAGLILRPAQATAA

SEQ ID NO: 331009 - protein, 420 aa, unidentified
MVYLERGYNLKELPWSKIVSNSFLFKEACMILVGVDVAKDKHDCYIMTSEGEVLFKSFTIANNMEGFNQLYEKILSVIDNFDNVKIGLEATGHYSYNILGYLLDKGLTPYVINPLHSNLYRKSLSLRKTKTDKVDSRIIASMLMSDVSLKPYSNTLYHNEELKSLTRYRFTKVQERAKLKISISRLVTILFPELEKLVPTLQMNSIYALLYEFPSAHAISKAHLTRLTNLLNTTSKGHYTKDKAVLIREAAKNSIGSNMPAKSLELKHTIKLIKELTSEINEIEEEIKIIMNKINSPILTIPGIGLSTGAQILAEIGDFKNFSSPDKLLAFAGLSPSTYQSGNMYSSNAKMEKRGSKYLRFALFNAAIYVSYWEPTFSQYLKKKRVEGKHYYVAISHVVKKLVRLIFHLEKTNERYSTVV

SEQ ID NO: 331010 - protein, 350 aa, unidentified
MLIIGCDFHTRYQQIAMLDEATGELVERRLEHETGQARAFYAGLAPPVRVGIEATGHTQWFERLLTELGHELWFGHAAQIRATAVRQQKTDQRDAAHILDLLLTNRFPRIWVPSPAERDLRQLLWHRHKLVCLRTLVTNQLHAVAMSQGLCRKKKLFTAKGRAELTSLPLGPWASRRRAELVHFLDQLDPPIAELDRAVLKEAQRRDDAVRLMTHPGVGPVNALAFVLTIGPVSRFRRSKQVASYLGLNPSEHSSGGKQRLGAISKQGNTMMRWLLVEAAQTAVRFDPQLQQDFQRLKFRRGNAVAKVAIARKLAVRMYWMLRSGADYARLVRMQGSPGATLVNASSPSG

SEQ ID NO: 331011 - protein, 291 aa, unidentified
MKSKEIVGIDVSKKVLDIYILSEKHHFKISNDPGGFADLIESCAVKLGERFENVFFCFEDTGRYSKLLSVFLQESQFQFAALNALDIKRSMGLTRGKTDKKDARMIALYAWRKRDELNVTNLSGPIIDQLKQLLTLREKLIKHRTAFKNAGKDLHDCYIDGEFSFIKERHTSMLLHLNSEIDLVEKELLRIINLHKELDDTFKLLLSIRGIGKVLAVYLITLTDNFTKFLSPRKFACYAGIAPFEYSSGSSVKGRTKVHSCANKQIKSLLNMAAMSSIQLNGEYKAYYLRR

SEQ ID NO: 331012 - protein, 316 aa, unidentified
MKIIGIDISKQWFDCFCFSKGGRRFANTPEGWSCFAKWAGKKVWVVMEASGPYYLGLASWLHERGTSLSVVNPLVIRRYSQMKLARTKTDAKDAELIAGYGVEQQPTSWSPPSRVCLQMRQLMSLREGLVRQQGILRGQQEAFSQGPVAEELTQQILAEQAGQVERQVNRIDRRLKQLATMHYAELMEALQTIPGIGPKTAIMLLILTDGFTRFQSARQLASYVGICPRVWQSGSSIQGRGAICKLGAAHMRKLLYMCSWTAKLYNPACRSLYERMATKGKPERVIKVAVAHKLLRQAFAVGKKQEPFNEKLAMVA

SEQ ID NO: 331013 - protein, 466 aa, unidentified
MTPHKDFFLDPRPPAPTLPQSPVLSEALQVCHPHAAGVDIGEAEHWGAVPPGRDPQPVRRFGTFTADLDALADWLIDCGVTTVAMESTGGYWIPLFALLEARGVQVLLIDPRQAKRAPGRPTTDRLDCQWLQRLHAYGLRAGAFRPDDQVCVLRASLRHRQMLLTYAAHHMQHMHKALQQMNLKLTQVVSDLTGATGMAIMKALVAGERDPQRLAALRNAHCQHDEDDIAKALQGTWHAEHLFAFQHALSLYAFSHQQLALCDQQITRPLATCADKSAGQPLPPKARRSKKTNAPRFDARTPLYRMAGVDLTTIEGLEEHTALVILSEIGTDMHRWPSVKHFCRWLGLCPQHKISGGKVLSRRVRPGAHRVTVALRLAARSLHHSQSALGAFLRRMKVRLGTPKAITATAHKLARLVSSLLQHGSAYVQQGLDAYETQYRERKVTAMTKQAKALGYTLVPLAAQGS

SEQ ID NO: 331014 - protein, 326 aa, unidentified
MTASQASDNSFIGIDVGSASFDVAWHRGDCAHYANRPDGVAALLAKLKAGPAISRIVVEPTGGYEKPLVKTLRRAGLPVEIVHTSRFSAYRVMVGARAKSDSSDARLLAAYAAAPDDVRGRKPHHVEVPEDAIREELAELASRRDQLKHMIHGETCRLTTVRSAKLRQAITAHLDVLKAEDAQTHQTMLALVRARVDLKKAQGLLKTIKGLGDKSALACIALVPELGHVDNRAASALVGVAPFTRQSGTITAPARIHGGRAAVRNILYMAAVSASRHNPVLRPFYQRLLAQGKKVKVALIAVLRRLVVFANAVLRSGQPWKGATAS

SEQ ID NO: 331015 - protein, 426 aa, unidentified
MNCKLNDKIKQVEETSLVIGIDIGSTTHYARAFDWRKMELAKVFKFSNTLEGFEALSRWIGNIQTLRQKEKIIVGIEPTGHYWFALGQYLQGKGIKLVMVNPYAVKQSKELDDNNQTKNDAKDPSVIAKLVIDGRYSIPYVPTGAYADLRIMFSNRMRISREIGAVRNHLARWFAIHFPEYKEVFRDYASKGSLLLLKVAATPSSIVALGAEGINQIWRDAKVRAVGIKRATTLYETAKKSIGQSQGTAAAEVEMKLLLEDYEAKMRQYASIMAALEEAVRRIPGTERLLAIKGIGLVTVAGFLAETGDLGRFESPKQIQKLAGLSLKENSSGQHKGETTISRRGRHGLRNVLFNAVIPLLATNDEFRSLHEYYTTRAANPLKKKQSAIALCGKLIRIFYVVLVKGTVYDGQKMLADIHRNGTQVA

SEQ ID NO: 331016 - protein, 314 aa, unidentified
MYHYIGIDVSKKVLNIFDGKKDLVFDNKENLSSLKKYLKKKYPDLSSLVILFEATGIYSYHLKAFCADHLIKVCIINPQASHNFSKSLGERSKTDRTDARTIWAYHQLLKDKDIHIPKVDPVLVNLSSYLASYHLTLKQRLALANHLAEIKDKLLHRLLKKELKQLCQLEQELLIRMDVYIKQYPNLKEDYQRLLGISGIGQKTALSLLVLFHTYPDTNRNQITALIGLDPIQRQSGTSVHGRSRISKHGNQMMRKSLYMPTLCCIKHNHKIRVFYERLVSKHKPKKVAVIAAMRKLPLIAHAVYQNKTVYVPE

SEQ ID NO: 331017 - protein, 416 aa, unidentified
MNAVGIDVSSRKSTVAVLRPLGEVVCLPFDVTHDIVVLASLAEKLKAIDGETRVVMEHTGRYYEAVAKALHEAGFFVCAVNPLLIKEYGANSLRRVKTDKADAVKIARYALDNWADLRDFTPMDAIRYDLKTLNRQFQLASKQRTASANNLIALLEQSFPGIRKCFDSPVRSDGTQKWVDFAHSFWHVDCVRKQPFPAFCERYRKWCKLHAYFFKLRNAEKVYALAKSAVVLTPKSKVVKVLVQEAANQLISISRSVEVYRAEMDRLAAMLPEYPVVMAMYGVGKSYGPQLMAEIGDVRRFERKQALVAFAGIDPMPNQSGDKNVRSNKSSKRGSPYLRKTLFNVIRTYLQCAPQDEPVFQFLNRKRAEGKPFYVYMLAAANKFLRRYYAKLRDYFASLDTLQPVAPIPTILKATL

SEQ ID NO: 331018 - protein, 442 aa, unidentified
MSHQTQQPEPEFAAFVGIDWADRQHFWACQTPGSRPIEQGVLAQTPEAVEEWAMELHRRFGGAPVAVALEQSRGALIFLLAKYAHLVLYPVHPTSLANYRKTFRPSGAKGDPSDARLVLDMLVHHRDQLRHLSPDTVETRTLQLLVEQRRKLVNERTRFTNRLTSQLKLYFPQILEWFDAIHSPLVGDLLERWPTLQELQKAKPATLRRFLTQHNCRGQEKIDQRLEQIRQAVPATGDGALLTASRSAVCALVALLRALREAIAAHDEQIEQLAQCHPDFAIFDSLPGAGPVLVPRLIAALGTQRDRYRSAHEIQCYSGIAPVKESSGQQEWVHWRWACPKFLRQTFHEWAGHSVGFSEWARTYYEGQRNQNKTHHAAVRALAFKWIRILFRCWQNRTPYDEAIYLNALRRRQSPSIAPPQPIVELQLKKRGGFWKITAADA

SEQ ID NO: 331019 - protein, 346 aa, unidentified
MGMDIAVLGVDLGKNICSVVGLDGSGAVVMRRKVRRETLIALAEKLPACIVGMEACCGAHHLGRVFAAHGHDVRLMSPEYVRPYVKAQKNDDRDAEGIAEAATRPTMRFVELKSQDQLDMQSLHRSRDRLVGERTALINQLRAILLERGMVAPQGKRKLEQFLAVLMDEQGGEGLSPRMTLLVADARAQWAELDRRITAFDAEFVRWVKDNQEARRLMTIPGIGAIVASALVAAVGRAESFDRGRDLAAWLGLVPRQFTTGGKPKLLGISKRGNKYLRRQLIHGARAALPYVAERDTPLGRWAKGLMSRAHRNVAIVAFANKLARIAWAVLQRGERFAATGMSMTA

SEQ ID NO: 331020 - protein, 357 aa, unidentified
MVEGSWVGLDVHARSSVASVLEAASGEVRTLRVPTRCEETVAWLQTLSGPVRVAYEAGPTGYGLARACAAAGIACTVAAPSKIPCASGDRVKTDRRDAERLVRLLRLGELVAVRVPDPFEEAARDLVRARADARADLMRARHRLSKLLLRHGLVYEASAWSIAHDAWLRAQRFDSRALALAFEEGYGAVLQAKLRRDGLDRAIAELASEPPFAEVVARLVCLRGVSTLTALALTVELGDWRRFRPESLGPFLGLTPSERTSGERRRLGAISKTGNTHARWLLVEAAWHQRRPLRPSAQLERRRAGQPAAVRARADRSARRLHGRWQALERRGKPRTLVAVAVARELAGHCWALATMS

SEQ ID NO: 331021 - protein, 353 aa, unidentified
MTHVGIDLHSNNMVNVAINGNGKMVREAKLPTSRRSLKDFFSTFDGPVKAVVECTSNWYWLSDWCRANGVELTLAHAKMVKAISYAKVKTDTMDAKTLAELLRADLIPEAYQIKHDRRELRELTRGRLRLIQWRGTLQSTLWSQAIKYNVQISGTQWRYLDKLQRWLQPQLPPAAGLQAELMIGQIRQLQTHIHRIEEEIEKQVPFEAAAERLMKVPGLGKVGAWTILAEIGDIHRFPSAKQFVSYCRLVPGSKNSGGNNRHKSGNKDGNKYLRAAFGQAAVSAYTHYKVVKKFYRKIKRRSGRSVARAVVGKELAKGVWHMLTKDEEYKGFKGQPVRAASQTCWPQPISPNA

SEQ ID NO: 331022 - protein, 362 aa, unidentified
MPKMIWLGMDVHAASITVAQYEDQAPTATVQTIANDPAQVRRLVRRLPAGCDVRACYEAGSCGYGLHRQLTALGVHCDVIAPALIPRRPGERIKTDRRDAEKLGRFHRSGELTTITVPTPSQEAVRDLVRAREDVRRDRTAARQRLAKFLLRHGHRYPGSHWTKRHWEWVCGRPFEGAARTVFVHYCDHVLALNERLAHLEREIHTFADSPVYQPLVARLSCLRGLATLSALMLIAELYDLRRFRTPRELMAYLGLVPSEHSSGARERRGRITKTGNALARRLLIEAAWAYRHPARQTRRVHQALTTQPPEVHAISDRALHRLTARYRRLLSRGKTPHHAVTAIARELCGFVWAIALVPDLA

SEQ ID NO: 331023 - protein, 350 aa, unidentified
MAGYVGQQYVGIDLHRRRSVIVRMSDTGEVLEAVRIVNDADRLTDVITRAGENPEVVLESTYGWYWAVDALQAAGASVHLAHPLGVKAFEYRRHKDDFRDSIDLADLLRMGRLPESWIAPPETRELRELVRHRAKLVSLRSHCKAEVHAVLAKCGIAVPMSDLFGVGGTQLLDRLELPKPYAARIDSLRRVMDLLDFEIDIFANLVRGRLANDPGFTAVQTIPGIGPILGAVFVAEIGDVHRFASADKLGCWAGMTPKHHESDTHVRRGRITKQGSRLVRWAAVESVQRLPAHTVLGAFRDRIGDKRGHNIGVVAAARRQLEYVYYALRDHHVRGLHPRPAAAPAAAAAS

SEQ ID NO: 331024 - protein, 366 aa, unidentified
MKKISTVQVFGNEIFKEQKLTIGVDLGDRWSFYCVLDEAGKIILEQKVATTTEAMKETFERIPRSLVALETGTHSPWLSRLLRELGHQVLVAHAQKVQLITKSTRKDDRHDARTLARLARIDPELLGPVRHRSAKAQIHLTVIRARAELVRARTALVNAARGLVKSYGQRLPKCGTRQVSRELGAGLHAELREVLEPLLKEIESLNERIQEYDVRMEKIARESYPHVELLKQVKGVGTQIALTYVLTLDDPRRFAKSREIGCFLGLKPGRRDSGESQPQMRISKEGDRYLRTMLVQGAHYILGPFGEDSDLRRWGLKLAARGGKSAKKRAVVAVARKLAVLLHRLWVSGEVYEPLRNSQKAIRAAA

SEQ ID NO: 331025 - protein, 409 aa, unidentified
MQGYYVTGIDVHKAMLAVVVSEVKPGECEFQRRRFGTTRKQLRELAEWLLELGVQEVVMESTARYWRPVWVALEETGIKRHLAHAHSNGARRGRKSDFRDAERLVHRLVAGELVLSYVPEDEQQGWRLLTRTRYQLVCERGRVQSQIEGLLEDAQVKLSSVITDLLGASGRRILEALVQQQGQHDPAKLAELGHAKLRASREELTDALDGRWLERHRFLLRMHLGRIRELDSQIEQIQQQTATAMQSCQEAVARLIQVPGIRTEGALQMLAEIGPTAAAFPSPEQMASWVGVCPGQQESAGQSYSQRSAKGNWQMRRLLSQAAHAAAHAKGSFFESLYRRLVLKIGPQKAIWAVAHRLCRLIWKILHQGVQYREQGAPTASPKSIRRRQLKLTAEFRRLGFQVQFTPIN

SEQ ID NO: 331026 - protein, 450 aa, unidentified
MAQGSGLTRGDRNRNRKLEALREAVARDRAVLAVDLGEDKQVAVVMDHECRVLARKVVKAKAHQLAGLLDWGADRAVKAGFAGLTVACEPTGHRWKALMGLADGAGHGFCCVQSLAVHRAREGDDYTLGKTDHRDAYLIGKLAVRLECYLPERADEAWARLRHLGARRFALVADVTSCMQQAGDLLGCAWPAPLGAAARPLESVTWLAGMAVITGRCCGQPRRLRKLGYDRFLAAVRRELPRWGGKYVRHSIVRGLWDALADAGGVAAQRPGALERVHLLLGDWRELRTRLAGTEERMVAVLGKLGLAELVASIDGVSALSGAVILAEAGDLQRFTSGRAVVKHAGLNPSERTSATINGQTRISRRGRPGLRAAAWRAVWGALRHNPVLQAKHAHLTGRHANRLADGQARTACAAALLRWLWAVVITGQAWDARIAAGQIPARPVTTAAA

SEQ ID NO: 331027 - protein, 348 aa, unidentified
MDIIKQVIGIDVSKDTLAVSYGTLNVNQEQKITKPTTFDNNNKGFKELMAFAKKHRAKAKSPLYFVMEATGVYYENLAYFLTEKHQKVIVVLPNKTKNYSKTLEIKSKTDKLDAKMITQFGLERQMQLWKLPSPSIKAIKSLTREYNSIKRMAAQVKNQLHAKEYSHQPLKESLKRSKSTLAVFDKQLKEIEKQLKELVENDSDLNNRINKISKIEGVGFMTIVSIIAETNGFALIENTKQLASYAGLDVVYNESGLKKHKTSISKKGNRHLRQALYMPALSACRYNPRLKQTYIRLVTKKNTKKVAIIAVARKLLILIYTIFKKNVEYISNYYPAYAGNIRWVIVIN

SEQ ID NO: 331028 - protein, 347 aa, unidentified
MSITMIGLDTAKSVFQVHGVNEAGKVEIRRKLRRSDLIPFFEKQEACTVIMEACGAAHHWGRILSGLGHEVKLIAPEAVKPFVKKGKKNDAADAAALCTAASRPDMMFVPIKSTEQQSILALHSARSLLVKQQTMLANAMRGLATEFGLTVPKGIGKLEELLELVETDKAFPETARRVFTGLFEQCRALADSIGALDAEIVAHARQDETARRLQTIPGVGPITASLIVATVVDISQFKSARDFAAWLGLVPRQYSTGGKTRLGRITKAGNRAIRKSLVLGATSMVCRASKWNSALGAWTRKVLERRPVRLVTVALANKMARIAWALMTRKEVYRPKGRAATATEAAA

SEQ ID NO: 331029 - protein, 323 aa, unidentified
MQGKVTRSADNVTFIGIDVSKGRLDVALAPAGVTFAVTNDKKGHKTLLKKLIGLDVGVIVLEATGKYHRGVHLFLHEKGLPVCVVNPYRSRKFADALGELAKTDKIDAKVLARYGEFIGPGAQIPVSKTLSELAEILNTRDSAIRARTALRNRLAAANSSLVRRELRMQIRNGGTHIERLEKAVQALVAGDDELARRFRILSSIPGFGWATAAGLVGLMSELGNLSAKQVAALAGVAPMNWDSGEMRGRRAIKGGRPAIRRLIYMASLSAGARGANPDMKAFYQHLRARGKPSKVALVAVMRKLLILANTLIAENREWTQKVA

SEQ ID NO: 331030 - protein, 378 aa, unidentified
MNLKYSVGLDVSSKKIDACISVIDQRQRVIVKSSKKILNTKKGFEDLIVWILKHQKDSIPVVICMEATGIYHENCAYFLYEKGFTVSIILPNKAKKYLDCLGLKSKNDSIDAKGLSQMGAEQCLEAWEPMGVFFYELRLLTRQRQNLTELKTIIKNQLDALSHAMHQLASVTAQLKENISLFELQIKELDKAILEHISSDKEVLEKVENICTIKGLGILTTAVILAETNGFTLFNNYKQVVSYAGFDVVEAQSGTRVGKTKISKRGNSRIRRALYMPALVVIQCEVQQFKDLYDRTYKKHGIKMKSYVAVQKKLLTMIYYLWNKNEAYDPNYKVKFQEEEQELYSLFAFEKGIKSSPNKIEATQGKLPVNDHSVLPLC

SEQ ID NO: 331031 - protein, 424 aa, unidentified
MKVTYQTCCGVDVHKSFLVATIVKTTGGIEPSYQKKRFSTFNNSIFEFKQWLLDNDCRDVCMESTGKYWVPVFNLLEDEINVVIANPKWVKAVKGNKDDTKDSKWIGDLFRLGLVKGSYIPCKIVRILREYTRYRYKLVSCRSSEKNRYQNALTVCNVALDSVVSDIFGKSSTSIIDYLLEQSGTSINHEEIASKLLRSLKSKEDAVIESVEGYQMTDAQKYRMRLVRAHMDYITAEIKDVDKMIENMISSNPDFENAVQFLCTIPGVKCDSAITIISEIGTDMSQFSSSKRLCCWAGLTPGNNESAGKKKSVRITRAGVYLKPALVQCAHAAVKSDQSPYYKKKYESLVKRRGKKRAIIAIARMILTAIYQMLSTGEQWNPSDLYKIDMPVALVEKQKAKAIKQAKKLLQREGLLPPDEPVAS

SEQ ID NO: 331032 - protein, 413 aa, unidentified
MDVLHSRCCGLDVHKSSISACILLREAGRVQKHQRRFGAMTQELQELAEWLRQFGVSQVAMESSGVYWKPVWNILEGQFTVVLANAQHIKNVPGRKTDQKDAEWIAQLLQYGLLRASYIPCEIIRDLRDLTRMRTSLSQEASRISSRIQKVLEDANVKLASVATNVLGKRGRAMLEDIITGEDDPEHLASLALGHLRVKIPQLRLALEGKIRSHHRFLLRRLVDQIQFVEHEIALLDERLEDIGRQRPDLAQAVARWDTIPGIDRVAAWALLAEIGDNMAQFPTAEHLASWAALCPGNHESAGERLRGTTRQGSPWLCRMACQCAWAAARTKNTYLSSQFRRLAARRGKKRAIIAVAHTLIIIGYHLQKNQSNYEDLGGNYFDRIHSDGLKRYLVKRLQQLGHKVTLEPMEAA

SEQ ID NO: 331033 - protein, 408 aa, unidentified
MRWYMGLDASDSEYFVLVFDDAGQEVHRRKVAHSAEGFADFGGWLNARIADGLELFASLERPHGRMVEILLDHGVTVYPVNPKSLDRARDRYRPNGGHADWFDAFVLGNSLRVDHMHLPALRPDSEASAELKMLTRDRSRASQNQTRCQNLLTQTLKEYYRRPLEVFPDLKTHMALDFLRRFATPESLDKMRWGQWLKFAREHRRSDSRAREMWEQLHAPQLPVKAHIARVHSRQLLHLVDELGIIVASVKDYDQEIERFFVTLKTVDIARSLPACKTGTILPTLWAELGDAVGRWESFRHLQGYAGTTPFTKQSGKSKAVLFRYGCNKPLRYAIHWYAIHSLKKCVWSKAYHQRQLDRGRSYNQATRALASKWLKIIFVMWRDGVPYDEDRHLASIAKQNINQVIAA

SEQ ID NO: 331034 - protein, 341 aa, unidentified
MQDVTLIGIDLGKHSFHVHGQDRHGKALLRMKFNRKQLIEFFAKFQACTVVMEACAGAHHMARRLAGYGHEVKLISPQFIRPFVKSNKNDFIDAEAICEAACRPSMRFVTPKTESQQCLSALHRVRESLVRERVVASNQIHGFLLEFGISLPVGHAVIRRLPSVLADQALPARLVALLERLHSHFSYLEEQIADIEKELNRQLQDDDLGQRLMTIPGVGPLTASVLAAEVGDGKQYRCGRDFAASVGLVPRQYSTGGKNNLLGISKRGDKHIRRLLVQCARAYMLRLERQTDRLSQWVRSMLTRRHSNVVVCALANKLARMAWAIAAHHTEFKRHEAVSVT

SEQ ID NO: 331035 - protein, 421 aa, unidentified
MNQNQCFAALIGLDKSDNKINVSLKACGQNKIERSIIKSSAEALHAWVAALCARFAHQQIAICLEQPAAGLIHALMGYDFIVLFPVNPMSLARYREAFTPSRAKDDPTDADFLCELVALHRDQLHAWQPDDVSIRKLRHLTQARRRSVNMRTRLSNQLKALLKSYFPQALELCGEDLTTPMACALLQKWSSLQQIKKARPETIRRFYYAQNARRGDVIEKRLALIQKSVPLSNDPALIESSIITVQALVLGLRATHSAIARFDREIARTFNEHPDAPLFAALPGSGTCYSARLLAAFGSRRELFESAEAMLNFSGIAPVLKRSGQTTTIHRRYARPLFLHQSFMEYANESIRHSLWARAFYQKQKAAQKTHWVIIRALAYKWIRILFRCWQEQTPYDEIRYLKSLQTSRSPLLQYIAEPAS

SEQ ID NO: 331036 - protein, 386 aa, unidentified
MNNVYSSVTCGGMDVHYKFSNVTFRDKAGCVIRRERLDHRRRDQLLERLNRWPKGMPIVLEASFGWGWLSDLLSEAGLEPHLSNCYKLEQMRKARGWVKTNKKDANLVSLLPFETTDWWEVWRAPVEVRNRREQMRFRADIVALQTTVKNRIHAIFHRHGIFHDFSDLFGGKGRRFLAELCIGGSEYLSPESLQAFRGQVKLLDYLRRQLADIEQTLRKQLTRTPLIKQLKTIPGIGLILAHVLVAETGEIERFRNHKALASYSLLAPRSNDTGEDDPGRSPLGRHLGVRGNRTLKWAFIEAAHGAVRSGGRWRAMFDRVTAGGTKDRSRGYIKVARELVKVVYVVWAKGVYYQPAAPARPGSRNKKKSRSGTGQLLHPMVHALTA

SEQ ID NO: 331037 - protein, 433 aa, unidentified
MNPNRLQVGIDFSHPRADICLLSPDGQLLVEHQAFANSQPGYQQVRQVLLEHIRRHAFSGVDVSGEATSYYWFPYFWQLAHDAELAACDLSLFLLNPRQVRWFKQSLPPDDKSDATDPFYIAERTRTRRPKAAWDPQDDWLPLRFYTRLRFHLAQALTREKNYYLVHLFLLHSAYRRGQPFSDPFGVTSQQVLGGERSLAELVQLPLEELAEQLDVWSEGKLDDPLETAQKLQQVAQESFPLGEPLLTPIQRVLDLSGAHIRFLEAQITQVEGWIAAEVQARHPEALLLDSIPGVGLVLAAGIVAEIGNLERFFQTPKWDKKHKRYRKKTLREVEDAVAKLAGLWWPKADSGDFVAEDRHLAKTGNRYLRYYFVQAANGMRRHIPAYARFYGLKFRAVTRHKHKRALVLTARKSIGLFVGLLHRQETYRSQEG

SEQ ID NO: 331038 - protein, 330 aa, unidentified
MKNWEFTLGVDVSKLTLDVNCAELNIHIKITNGSAGFRLFLKWCKESGIDLKKSIVAMEYTGGYEYKLMQFCEAKKIQYSRIPGLAIKNSLGIIRGKNDKVDARRIAQYTNEKHKSITPANPINPTIVGLRQFLSFRKRLVRESAGYKATMKERKEMYTVKNNDTLVRIMNKKIKENNKLVKQLEIEMQALIQTDQKILTNYNIVTSIRGIGNVNALMTIAYTENFTCFKNARSYAVYVGVVPFDHSSGTSLHGRKRVSNMANKELKQELNQAARVAIEWNKDLKLYAENKRKDKPYKVVLNNVKFKLILRMFSLVKRGEFYVDNYQKVA

SEQ ID NO: 331039 - protein, 344 aa, unidentified
MKYFTGIDVSLRFVSICVVDEAGVVQYEGKVPAEVDLIVAALRRFSAEVRQVGLEAGTLTQYLTYGLQKAGYEVLCLEARQTAATLAAMRNKTDRNDARGLAQILRSGWYRTVHVKSLESHQVRALLASRKAILTKCVDLENELRGLLKIFGVRLASHVAHGSFDQTVRAAVSATPELSMSLLPLLDARTVLYKTYLKLDNAVKAVVRHDPVCKRLMTVPGVGPVTSLTFKAGVDATDRFRSSRNVAAHFGLTPRRYQSGETDNPGRISKAGDVEVRQALYTAAHAMLTRSYAWSTLKAWGLRLAKVRGLRRAVIAVARKLAVILHRMWVDGTDFRASRPQEAA

SEQ ID NO: 331040 - protein, 353 aa, unidentified
MFVGIDTHKDTLAVAVCDRAGVLVEWNEVVNEPAGFAELERRLEAMTVVRVGIEGSGHFGRAVAAHLVGVDYDVREVPTAMTSRERAARPGQGKTDAVDALAIARITAREAGLPSVRLKVGLAADLRALLDYRDALVREHHALANRVHAELVGLLPGYHHTHPHLTSSVQVNAVLALLDGDGRVRAGLARRRLDRIAVIMAEVRALTREISTLVTGHADAVQAIYGAGPIVAARFVAEIVDIDRYPNRDVFASANGTAPLAASSGRTVRHRLNRGGNRQLNRGLYTIAITQIRADTPGRSYYDRKRAEGKTSREALRCLKRRLSDQVYKAMRADAATAKTGTRTPSATSARAA

SEQ ID NO: 331041 - protein, 342 aa, unidentified
MSLRVTIGVDAHLDTLALCAVAGSGKRLSHCEVPNTESGFSRASRFATDCGAKRFAIEGGGSHGRALRRFLTTEGFEVTEVPTWRLDQLRRRGRGRKDDATDAELAARVDLVEELPVTGCSDRAEAIRVLRVQRSGLVKQQTAAINRIRALLVEVDPARAAQMGRVRSRRSLQALSRVAYRGDLYRDTVAAAIRFEAKAAIERRDMIRHLEERIDQLLPAAGHALKEICGISTIGAATIIGEIGDIERFATPARFAAWAGTAPLDASSGRQQRHRLNRRGNRQVNRVLHTAILTQLRCSGPAATYIERRLQEGKTRNEAIRAATRHLTTKTWRTLKQHPQLT

SEQ ID NO: 331042 - protein, 350 aa, unidentified
MENLIRVGVDTSKSVFQLHGVDSAEEPVLRRKLRRGQFLAFFAGLSPVKVGMEACGAAHYWARELRALGHEVVLIPPQYVKPYVQRGKSDAADAAAICEAMSRPALFKTFVPVKSPEQQAAQMLARVRAQHIARRTQLSNSIRGFAAEFGLIAPKGLARLGELVAGIRADAAIPELAREMFEALVEDYARIDAALGQLDRKLLALHRGNEVSRRLAAIPGIGPIGATLLAVKVTDAHGFKSGRDFAAWLGLTPRNHSTAGKNRMGVITRAGDEMLRSVLVAGATAVIQQMRRGGKRAWPWLEGLIARKPFKLAAVALANKLARIAWKLMVSGETYRPIATAIPMAAPVRP

SEQ ID NO: 331043 - protein, 374 aa, unidentified
MKLMTRTAEDTSTLYVAFELSAGKWKLAFARKLGEPARIKTVEAGALAAVTKEVEISKEKLGLPADAAVMSCYEAGRDGFWLHRWLIAQGVESLVIDPASIQVDRRARRTKTDRIDAIKLLRALILHAWGQQDWKVVRVPTEVEEDGRRLHRERERLVGEKGQHQARIRALLATQGIRTLKVEAKALELRRPWDGAPLPEQLRQELARELGRLQLIRTQIKAVEKEIEEGAGHTSRAAQVVRQLRQVKAIGLVGAQILGYEFFGWRKFTNGRQVGALAGLTGTPHQSGSTAHEQGIGKAGNRRVRTVMCEISWTWLRYQPDSALAQWYRARFGDGSGRQRRVGIVALSRKLLVALWRFVDQGVVPEGAILRPAT

SEQ ID NO: 331044 - protein, 414 aa, unidentified
MFAVGVDVSNGRSMVAVLQSKTSVLMKPFEIPHTAEGFASLAGKLAGLDGEVRIVMEHTGRYYESFARAMHNAGFFVSAINPLAIKNYQDGINIRKVKTDKADAMKIARFALDKWEILPQYTPMDTIRYDLKTMHRQFQLSSKTKTELSNNLIALLEQSYPGANQYFDSPVRPDGSQKWVDYVDTFWHVDCVARVSQNAFVERYRKWCKRHGYNFSQQTAIDLHTDARQKFALVPKSDTCKLLVREAVSQLNAVSRTVETYRTEMDRLASQLPEYETVMAMTGVGKSMGPQLMAEIGDIRRFPHQKSIVGFAGTDPIKDDSGDKVSDSKPSSKRGSPYLRKTLFVIMSILLQLHPQDDPVYQFLDKKRSEGKPYYVYMTAGMTKFLRIYYGKVRDCLKEQGLWEQTPDATGKAD

SEQ ID NO: 331045 - protein, 396 aa, unidentified
MTRYIGLDVHKAYIRGYEFQPYSSEGKRERHFRFPNTPVGWSQFISGLDADVQIALEVTGSAFEIYDTLVPHAAQVVVSNPVAMRRLGSGRHTDREDAVRLAQMLALRTLPAVWVPPHPVREVRRLLEVRDRLGSYRRALINQARAVLRRHGILLPKGPNALGQVTKAMVSKLPQAEQAILVSVLAAAQALEEQEKALTASIAARVVDEPAVHLLMTIPGVGMLTAATIWAKLGDPHRFRSPKQVARYAGLDPSVEQSGERDRRGHISRNGDHLLRRMLVEAAWAVARHDSGPLGAFYRRKAKQLGAKRTLVALARKLLIVAWRMLCTGEIYRGVQQGTLRRKEVQLTKLLQQAPDWEEKLLNLLEEMGDNHARRRCRAEGVRGELHSKQLCPAAP

SEQ ID NO: 331046 - protein, 393 aa, unidentified
MDILYHCRAGLDVHKKTVVACVRRIGPDGQVEQETRTLATMTADLLALADWMAACGVGHAAMESTGIYWKPVWHLLEDRFTLVLVNARHMRQVPGPKTDVKDSQWIAQLLQHGLLSPSFVPPPPIREPRDLTRRRTQLVADRAAVANRVQKVLEAANVKLSSVATDVLGASGRAMIARLIAGETDAELLADEARGTLRRKLIPLRQALAGRVTEHHRFQLRMLMDQVRHLEEWIARLDGRVVEVMTPVVAGEPDRPPPLGEAVRRLITVPGIGRRAAEVIVAEVGPDVRNFATAGHLASWAGLCPGNNQSGGKRRSSQTPKGNSSLRVMLVQVAWAASHTKQTVLSQTYRRLAKRLSKKKALVALGHKLLRIIHRLLSRGVDYVEYQNPGLAA

SEQ ID NO: 331047 - protein, 367 aa, unidentified
MKKVSTAAAKQSSNFSQQKLTIGLDLGDRSSWYCVLDEAGGVLLEQKLSTTPKAMKEVFGAMPRSRVALETGTHSPWVSRALSELGHEVIVAHARNVRLIGESRRKDDRLDAQTLARLARIDPQLLCPVKHRSARAQADLTVIRARAGLVRARTALVNTARRLAKSYGERLRGCNVRNMNPEKADGLSPELQTALQPLLAGIELLSEQIREYNERIERLAQESYPQVQLLKQVKGVGTLIALTFVLTLEDAHRFRKSRDVGCYLGLQPGRRNSGQSEPQMHISKEGDPYLRTLLVQGAQHILGPFGADSDLRRWGLKLAERGGRNGKKRAIIATARKLAVLLHRLWVSGEVYEPLHNSSRVAVPAAA

SEQ ID NO: 331048 - protein, 542 aa, unidentified
MCRQPLDLTVFSVRKAYTRDAYADISLAVMHKLAERPAPARRHSSSRKLVNNCAAGDNFAGGRPASARTRSRVCNPKRIDGRLPVEPEALAPTSNRKTPQEGHHISLVDSRAKRRKNQRQQRQTMNDSQQWKQYPGFGAVDWASEKHSLIVVDQAGKVIEDFEIEHSALGWKKFREKLQAYGSIPFAIETSQGAAVEQLLEAGMIVYPLNPKSARAYRDRKAPSGVKDDRLDAWSFADALRVDGQGWKALRPEEPLIKELRLVCRDEVTLIEQRTALILQLRHALAEYYPAALEAFKDWTSVSAWMFVQRFPSPELLAKAGKRQWQKFLHARRLWGSDQGPRRMEIFAHATELSGSAPTAKAKSLLALSLVQMLFVLEKQLAVYRQRIEELFARHPDHDLFGSLPGAGSKIAPRLLAEIGDERDRFQGDAQNLQCLGGTAPVTMRSGKYRHCHRRWACDKHLRHAIHLFAQQSLTRCAWAQIYYEHHRKKDRSHSDALRRLGHRWLKIIHKMWIERTPYDPELHHRNQLQHGSWIFQLKACE

SEQ ID NO: 331049 - protein, 387 aa, unidentified
MQKPHDNSKASPAAFMQDNTLIAVIELGLSNWLVAGLIPGVSREPLKKLEPNPEDLLKLLHGWRDEAIKAGRPITRIAVAYETGRDSFWLARWLRERGIDAHVIHATSVAVSREHRRAKTDRLDTAMLKRGFLGWLRGERGHCTVANVPTMEEEDAKRPHREREGLVHEQTRVVNRMKSALIQFGVRNFNPKLRKARVKLETVRTPEGKSLPPNTIAALRRDMERLKIIKEQIKAIEQTRLQQFEQKPEALANRMVYLLVRIYGLGWETADLLVHELLSRTLRDRKAVARYAGLTGSPDESGSKRREKGLSRSGNARVRKIMIQLAWRMVKFQPDSALVQWFKQRTENAKGSRKPMIVALARKLIIALWRYANDGVIPAGFSLHSAA

SEQ ID NO: 331050 - protein, 365 aa, unidentified
MEEPAVFKNSMLFIGLDLGDRHSHLVILDQDGELVEEARLPTTQASLERKFSGIPACRVAIEVGAHSRWVSALLTRLGHEVLVADARKLRLIYNNPRKHDRADAEYLARLARLDPGLLSPIHHRSPQAQAHLAVIRARDSLVRARTQLINHARGLVKTTGARLPSCSAASFHTKTASAVPQELLPALSPILATIGSLTQSIQAYDRQIQQLALDHYPETRLLRNVPGVGPVTSLAYILTLEDPHRFRKSRELGACLGLVPRTDQSGAQDPQLHITKTGDSYLRRLLVQSAQYILGPFGPDCDLRRWGLKLAERGGKSAKKRAIVAVARKLAVLLHHLWKNGEVYDPLYRSQLARPSVKEAAIATG

SEQ ID NO: 331051 - protein, 340 aa, unidentified
MRLIGCDLHASQQSIAMLDCDSGAVNEKTLKHEGEAVREFYASIPPPVVVGIEATGSMGWFLRLMEELAIECRVGHPTAIRKAETRRQKHDRRDAALLLQLLVEDRFPAIWMPSTEYRDLRSLLLHRHQWVRMRTRVQNALHAIVLAHGVRRGHTLWNRDGQALLASLPLPPHTADRRSELQALYQHLQTHIDRLDDRVEHVANERARATLLMTHPGVGPVTALATEVFVGDPARFLDGKALASYVGMIPREYSSGKRQRLGALSKQGNPFLRFLWCEAAAHAVRRDPELQRFYRRKVVQKGFAKARVAAARKLGIRLWIMLRDQIDYTEFCRRGLARQS

SEQ ID NO: 331052 - protein, 361 aa, unidentified
MSRNRTSIGLDVHARSVVGCALDGETGELFRRKLSPDKAEILAWARSLPQPVRATYEAGPTGFGLARFLLAADVDCLVAAPSKLQRPAGDRVKTDARDALHLAKLLHLGEIVEVTVPSVEQEAARDLVRAREDARGDLMSARHRVSKLLLRQGIVYSAGNAWTTTHDQWLRGQRFDQSGLQIAYESAYDAMTAVIDRRDRLDSQIALMAADSEFTPVVNRLGCLRGISTLTGFGLAVEIGDWHRLDGRRIGAYLGMVPTEYSSGGSRSQGGITKTGNGHARRLLIEAAWHHRQPYRPSSPTMRRRWDKASADARRRGDEGNRRLNTRWQTFIARDKRSVVANAAIARELAGWCWSLAVLEE

SEQ ID NO: 331053 - protein, 407 aa, unidentified
MTITCGIDWAEVHHDVALVDEAGQRVAKLRIDTGAKGFGELLDLLAEHADEPLEVPVAIETDKGLLVAALRAAGMVLYAINPRAVARYRERHGQAGGKSDPVDAMVLADILRIDRDHHRPLPELSEEALAVKVLARQHQETIWTRQAAVNRLRSLLVEFYPNALVAFPNLTHKAALEVLATAPTPTAGSKLTARRVTALLRRSGRGDRPGLAERIVTALRAPALHQPERVEAAFGHVVSSLVATIGVMQTGIAELETAMTAEFDAHPDAAILTPAPGLGPVLAARVLGEIGDDRARFPGAENLRAFAGTAPITKASGRTKVVRARHIRNRRLADACHWWAFAAITKSPGARAHYDRRRAAGDTHNAALRHLANKLLGRLWWCWQHHQPWDDNAAWPELHKSANQIAA

SEQ ID NO: 331054 - protein, 420 aa, unidentified
MRKFLECCAGIDIGKREITVTILTGSVEVEPVQQTQTFGTTVQELNRGLEWLLAHACSTVVMESTGTYWVPVWNVLHERVAVIVANPEHVKARRGEKTDPEDSRRLAERLRVGDVRGSFVPSEQIVELRDLTRRRKRLLSAANSERNRIQKLLEQANVKIGNVVSDVFGVSGQRILQALLQHPQLPPADLAELAKGRLRHKRQALIETLQGHRLNDHLCWMIQHSLDHLVFLEKQLTELSQRTLQKLQPFEREYELLQTIPGIAAETAAVILAETGGNMAQFPSPRHLTSWAGICPGNNRSAGKQNSASIKRANKWLLAALVQSAWATVRQRGSIFKKRFYRQMQHRGRKRALIAAARSLLAVVWQVLQRMTPYNEPANEVFQERERGKKIRHHLHRLRDGTRFRTDNPHPLGALGIHAR

SEQ ID NO: 331055 - protein, 320 aa, unidentified
MTEQPVYVGIDVSKATLDVAVRPIHQRWSVANREKGFNPLVRRLKTVSPALIVLEATGGLELPVVAALGAAGLPVVVVNPKQVRDFAKATGKLAKTDLLDAEVLALFAERVRPTPRPLPDAEARALSALLARRRQLIVMLTAERNRLSRALPSIRPGVEEHIAWLKEKLRALDEELAHAIRQSPLWRERENLLRSIPGVGPVLTFTLLAELPELGTLDRKQIAALVGVAPLNRDSGVLRGKRTVWGGRAPVRAALYMAALVATRFNPVIRSFYERLRTAGKAKKLAITACMRKLITIINAMLKHRAPWNPIITQTFAPSS

SEQ ID NO: 331056 - protein, 403 aa, unidentified
MNSVGIDISKGRSTIAVMRPFGEVVISPFEVRHTDSELSELARQLKSLNGETRVVMEATGNYHAPVAKLLHDAGLYVSVINAKLVHGYGNNDLRRVKTDRKDAVKLANYGLDRWLTLPRYVPEEDTRLLLKNCYRQYRQYSKVQTVLKNNLISLLDMVFPNVNRLFSSPIRGDGSEKWVDFVAEFWHCRCVSEKSQKAFTNKYQRWCRKHGYNFSEAKAHTIHAEACGHIDVIPKSETTKLLVEQAVAQIKATSAALVALKHEMQALASMLPEYPVVMDMFGVGPTLGPQLMAEIGDVRRFYSKKALVAYAGLDAPPNDSGDVTGSHKSMSKVGASSLRRTLFLVMSVYLQNAPLDESVYQFMDKKRAEGKPYRVYMMASANKFLRIYYATVKAYLESLEHTA

SEQ ID NO: 331057 - protein, 414 aa, unidentified
MSTSYELLVGIDWATEAHQVCVLTPEGAVFLERTVEHNAAAIHAFLEALLAHVGGRAEAVAVGIEVPQGALVETLLERGLYVYALNPKQLDRFRDRHSVAGAKDDRLDAYVLADALRTDLHKFRRVSLDHPLVIQIRELSRADEDLRGEANRLTNRLREQLYRWLPHVLALSPSADEPWFWDLVERLARSGPVRLQRRQAEALLRRHRIRRLTADDVLATLAAERMKIAPGAAEAARTHIRLLLPRLRVVHEQRKGCAKQLGSLLDEYAAEEDEEREGAPSDVELLRSLPGVGPTVTATLLAEAASLIGERDYAALRALAGLAPVTKRSGKSRVVLMRYGCNTRLRNAFYHWARTSVQHDEAARTYYAALRARGHSHGRALRSVADRWLRILMAMLNSRTMYNPYHQRHTRAAA

SEQ ID NO: 331058 - protein, 442 aa, unidentified
MTLLARLGDPLPERYYLGLDIGYKEHVAVVTSLQMFVQGGDHWKRSPALAFPTTRAGFEKLQGYLDRFSPDPQKFFGVCEPTGGHYGATVFQYLLDRHYPMWWIENVLTRRMRERIFGSLPKTDPMDARTMTRICYLYEAVGEEFSLRPLHLAERDDSELLALCRDYWRLTGMVGRVRSQFGQLMAVVFPELKVFFPDTVSSVAPVSVIHAYPTPSELAAAPTADVTAVLWKVSAYHHAKRAAELQALARTSVGLLPDPGRAWRITWQTDFLLTNFRALHQLEQQIKALVQQHPNYRWLANLPYSGPATLGVILSVTGDVKRFRNYRQFVAYTGYFAGLEKSQTIDHTRMSRRGNRQLKRALFQIVAPLVWFDPGDNPYKQLYERKKAEGRAWYEAMPFACAALARHIFHCLKSQQPYDVQQVGLNSRDIVRGSMLTTSFAL

SEQ ID NO: 331059 - protein, 269 aa, unidentified
MTFRPHALHLKAELFVKSSRVHVRDDGFTRCNFHLKFFIMVSRGIDISKSSFVAAYPSTNGNPTKTFPNTTARMRELIGTLAVAEHHCVMEATSNYSCCCTCYIRTVLPSVLPPPKKQIKHFSRMMMPVTKTDEKDAYMIAMYGEKMNPPIYKMPSQATIRILTTEGFTYFDNAKQLSRFIGICPTYQQSRTSVNIREHINRNDDERLRSLLYIAFWTALRYNSRECYIRLKANEKPFKVALIAVTNKLVRPVLTITTINSIYRWICPG

SEQ ID NO: 331060 - protein, 413 aa, unidentified
MALKIVYQICCGIDVHKTFVVACIASTNNNVTTYKRHRFSTFTKGLKELSQWLCENNCRDVCMESTGKYWIPVFNVLETTCNITLAHPKYVKAIRGKKTDKKDAQWIADLFKHDLVAGSFMPPLAIRQLRDLMRYRFKLTNFRSSEKNRFQNSLTVSNIQLGNVVSDTFGKSSMAIIEQLLNNPPDQSLDIPSLIHGSMKKKIPELELAIDGFITPEQTAKLRIIKQHYDDLKDRKSDLEDLILCLSLPYAEKINLILTVPSFKNIFSAITIISEIGADMDVFPTAKHLCSWAGLTPTNNESAGKKKSVRISRAGCYLKPLLVQCATAVVKSEKHPEIRNRYLKIKKRRGHKRAIIAIARMLLTAIYMILKKKEPYNAELYKKSDILPVSREITVEQAIALAKSQGYLILTGT

SEQ ID NO: 331061 - protein, 356 aa, unidentified
MVRHIFVGIDLGDKNSVARIALDQEKSQRRAFINNRQGRARLLEQVKRQAEQAGGAKIVMAYEASSCGFVLRDEAEAMKIQCWVLAPTRMEKSVDQRKHKNDDRDADDVLEKLRGHVLAGNRLPTVWVPDRQTRDDRELIRARLDLSEKQTQVKAQIQMLLKRQGLEKPSGLGAAWTVAYRRWLDGLKEWTGLGWGRRQALSSLLSQLSFIEAEIRRMEKPMEQLADEPRHQAIVAELTQEPGVGRLTALVYRTEIGYAGRFRRGRQLGKFTGLTPNCRQQNDRKGHISRQGPPRLRKILCQASWVHIRHDPQARRVYQELVCRNPKKKKIALVAIMRRLAVRLWHRMRQIELAQA

SEQ ID NO: 331062 - protein, 340 aa, unidentified
MTQHKIIGIDLAKNIFFLFEINHKGKNLSRKKLQRSKLLSYIANKAPCTIAMEACSGAHYWAREFSQFGHEVILYAPQHVKTQRRKQKNDYNDAEAIAEVALYKRPHPVPHKSVEQQDIQSLIRMRRLLVTERTRIVNQVRGLISEYGIIMPKGAAAFRKAIPEILENDENQLSCILRELLSHQYERYLYIDEQVKWFDDKLNQTIKQFENAKRLMSIPGFGPLTSQAVAVWLGSGQQFKTGRDASAAMGLVPKQDTSGDKVILLGITKRGNTYIRSLLVHGARAALRRAKFKSDNLSKWMLELQERRGPNRAAVALANKLMRIAWAVITKNEEYRPTQS

SEQ ID NO: 331063 - protein, 346 aa, unidentified
MQIVSVGIDLGKTTFHLVALGAAGKVLVRKKFTQRQLLTYTANMQTSLIGLEACSGAHFLGRALRKQGHDVRLIAAQFVKPFVKSNKNDFVDAEAIAEAVERKNMRFVPIKTDDQLDLQAIHRVRDRLISRRTAVINQLRAFLLERGLVFAKTPAKLRAALSDVLENADLDLTTQMRNLIDLLWNEWKTVEGQIEGLSLELERISAADPGCTRIRQIPGIGPIVATAIVAAIGNGAAFGKGRDFAAWLGVVPRQYSTGGKARLLGISKRGNVYLRKILIHGARAAVLRIKRDRAPIGAWLDALDARAPKNVVVVAMANKLARIAWAVLSSGEDYKPNRNMVTAFMN

SEQ ID NO: 331064 - protein, 269 aa, unidentified
MDHSPSFVGIDVSKDQLDVHLLPSGARFAVPRNGAGLEELVHRLTVEERPTLVVLEATGGFEVTVAAALAAAKLPLAVVNPRQIRSFARSMGRLAKTDRLDAEVIALFAERVRPEPRPVADEDALALGELVARRRQLVEMIGMESNRQQQVRDRRLKQRIQGHLEWLQQALADLDGEIDDLVRRSHAWRETEELLTSVPGVGKVTARTLLAELPELGQLGRRQLAALVGVAPSTATAASGAGTGPLPAGASTCAGPSTWPPWPRCAATP

SEQ ID NO: 331065 - protein, 407 aa, unidentified
MNKEAARTPAALVAIDWADQKHDIALVPKGASRPEILQLPHRPQELANWIAELRKRFGGQKVAVALEQKRGALIHALMAYEFLELYPVNPTTLANLRKAFKHSGAKSDVLDRDLLLELLQKHRDRLSCWQPDDEQTRHLDLLVQDRRAAVNECTRLGEQLRAALKQYFPAMIDLVTDLTTRLACDLILKWPDFASLKGAKSQTLRSFFYAHNFRRSDILEQRLAALRTAAPLCSDAAIVGAGRLKAMRLARAILTLLPAIKQYDKEIAALFKTHPDAFIFDGLPGAGPVLAPRVLTAFGSRRNRWRHSLDLATFSGIAAVIERSGKRSVVHWRWACPKFVRQSLHEFAGSSVRFCPWAKRFYQTQLSRGKDHHIAVRALAFKWIRILFRCWQDRCPYDPLKYAPANL

SEQ ID NO: 331066 - protein, 346 aa, unidentified
MKINRVGVDLAKNVFQLHGADRQGKTLWKRQLSRDKWLTVLFATVEPGTVIGMEACTGAHHWSRLLLDKGYEVKIIPPQFVKPFVKSNKNDANDAQAICEAMARPNMYPVKVKTIEQQDMQAIHRIRNEIKSHRIAKANQIRGLVAEYGMVAPKELTSLRSAIPKWLEDASNGLTMFFRQLLQGLYEDLSSVDKRMAELDKQIAVIAQQDPIAKRLQQLRGVGPLIATALVATMGDGKQYRKGRDMAAAIGLTPRQHSSGGKDRLLGISKRGDAYLRCLLVHGARSAMRTAKDKDDRLSRWITNLQDRRHANVAACAMANKMARMAWAMMTKGVDYDPDFSSVSAS

SEQ ID NO: 331067 - protein, 386 aa, unidentified
MRNEATLSMESNAGGQVLYMALELSNTTWKVLFGTSASGRRRERNVTARDLLALLAEVARAKERFGLAADAKVVSCYEAGRDGFWLDRALRLNGIDNLVIDSSSIEVPRHMRRKKTDRVDVGKLLGLLLRFAFGERAALAVVRVPSSADEDIRQLSRAIERLKGERVRHLTRIKALLAKEGIVIQRVGGPAWAERVAALRTWEGKPLGRWLQQDLRDDGEQLALVVRLLAERQAERDALVAAAESGAGLKARQLMRLRAIAAESSFVFATEVFGWRSFANRRQLAGAIGIVGTPFKSGSLDHEQGISKAGNARMRKMLVEIAHCWLRYQPTSALARWWAERFARGGGRRRKSGIVALARKLLVALWRYLEEGIVPEGAQLKPAVAP

SEQ ID NO: 331068 - protein, 266 aa, unidentified
MTKHSIGVDISKSHFDAFDLETERAAQFKNGETGYRDFRKWLDGRNITRIVYEATGAYHRPFELALETNFPLVKVNPFQARRFAEARGTRAKTDRADARSLAEMGKAFDLEAPPPKSKSQRLLRDLHTARSRMMCERVRLLGRASQLDVPLLQRQTRELIAHVERQIAELDAEIAALIAEDQEETRKLEIIRSIPGIGMVTASAILAFLPEIGQLERKQVASLAGLAPFTRSSGTWVGKSFIKAGGRNCVRHCTCPRSSRRGSTRI

SEQ ID NO: 331069 - protein, 462 aa, unidentified
MTTSPCRVHGLGGGVTSSEGTDRPLIRGMTTGFFAGREALRNVDVAISAVAGPGEYDRRTQHVIDTGDIDVYLGLDVGKGEHHATALTPAGKKTFDRRLPNSEPKLREVFAKLQAKHGTVLVIVDQVASIGALPLTVARELGCHVAYLPGLTMRRIADLYPGEAKTDAKDAFIIADAARAMPHTLRSVDLDDETIAELQMIVGFDDDLASEATRLSNRLRGLFTQIHPHLERVLGPRMQHPAVLRLLDQFGSPAQIRKAGRRRLITLIRPKAPRMAERLIDDVFTALDEQTVVVPGTDAAALIVPSLASSLQAVLDQRKLLAHRIEELLEAHPLSKVLMSMPGIGIRTGARILIDVGDGTSFPSAAHLAAYAGLAPATRSSGSSIRGEQPSRRGNKQLKRAFFLSAFAALADPASRTYYDKKIAQGKHHTQAILCLARRRADVLFAMLRDGTFYQPPTPIAP

SEQ ID NO: 331070 - protein, 445 aa, unidentified
MIGFEKRDRVAFAPLDLVEEKRYMYANMRLVEQGLNKSMLLEGYQALTAMETQPLCGSKLDSSNVQETNTWRQFNPLCSTNLILHQEEEMNRPEFYVGIDVGSATFFVSIGQLEGETNWKIVAKPTTFENVFDSFSQFRYWLETNKALPNNCIVCMEATGVYGEALAYFLVSNQYRLVIEAPLKVKRAFDPEGHKNDSVDSRQIAEYAYRFFDELRYWQPKDVSIEQIKTLLTLREQLVIQKTGHKNANNIIKRKVVRTPLAENVHETTIKTLEDHIKLIDKEIQRLIDEDPASKELQKLLETVPGIGKTLATFLVVTMHSAPEPLNHKALAAYIGICPYEDSSGSSRHNKATSRHYGPSAMRRLIHLAAMSVRQHCPLYQHYFIRKVAQGKEKKLVINNIANKLLKMACAIARTKTPYIPGYRSIHPQRLKQPLKISSIPLTGS

SEQ ID NO: 331071 - protein, 339 aa, unidentified
MMEITRIGLDIAKGVFQVHAVNAQEQVVLRRSLRRNQLLAWFARLSPCLIGMEACGTANHWGRELSVLGHTVRLIPPGYVKAYVRRNKNDAADAAAICEAVSRPSMRFVPLKTIQQQSETLTHKARQMLIKQRTMTQNSLRSLMAEFGVVVPQGPQHISKLLAILADPEDPRVPAVARVALNTMSEMLSALEQQIETLDKTIKAQVRANPTARHLDTIPGFGPILSGAIAAIVADPRHFDSGRDFAASLGLVPRQDSTGGKTKLGPISKRGNGYLRRLLVNGATAVLNGKNARNDPWRAKLLDSKPKKLAAVALANKMARIAWAVMTRQENFRPRAVAA

SEQ ID NO: 331072 - protein, 341 aa, unidentified
MKNLFIGIDFSKKTFDVSFFEKDGTGEVFYSQFENNKDGFKHLVKWISQHTDVCKEEWLFCGEHTGLYSLELPAFLLKQNLFIWLENPLQIKRSSGIKREKTDKTDSLEIAHYAFRFQDKARCYKLPDKVFTSLQNLLSFRGRLVKNKQELLVAAKEMRRVFNRDKTARYIYEQSMLEIGRLNKKVKEVEEQMLSLLDEAEELKTNYERITSIKGIGMINALTILIYTENFTRFTDCRKFSCYVGVVPFDKSSGTSLNRGKRINWLANIQIKTLLTQAAKCAVVHNPKLRNYYQRKMAEGKSMKIVINNVRNKLLQIMFALVQKGQSYINDYERQLEIKLI

SEQ ID NO: 331073 - protein, 423 aa, unidentified
MKLTYPICCGVDVHKTFLVATIITSNFESPKYRQKRFSTFYKGLLEFKQWLLDNNCKDVCMESTGKYWVPVWNALEDSIHVVIANPKWVSAVKGSKDDKKDSKWIGDLFRMGLVPSSYIPEKDIRVLREFTRYRSKLVSMRSGEKCRFQNAFTVCNLTLDAVVSDMFGKSATDIENYLLESDSVDPNHCVSLLRGRLKKKSEEIVNAVEGFDMTAEQKERARIIQGHFADINSRIAQVDEVIGRLVSEYEGAISLLCTIPGIDRRLAITIISEIGTDMSQFGSSKRLCNWAGLSPGRNQSAGKKKSVKISRAGVYLKPALVEAAHAAVKATAKNPYFRIKYGRIMQRRGKKRAIIAIARMMLTSIFAMFTTGEVFNPHDIQKFDMPEELKKKQTLSAAKDAVKLLVSLGLVAENSISLQPLAS

SEQ ID NO: 331074 - protein, 428 aa, unidentified
MDKVDRNRLEEFRQLKREIRGSEEYLIVGIDIAKDRHHAFFGTATGRTLLRRLVFSNDHEGFRKLLDHTEALRVQHGLKKVVYGMEPTANYHKPLGEYLIKLGRGVVLVSGVTVARNRESLDGRWDKHDGKDSANVADLISQGKCLYYEHPSAELRGLRGLLSLKRRLKKQEHGYRVRIRSHLIAQYFPEMDRDYERLGAEGLSIVRWCLPASQITQLDVAPFIERVISRRITMEKRRRLEEVWEKAAESIGCEGVPGVDHEAKIMGEGLKQIREMIRETEDKIEELCKEFLEYPYLLTIPGFGPDVSSKVLGAIGDPYRFDNGKQVLKMGGLDLSADRSGKDSDKAIPEISKRGKADLRYALYQAAFIASTKNRDLMFYYTSKLQGREKEKGIHTKMLVKLSAKMLLIAWTVMKKKEAFNPAYLKAK

SEQ ID NO: 331075 - protein, 342 aa, unidentified
MATKQDKIEFDQVIERGCGIDIHKSVLVATVQGKGIKTETRSYDAFTESIKQLRDWLKSLSITHIAMESTGVYWKPVYNILEEDFEIVLVNARDLKNIPGHKTDKKDSRRIAKLLLAGLLKGSFIPPKPIRELRDLTRYKRRIIQQIASEKNRIHKFLEDANIKLSTVVSNMSGAVATKIIDAIIEGEGEAEKLAKLRHGRMKASEEELVVALTGNLTEHHKFMLKMGKQSIKNKELLIDELDRQIDNQLKENQMVLDAELLSTIPGVDKDAAAYILSEIGNDMTRFPDEQHLASWSGLSPGNNESAGKKKLKDHTRGQMVKSNDCAMCMGSNANKRHLFTK

SEQ ID NO: 331076 - protein, 340 aa, unidentified
MSEVSIIGVDLAKRVFQVHGALPDGNVAFRKKLSSSQFMKFLAEQPPCLIAMEACATAHYWGRAALGSGHEVRLIPPIYVKPFVKRQKNDAADAEAIVEAALRPTMRFVEVKSADQQSLGLLFRTRELLVRQRTQLINALRGHLAEYGIVVAIGARNVKVFQQALLDHGTRLPKTVLSISGVYFEQIAALTEKVTELEIALRRETARDGQATLLQTMPGIGPMSAAAIQAFAPPLENFARGRDFAAWLGLVPRQHSSGGKDRLGRISKMGQRDIRRLLIVGAMSIVNWASRKGSQDSWLMRLLESKPKMVVAVALANKMARRLWAMCVKKEVYEIPVLVA

SEQ ID NO: 331077 - protein, 392 aa, unidentified
MEFCPMRKPNDMSKCLAAFDQDSTLVAVIELGLKSWLVAGIVPGIERHPLKKMEINEPALIELLYRWRDQARKAGHPIKRICVAFEAGRDGFWLARWLRSQGIECYVIHPTSVCVSREHRRAKTDRLDTEILKRAFIGWLRGETDHCSMAAIPTLEEEDAKRPSRERETLVGERTRIINRVKACFVRLGIRGLKLNWRKAADVLAKLRTPEGRPIPPNTLDELKRDLARLLFVSDQIKEIEKMRLARLRTAPKRGPGAMVRILANVLGIGVETADMLVHEVLSRKLRDHRAVARYAGLTGSPDESGRKRREKGLAKSGNARVRRGMIQLAWRFLWFQPTSDLAKWYEARTSDGRKDTRKRMIVALARKLLISLWRLVTHGEIPTGVVLRAAA

SEQ ID NO: 331078 - protein, 368 aa, unidentified
MREQQNNRQERTIIGLDLGDRWHRFCVLGESGQVVKEGSVANNRVALSELSSRYPGALVVMEAGCHSPWVSRHLEQAGCEVIVSNPRKTRAIYQHERKSDRRDALMLARIARMEPALLYPVGHGSEEAQQDLLRIKLRDSLVRARVGLINSLRFTLKSLGYTIANPSTERFHKVIQSALPESVVQMIAPSVQAIEELSLRIKLLDREIRTLAHTKYPETSWLEQIPGVGPITALYFVLKIGDPARFERVRDVGAFIGLCPRRDQSGENDPQLRISKRGDAYLRRLLVSSAQYILGPFAPPSALRQYGLALAAGATARAKKRAVVAVARKLAVLLLTLWKNKSSYQTFPQHSSREKMRTNDLERLRCIA

SEQ ID NO: 331079 - protein, 425 aa, unidentified
METTPQNIHGNFAAFIGLDWGDQEHVYQIFDIESQTTKEKKVRQNPIALAQWVAATKKIYPNQRIAIGLEQSKGAVINFLMEHDCFVIYVIAPKLAAKYRQAFKSSGAKDDGNDAGFILDILMRHREKLCPWRQEDPKTRRLQILTEKRRNAVNERTRLSNRLKALLKQYFPLALDVSGDSLYSIIACSFLLKWTTYDSLKRTRINTIRNFYLKHGCRHIKTIEKRVKMIQQAKPLTTDKVVIETSVLETSMLVGQLMVLNQHIENYDDTIKKLFPNHKDAEIFSSLPGAGEILAPRLLAAFGSDRDRFKEAVDLQNYSGIAPVTVQSGKQCLVRWRWACPKFLRQSFHEFAGESRKHSIWASAYYDKKRQQGKTHNAAVRSLAYKWVRIIFRCWKDRKSYDELTYIKALKNHGSDLFQYMAQTE

SEQ ID NO: 331080 - protein, 369 aa, unidentified
MKKTNEEKWSNGSKQASVTDNGKRVLRLGLDVHYRQVTVAIQEDGGRIKAAGRMKHPVFVDWIQKKLDQGWEICSCYEAGASGYWLHRRLEQMGVQNLVVVPKAMGQGGKKQKTDKRDAGELCDSLDRYLRGHDKALSVVRVPTQDQEQKRALIRYHRQIMADRGRCEARGKGLLCAQGIEVQGRWWEGHGWLEVQSDPQLKDWMKEQLIGWRNKILSLDEEQSGLRARVAALAPALLPKGVGAYSAAVLYYEMRGFERFKNRRQVGSMTGLCPGVHLSDGRGKEGSINRCGIGIVRWTLVEMVWRLMIWQPQYPPVRRLAAGLVKGKRAKKRLVVQAARRLAIDLWRLSTGQTTPEKLGLIMHCVSEK

SEQ ID NO: 331081 - protein, 339 aa, unidentified
MNTNLVAIDLAKNVFQVGLFNQACKVQSNKKVTRKKLRQTIRQIEPTTIVMEACYSAHYWGREFEKMGHVVKLIPAQHVKPFVVGNKNDANDVVAIAEASRRPKIRFVPVKTVYQQDIQMLHRIRSRHVSQRTALVNQIRGLLSEYGVVVALGWRKLCAALPDILEDGENDLSTYGRMMLAQLSDELTAINDIVKNDEKILASLVESDEDYQRLLKAPGFGQILTSAAVSSIGNGAQFTSGRQTAAWLGLTPGSMASGEKSVSKGITKRGNRYLRTLFIHGARAILNWAIKKDKTDTLSLWIKQLDARIGRNKTVVALAHKMVRIAWAILSKKEEYKPA

SEQ ID NO: 331082 - protein, 309 aa, unidentified
MFPVGIDVSKNTLDLCMLYDGIKGRIKTRNIQNNRHSVENILRWLRLQHCSPEDVHVVMEATGVYHERLATELHDAGFRVSLANPHRSREFARGMGIMTKTDKVDAYMLACYAFLKKPHRWEPPAPEIRYLGALLRRRDVLLGDALREENRLEKYLSTDTPADIISSCRRMAQLLREEVSNIERQIKAHIKASPALRRDYTLLTSIKSVGPQLGMHMLVVLRSHNFVSAEQAAAFLGVVPIEKRSGTSVRRRPRMSKIGPPQLRAKLYMSALCGKIYNKRMRNIYDEGNAVNLLMTILICSHSILVTSG

SEQ ID NO: 331083 - protein, 338 aa, unidentified
MKKRNSSQKSRTRTVKTKRAKEVIAIGMDLGDRTSRYCMLSDEGEILREGEAATTKAGMVETFGSLGRVRIAIEVGTHSPWVSRLLQKLGHEMVVANPKQVKLITESSRKDDRLDAQTLARLARIDPQLLRPIQHRSEKAQSALMVIRVRAALMAVRTSLVNTVRGLTKSMGERLPKCDADQMGVLQAASLPPKLRQVLEPLLKEVESLTEKIKDSDREIEQIARKDYPETALLQQVGGVGPVIALTFILTIEDKNRFQKSRDIGCYVGLRPRRSDSGQSQPQLRITKEGDPYLRTMLVQGAHYIISRRGPDTDLKEESSCGGCAKVRDPASSAVGNG

SEQ ID NO: 331084 - protein, 416 aa, unidentified
MRIVYDNVAGLDVHKKTVVAAVSVKQADGSWRQERQTFGTMTIDLLALSDWLLARSITHVAMESTGEYWKPVFNILEDNMEVVLVNAQHMSRVPGRKTDQSDADWICELMQYGLLKASFIPPKGQRELRELVRYRTSFVRERATLVNRVQKVLEGANIKLASVATDVMGMSGRAMLTAIIAGNTNAEQMAELAKGRLREKRGELVKALEGRIQPYHRFVLTELLCQINSLEETITRFDQEIIDVCRPFEEAVVLLDTIPGVARQTAEIIVGEIGVDMTRFPTADCLAAWAGVAPGNNESAGKRYSGKTRKGNQHLMTALVQAANAAAKTKNTYLHAQYQRLAARRGRKRAIVAVAHSILVIAYHLISRKEPYRELGGDYFDMRRPEATATRLIKRLEHLGVHVLVQNPLVPAVAVP

SEQ ID NO: 331085 - protein, 355 aa, unidentified
MAHDILLTADYHDRVCVIRRLNLTTREERMLPGVPTTPEALNRIVDDACLEAGSEGRVIWLQESTTGWARVKELIGDRVVFFVCNVLQMPLPPKARRRKTDKVDTARLQREFLNGDLPLAHQPPPEWRQLRRLVAYREGLVSRRTAVRNWINRYLAHETWVDRTRLWSPAGQARLRALLPKLSSTDAMIIGLKLEELARLDEQLKPVLLELLAAYNNCPDAQRVDAIKGIDVVSAVSIVARIGPVDRFRKADSLIAFAGLAPGVHQSDETRRNGRIGGGGTDRHLRHYVIEATMWARNLPRYKPTYDRVKRRRGAKVARLVVARMMVRSIYKVLREGVAFDPAPARKATAAAAAC

SEQ ID NO: 331086 - protein, 387 aa, unidentified
MTVPAQVFGLIPRHYDIFGGLDVAKKNMAVTFTDHEALMRSLRLPYSSAHLLHYVRKHFPDQRVAFVYEAGPTGFGLHDELVSAGYRCLVVAPSMVPTAPGDKVKTNRLDSRKLSVQLRGGELRSIHVPALRYRELRHLVQLRDTQVGQLKATKCRIKSLLLCEGLAFPPAPESSQWSARVLSELLELPCSPAVRFELDQLIGTLHFHFNSAAAAQKQVRYYCQNDPELRQSIRLLASLPGIGVIVATHLVARLGDWRELSNVRQIAAFLGIVSREHSTGEKANRGRITRTGDSRLRNKLIQSAWTAIRKDAELRAFYLRIYHRHPKKIAARKAIVAVARKLTTRIYAVLKEQRPYVLRPENFAAPLTAEETVGPRERLDNPQNEQP

SEQ ID NO: 331087 - protein, 409 aa, unidentified
MYDKTKFIYVGLDLHKEQHTAVIMDCFNEKLGEITFQNKPSEFSKLLVKAKRYCTDGKEIVFALENSYGYGRALAAWLIERNYIVKDVNPALSYAYRKSVPQYKKNDSYDAQCVARVAINELNKIPDAMPEDMYWTLSQLVNRRANLKTHHIRLKNQLHEQVCVAYPSYKQFFQDIGRPTALYFWEHYPSPRLLRGKTVEELAEELIPVSHNQFSTRKCQKILDAVKSDGDTTRDYQPERDEITRGLVRDVRHYVNQLEEVDKAIANFLPRFGCTLNTIPGVSNTTVAKLLSEIGDIRRFPNANKLANFAGIAPVNFSSSGKGDDKPSKQGNRRLQGTIYFLAIQMIQLSSKGLPRNPAFYAYYKKQLARGKTKPQALILISRRLISIIYGMLKNKTEYRMPKVPENLN

SEQ ID NO: 331088 - protein, 343 aa, unidentified
MNVTTIGLDSAKNVFQVHGVDANGKVAMRKQLKRGQVLAFFANLSPCLIGLEACGGAHYWARELLKLGHDARLISPQFVKPYVKGNKNDANDAEAICEAVSRPSMRFVPIKSIEQQDIQMLHRARSGLVKERTAQANRLRGLLNEYGIVSGQGLTQLHKRLPAEIVKDAENGLTKAARQIFADLHQQLIELDRQVSAYGEKILVLHQSSAVSKTLGTVPGIGPISATALLASLGDGKAFDKSRQVPAWLGLVPKQDSSGGKPKLLGISKRGDAYLRTLLIHGARAVVKAAAKKDDAQNRWINDLVKRRNANIAAVAVANKNARIVWALLTRTESYHTPVSASI

SEQ ID NO: 331089 - protein, 372 aa, unidentified
MVYIGIDIAKFKHFASVVSSDGEVIVKPFPFENSRQGFMKLIEEIENFQDCLIGLESTGHYAENLIYFLYQRGYQIGVINPIQTDALRDSNIRKTKTDKIDTKLIVQCLMLKKYSLVNSQDINIIKLRRLSRFRLETIQQQTRIKTQLTACLDIVFPELSSFFNGNLHLKVSYALLEKYSSAKAIAHCRIDGLTNLLYDNSRGHYNQDKALQLKELAKQSIGLDNPAIELQIQCLIKQLRLYQKQIKDIDLAIMTLMELLNSPILTIPGVGYILGAMIISEICDIKRFSNPSKLLAFAGLDPVVKQSGDFQASSMKISKRGSTYLRYAIYRVAFLIIYNNETFHNYYISKCAQGKTHRVASVSYTHLTLPTT

SEQ ID NO: 331090 - protein, 369 aa, unidentified
MKESITYVGLDVHKDSISVAIAEEGRDGEVRFYGTIGGDITSLGRLVKKLSSKGRKLRFVYEAGPCGYKIYRYLTSKGYDCEVVSPAHIARKPTDRIKTDRRDALTLARLHRSGDLTRVYVPREDDEAMRDLMRAREDAVRAQRAARQQLKAMLLRLGIRYNGRASWSRAYFNWLSEQKMSTPAQQFVFQEYINAIHETTERVKHFNKQIPVLVESWRMRPVVCALQALRGVSLITATTTIAELGDLNRFDHPSQLMAFLGLVPSENSSGPKIRKGAITKTGNTHVRKVITEAAQTYRHPARISRHLLKRQEGLANEICEIAWKCQTRLCGRFRQLLARGKNRNVVVTATARELCGFIWAIARQVPAPN

SEQ ID NO: 331091 - protein, 412 aa, unidentified
MEVLYPHCAGLDVHKDTVVACVRHMATGSVEREVRTFKTTTKDLLALSDWLAEHGCTHVAMEATGVYWKPVWHILSDGDFVLVLANAAHVKNVPGRKTDVNDATWLADLLAHGLIRGSFVPDEQTQEMRNLLRTRKQLVRECSRHIQRLQKTLEDANIKLDSVISDIMGLSGRAMIEALIVGESDPERLAQLAHRRIKAPPEALCEALRGRVTRHHRFLLRLHLKQIDAVNVAIDDIDQEVDAQIEPFRTAIQLLITIPGVSELSACVILAEIGHDMNRFPTAAHLISWAGLCPKNDESAGKRRSTRMRKGAPWLKTTLVQCARAAARKKASYFQAQYHRLRARRGDKKAIGAVAASILTTAYHMLKYGTLYEDLGPDYFDKRGKGKHVHRLINRLQNLGFAVQITPVEAAA

SEQ ID NO: 331092 - protein, 368 aa, unidentified
MLARGTEDKEYAMSQKLNSAIAAIGIDIGKNSFHLVGQDRRGALVLRQKWSRGQVEARLANLPPCLIGMEACVGAHHLSRKLQALGHDARLMPAKYVRPYSKGEKNDYRDAEAIAEAVQRPTMKFVATKTADQLDLQALHRVRERLVGQRTGVINQIRAFLLERGIAVRQGLHFLRAELPSILAKRTDVLSPRMLRVIEDLAGDWRRLDERIENLSDEIAALARQDKGCERLMTVPGIGPIISSAIVAAIGGGDAFSKGRDFGAWLGLVPKQMSTGDRTILGSISRRGNRYLRWLFVQAAWVVLVKITPEGWERYGLRAWIEAAKQRLHRNVLAIALANKLARIAWAVLHKGRAFECVKTNATASQAA

SEQ ID NO: 331093 - protein, 354 aa, unidentified
MAEALKNSIAFVGIDIGKNSFHVVGLDECGAIVLRQKWSRGQVEARFANMPPCLIGMEACVGAHHLSRGLQKLGHDARLMPARYVRPYSKGQKNDFRDAEAIAEAVQRPTMKFVATKTADQLDPQAMHRVRERLVSQRTGIINQIRAFLLERGVAVRQGLRFLRSELPGILARPSDILSPRMVRIIEDLAGDWHRLDERIEGLSSEIEAIARRDSSCERLMSVPGIGPIISSAMIAAIGAGDVFSKGRDFAAWLGLVPKQISTGDRTVLGKISKRGNRYLRVLFVQAAWVVLIRPKSWERHGLKSWIEAAKKRLHRNVLAIALANKLARIAWSVLAHGRSFEASKLAEVAAKSG

SEQ ID NO: 331094 - protein, 411 aa, unidentified
MDKVYDKCCGIDLHKKLIVACFKQGNRQEIRDFGATTRELLEMADWLKEGGCEMVAMESTASYWKPLYNILETCELKAMVVNAQHMKAVPGRKTDVKDAEWIADLLQHGLLTASYIPDKDQRELRELVRYRKSLVGERARELNRLQKMLEGANIKISGTIRDINGKSARNILEHLLSGKQIDSAEYDILYEKKVIAHNLKATKEQIIDDLNGVMSALQKKMMRIILNHLDELNAHIRELDDDIDNFMKPEEKEAAKVIQDIPGIGNTSAQAIISVIGADMSRFPTDAHIASWAGLCPGNNKSANKRKSGKTRKGNGLLRDTLIVCAHSAVKNKSSYFHAQFARISAHRGSKRAYVAVAHSMLVAIYHILKDGVVFRDLGAEYYNQFNRERKINAYLKKLKALGWEVPVVAA

SEQ ID NO: 331095 - protein, 388 aa, unidentified
MNKIIYIGMDVHSTNFTLCSFEPGYGFEADKIFGQTQIKEDIFNSTVKYINKLKSMRPDVDVVCGYEAWCLGYNLHRKLKAKEIESVILAPTTMAVSRNCSKKKNDYRDAITIAKCLASSAYKAVYIPDDKDEDVRDFIRMRDDHKTALKQIKQQLNAFCLRHGHHYDKTKWTGLHLNWLRKLELSKLQRETVEEYLVTYETLTSKITALDIRIEDIASEERYAEKVNKLKCIKGIKTHTALSFVCEIGDFNRFKSADKFAGFIGLVPGECSSGNTERMLGITKAGNRHLRRLVVEISNTYRRGTVGRKSAALKERQKDMPKDVVAYADKATNRCQRKYQRMMFKGKNSNQAVAAVARELCCFIWGMMTGHHSRTAQAEASVYRSELD

SEQ ID NO: 331096 - protein, 349 aa, unidentified
MASFNYHLGIDLHKQFAYWTLINNAREVLFQGKVDTEKNATLKALNNLPVPAQETQAAVEPVEQWGWYSEILEQKGYTIFLTDSLKAKLIAGSRLKNDKVDSLALAELLRSDFLPKAFLAPRKDRELREFLRWRVFYVRVSTRVKNRIHGILAKHGLRAPKTDLFGKKGMDWLKQQELRPVFKRELDSLLKAYEVIKDEVRILTNEAKRMVSKDEELKILQSIPGIGPLGALTIKSEVGDFSRFARPEKLASYAGLVSSSYSSGGKLRFGKITKQGSRYLRWIMVEATQRPSPKLGKLYSFYQKIKTKKGNKIARVALARKLLCLCWVLANKKEHFSVLPCRGSGSVTQ

SEQ ID NO: 331097 - protein, 345 aa, unidentified
MSIVGGLDIHRRQLTFDYLDTVTGQVARGQVAPADREHLRAWLARFTGRDDVAFAIEGCTGWRYVAAELAAAGAGVHLAEPAGTALARGRKRHAKTDKTDSRHLRGLLAEGRLPECWIPPEQVLEARALLESCHDLRREHTAWLQRIHSVFFHHGAPAMGEGILSSIGGPAAARTTAAAHLSPAGQQQVTIALAMMTCLEDQMHGLRHQLLDTARHLKGPRVLAAQIYGVGLLTALALTCWPGGAGRFSSARKAVRFAGLDITVSSSDRKGPPGRLSRQGPPVLRWALYEAGKAHARASAPDHACYAQVKDRKTGKRAALSEARKIIRRACHILNDLGDDAFAAV

SEQ ID NO: 331098 - protein, 348 aa, unidentified
MRGAVQMQITTIGLDIAKNVFQVHGIDAAEKVVVRKQLRRSQLLAFFKALPPCLVGMEACATAHYWARELTKLGHQVRLMPAKDVKAYVKRNKNDAADAEAICEAVRRPTMRFVQIKSPEQQGRLMQHRARDLLIRQRTQVINGLRAHLAELGITAAQGNAGLKELLAIIASDEDARLPADAHAVLIVLAAELQAMQTLITSIEKRIMAQHRSSEESKRLETIPGIGVVGATAITATVTDPNIFRSGRDFAAWIGLVPRQDSTGGKQKLGPISKQGDRYLRRILVVGAIAVLRRARQQPEKYPWLTQLLARKPFRVVAVALANKMARIAWALLAKGGTYRAPALAAAA

SEQ ID NO: 331099 - protein, 335 aa, unidentified
MFYSGIDLHRDNCYITTVDDTGNVVKQQRVPNSPPLVLDYFTTLGAEHKTVVESTTGWYWLNDLLESAQIPMVLAHAKYLKAISYAKVKTDKVDSHTLATLLRLNLIPTAHKISPELRGLRDTMRMRLRLVQQRSACYRRDDSIIAKFNAPENVPEQYRLQAAAIDRVAQSLTEQILALEKSLHPFLIPNTDIQHLLNIPGIGKLSAFTIYLEIDGIERFESEKQFFSYCRLVPAADNSNRRMHHHSSKDGNKYLKIAFSDAAVHAIQYYPEYKAFYNKMVRRGNTAIARTIVAKELAKIVYHILKNNEPYRGFKGLPMSRQKSLQWPRLPSPDA

SEQ ID NO: 331100 - protein, 377 aa, unidentified
MGDYSDAFVGFDTSKLRNAVAIVEAGRGGEVRFFGEIENTPAATAKLVLKLSAKYKRLTFCYEAGPTGYGLYRQIRDLGFECVVVAPSLIPKRPGDKVKTNRRDALSLAKLLRADELTPVWVPDGGHEAMRDLTRARETAMLDLRTKRQHVSAFLLRLGRPYPEGRKTWTKAHVSWIASQKLEHPQQRLVLEEMMLAIRQAQERLARLEQAVAAAVPEWSLAPVVTALMAMRGIDLISATTLLAEIGDLSRFQTPTELMAYLGLVPSENSTGDTVKRGPITKAGNRRARRMLVECSWSYQHPPRVGQAKQPKVDAALPAVREIAWKAQCRLYRRYRTLIRKGKRKTVAIVAIARELAGFIWAVARAVTTAPVAPALA

SEQ ID NO: 331101 - protein, 403 aa, unidentified
MTYNVVFGIDVSSKSSTVSVLIKRNEFKHFTIANDLVGFNELLEQLQCYKHPVVIFEATGVYSLPLQSFLDHHNYDYTRINPLSAKKLMDNNLRHLKTDRTDAHNLAKIQFDVPQPLTPKQDYRYHEMQNASRFYEELTRDLVKYKNRLHRALQSTFPQIEQISSSRSGEVYWHIVDLFPHAKFVLDSSYDQIASQLVKIKGIGASKANQVACSLQSLAQRTWYYDDCDSITVELIKYCIEHLLQIEQRRKHILAYIKQIAPNPKDVQIYLSVPGIGKKTALRIYAELGDLRRFNNANQVDAFIGIDPGESQSGNTDKHLPITKHGNAIARKIMYRIITQMESAKKTKPCHITDYYEHKKQLSQTKGHKKAAIASMHKLIRTIYALIINDQSYDYHKALRNQR

SEQ ID NO: 331102 - protein, 334 aa, unidentified
MNYTHYVGIDISKLTIDVVLFSGEDHSNYQHQVFSNDYTGFDKMEKWIRSLTDTALEKILFCCEHTGLYALPICRWMVAKDAKLWVENALQIKRSIGLKRGKSDKVDAYAIADYGFSKQYQARLYKQPDANITQLKHLLTQREHLVRHQASFKNSISEFKGFDEQNAAFCIEQNKELIKYYTQKIKDVDEQLAAIVMKDSDLKKKFDLVCSVHGIGKQTALFILIHTKAFTEFDDYRKFACYCGIAPFPYGSGTSIRGRDRISNLANKKIKTLLTMCCLNVLKGENEFQNYYRRKKAEGKSFLSILNAIKNKLISRIFAVIRKGVPYQMELNPA

SEQ ID NO: 331103 - protein, 402 aa, unidentified
MAAGQLWAGVDVGNEHHWVAVVDSACTMVLSRKLANDEQQISKLVAEVDRLGAQVSWTVDLTTVYATLLLAVLAEAGKSVRYLSGRSVWQASVIYRGGEAKTDAKDARVIADQSRMRGDDLPVLHPDDDLVTELRMLTAHRADLVADRTRTINRLRQQLVAVCPALERAAQPAQDRGWVALLARYQRPKAIRHSGITRLTRVLADAGVRNAPMIAQAAVTAAKTQTVRLPGEEVAAALVAQLAQGVIALDERIKQIDADIEDRFRRHPLAEVITSLPGIGFRLGAEFLAAVGDPALINSADQLAAWAGLAPVPKDSGKRTGRMHTPQRYSRRLRRVMYMSALTAIRCDPHARSYYQRKRNEGKRAVPATICLARRRTNVLYALIRDNRTWQPDSPPITTTAA

SEQ ID NO: 331104 - protein, 312 aa, unidentified
MGTHWIGIDVAKPWLDVARRDGEDVVRYANTEASIAELLTRLRTEEPAGIVLEATGGYEQAVVNRLWDAGLPVAVINPERARAFARALGARAKTDALDARMLAQFGSRMQPEPRPQPDETRTALDDLVTRRRQLQEMLTAEQLRRERAPARIRPGIEAHLDWLRQQLADLEREIAEVIAADRVLSAKARALRSIPGIGPVVAATLLGGVPELGTLSRQEVAALVGVAPINRDSGGRTGVRAIAGGRRAIRAPLYMAALAASRRGPFKPVYDRLIAAGKPPKVALVALMRKLVVVANALLRDGTTWSAQQTPV

SEQ ID NO: 331105 - protein, 323 aa, unidentified
MDSIVNGKDNLMDSIVIGIDVSKDRLDVATPDGVVDYPNAPHGHQQLIKLLAKWSLEAILVEATGGYERAVVAELAAVDLPVVVINPRQVRDFARATGRLAKTDRIDAQVLAAFGQAVRPERRPLPDEKQRELQQQLARRRQLVEMLTAENNRLQQATDKLVCKTIKAVCTTLRKQLDHLDEQLQRLIEATPAWRAKEDLLRSVPGVGPQTALALLAELPELGNCSRQQIAALVGVAPINQDSGKHRGVRTIWGGRASVRSALYMATLVATRWNPVIRLYYQHLQSLGKRKKVALVACMRKLLCILNAIFRDQQPWKNPLPNS

SEQ ID NO: 331106 - protein, 355 aa, unidentified
MTSAKYIGLDVHKESISIAVLNSAGKVMMECVIETKASVILQFLNGLSGDLQVTFEEGTAAAWLYDLLKPHVTRLVVCNPRRNALLKVGNKSDRIDAQKLAELLRGNQLQPVYHGEHGLRTLKELVRSYLTVSKDLARVMTRVKALYRSWGIPCSGTQVYSRLYRVSWLSKISEPGVRLRAAFYFQQLDALRTLRQEVRQELLAESKKHKVWKRLCGIPSIGPIRAAVARGILQTPHRFRTKRQLWSISGFAIETRSSADHRNVNGQLRKVKKRVSIRGLNQNHNHDLKNLFKGAAVLASTKPGPFQEFYEALLARGMRPEMARLTLARKIATIVLIVWKRGVNFDAQYLKPQTV

SEQ ID NO: 331107 - protein, 480 aa, unidentified
MSLKRDASSEKNQTVRYTKRLEIVHPHCAGLDIHKEKIWVCTSPFHDGVAPEVSTFATDTGSLEKLAAYLRERKITTVALESTGVYWLPTFLTLRQKNLNPILVNPRDVKNIKGRPKSDRADCVWICRLHSYGFLRASFVPPDVVLDLRSFYYAHEKLTVDSASMLQRMNDELVKMNIRVDLILTDLSGASGIRLIEAILGGECSPERLYQLLDEQIMKKGKDVILPYLHGDYREGNLAILRTWYDLYLGIRKEISRINQKIYELLQSFPKKADAKDLPRVKKNYREDKLDFPYELRPIFFEIYGVDLTQLPGIGAGVLLALVCMVGTDLSPWPSAKHFVSWLGLAPINKESAGYRKSGSTQRINNLLSNAFKMAAMAAKRTTTDIGRTARHLAGRILPKKAKVATARKLAELVYNILQNGMELKVKTEEEYEQRRKQRDIQFFVKGLFKYIINGQLLPEVEKVYQEHCQGIKAASLTNA

SEQ ID NO: 331108 - protein, 386 aa, unidentified
MKQYVGLDISMEETSICVLDQTGGVTFEGCAPTNPEAIAKLLRRHAGNAERIVFETGSLSNWLWHQLKALGFPVLCLDARHAHAALSMRINKSDQNDAKGLAEMARMGWYREAAVKGAESWKTRSMLAARTKLVSLRRDIDNQMRGLCRGLGIVLGKAGSTNLARKVDAVLAEAPDLQDIFTPLLLAQSCLTEQIEKFDRQLMAVAKGDQTVRRMMTVPGVGPLTALSFVVTIDDPSRFKHSADVGAYLGLTPRRYQSGEMDRTGRISMRGNHQMRTYLFEAANVLLTVVRRGSALKRWGSKLAKRIGTKKARLPSLVKWLSSSMPSGPTAPSSKQRCAPHEAVLNRPRSALGGTSVPAGTKVWAISKSSLRALRTALLTSGCHTS

SEQ ID NO: 331109 - protein, 347 aa, unidentified
MSITMIGLDTAKSVFQVHGVNETGKVEIKRKLRRSELIGFFEKQEACTVVMEACGAAHHWARILSSLGHEVKLIAPEAVRPFVKKGKKNDPADAAALCTAASRPDMMFVPIKCIEQQGILALHSARSLLVKQQTMLANAMRGLATEFGLTVPKGIDRLEELLALVDADKAFPEKARQVFTGLFDQCRALAESIRVFEVEIVAHARHDDTARRLATIPGVGPITASLIAATVVDIGLFKSARHFAAWLGLVPRQYSTGGKTRLGRITKTGNREIRKLLVLGATSMVYRAPQWNSVVGVWTRGVLERRPVRLVTVALANKMARIAWALMTRKEVYRATGRVAAATEAAA

SEQ ID NO: 331110 - protein, 414 aa, unidentified
MNASTPRTTRKYSRFCGIDVAKNKHVACVIDRDAGIIVRAQSFANDAGGYQRILDRLKEIGGPSKVAIGMEATGHYWYSLHDFLVRHRYDVAVLNPIQTAKQVTKGIRKTQTDRIDAHHIAVLLKNGEQRPALIPGELGMTCRQLSRLHHTMVHQASRIKQLIWARLHPVWPEYEPLFGTPFCKTGRTLLNAAPTPQDILALPREDLLDLIRRTSRGHYGAAQADKVRQAAENSVGTHRGLPAARTGIRLLLAQLDALKPIREQLEGEIETLAGRLPDYLMTLPGASPINVVSLFGETNPIEAFGSPSQLIAFAGLDLVVSESGEYKAPRRHISKRGSPFLRHTLWAMALRACFQEGDLRDYWLRRKAQGLSHMESVTAVAIKLCPVVWRIMTDRRDYLPQRPVRPRLTAGMKP

SEQ ID NO: 331111 - protein, 320 aa, unidentified
MSAYEFVGVDIAKDKFDSALEINNRCKHAVFSNNEQGYKAFLKWLEQYTISPWVCMEATGHYSEGLADFLAEKGIRVSVVNPFQIKSFAKASLARNKNDRIDAKIIAQFGQRMEPRIYQSSSAEQKEIKELTKVLDMLKVQVIQLTNQLHSIRGRAAQKSLKKMIEKLEQEIKRIQQQIDELINNNQQLKEKFELLLSIKGIGKLTAYHVLARIPDIQCFQTAKQFAAYMGITPKQQQSGSLIGKTTISRLGDSRLRKALYMAALVAKRYNKSLLPFINKLQTKGKTPKTIICAVMRKLAHIIFGVLKNKQPFNENVACF

SEQ ID NO: 331112 - protein, 369 aa, unidentified
MGEYSEAFVAFDVAKKKHAVAIAEGGRTGDVRFVGEIENSPAAIERTIKKLGKKYDRLHVCFEAGPTGYGLCRQVRDLGHDCMVVAPALIPKRPGERVKTNRRDAVTLARLHRAGELSGVWVPDVVHEAVRDLVRAREAAADDLRRKRQQLLSFLLRHGRIYENGGHWTLAHRRWLAHQSFEHTAQQIVFQEKIDAIEDAAQRLHRLDEQLRAVVPTWSMARVVEAYQAMRGASFLVAVIFAAEIGDVRRFDTPPQLMAFLGLVPGERSTGDTVRRSSLTLAGNRRARRALVEAAWTYRYPARVSETLRARLEGLPKAVRDIAWKGQVRLCARYRRLSAAGKKPPVVVAAIAREMAAFLWAIGREVAPS

SEQ ID NO: 331113 - protein, 379 aa, unidentified
MSKIRFVGLDVHADTIAVAIAEPDGEVRPLGIIPNRLDSIRKLVAKLGPAKQLKVCYEAGPTGYVLYWQLTALGVACEVVAPSLVPVKAGDRVKTDRRDAAKLARSYRAGDLTPVWVPDADHEALRDLVRAREDARQDQHRARHRLSKFLLRHGRRPPENVKKHWTLKYMTWIQEQVHFEQAALEVTLLDYVHEVEHMAGRIQRLETAITEAVQKAPPEMRAVIEALQALRGVAQLTAVTVVAELGSLSRFHNPRQLMGYSGLVSSEYSSGNRIQRGTITKTGNAHLRRVIIESAWAYQHRPWIGGFLLKRQQGLNLSPEVKEIAWKAQWRLHTRYKKFAAAGKKKPQIVTAVGRELLGFIWAIAVQTEAQFRVQSNAA

SEQ ID NO: 331114 - protein, 351 aa, unidentified
MSRSSSSSAIATLGIDLGKNSFHLVGQDKRGSIVLRIKLSRAQLTQRLATIPPCLIGMEACAGAHHIRRLLQALGHEVRLIPAQYVKPFLKGHKNDYRDAEAIAEAVQRPTMSFVAIKTPDQMDLLALHRVRSRLVSQRTGVTNQIRGFLLERGITVRQGLAPLRQALPGILASSSDALSLRIVHLIADLAEDWRQLDERIAHVSAEIEALAAQDEHCRRLMSVPGVGPIISSAVVAAIGTGAGFKQGRDFGAWLGLVPKQESTGDRTILGKISKRGNKYLRTLFVPAAHIVLVRRPHGAKLGLWPWIEAAGRRLHRNMLVITLANKLARIAWAVLARGHAYQPRSASHAV

SEQ ID NO: 331115 - protein, 432 aa, unidentified
MRLRERAFYISITRAPRHHRQECVVEVLHARCAGLDVHKDTVVACIRIASKGTATQDVRTFQTTTSQLLALSDWLSEQEVTHVAMEATGVYWKPVWHILEESFELVLANAAHIKNVPGRKTDVNDAMWISDLLAHGLIRGSFVPEASIHELRALTRTRKQLVREKAQHMQRIQKTLEDANIKLASVITDILGMTGRGILEALIRGETDPEKLVDRRRGRLKATRAELVEALRGRVTRNHRFLLELHLNQIDALDKSIESVEKEVGELLEPFRAAAELLKTIPGVSDTVADVIIAEIGVDMLRFPTAGHLVSWAGLCPGNDESAGKRRSTRVRKGSPWLKTTLVQAAWAGSRTRGTYLRTQFLRLKTRRGPKKAIMAVAASMLTAIYYMLRDSVPYRDLGPDYFDRMDTTKVTTRLVRRLESLGFHVELKEAS

SEQ ID NO: 331116 - protein, 356 aa, unidentified
MSRDIKYIGMDVHKEATVIAVLNGSGKLVMESIVETKASSILQFIHGLRGELHVTWEEGTWAAWLYDLLKPHVQQVLVCDPRRNALLKEGNKSDKIDARKLADLLRTGMLRPVYHGEHGLRTLRELGRSYRTISQDLNRVMNRIKALYRGWSIPCAGTQVYAPRYREEWLHKIEQAGVRRRAELLYQQLDGLQGLRRTLRPELLAETRKHKAAKLLRQIPCIGPIRAARLIALMQTPHRFRSKRQLWTYSGLGIETRDSAQYRFVRGELQRTKKPQQIRGLNQNHNHEMKEIFKGAATRASCGVGPLRDFYVALLAKGMKPEMARLTLARKIAAIALTLWKKGERFDAEQLKPQAA

SEQ ID NO: 331117 - protein, 430 aa, unidentified
MKSNTQNAKIEAITEKTLVLGIDVGSETHYARAFDYRGIEYSKKPFKFSNTEAGFVTLKEWILDLKERHEKDKVVPGMEPTGHYWFNLGKFLQDNEMKPVLVNPHHVKKSKELDDNNPTKNDRKDPKVIAGLVREGRYMIPYLPDGVYADLRTASNIRFQLQAELTRIQNRISRWFNVYFPEYKTVYGKPDAKSGMLILKAAPLPEDILTLGIDGVNQIWRDAKLRAVGKARAKILIEAAEHSVGSKEGAVSARMEIRMLLEDYESRNICLQEVMTLIEGLVKQIPMAEKLLEIKGVGIKTVSGFLAEVGDISRFNTPKELQKLAGLALVESSSGKHKGETTISRRGRKRLRYLLFEVAMSLVAKNPEFRELHNYYTTRRLNPLKKMQSLMAIAAKLIRVFYAMLTKGVDYDPKKMASDIKRPAVYLQAA

SEQ ID NO: 331118 - protein, 480 aa, unidentified
MLFVGDDWAEDHHDLEIEDEAGRRLVRARLPEGLVGITRLHTLLAEHAPADWVELPAEQVAAQGDREWLRSPCDSIAHWGCPPGLSGVPWLLIEMCAWSLVTDGSAGCPTGAVLGATAPGSPRSGEDAMPTAPPTVWARVDVGKTHDWVEVVDATGATLLSRRVSNDQTEIDAVIADVVVLAEAVLWAVDIVGTPSALLLALLAAAQQVRYASGRVVSVMSSAFTGEGKTDAKDAHVIAETARLRRDLSVVDQVTDLARNLAVLTAHRADLVADRVRGINRLRDLMTSAFPALEREFGYASCKGALVLVSGYATPDRLRRVGRARLAAWLRARHVRSYAQLADRAVTAAGTQHVVLPGQDTSAGIVSELASSVLALDVRIKAVDAQIAVTFELHPQAAVIVSMPGFGPFLGASLLAAAGDLRDFPSAGHLAAAAGLVPVPNDSGRRSGNLHKPRCYSPPLRHVFYLSAQTATMRSGPNRD

SEQ ID NO: 331119 - protein, 430 aa, unidentified
MRTVAELEPIAYVGVDWASEEHAVCVLDTAGRKTSSFTVAHGREGFDHLAKKLAALGPAGQVPVAIERPDGRLVDALLEGGHPVVPVSPNAIKAWRESEVVSGAKDDPGDAEVIAEYLRLRSHKLTVLAPFSEETKALRAVIRARDDLVEQRVAAHNHLEACLDGFWPGAKAIFADVTSEIALAFLERYPTPGSARSLGERRLQAFLTKHGYSGRRPAAELLERLRSAPEGIADGPEAEARRDAVLGYVRVLRALNASIKALDRSVGAHLGEHPDAEIFTSLPRSGRINAAQMLAQWGDCRAAYDGPEAVAALAGAAPVTKRSGKHTAVHFRWACDKRFRQAMATFADNSRHSSPWAAAVYQAAIARGCDPPTRSGSWPGPGSGSCGAAGKTESPTTRPSMGPPRGSSAHRKEVRPKNRLPRVDTEGVIR

SEQ ID NO: 331120 - protein, 352 aa, unidentified
MRFYTEKHRYYCGIDLHAKTMYICIVDADDKVLFHENAPVNADILLDIIEPYLPDVVICVECIFTWYWIADFCEERDIPFVLGHALYMKAIHGSKTKSDKIDSLKIAKLLHAGMLPMAYVYPSGLRSTRDLLRRRMHFTRKRGELLAHIQNTKSQYNLPGFTKSISYKSNRKTIVSHFDDASVQEMIRCDVSLIDHYDGLLKHVELYILKHAKAHRPHYLYLLQSIPGVGKILALVMLYEIHDISRFEKVQHFTSYSRLIRPTKESAGKIKGGGGRKMGNAYLKWAFSEAVLLLIRDSSDVKELHNKLKNRHGKARALAILSHKLGRAVFYMLKNNQAFDIKTFVNDKTKPE

SEQ ID NO: 331121 - protein, 353 aa, unidentified
MNSLTDLREVVDVVIGVDTHVHTHSAAVVDAATGGVLDEITVDATAEGYAELVEFANNHAMLRAWAIEGTGGHGAGLSRHLLEMSEIVIELDRPKRAARRNGAKSDPLDAIRAAREAMARPRLGTPRSGGERQALSVLLAARRSAINASTEAQQQVFSLVIAAPEPIRLRFRGQKLAAMLNTAANLRVHASWDTETTSTVVALRTLARRAHAMLKEARELQKAIVAIIRNWRPDLLEEFGVGPIVAATVLCAWSHPGRIHSESAFAMLAGVAPIPANSGQVTTRYRLNRYGDRQLNNALHTVVQSRIQYQPATRDYVARRTAEGKTGREIKRCLARYVARDLYRLLENTATAA

SEQ ID NO: 331122 - protein, 348 aa, unidentified
MQSTANLPVIGLDLAKSVFQLHIVDIQTGEIQRRQIKRAKLTEFFAKCQRSLVAMEACGTAHHWARVISSLGHQVKLLPAQHIKAFLLRDKTDAMDAQAIWVAAQQPHLKPVPVKTERQQTCMALHGMRRQLMKMRVMQTNALRGMLAEFGIALPVGHSQLLKAIQGELAKAQQADQLTADLVLSVQEQLKRIDALQEDIDHLGQRLRAMIREDRQMQAIQQIPGVGDLTASALVAAVGDFSTFKSGHQFASWAGLTPRQVGTGGKTQQLGISKRGDTYLRTLLIAGARAVIARADKSSWITRLLARRHYNVVVVALANKMARTVWAVLAKGTVFEQVKWNPIDPVAV

SEQ ID NO: 331123 - protein, 383 aa, unidentified
MKAVCGLDVHKDSVYLCILSEFGELIEKVFGVLTYQLEEMRDLMLHHHVVEVSMESTSVYWIPIWRVLSPHFKLNLANPYFIKQLPGRKSDVKDAQWIAECTMKELIRGSFVPPETIQQLRQYDRRIFDLNEEIVRKLSKLDAVLQRCNIRLSNYVSNVDSKSYKAVVRAISQGFTAPEELVKLIHGRIINHHGMDVITASLKGVVSLAEIDMISQLRDELDMAEAHKEKCQARMLEICEREFPEELKRLQTIPGIKERAATSLIAEIGTDMNKFETANHLASWSGLKPRNDESNKKIKSRSITHGNVYLRKTIIECAWAASRTKDCFFSRFSYHQTQVRKKNKMKVLVAVARKMLIAVWHVLHDNTIYIDFTTDRKTSRTKG

SEQ ID NO: 331124 - protein, 408 aa, unidentified
MNAVGIDVSKGKSMVAALRPMGEVALLPQEFLHTEVGLEQMAYAIIALGEDTRVIMEATGRYHEPVAAALHEYGIYVCVLNPLFIKQSGGGSIRKVKTDKADAMKIAKYGLDNWVDLREYTPMDTVRQQLKLCSRQYNLYMKTVVSLQNNLISLTDKTFPGVNELFSSPERADGHQKWVDFVMTFWHCDCICRVSERAFTERYQKWCKRKGYHFSAEKALDVYTGSCGHFTTLPKNDNTKLLITTAAQQLLAGKMTLAALRAEMTRLAKQLPEYDTVRAMYGVGETTAAQLMAEIGDVRRFPRRSSIVGFAGVDPAVNQSGKHSAKSVPTTKRGSPHLRKTLYQIVCTYLKKSPVDEPVYQFLDKKRAEGKPYFVYMTAAQNKFLRIYYARVKESLEAFDARQDTVQN

SEQ ID NO: 331125 - protein, 339 aa, unidentified
MSKLLKNFVGIDISKTYFDAALVKVEDSSQIIHQQFSQNSEGFLKMILWLKQQDVTAGEETLFCMEYTGLYNNGLVNYLVQKKAQLWVEMPLRIKKAGGFERGSDDKTAAIKIAWYALRYHDQMKLWQPVDSNIEKIKSLIVQRDRIINAVTQLSVPINELKECSCIAEAKTMEKLQRPALTALQKTKAAIEALIIKTVQADEQINKKVQQVQSINGIGPVTAVAMLVYTKGFSSFTNAKELACYCGIVPFKKISGTSVRYKPSVSPYANKKLKKLLHLCALSAIKNDAELKAYFERKVAEGKNKMCVINAVRNKLVHRVFAVIRDNRNFEANYVRKCA

SEQ ID NO: 331126 - protein, 318 aa, unidentified
MSDSVFVGIDVSSQTLEVASSAQAKTWQLANDATGIEQLAVELAGLKPALVVLEATGGYEFEAACALQAAGLAVAVVNPRTARDFARAMGALAKTDALDARMLAAFARVLHQHPEHERFVKPLADAELQRLQALVLRRRQLVQMITSERQRMRVSHAAARPSIERVIEFLKTELADCDADVAAHVQRHHAELATALASVPGIGAASVAVLLAELPELGKLDRRRVAALVGVAPLNRDSGQMRGQRTIWGGRADVRRTLYMATLTAVRHNPILKTHYERLLAVGKRKKVALVACMRKLLTMLNAIAKHGSNWDPTLHHA

SEQ ID NO: 331127 - protein, 392 aa, unidentified
MKNRYGSVAYGGMDVHYKFSNVTLRDAGGAVVRRGRLDHRDREALRRQLAQWPRGMVMVLEASFGWPWLSDEVRGAGLEPHLSNCYKVDQMRKARGLAKTNKKDADLVSLLPGEQTRWWEVWLAPPAVRDHRDWLRHRADLVQMQTATKNRIHAIFHRQGIFYEETKDLFGGRGRGFLMALCQDGRHAGGVLPAGALEALRGQMRLLMHLRAELATVAGHLRGQLKRDPLIRLLDSIPGFGLILSHMVAAEIGAIGRFRNHKALASYACLAPRCHDTGEADPRRAPLGRHLGTRGNRTLKWVFIEAAHGAVKRGGKWGAMFNRYTDGGKTNRGRGYIKVARELVKVVFVVWSKQVAYTETPPPRPGGKQARRGRKHSRPGTGQPSHAMVPAK

SEQ ID NO: 331128 - protein, 478 aa, unidentified
MEQQDGQPGPRRLVGIDLGIASRHSVRVLEADGQLVCRSSCVATVESLAAVERAALAGAPAGTRLAVVFEPTGPAWLPIAVFFSRRGHAVHRVSSAKAADLRRFLRRHAKSNGIDAETLARMPLADPGGLQQLELPGEAAAALDRRVRACARLTRAAAGHKTRIKDLVRQLMPQTPLTGDLGKADLAVLERYGDPRALLAAGEAELIRLITTTSGHQQGPQRAGQWRRAAAAAVELYDGHPAVPYQELAAEVATEVRLLRAIQAELAVHATAREAHYRQADPSQLARSLPGFAEISAPVLIAATGRPGRFRDGTKFKSYVGLAPRASETGETDRKGQPMSKAGPSLLRATFFRAADTARRQDPQLARIYYLQMTERGATHLKACCVVAGHLAERAWAVLNRSTPYVICDTNGNPVTPAEAKKIIAERWTVPEEIRKRRRSRKIAGKAPQAALTGPDRRGDPPRPRSSRPRGKTVKPAT

SEQ ID NO: 331129 - protein, 416 aa, unidentified
MNAAGIDVSSSKSTVAVLRPFGEVVKLPFDVRHSVEELASLAKQLKSIEGETRVVMEHTGRYYESIAKVLHEAGLYVSAVNPLLIKEYGNNSLRKVKTDKADAMKIAKYALDNWSELRDYTPMDTIRYDLKTMNRQFQLAIKQKTATANNLIALQEQSFPGIRKLFDSPVRSDGTQKWVDFTHDFWHTDCVRSGSLNAFTERYRKWCKRNRYQFSTEKAAEVYALAKSAVVLVQKTSVTKTLVQAAADQLTAISRSVETYRSELNKLASQLPEYSVVMEMYGVGESLGPQLMAEIGDVRRFERKQSLVAFAGIDPAPSESGDYCSCSNRTTKHGSSYLRRTLFNIMKVHLQRAPADEPVFQFMDKKRAEGKPYYVYMIAAGNKFLRRYYGKVMAYFSSLEDLPPVDMDSTGLHHTK

SEQ ID NO: 331130 - protein, 339 aa, unidentified
MGLYTGFDLHSTNTFVGIINENGERLWKKKLRNDPSLISETLRPLKKDIEGIVVESTYNWYWLVDLMMEEGYRVHLANPSRVQQYSGLKHGDDEDDAFWLAEMLRLKILPEGFIYPKEQRPLRDLLRKRGHLVRLRTSLILGLQNILARNLGTKMNTHHLKSLRTDHVTPLLMGNDDLSLAGRVSKEAVDSLTRQIQAIEVAVERKIDIKKPYDLLLSLPGVGRVLGLTIMMETGPIDRFKDVGNYVSYCRKVPAARFSNDKKKGTNNRKNGNKYLSWAYGEAAELARRLDSEAKVYYDRKRRRTNAPIAHSALAHKLARAAYYIMRDEVPFKPEKAFA

SEQ ID NO: 331131 - protein, 382 aa, unidentified
MDLRLGIDIACRTAHQASLADHTGRLLWRGHRFHTITAELDRLWQRLPEGTDPTQVMVIMEPTRNAWVPLAAWFRRRGACVILVPPERSADLRAYYHKHTKTDRLDATLLARLPLLHPDGLHPEHGLGPADPLRRETKLRATLVKRRTTTLARLDALLELLGPGWLSALGADLANKTPLRLLAAGYADPHTLKRLGKPRLARFIYRHSRGAWGDAHAEALLAAATQTLSLWDGELDYAELADDIAVEARLALHLTQEIKELDERIGVLLVKLDPDGIITSAPGVAQITGAQILGRLGDPNRFDSLAGVRAFSGLVPSLTASGVTGKHGGPTKAGDAVLREALFIAADHARRLDPTLAARYHRLMIQVGKHTTRRCVTSPRRY

SEQ ID NO: 331132 - protein, 484 aa, unidentified
MSSEEKQPVEPGKQKTAVGKSKRRRRKGMTLEDRPLLEANAAGIDIGAREIFVAVPADRDENPVRVFPTFTADLDEMARWLVSCGVTTVAMESTGVYWIPLYDVLEQHGVRPCLVNARNMKNVPGRRTDWHECQWLQFLHSVGLLRAAFRPDGDVSAVRSLMRHRTDLVQVAAQHIQHMQKSLTQMNLQIHHVISEITGVTGLAIVDAILAGERDPVVLAKLRDHRIHASEEIVQKSLVGNWRREHLFTLKQSRQIYQQYQESITACDEEIEKLVVAFEPRVDPSEHPLPPDRKAKQRKRKKRGVIPGVNPKTGFDMRTEAYKLFGVDVTQIPGLMMMALVLFSEIGRDMSKWSTADHFASWLGLCPDNDISGGKVLWKGMRGTRNRAGQLFRMAAFGLHHDLTPMGDHLRRMKSKIGPAAAQTATAHKLAIIFYTMVKNQVEYDASIWARKDAEREKRFEAKLRRQAQAMGYKLVRSDENIAA

SEQ ID NO: 331133 - protein, 348 aa, unidentified
MTIVSLEAGRTVVGGVDTHLDVHVAAALDPIGGVLGVESFVANPRGYKAMLEWMGAFGTVSQVGVEGTGAYGAGLGRFLRRSGIAVIEVDRSNRQVRRTQGKSDPVDAVEAARAVLSGRATGAPKSRDGNVEAIRALLVAKRSAREGRLRALHQMRQLSYTAPDQLRCRLKGLPIKAFTAEAAALRPRAGGDPVVYATKVSLSSLGRRVLALEDETAGIDELLGELVTATAPSMLELFGVGIDTAASLLVAAGDNPERLRSEAAWAHLCGVAPIEASSGKVTRHRLDRGGDRHANQALWRIVMTRISSDPRSRAYMERRTKEGRSKREVIRILKRYVAREVFKQLPRA

SEQ ID NO: 331134 - protein, 417 aa, unidentified
MEELPFRVFVGVDWGDELHQVCSVLGGKPQQRRFEHSGKGIAALVSWLMELCERQPATVAIAIERPHGVLIDALLEHGFAVFSINPKQLDRFRDRFSVAGAKDDSRDALVLASSLRTDPQAFRRVEPEDPLIIQLREISRAHRNLERDHRRLCNQLRDQLNRFFPQVLELSNAADEPWVWSLLERFPSPEKVRHAHQSSLERILREHRISRVTALEALEILKSPPLPVAEGVVEAATQHIALLLPRLRLVNDQRRQCGQHMDRLVKKLGETEDAQPGTKREHRDVEILLSQPGVGGIVAATVLAEAHQPLVQRNYHVLRTCGGIAPVTRQSGKTRNVTMRYACNHRLRQAFHWWGNAVCQCDPKAHALYLEHRRMNHSHARALRAVMDRRLNILMACLRSGHLYERDHAPKKGLDNT

SEQ ID NO: 331135 - protein, 369 aa, unidentified
MGNRNMFVGLDVHKETIDVSIAEGDRRGEVRHYGVIASDLEPLDKVVRALRAPDRTLHFVYEAGPCGFGIYRHLTHRGEECVVVSPSMIPKRSGDRVKTDRRDSLALARLHRAGELRAIYVPNDADEAMRDLVRARADAVVMSIQAKYRLKAFLLRQGRRYPGRDGWTLAYRRWLTDLRFPSPPQHIALHEYRDTIDETERRLERLTEQLRQLAPTWRWAPVVAALQALRGVSFITAVALVAELGDLRRFRHPRELMAYLGLVPSEHSSGPSVRRGAITKAGNPHVRRLLAEAAWAYQGIPRIGRVHAYRQEALPKVVCDIAWHAQLRLTTRFRRLVARGKAKPKVATAIARELTGFIWAIAREVSPAQ

SEQ ID NO: 331136 - protein, 425 aa, unidentified
MKHTQNEKIMQIKVETLVVGIDIGKSTHYARAFDYRGVELGKLLRFANSAQGYAALDDWMRRIQQKNEKTEAIVGFEPTGHYWFTLGDHLQAEGHRLAIVNPYHVKCTRELDDNSPTKNDRKDPKTIAMLVKDGRFRDVYIPEDVYQELREAVWERERLQEQLGSLSNQVIRWLDIHFPEFSVVFKDWRGKAAIRTLKDFSTPAAVVAAGADGIVRAWKKDMKKASLKKAERIVAVAAESIGRKSGSNAAVASLRNLLTQYEMVQRQVQEIEELMQALLLQVPNAGNLLAIKGIGMVTAATIISEIGDIGRFKDPRQIIKLAGLALRENSSGKHKGKTTISKRGRRRLREALFRVMIAMLANNREFRSLHQRNLNRTENPMNKMQSIVALCGKLVRVLYALLTKGVEYDSHKLIADMGRSMMVAA

SEQ ID NO: 331137 - protein, 364 aa, unidentified
MNQFSTIIGIDLGDTFNYFHVVNAAGELVQEGRVRCNLDAMSTFFAQYETPSLVAIETGTHSRWVSRVGEANGHEVLVANARKVRAIYTNERKSDALDAKMLARIARMDPQLLSPISHRGGQAQTDLALLKAREVLVAQRTQLINHIRGVVKSMGARLPSCSAPSFHKKTVEHVPEELRPALAPLYEQLEDTTRRIREYERLCQQRAEEEYTETELLQSVPGVGPLTSLAFVLTLESPDRFKDSRNVPAYLGLVPRRDQSGERDPQLRISKAGDEFLRRLLVSCAHYILGPHGPDSELRQWGERIVARGGRFAKRRAVIAVARKLAVILHQMWKTGMLWEPFPHAPDEDKESVPEDAALAGVPV

SEQ ID NO: 331138 - protein, 315 aa, unidentified
MDKELYFGVDVSKKTLDLAYYDGETIDWKNAHIQVSNDDAGFKKIGSWVAKVGKDLDTFLFCMEYTGLYNQNFRLWLESKEYIYGMVEPRKMHRFEPDLDDDQRSLDRIKTDELDAFRIAIYCEQNHKKILRNPSKLPSPVYLKLKRLLVERKQNTKQSTLYKQQLHDICAYDTDLSVERKKLLLKSMKENQKAIDKEIDSYIQEDASISKNYELLTSIPGIGRIIALETIVLTENFTAISNPRKYACYIGIAPFKKESGTSVRKRTSVSKKGFSEAKADLSIAVLSAIRNNPSIRDYWIRYSLMRSAQYYDPVC

SEQ ID NO: 331139 - protein, 353 aa, unidentified
MTSLTDLREVVDVVIGVDTHVHTHSAAAVDARTGGVLGEVTVEATADGYTQLVAFAEEHAMLRAWAIEGTGGHGAGLARHLARRDELVVELDRPERARRRNGAKSDPLDAIRAAREALSRARLGTPRGGGDRQALSVLLAARRSAVEAGTDAQRQLFSLVIAAPEPVRARFRGLKLPAMLRTAAALRVHPSWDTETTVTVITLRSLARRARALSQEAAGHEKTILGIVRSWRPDLLEQPGIGPIVAATVLCAWSHPGRIHSEAAFAMLAGAAPIPANSGQVTTRHRLNRYGDRQLNRALNTIALSRIRYDQATREYVARRTTEGKTGREIKRCLKRYIAREIFRTLEHPPATT

SEQ ID NO: 331140 - protein, 341 aa, unidentified
MEHYAGIDVSLELSSVCVVDANGKIVREGKVASEPEPLIAWFGSLGFGLTRIGLEAGPLSQWLYAALKEVGLAVELLETRHVRKALEAMRVKTDRNDARGIAQLMRYGWSRPVHCKSLAAQEVRALLTARKLVQSKLLDVEMSVRGILRGFGLKVGRTTPKRFAGRVKELVAGHATLEVIAQALLSARDVLSCELNGLEKRVRRIARSDTRARLLMSTPGVGAIVALTYVAAVDDPTRFKSSKAVGAHFGLTPKKHQSGERDVTLGISKMGDASVRAMLYEAAHTVLTKPIKGAGLKSWAMKLAGRAGMKKAKVALARKLAVIMHRMWIDATPFNFAAAAV

SEQ ID NO: 331141 - protein, 342 aa, unidentified
MNQYAGIDVSLECSSVCVVDANGKILREARVASEPEALIAWFRSSGFGLERIGLEAGPLSQWLFAAMREAGLAVELLETRHVRKAFEAMPVKSDRNDARGIAQLIRLGWFRPVHCKSMSAQETRTLLTARKLVQSKLRDVENSLRGILRGFGLKVGKTTELKFAGRIEELVAGHPHLQVIAKALLAVRAVLRKEFAAFEKQVRKMARSDLRTRLLMSTPAVGPIVALTYASAIDDPSRFKSSKQAGAHFGLTPKKYQSGETDYTGRISKIGDSSVRTALYEAAHVMLTKPVKSCSQLKSWAMRIARRAGMSKAKVALARRLAVIMHRMLADGTPFNTAAAAA

SEQ ID NO: 331142 - protein, 321 aa, unidentified
MHKYNQIFGVDISKDVFDVMNSQGEHLQFENSSKGFNGLIKHLTKNDLIVMEATGYYHYCLAQYLYDLGYTVSVVNPLAVKRFIQMKLSKIKTDKSDALAICQYASSNEVPIYTSRDANQAECLQLMSLIEIYLKQSTALKNKLHGEKTLGIPSKTVYHSLNRSLKVIQKEIQLLEKKLLELVKEHQQKQLTLLKSIPGMGTKTSIILIVLTDGFTKFDNAKQLCSYAGTTPTIRMSGTSVRGKSRISKMGNQKLRNLLFLCAFSACKYNKACRELYERIVAKGKSKKLALIAVINKLIKQAFAVAKSGLPYDEKYVSNLS

SEQ ID NO: 331143 - protein, 372 aa, unidentified
MNYNTVYVGMDVHKESFTLCAYTIDAEKGSHFQRTEADYKNVLKYLEFLRTVYGNDANFICGYEAGCLGYTLYHQLIEHHVNCVILAPTTMLEQCSRRRIKTDRRDAEIIAKCLAQHNYSPVHIPTATDEETKEFLRMRDDHKLALKKVKQQILAFCLRHNYRYDGNSHWTAAHIKWLKSLKPEALYKEILDEYLLTYTTLSDKLERLDKRIEELASKDEYRESVKKLCCFIGIKTHTALSVLIEVGDFQRFASAQKFASYLGLVPGEDSSGDEQTRLGITKAGNRHVRMLLTEASQCYARGQIGFKSKELKSRQAGNSPQVIAYADKANERLRRRYYKMVLGKSKKHNVAKTAIARELACFMWGMMTEHIA

SEQ ID NO: 331144 - protein, 308 aa, unidentified
MPQTYIGCDLSKDRLDVFDPRVGHGTQHANSPTGIRALLRACGPGGTLIFEATSGCDQALLNALATAERPFVRLNPLHAWHFAQSLNLPKTDRVDARMLARFGAERQPAPHLPQDKARAELAELADRRDQLKRMETQEKNRLSKTVSPLIRADIRASLKALSIRIARFEAEIADHLAQSPGLATDAGLLRSVPGIGPVTATGLLARLPELGHLDRRAIASLAGLAPKARESGKFRGKRRIGQGRELVRRLLYMAALSLWRTPGPATTMLRRLQDAGKPAKVILIAMARKLLTIANAVLRDQKPFRTTP

SEQ ID NO: 331145 - protein, 397 aa, unidentified
MYIVGIDIAKRKHEAAVIDGEGTVIIKPFSFTNNCSGYNRLLAMLAKAKLPLDEVSFAMEATGHYWLALFTRLQKEGFRVQVINPVQTNSIRSFYIRQAKTDPRDALLIAEVIRFGHFSESTLHPENIYELRELCRGRHAIVSMQADVKRKVVALLDQVFPEYETAFTNMFSDTSMAILQTCPTPKELSEIPLEELCHLIEVSSHKRFRMAKAQELQELARNSFGFAMAGDVFSTMIRLYAKHLDFLKQQVREMDRKIAEIMEALDTPITTITGIGPTLGAYILSEIGDINRFSSSAKLAAYAGIDPTMRQSGEYNGVRNRMSKRGSPYLRHAIWLAASSAVLHDPALKLYFQKKRDEGKPYMASVGHACRKMVSIIYAVMRDNKAYTPYIPNEISA

SEQ ID NO: 331146 - protein, 414 aa, unidentified
MIEVVNKACGLDIHKLFFIATILSRSGEKQQQNLRRDDEGILALKNWVISEKCDVVACESTSDFWVPIYDSLIDHLPVIVGNARDMKAFTHKKTDKIDSKVIAQLALNNMIQPSRVFPKDHRDFRSYVRLRLTLVQKRTDLKNEAHSILASEMLNLKNVLTDIFGKNGRMILSGISSGKTVDQIIASLSPNVRTKSAQIREVLDKEISQSAAFRLQICLKVIKSLDDEIEALEKEIFNYAYINHKREMEILMSVPGIGELGAATLIAEIGNFTDFSSGDKLASWLGIVPNVYQSADKYYNGRITKGGSKTARWILIQIAQAAARTKNSKLKEFFNRKKKSIGHSKAIVALARKIATIIWHLITKDEMYEDEKGYKKGEIQKKKIVETEIFSVDERIKIISGIFAIMGKKGREST

SEQ ID NO: 331147 - protein, 372 aa, unidentified
MNATSIFVDNYQNQSPMTKLLQFADFTNKHIFVGIDVHKKDWNVSLFYEQDYVKTFTQPPCSDALEKLLRRDFPGGNYLCGYESGYSGFWIQRQLQSKGINCFVIHAADIPQTHKHKTAKTDAVDSRSIAQALSAGTVTSVYIPNPEIESHRSLLRYRDRLQRDIQRCKNRIRSLLFQYGYEIPSHFDKCWSDKFVQWLKSFDIDQIITRMTLNHMIEQLELLRGNFLKVNKNIRLLQKNDKYKPLMTLLTSIPGIGPLTALYLILEIADMKRFESFRDLNSFVGLYPMEYSSGEHEYKGNITIRHNKYLRKLLIEAAWIAIRHDPALLLVYEEWKNRMTGKRAIIKVARKLLSRVRYIWLNETLYVKGVVK

SEQ ID NO: 331148 - protein, 307 aa, unidentified
MYVGIDVAKDRLDVHVRPSGEAFAVARDGEGLAALTARLDELGPRLVVLEATGGFEVTVASALAAAKLPLAVVNPRQIRDFARATGKLAKTDALDAAAIAHFAEAIRPEPRPIPDEQARALGELVARRRQVVEMIGAETHRRRQMTQRKVLRRIDRHLAVLQKELSEIEQELDDSIRGTPAWRENDDLLKSVPGIGDATARTLLAELPELGTIDRKRIAALVGVAPLNRDSGTMRGRRTTWGGRATVRTALYMAALVASRHNPVIAVFYRRLRAAGKPAKVALVACMHKLLLILNAILRDRRPWQHA

SEQ ID NO: 331149 - protein, 374 aa, unidentified
MVDDIALYVGLDVSKEKIAIGLAEAGRKGEVRYYGEIANRADAVRKFVDKLAGRHGRLCFCYEAGPTGYGLYRQLSALGYDCLVVAPSLVPTRPGLQIKTDRRDAVALAALLRAGELSSIWVPDETHEAMRDLCRAREAAVSDLRRARQHLLSFLLRHGRVFEGRSHWTRAHRNWLATQRFDHRAQQIAMEEYIRAIEQIEERRERLTRQMLALLPDWSLNPVVEAIQALRGVAQISAVTLVSEIGDFRRFSNPRQFMAWLGLVPKEHSTGASVSRGSITKAGNTRARRMLVEGAWTYRLPARVGQEILKRTEGLPEAIRATAWKAQVRLCQRYRRMQASGRPTNIVTVAIARELAAFVWAIATTVPIPPTKAA

SEQ ID NO: 331150 - protein, 402 aa, unidentified
MRVAVGVDVAKEFHWVAIVLTDGGEVLLSQRVDNDPDSIDGLIEHLRAVAAEHGELTVGIDLMGGIASLLTAMLLDANIRLVHVPGLVVNRARRATKGGEAKSDPRDAQAIADQLRLRQDWRVVEQRDEVSVDLRLLVSRRRELVVDQTRRLNRLRETLTSLFPGLERAVDVTNLSDLHLVARYVTPDQIRKAGQRRITDYLIRNGVRRTYADRLAAKAVTAAEAQRTVVVGQDRLAEFVREFATDAITARRRISDLDGQIGADLDRHPDAALIRSLPGMGATLTAEFLAEAGDLTRFATANQLASAAGLAPVLKQSGKVRYLQRATAGSKTLKFVFYQSAFCAIQRDPASKAFYARKRSEGKRHHQALIALARRRINVLHALLRTRQPYRADYQPPATTAA

SEQ ID NO: 331151 - protein, 343 aa, unidentified
MAENMIIGVDLAKHVFQLHGASQAGHEKFRKKLTRTQFRRFMADQPVCLVVFEACGSASYWAREMTALAHEVKLIAPQYVRPFVKRHKNDRADAEAIVIAARQPEMRFVEPKTADQQAKAVLFRGRERLVHQRTELVNALRAVLYEYGHVIPKGIAKLGHARDIVEEPSSDLPDLAREECRDLLEQIAEKSSRIDKKAMKAKQLATETGMVRRLQTMPGVGPLTALAIEAFAPAMESFKCGRDFAAWLGLVPRQHSSGGKDRLGRVSKAGQADIRRLLIIGATSRLNWIGRKPIHPESWLARMLDRKPRMLVAIALANKMARAIWAMLTKKEDYQAQAPAMTV

SEQ ID NO: 331152 - protein, 339 aa, unidentified
MELYSAIDLHSNNSHVAIIDDQQNRVFYRKLANDGKVIENAFAPYRDRLKGIVIESTFNWYWLADLLIEKGYPVHLANPCGIQKYSGLKHADDKHDAFWLAQMLALNILPEGYIYPKEDRPLRDLLRKRAHLVRVRTSLILSLQNIVMRNYGIKIRSNDLKKLTQDPVAELLKDQEELALAGRASKETIDFLTRQIQRIETAVRSKALLKEPFSKLLTLPGVGDILGMTILLETGPIERFKQVGHYASYCRKVSSRWTSNEKIKGKGNTKNGNPYLSWAFSEAADHARQTHGPSRDFYNRKLNQTNASVAHNALAHKLTRAAYYIMRDHVEFEEAKMFR

SEQ ID NO: 331153 - protein, 329 aa, unidentified
MQYFLGIDVSKAKLDAALLLANGKFKSKVFANDAAGFAALLQWLPSHLPDAPDGRARVHACMEATGSYHEALACFLSDQALLVSVVNPLLVKRFAEANCMRNKTDGADAKCLALFCQAQRPGRWEAPSVTVRALQALVARLETLQAMRQAECNRLEVAHSSVADSVRQVISGLDGAIAQVKDQIASTIDDDPDLKQRSGLLQSIPGLGDKTIPQLLAYIGRPERFKSVKALMAYAALAPLIRQSGTSLDKRRGTHPMGHQELKRALYFPAMVAARYNPLVKVFWNRLKAQNKPGKVIVVACMHKLLAIAYGVLRSGKPFDPNHLKHIAT

SEQ ID NO: 331154 - protein, 408 aa, unidentified
MIFVGDDWAEAHHDVYLCDEAGTRLGARRLPEGIEGITAFHDLIAGHVDDPADVVVGIETDRGLWVQALIEAGYVVYAINPRAASRYRDRHSLSGAKSDPGDAKMLAELVRTDRHNHRPVAGDSDLGEGVKVLARAHQNMIWDRTRATNRLRSALREYFPAALDTFAELADRDTLAVLAAAPDPVSARRLTPGRVRTLVRSAGRQRNIDTRALSIVEGLRADALSAPPAVVSAFAATTRAQVAIIAELNAQIAGLETELATHFEQHPDADIYLSLPGIGVILGARALGEFGDDPNRYADAKSRKNYAGTSPITRASGTRSVVLARFVRNTRLADAINQWAFCTLTNSPGARAFYDHHRARGDSHHKALRALGNRLVGILHGCLRTHTPYDEQTAWGHRHDNPIDQIAA

SEQ ID NO: 331155 - protein, 368 aa, unidentified
MTKTVYIGMDVHSTNYTLSSYTRETDNCFSTVTLKPEVKSIVKYIKRIKEDHGEDVEIVTGYEAGCLGYSLYKDLEKEGIKCIIIAPTSLPKQKAGEIKTDKRDAQKIARALAAGTYKSVYVPDQEDEDVKEYIRMRDDHKQTLKKTKQQINAFCMRNGFVFTEGKSKWTQKHIKWLRTLKMTAMQRLILDEYLITFDYYTLRIKQMDEKIEEISNRERYKEDVDRLCCFAGMSVHKSLCHIVETGDFDRFPKAPAYSAYLGEVPGESSSSTNVNRLGITKAGNRHLRMLDIEAAHAIGRTRKTKSKALIKRQQKCSPEVIAYADKANERMRKMYLDLSLRKNKNIAAAAVARELSCFIWGMMTDHIS

SEQ ID NO: 331156 - protein, 349 aa, unidentified
MTIVEDRRAITGGVDTHADVHVAAALDPIGGLVGVREFPATAAGYADLLEWLGGFGTAALVGVEGTGSYGAGLARYMAGAGVRVVEAARAGRQDRHRQGKSDPLDAVSAARAAQSGRASGAPKGRDGAVEAIRALMVAKRSARAGRTQAINQARALIVTGPDELRARFAGHRPAQLVEAIAALRPRPGDVPGYATRVALRELGRRAQFLDAQLDRLDEVIGPLVTGRAPGLLRLHGVGPDTAALLLIAAGDHPERLRSESSWAHLCGVAPIPASSGKVSRNRLNRGGDRQANHALWRIVITRLGSRPGHPATRAYVTRRTKEGLSKKEIIRCLKRYVAREVYHQLRAGA

SEQ ID NO: 331157 - protein, 420 aa, unidentified
MTKRRYRSTKVNQVNWSQIAEQAGEQKVVFAVDVAKEKFVGALMKPDRTVLKTIQWQHPEQTPELMHGLLSHLGAQRLEVAMEPSGTYGDPLRWLFVTHGVAVFRLSPKRVHDSAEVFDGVPSLHDAKAAYQIGRLHLDGVSRRWEERSEQRRELTAQIAVLNLHQERLQSSRNRLEAQLSRHWPELGGILDLGTLTLMSLVAAYGSPARVAAHAEEARRLMHRSSGGGLRREKIEGVLEAARQTLGMPCLEAERMLLQTLAQDMLDNHRAVQRAEQALAAQVDADATLHGLASVVGKTTAAVLVSTQGQPQDYPDAGSYLKSLGLNLKERSSGKFQGQLRITKRGPGIARLYLYFAALRWLYRDPIIQAWYQRKVARDGGHKGKAIVAIMRKLAKALWYVAQGVAFDSRKLFNLKALAA

SEQ ID NO: 331158 - protein, 499 aa, unidentified
MGETFAEHASSRYELAFRARDALGQNFERDDVLWFDNAYSDAVPIENFTIRTAQNQSPRVRQIITRKAGKFTMKQETPEPEEFGAYIGLDWADRTHVISLRSADSNKVERYKLAHTPEALAEWVSDLQRRFAGQRVAVALEQARGAVVHALMGYDFLVLYPVNPKTLAKYREAFSPSGAKDDPVDADLLLELVTLHRNKLRAWLPDDELTRTITLLVEYRRQLVASQTRLSNRLTSLLKLYFPQALAWAGELTTVQACDFLQHWPTLGQVQQVAPSKLRKFYIAHGCRKADVIEQRLQEIKVAQPLTKDGAVITASVAMVQACISQLRPVMEAIAQMEKQIAELFGQHADHDLFSSFPGAGPVFAPRLLVAMGADRGRFAAASEVQQLSGIAPVIERSGNSCWVHRRWACPKFMRQSFHEFAGQSIRWSAWARAFYDQQRNRGNGHHAAVRSLAYRWIRIIYRCWQMRVPYCEETYCRALVRRQSPLARVLSAQMQNCG

SEQ ID NO: 331159 - protein, 411 aa, unidentified
MDLMYARCAGLDVHKATVVACVRMPGPRPDARHAETTTFATTLRGLEALAAWLTAHGVTHVAMESTGVYWRPVFAVLEGTVQVQLVNARHVKMLPGRKTDVRDCEWLAQLLECGLLRGSFIPPAAVRDLRDLTRLRKALIRERGHHVNRIAKTLELANIKLGSVVTDIMGKTGRAILQALSAGLDDPEQLAACAQGSIRKKQAALREAVEGRLTPHYAFLLEQHLALIDTLDAHLATLDARIEATMAPFAEAAALMQTMPGVATRAAEAILAETGEDMSPFPTAAHFASWARLCPGNHESAGKRRPTTTGKGATWLRATLQEAAWAAVRTKKSYYRALYYRLKARGGPKKAIVAVQHAMLVALWHMLKRRVPHQDLGADYFAQRNTERTLRHHVRRLEQLGYQVLLAKEAA

SEQ ID NO: 331160 - protein, 424 aa, unidentified
MNNTQNQKIAQVTDKTLIVGVDIGSENHFARAILARGFEVSKKPFPFTNTEEGFESFVTWIYNLAVAHKLTKIMVAMEPTGHYWFAFVAFLKKYDVQVVLVAPQHVKHSKEMDDNTQEKDDRKDPIVIARLVPEGRYLIPYIPEDIFAELRVAFNRRCELVEEQVRITNRMIRWFDIYFPEYRRVYGRIDAKTGIMILKRAPLPADILGIGADGICEIWKDAKVRGNGPKKAKQLYSAAEHSIGMKGGASVRWKLWQLLEEYELIERQLHDILQLIEGLLYQIPGADKLLKIPGAGLVTVAGFLSEVGDIKRFSDPKQIQKLAGLAVVENSSGKRKGLPGISKRGRSRLRWVLFQLARSMVMFNPEMKAYHQYYTTRKENPLKKLQSLVAISARIARIFYGILKNGTEYDPTMVMKDFNKAVAA

SEQ ID NO: 331161 - protein, 381 aa, unidentified
MRAKKRGPGPSSVLITPDHAGNVAGVDPHKRTLTATVVDPRGGILAGEHFRVSGDGHRALEAWARQFGPIARWGVEGASGWGRHTAMFLTGRGYDVRDVCANRTPRNDRARLRGKSDMLDSERIARETLAHPLLPKAFKRAAADSGPDEQHQLLALWHHRRRSILTSRQHLVNEAESLLCELPLDLREQLPDSKAVRPRLAALARRNRRRRYDAPTSLRLRMLDDYRVQITALDREEKEVVAHLRALVQASGSTLGELCGLDTRSVAELLVEVGDPRRFTEGGFGRFNGTAPLPASTAEGPGEPVRHRYNPGGNRRINAVLHRMAVTQLRCEPRAQAIFANARAHGHTKKEARRILKRHLSDVVYRRMTRDQAVPRPLIAA

SEQ ID NO: 331162 - protein, 398 aa, unidentified
MSLYFVGIDISKYKHDCCIISATDQKVISKFSIKNDKVGFEELITTFNSLSSPEDIRIGFESTAHYALNLELFLENAHHSFMEVNPVLIKEYKKSTTLRRTKTDSVDCESIARWLMTVEYKPHSKGFYHAYSLKSLTRLRDKLIRQRSFNLVKITNVLDHTFPEFKPFFNERLSKTALYLLENYGSAEKMARMNSASYEKLRSVSRGKFSPQQFLRLKELAANTVGVNNSIFDVELNSLLFLYKSLVKEIDTIEKEINKLIEEVHPHYMSVPGIGPLSAAVIYSEYGDISNFTNPGQMLAFAGIEPGINESGTESHGGKMVKRGSSQLCYTLINWNLLSIIPIADLILQIVRKLFYINACINDEKSLKISVLSQIRKAINMLKVLKLYDFQICQFFNK

SEQ ID NO: 331163 - protein, 342 aa, unidentified
MKLFIGLDVSLAKTAACVLDEHGRIVREAEVSSDPEALAKFAREQPGEIAAIGLEAGPLSQWLHRGLAGAGLDAVLMETRQVKGALKAMPIKTDRRDAEGIARLLHLGWFRPVHCKSVSAQEIRALLSAREAVKKGMINLEMSLRGLLRNFGLKVGTISRGRFEARILELAAGNAMLEAAAGPMLRARASLRRELAGLERQVRQLAKEDPVCGLLMTMPGIGAVVALTFKSAVDDPARFASSKKVGPWTGLTPSRQQSGERDITGGITKAGDTGLRRVLCQAATVLLHRGRASWLRTWAARVAKRRGNKRAMVALARRIAVVLHRMWRDGTAFQPDSAPAMI

SEQ ID NO: 331164 - protein, 332 aa, unidentified
MQHCAIDLGGRKSQVCVRSGNGDVLFEERLDTAWLPEYLRELPHSRVILETAAEAFRVADAAKQAGHEVRVVPATLVRSLGVGARKTKTDKRDARVLSEVSCRIDLPSVHIPSARSREWKTICGMHDALVSSRSKLINNLRGWMRGQGKRIRGGKAETFADRLRTLQPLPPHVQTQLEALSGLNEQVRTSERRIEALAGDPLCRRLMTTPGVGPSTAVRFVAALDDISRFESAHKVEAYLGLAPGESSSSERQQRLSITKAGPSSVRWVLIQAAWVLQRRCRSAAARPLQAWAADITLRRGRQVATVALARKLAGILYALWRDGTTYQLPQP

SEQ ID NO: 331165 - protein, 407 aa, unidentified
MLEVKVERCAGIDVGKKWIDVCVLMGPANRKPAEEVRRFRTHVGDLEALRAWLKEKSCTEVVMESTGSYWKPVFNILEGQFQVILANPEQVKALRGKKTDRKDCRWLAGLLRHGLVQPSFIPPRDIRELRDLTRRRRTLLQNLTQERNRIQKFLEDANVKIGNVLSDVFGMSGQAMLEALLENKLSPEQTADLARGSLRRKIPQIVEALEGHRMSDHHRLLIRQALKHIQYIEEMIEELDKEIQRKLTPYQKQVEWACTIPGIGSDAAAGILAEIGMDMSDNGPFSSCHHLASWAGLCPGNNSSAGKRKSGKIRKGNRWLKATMTQTAWAGAAKKNSAFQFRYHRLKSRRGVKRATIAVAHSQLIALYWVLRTGVPYQQQRQDLERQQRESLIRHHLHRLTQLGYTA

SEQ ID NO: 331166 - protein, 345 aa, unidentified
MRQVCQIGLDIAKEYFQVHGVDKNGKDVFNKKLKRKNVLSFFANLPPCLVGLEACGGAHYWARKIAKLDAGHTVKLISPRHVKPFVLNNKTDAADARAICEVVGRPSTRFVTVKTVEQQDLAAWHRIRERKIKERTALANQAKALLLEQGIVVAKGITRIRKFLPIAVENLENRLSMTARDYLSELYAELVTCDELVEKYESRIISFAKNDEACKRLQKIPGVGPITATAIVVHAADATEYKNGRGFAASLGLTPKEHSSGGKQRLPGISKRGSNTIRKLLIQGARIITRYALAGENQSYPVQQWIQGVATRRGRQIAAVALANKTARIIWNLLAKKEEYRPVMA

SEQ ID NO: 331167 - protein, 369 aa, unidentified
MKTNQSVSSSSSNQASLANYVNRVLKLGLDVHYRQVTVAMQEDGGRIKAAGKMSHGVFWTWVDKKLKEGWQIYSCYEAGASGYWLHRQLVEQGVKNLVVAPKAMGQGGKKQKTDKRDGAELCDSLDRYLRGQEKALSVVAVPSVEEEQKRALIRYHRQIMADRGRYEGRGKGLLCAQGIEVHGRWWQGKAWQELKTEPRLADWMKEQLDGWRSKVLSAQEHQEGLRERIEALAPASLPKGVGAYSAAVLQYEMKGFGRFKNRRQVASYTGLCPGIHLSDGRGKEGSINRCGNGAVRWILVEMVWRLMFWQPQYPPVRRLAAGLVKGKRAKKRLVVQAARRLAIDLWRLATGQTTPEKLGLVMQCNPQSK

SEQ ID NO: 331168 - protein, 354 aa, unidentified
MIIIGVDFHPAYQEIASVNTDTGEYQEKRLAHPQEAEEFYRSLACVGQAVRVGMEASGQAQWFERLMEGLRWELWRGDAEAIRAKRGRKQKTDREDARHILKLLLKEDFPRIWVPSWENRDLRQLLWHRHRMVQARTRVMNQLQAVALNEGLRCKKGLWRASGRQHLECLQLAPWSSRRRRELLELLDRLNPTIAELSQAIEREAEKCPEAQRLMTHPGVGALTALAFVLIIGKAERFGCGKQVASYLGLVPLEKSSGNRRRLGHITKQGSSLVRFLLVEAAQVTVRSLPEWRSKYVHLMMRRGRKTAKVAMARKLAVRLYWMWRKGSDYEQWKKFGSYVGQPVHRYGVQSNTA

SEQ ID NO: 331169 - protein, 431 aa, unidentified
MNYNQNHKITQITSETLIVGVDIAKHNHVARAQDFRGLELGKTCFFENTKAGFHSFLVWINQLVKECKLNQVIVGMEPTGHYWLNLAHLLKENNIKFVSVNPLHVKRSKELDDNSPTKNDVKDAKVIAQLVKDGRYAEPTIPQGIYAELRVAKKLRDLLNVDLQVVQGQVHNWLDRYFPEFLTVFKSWEGKASIHFLKLEALPHQLVNYTDEELLLSLRQVVKRSIGLKKIRALKEAANRSIGIRQGAAMAKLELRALLEKYDFIQMKFEELDHQLDQLLDHIPGVTQMLEMSGIGRDTVAGFFAEVGDLRDYQHPRQIVKLAGLSLKENTSGKHKGQTKITKRGRKKLRALLFRAAMILVAKNKAFKALHIYYTTRSHNPLKKMQSLIALCNKLIRILFSIGKKQFTFQEDKMLKDIPHMATSVVHQTVA

SEQ ID NO: 331170 - protein, 407 aa, unidentified
MLFVGDDWAEDHHDVCLQDAQGRVLAARRLPEGVAGITRLHELVAGHLDGDDPSQVVVAIETDRGPWVRALVAAGYRVYAVNPKQAARHREVVAVSGKKDGTFDAATLADMGRTRRHQLREVAADSDEAEAVKVAARAHQKLVWERTRHALRMRSALREYFPAALEAYGPLTLTGTDTLELLAKAPEPAAAARLTIAQISAALKRARRRDVAGKARQIRAALREQHLGQPEIVTEAYAAGVRASAAVIAVLNEQVKVMEARVESFFRRHPDAGVYLSQPGIGVITGARMLGEFGDAPGRYAGAKARRNYAGTSPLTIASGKKKTVHARFIHNDHLVAAMHDQAFGAISASPGARAYYDELRAREIDHTDALRRVANRQAGILHGCLKTGTAYDEHTAWGHRSQPAAA

SEQ ID NO: 331171 - protein, 363 aa, unidentified
MNESMTVTVGLDVHARSIRLAAVRADELLEERTLPYDEEGVERVLRRWPAVRCCYEAGPTGFGLQRFLAERGIECLVVAPGLVPQRPGDKVKTDSRDARKLARLLAGGLLEPIHVPSRELEAARDLVRAREDARLDRMRDRHRLSKFCLRHGRLLPTSSWTVVRRKWLSEQRFEFPAQQQTFDTYLHTVDLVDARTEALERAIRETAEQGPWSELVTRLRCLRGVETLTALGLAAEIGDFSRFRSAEEFMAFVGLVPSEHSSGEKRRQGSITKVGNSHVRRLLVESAWHARRRPKVGYELARRQRGQDAVVIERAWRCQQRLYQRWQRLAGRGKPQQKIVVACARELAGFVWAIATDQPLRST

SEQ ID NO: 331172 - protein, 417 aa, unidentified
MTESIYRRCCGMDVHQKKIVVRVLPPDGRMGREVCKTYGTFSAELTRMRGWLKLLKVTEIAMESTGVYWRPVWNVLEGHGFRLLLVNPQQVKALQGRKSDGRDARRIAEFLQDGRLDGSFVPPPEIRELRQLLRCRQSYLEQRNEVHNQIRDLFETTGLKLSSVLSNLMGVSGQRIIAAMIAGEQSPDLLSWKVKGRLRQKEQLVRQSLKGTFQDFHRLMLEKFYRHYQFLSQEIERMEAEIADRMSPYQLQVNGLTSIPGVDRIGAWYLIAELGVDMSIFPDADHCASWAGMSPGSCESAGKVFSGRTKKGNKYLRRVLTQAGWAASRCKRGYLRAFFHRVKARRGWGRAVFAVGHKILLIAYGILKNGGTYQDLGDDYFDRLHPERTTKRLVKRLQRLGLQVEISPLTRLNPESS

SEQ ID NO: 331173 - protein, 333 aa, unidentified
MSLELLAIDLGKRSFHIHAVDSHGVIISRKTSRAKLIETIEELRPITIAMEACASAHYWGRRFLGFGRRVLLINPRFVKPFVKGSKNDAADAEGIYEAALRPTMRFVPVKSTEQQDLQSLHRTRDRVVCARTALINHLRGLLGEYGVILPQGAWRFLAQARDAVASAELSDLTRELFADMLDELDSLDLRLDKLDRQLLAICRTNEACRRLSKLPGVGPVIATALVAAVDDGRHFRSGRELAAWIGLVPRQYTTGGKPRLGGIGRRANHYLRRQMIHGARAVMFRLSKRDDRRSQWLKALTVRRGFNRTVVALANKTARIAWALLTRKEDYAA

SEQ ID NO: 331174 - protein, 417 aa, unidentified
MTVSSLMQRRSAIKPDTLIVGVDVAKFHNVVCTMVPGGAIGRPLEFSNSREGFVALSAEIEARKPSPVSAVIVGLESTGVYWINLARWLAEQGYQVVQISGLYVHRAKELADNSRGTSDGKDALLIADLVVQGKYLSFVQPAGVLADLRQLVGLRQRLVRERAARYNLLHQSVDLLFPEFAAVFRDVTGPGARRVLRRFPAPAAALAHPPDEMRRQLAEDGRVRVSVTKLAELQAVAQQSIGICEGTTGIKYALNDTLLELASLDARVKQVEAEIDRLLVQVDETPILTSLVGRMTAAVILSETGGVRQYSCAAAVLKLAGLNLYQISSGQYCGDRHISQMGRSLLRQALYLAALQHTHPGTPLYPYYAELLRRGKPKPVALIAVCCRLVRLLYALVRDGRCYSAQPPENNPQAQAA

SEQ ID NO: 331175 - protein, 340 aa, unidentified
MHNPNHGVVFVGIDVSARELAVALQADEQLEPVRTFANTPAGHQQLGRYLRRNQQSVRVCVEASGNYSLDLCLTLHAADGIELSVINPRLARRFAESLGTRSKTDPVDARVLCLYAQRMPPVPWQPPSPASLHLRSITRAVEALTCMLVQERARHHAAEASTALPRLVVNELKRHQRYLEQRIQRLRREAVRIISSDADLARRFRLLQTTPGVAETSALQLLGELAVLPSTLDARQWVAHSGLDPRHHRSGTSIEWTPRLSKLGNRRLRRALYMPALVAVRHDPHLRGFYQRLCANGKAPLQALAAVMRKLLHAFHAMFKRDQAYNGAHLCPQVPLACHP

SEQ ID NO: 331176 - protein, 341 aa, unidentified
MNKASTIGLDLAKQVFQVHGADATGAVVFRKRLRRTGVLQFFASQAPCRVAMEACASSHYWGRELSRIGHEVRLIPPAYVKPFVKRQKNDAADAEAICEASQRPTMRFVQIKSEAAQAAAVVFRARDLLVSQRTQIINALRGHLAEFGLVVAKGPAHLGRLLAQAEDYARSLPQTVRPIFGVLIEALHSLDEKIAVLDVEISRRAEEDEDARRLKTIPGIGPITAAAISALAPPAQTFSRGRDFSAWLGLTPVQRSTGGKQRLGRTSKRGERTIRRLLIIAASAVVRWAARKGAPEGSWLQRMLTRKPRMLVAVALANKIARIVWALLARGGIYRTSIAAT

SEQ ID NO: 331177 - protein, 352 aa, unidentified
MSHKSASSAAVSTIGIDLGKNSFHLVGFDQRGAIVLQLKCSRAQLERRLANIPCCLIGMEACSGAHYIARQLAALGHDVRLLPAQYVKPFLKGHKNDYRDAEAIAEAVQRPTMHFVAIKTPEQMDLLALHRVRSRLVGQRTGVINQIRGFLIERGITVRQGIMPLRKALPDILSSNNDALSPRMVNLIAELIQDWRRLDERIAAVSAEIESLAEQDEGCQRVMTVPGIGPIISSAVVAAIGNGAGFTQGRDFGAWLGLVPKQESTGDRTILGKISKRGNKYLRTLFVQAAHVVLARRPNAAMRGLWPWIEQLSRRLHRNMLAIALANKLARIVWAVLARGRPYQPRIAADVA

SEQ ID NO: 331178 - protein, 367 aa, unidentified
MNQGITFVGLDAHKESDNVAMLLPEEMKPVEWQVANERATVLRMVRKVRRQAPGEVRFCYEAGPCGYALQRWIQEEGVTCVVVAPSLIPRKSGDRIKTDRRDARKLAELYRAGLLTEVHPPTEADEAVRDLCRAREDAHDDLVRARHRLTKLLLRRGHSWEGGKKAWSQGYRLWLRNFRFEHAADQAVLEDYLLAIEQVEERLRGLEERMEVASQQAPHAEAVGALRCFRGIDTITAMTIVAELHDFMRFQSPRGLMAYLGLVPSEHSSGGKRRQGALTLTGNGHVRRLLIEAAWHYRHRPSIRALARRRQGQPPEVIGLADKAMTRLHRRFHRMLAKGKPRPKVVAAIARELVGFIWAALYPRAAA

SEQ ID NO: 331179 - protein, 368 aa, unidentified
MAEVRAFVGLDVHKETISAAVADAGRTGEVRHVGTIENSPAAIGKLARGLARRHGALEFVYEAGSCGYNVQRQVAAMGMVCRVCAPSLTPRKPGERIKNDRRDAIALARLHRAGELTYVWVPDAVHEALRDLVRARHAACQDVRRDRIRIQAFLLRCDLRFEGKSWSTRHRKWLCNRQFAHPAQQIAFQTYLNALEHDEARKTEVEGQIREMLAASPWTRQMQALQALKGVGPVVAATIIAEVGDFSRFAHPRQLVAYFGLAPGEHSSGGTVRPRGITKAGSSLARAVLCEAAWNYRATPKVGQWMKERCPPVPQDIHALAWKAQLRLHKTYRKLTGRGKRSVVATAAVARELLGFVWSIGQRVPLGA

SEQ ID NO: 331180 - protein, 332 aa, unidentified
MVAGTLGSLNKAGSRKMTQISRTAGIDTSKAKLDVAVHGSVEHWQVDNTPAGWRRLAAELTGAEVMRAGIEASGGYECGVVGYLRAKGFTVLVLQPIQVKAYARLHLRRAKNDKLDAALIAACAAMTDRPRIEPDQRLAKLAQHLTFVEQIEEDIARFKIRLEHVGERRHRRMVVTDIARLKARRLVELARIAAALRAHDDLARRLDLVLSVPGIGERTAIALIVRMPELGRVSREQAAALAGLAPFDDDSGKHSGERHIAGGRRRLRRSLFAAALPAAFRWNKALIELYSRLTQRGKAHNQALIACARKLLIYANTVVQRGTPWTERPVDA

SEQ ID NO: 331181 - protein, 421 aa, unidentified
MTARMNCPRGLTPLPPLQKERGRTAASPPGPLISEELDMKEERTPRGRPSPLRSSKAVGEQGSPRGGSVSGCKPEQLRGATEPGSRKDGTGRNHVEHRTRRCVVKSKSQVWAGIDVSKDSLKVGLWPDREVFSCAREPRALRGLARRLRGLKVKLVVLEATGGLEWPVIQALLSCGLPVHRLEPSRARHYARALGVRAKTDPVDALLLARFAASGELKAQSFANEPTRHLDALVTRRRQIVDTVTAESNRLGACLDREAQASLREHLRFLRRQVAKLDAKIDQFVQREPELKHKATLLQSAPGVGRVTAATLISAMPELGHLTRRQVAALGGTAPFPDRSGRRQGKDRISGGRANVRGALYMAVLSSIRRDSWIAVFYRKLVALGRPKKAAIAACMRRLIVKLNAMVRDNAPWRQTAPAAG

SEQ ID NO: 331182 - protein, 422 aa, unidentified
MLAESVDDEEIIARVAALDIGKAELVCCVRVPAEGGAKRRLQEVSTHSTMTRSLGDLANRLVDLRVERVVMEATSDYWRPVFYMLEAHGLQPWLVNARDVRHLPGRPKTDVLDAVWLCKVAERQMLRSSFVPPRPIRRLRDLTRYRIDLVGTRTAEKNRVEKLLEDACIKLSVVASDIFGVSGRAMMAALIAGERDPKVLAEMARTRMRVKIPQLVEAFTGHFDDHHRFLLAHMLARIDGIDADVAVLDAEIEAHLVPFKVAVERLDEIPAIGSVAAPVIIAEIGVDMTRFPTAGHLCSWAKFSPGIKSSAGKNKSNGSTGHGDRYLARVLGEAAPIAGRTDTFLGERYRRIARRRGKKKAIVAVGRSMLVIIWHLLADPETRFNDLGADYFTRHVNTETKKRQHVRQLEALGYRVTLEPAA

SEQ ID NO: 331183 - protein, 396 aa, unidentified
MKAVSGLDVHKDTIFACILQRGEAPFVKEYSTLTSGIRELSNDLQSMGVNMVAMESTGIYWMPVWKILEERFKMILVNPYYIKQVPGRKTDVKDAQWIATLLQKGLLKESFVAQGLIAELREYARGYVRLSCHETRLEQAIERQLIKCNIRITSFATKIGSATVMKIVKAICEGETSANRLEGFVHGRIRNKHKEKIFQSLEGEIRSFDRLMLKQSFQQYLLIKEQQSELIEQMNRICGEHFKKEMDVLCTVPGINSLSSMQIIAEIGINMDKFPTDKHLVSWAGLRPRNDESAGKIKSKKITHGNKYLRRVLVQCAWAASRTKGSWFQGKYQQLCVRKSEKKALIAIARKQLTICYHLMQTKQNYVTPIKVLSEKQKERKIKYLHKQLEALLNLG

SEQ ID NO: 331184 - protein, 350 aa, unidentified
MELNTIGIDLGKTVFHLVGLNLRGEVVVRKKFSRKQLLHFTANLQVKLIGMEACGGSHFLGRALREQGHEVRLMPAQYVKPYVKTNKSDYIDAEAIAEAVERPKMRFVPIKSDDQLDLQSLHRVRERWVMRRTAVINQIRGLLLERGITLRQGRRHIDAALPGILEDASAKLSGALRVLLAQLRLELDHLQMRIDEADAVINKIAGDNEACRRLVAIPGIGPVTATAIIAAIGNGAAFKKGRGFSAWLGIVPGEYTTGGKQKLLGISKRGNSYLRRLFVQGARAVLQQSAKQSSGLSAWLAQLTTRTHSNVAAVALANKLARMAWAVLAKNEPYRPPMLAGAATECLACR

SEQ ID NO: 331185 - protein, 353 aa, unidentified
MSNSTPWEAVVGLDLGDQYSYFCDVNVDGSLREEGRLPTNRRAFDLRFTIKPPLRVIIEAGTHSPWVSRQLSSLGHDVVVANPQRLRAIAESIQKTDRVDARTLADLGLHFADRLKTVSHRPEELQRDLEVIRGRQVLVLARTQLVNHVRGAVKSAGYRLPATDARFFHTKAARSIPPELLGVCAPLLAAIANLTAQVRECDHAIEELIRTKYPAARCLQQIPGVGPLISLTFILTIADPNRFSRTRDVGAYLGLVPRLRQSGARNPQLHITRAGDSYLRQLLVQGAHYILGYRGPDCDLRRWGLTHAASGGPAAKKRAVIAVARKLAILLLRLWTTGEVYEPLRLQKEVVAA

SEQ ID NO: 331186 - protein, 460 aa, unidentified
MLFAGCDWSDRWLDVAVLDRSGSLLGETRIVYSDGPDLIARYREFLAPLGRRWRATVTGIEDVHILFARSLAASGMEVVHVDPTRASRHRAAFGTPKTDRADARLIAAMTRAGECRPIVPNSPTAEALRVVTHAHRSAVASRAEALHVLRAALVRIWPAAVSAWPASVGGLRSPQARAVLAAAPGPRAAARLDRKRLAALLTVAGRKRTVESEAERLRRLFCRPAMLLDPRVEDAEAVRIRHLLAALDQAVQRTDALQGELEQRYAAHRYHQLVSRVPGVGTTLGAYLLAEIGDRPVERFGTGRSLAAYAGVAPVTWASGQTVRVAFRRASSTHLRSTLHAVAFSMVSHSPGAQAYYRRRRAAGDAHATALRKLGRKILLCLHHCMASGVPYDDAIAFGYDPTAADAPTLQREAPLDEMEIVRAREMLAAPGATVTATARALGVSTQTVYRHVLGRPRPR

SEQ ID NO: 331187 - protein, 355 aa, unidentified
MNDAKYIGMDVHTATISAAVRDSSGNLVMEATLETKAETILEFVHGLRGSLRVSFEEGTCASWLHDLLKPHVTEVLVCDSRKNALLRVGNKNDREDARKLSELLFLNELHPVYHGETGIRTLKELARSYLTITRDLTRVMNRLKAIYRGWGIACAGQQVYAPRYRAEWLAKITEAGVRRRAEIYYQQFDALAALRQEVRRQLLAESRRHPAMRLLRQIPSIGPIRAALLIALMQTPHRFRTKRQLWAYCGLALRTYDSGEYRFVGGQLKRSKKAVTIRGLNKNHNHDLKNIFKGAATRAAATAGPLQNFYQARIANGMKPPMARLTLARKIAAITLLVWKKGVRFDAKQLKQQAA

SEQ ID NO: 331188 - protein, 359 aa, unidentified
MRTIGAERPHTTEVSVILGVDTHLDFHVAVAVDHLGRRLGEASVPTSVKGYERLLHWAEGFGSLRCAGVEGTSSYGAGLTRHLRASGIEVLEVERPEHRRRSSRRNLEKSDPSDAERAARAVLAGEASGVPKSADGHVEMIRALRAARRSAMKARTQAANQLQALRVTAPEELRHRLRGLSTKRLVSVAARFRPGDDPRDVPTATKFALRSVARRYETLSEEIDELDEHLDRLVAQVAPELVALPGIGTDSAATLLIVAGDNPQRLGSEASFARLCGVSPIEASSGKVVRHRLNRGGNREANRALYMICLARMRRDPRTQEYVARRTAEGKSKREIIRCLKRYIAREVYRVLISCGARS

SEQ ID NO: 331189 - protein, 356 aa, unidentified
MSHEIKYIGMDVHKEAIVIAVLNESGKLMMESVIETKASSILQFLHGLGGELHVTWEEGTWAAWLYDLLQPQVQHIVVCNPRRNALLKEGSKSDKVDARKLAELLRTGMLRPVYHGENGLRTLRELGRSYQTISKDLTRVMNRLKALYRGWGIPCAGTQVYAARSREEWLSKIPQAGVRRRAELLYQQLDGLQMLRRNVRPEFLTESQKHKAAKLLRQIPCIGPIRAARLIGLMQTPHRFRSKRQLWTYSGLGIETHDSAQFRFVSGQLQRSKKPQQIRGLNRNHNHEMKEIFKSAATRASCGRGPFHDFYAGLLAKGMKPEMARLTLARKIAAITLTLWKKEERFDAEQLKTQAA

SEQ ID NO: 331190 - protein, 370 aa, unidentified
MEKGIKFFVGLDVHKETIAVAVAEAGRQPGRLQGTIAHDVNKLLKVLARFGEPGQVHAVYEAGPTGYGLQRSLTHRGYRCEVIAPSLIPKRAGDRVKTDRRDCLRLAELSRAGELRAVWIPDCADEAIRDVSRAREDAVNARTQARHQLKGFLLRRGLRYPGKSSWTKTYYRWLATLNFGESGAQTAFTEYGLAVTAADDRVARLTEALARSIVGWRFESVVAALQALRGIDQISAIGLVAEIGDIGRFAHPRRLMGYLGLVPAEYSSGDRVARGSITKTGNAHARRLLTEAAWNYRFKARIGLRAQQRQKELPQAIRDMAWKAQLRLTARFARLHARGVQINKVCVAVARELAGFIWAIAHVNATQPQS

SEQ ID NO: 331191 - protein, 337 aa, unidentified
MSVYVGIDVHRKRSQVAVVTGDGTVQLNKNVVNGSEPMLRLIGDLPAGTPVAFEAAFGWGWLAGLLEDYGFDPHLVHPLRCKAIASARLKNDKVDAAILAQLLRADLLPEAWIAPPEVRQLRALLRHRVGLVRLGTQLRNRIHAVAAGHGYDRSASYWTGPGRGWLAGLDLPAASREIVTDCLAVIDGLAPLIDRIDGELHQHAKADPRTKVLRTLPGVGEFTALVMLAEIGDITRFPSARKLASWAGLTPTARGSDLKVRHGNISKQGSAWLRWVMNQAAQTAKRSPDFAATYSSIAKRRGKKIATIAISRKLLTRAWHLLADMQAADASTPPRQP

SEQ ID NO: 331192 - protein, 346 aa, unidentified
MENIALDVHKKYTWARVENAKGDRLYESRLAHAHGNIKNFVHRWSAGSPVAVETVGNWYWVVDEIEAGGGKPQLVNARLAKLMMGMVNKSDKLDAKGLNRLQRTGTLPTVWIPPSTVRDARELPRTRMVLSRQRTQLKNRVHATLGKYGYVVEGATDAFGKRGREIVMELIGKLPPHTQWALKPVLDQLDHLGKNLKAIEAEMTKVFAPCSETTLLKTLPGVGEILAVVIWTEIGTLERFSRAEQLASYCGLVAREHSSGGKFRYGPVRRDINVYLKWAFVEAANSSILNRERCGYGHISQLYPRIKARRGHGKAKVAVARHLSEASFWILKKGEPYREPVSSTQR

SEQ ID NO: 331193 - protein, 342 aa, unidentified
MSYLGVDLHTNSFTVCRRTKQGKNSIRTFQIGRIADFRKTLRKRDLLAVEATGNTAWFVSQIRDRVKKVTVVNPFQFEVIRRSVKKTDKNDSKTLALFLSKDMLPEARMKTKENAQLHSLATTRDKLVKQRTALINKVHNVLNSYGIKFKKESLGSEKGLKSVWAYDWDVIVRIELEILIEQIRSLNKSIKTLDKEMSDHGQKLKGHESLTSIKGIAGRSATVLLSVIGDVNDFADENKLAAYFGIVPRVSDSNETVRHGRITKHGSKLGRTTLVQCTLVAKRYSPYLSRYYERIKSHRGSGKAIIATARKFLGIIYNTLKNEWIFEDFPNFVIASSCVKKQ

SEQ ID NO: 331194 - protein, 422 aa, unidentified
MTKRRYRTTKVNQVNWAQIAEQVGNQPVVFAVDVAKEKFVSTLMKPDRTVLKTIQWQHPEQTPELMHGLLSHLGAERLEVAMEPSGTYGDPLRWLFDSHWVAVFRLSPKRVHDSAEVFDGVPSLHDAKAAYQIGRLHLDGVSQRWEERSEQRRELAAQIAVLKLYRERLQSSRNRLEAQLARHWPELPGVLDLGSVTLMSLVASYGSPAQVATHAEAARQLMQRCGRSGLPQEKIEGVIEAARYTLGMPCLEAERVLLQTLAQDMLDNHRAVQQAEQALAAQVDADATLRWLASVVGKTTAAVLVSTQGSPQEYPDAGSYLKSLGLNLKERSSGNFQGQLKITKRGPGIARLYLYFAALRWLYRDPIIQAWYQRKVARDGGCKGKAIVAIMRKLAKALWYVAQGVAFDSRKLFNRKALALAA

SEQ ID NO: 331195 - protein, 317 aa, unidentified
MMKTNTAVAGIDTAKDKLDIAVYGQASHWCVENNLRGWRHLRSELAKAGVERVGIEATGGYERGVVRHLQEAGFTVLVLQPIQVRAFAKAHLRRAKNDALDAALIAACTAAMEKPHLEPDQRLTDLADLLTFVEQIEEDIARLKTRLEHIHEPRLRRMVLGDIARLKARRLTQIRFIARQLRAHHDLAARLDLVLSIPGIGERTALALVIRMPELGRVNREEAAALAGLAPFDDDSGKHKGQRHIAGGRKRLRRSLFAAALPAAFRWNKALISLYSRLKAKGKAHNAALIACARKLLIYANTVVARGTPWTDSPAFS

SEQ ID NO: 331196 - protein, 340 aa, unidentified
MQIYTGLDLSRKRLDYHACRVDGTLVGAGAVPPDPDGLARLVHRLGDANVLAVVESMNGARFVHDRLELAGWDVRLADPLRARALAPLACKTDRIDCWVLAELARRDLIPEVWLPDPAVRQERERARFRLHLVKHRTMLKNRIHQTLIAHGHPRPSVGLYTQKGRALLARLELPEPWRSTVQASLVLIDALDQQIAELVRELRRLGADHRYVPLLRTVPGIAWVLAYTIAAEIGDISRFATPTKLIGYTGLCPRVYQSGEHDRRGPLAKNGPDYLRWALVEAAHNAARHPCYRELAARQRARHRRPRGSAIATITIARKLTEAIWWMLTRNQPFAPAGAR

SEQ ID NO: 331197 - protein, 374 aa, unidentified
MDVHSTSYTLCAMEPVLGGEDRIFANIQVTSDYRNVVQFIDKLKEKLGSSGSYSIECGYEAGCLGYSLYHQLTKSGVKCTILAPTTMLTQQGKRVKTDKRDAVMIAQCLSYGGYHAVHVPADKDVSVKEYLRMRDDHKVALKKIKQQINAFCLRQGYFYAGNKWTIKHLNWLKKLVLSDLYRETLNEYLTSYEEQTAKIERFDKRIEELAEDSDYQENVKKLGCLLGIKIHTALSLIVETGDFKRFRKGNTYAAFLGLAPGESSSGEKINRTGITKAGNSHLRTLLIEAARGMCRGRIGYKSKVLRSRQDGNPTEVIAYADRGNTRMRSKYYRMIRHGKKDNVAVAAVARELACFIWGLMTNNITFKEEGTKAA

SEQ ID NO: 331198 - protein, 351 aa, unidentified
MTMLAEQVDVVIGVDTHKHTHTAAAIASSTGAALAHTTVTADAAGYAELIAFADQHASSRGWAIEGAGGYGAGLTRHLTDCQEIVLEIDRPKRPKRRAGAKTDLIDAERAAREALARDHLAQPKTGAVRAALQMRLAARRAAVTASADAQKQLLALVVTAPQRLRDRFAGQRTPAVIATAAKLRATTTGDVEYDTAVAVLRALARRIQDLQTEAATHQTAICALVRSWRPDLLDQPGIGPIVAATVLTAWSHAGRCRNDGAFAMLAGAAPIPASSGMTVRYRLNRAGDRHLNQALHTITLTRLKHDPATRAYAERRRKEGKSDRDIRRCLKRYICRDLYRRLEHQSPLDAS

SEQ ID NO: 331199 - protein, 430 aa, unidentified
MHNKNYISVGIDVGSAFSFMTILAPDETVILKPFKITHNNKDSLERAVSEIKKAEELYSLESRTFLESTGIYHFPLFCYLVDCGFNASIINPIITHSSKNGNIRKVKNDKIDSKGIAKLGLSKDIPVSQFPAKLVLELRSLTRKYYDLTDERSAHINKLKGDLHTVFPQYLDVFCDVTGKTSTMILRQYGTPDKILRGHKKTMIEKISKASRKGLAKASERYEKLCAAANAAKTFGCQIDSIYFNIFLTLDLVEKLDSALDSILNRIRQLITFNKNEKFIQQIKLLNTIPGVGFLTAVTIMCEIGDFSAFRNPKQLFAYFGLDPEVNESGKFVGTQLHMSKRGSRIARRAIFAVALASIRTKRNGEGINPYLRKYYELKSGQKPKMFAIGAVMHKVCNIVFAVLRDEKAFELRSPEEHCKQYQRPALAAA

SEQ ID NO: 331200 - protein, 345 aa, unidentified
MEQYAGLDVSLEATSVCVVDGAGRVVREAKVPSEPEALVAWFAGQDSAMARIGLEAGPLSQWLFAGMAEAGLPVELLETRHVRAALKTMTIKTDRKDARGIAHLMRMGWFRPVHCKSASAQEVRALLTARKLLQAKRHDIEMSLRGVLRGFGLKVGPTTPKTFEARIRDLVEGNDTLTEIAEALLSARCTLMRGFRSLESRLLAQARRDARARLLMTTPGVGALTALTFTAAIDDPARFRSSRMVGAHFGLTPVKYQSGETDVTGRISKVGDHGVRVALYEAANVILTRPVKGSALKSWALGVAKRAGMRKAKVALARKLAVVLHRMLRTGQAFALDGCPTAAAA

SEQ ID NO: 331201 - protein, 345 aa, unidentified
MEQISRIGMDTSKHFFQLHGVNAAEKVVLRKKLRRKEMVAFFKTLAPTVIGIEACGASHHWARILRSFGHEVKLIAPQLVKPYVKRGKNDTADAEALCEAMSRPTMRFVPVKTAEQQAALMMVGLRDRLIRNRTQLSNAIRGYAAEFGFTAARGMAHIDPLLDRIQADENVPVLARELFAAQAEDYAQLQAQIAEVDAKLMAWHKADECSRRLAKIPGVGPIGAALLMMKTPAPEMFRSGRQFAAWIGLTPKDHSTAGKVRLGVITRAGDEALRSVLVVGATAVVQHVRRGGRGSPWIVDLLKRKPPKLAAVALANKMARIAWKLMVTGNSYAAKSAPAALMGAA

SEQ ID NO: 331202 - protein, 345 aa, unidentified
MIIGCDFHPSWQQIAWLDSETGETGERKLVHASGDAKAFYEQLAAPAWIGMEATGNSQWFIELVQDLGHELWIGDAAQIRASYVRKQKTDKRDAAHILKLVVEGRFPRLWTPDREQRDLRQLVLHRHKLVEIRSRVKNELQHLSLNKGMQRKAKLWSQAGQKLLRELPLKPWAACRREDLLGLLALLNQQIGTLDQAVQQAADQHPQAKLLMTQPGVGPNTALAFVLTIGDVSRFPRSQQVASYVGLIPREESSGGRQKLGAISKQGNRLLRSLLVEAAQIAVRYDPGLRKQYLHRCHQKPKGVAKVAAARKLAVRLYWMLRTEKPYPEIVRIESSPRVPLVGAS

SEQ ID NO: 331203 - protein, 359 aa, unidentified
MDAQEGAVRRIVGGVDTHKDLHVAAVVDEQDRVPGTQSFASTRQGYRQMLAWMRSFGEVQRVGVESTGSYGAGLLRFLQQAGVTVLEVTTPDRQDRRRRGKNDDFDAQNAAHAAFAGIRTVTPKSRDGMIEALRVLSACRKTAVTARRIALQMIQNTIVCAPESLREMLRRMTRMQLVRTLAAWRPDLTAYRDVEAAYRISLKSLARRYLELHDEIADLDAMIAAIVDELAPNLVARNSIGHRGAAQLLLTAGDNPQRLRSEAGFAALCGVSPVPASSGKTARHRLNRGGDRAANSALHIIAIGRLRTDARTQAYVAKRIGEGHSKLEAIRCLKRYIAREVFTLIKQRQREINQTRIAA

SEQ ID NO: 331204 - protein, 349 aa, unidentified
MIIIGCDYHPSFQQIAWVDSETGECGEQRLAHSDGEAENYYRGLNGHGVRVGIEATGHARWFERLLAELKYELWVGDPAQIWAMRVRKQKTDRQDAQHLLKLLVEDRFPRVWVPSAENRDLRQLLWHRHRLVQMRTRVMNQLQAIAMNEGVRRKKGLWSKQGRRQLESFSLAPWATRRRQDLLELLDRLNPSIQELSTAIEQEAVQRPEVKRLMTHPGVGPLTALAFVLIIGSPERFRCGKQIGSYLGLAPCEDSSADRQRLGHISKQGNALLRFLLVEAAQATVRSDPEWRRQFLHLAMRRERAIAKVAMARKLAVRLYWMWRKGWDHQQMVQFGSHVGQPVVSHGVK

SEQ ID NO: 331205 - protein, 274 aa, unidentified
MKITTIGIDLAKSVFQVHGVDQRGKPVVLKRLRRKQMLTYFAQLSPCLVGMEACGGAHYWARKLQAQGHAVKLMAPQFVKPYVKANKTDAADAEAICEAVTRPSMRFVPIKNVDQQAVLSLHRARQGFVKARTAQANQIRGLLAEYGITLPQGISHVANRLPEIGDAKCFNNGRELAAWLGLVPRQHSSGGKSILLGISKRGDAYLRTLMIHGARSVIRVAERKTTLTDSWSTEMMKRRHSNVAAVARANKNARVVWALLVHGREYNPDYKQVA

SEQ ID NO: 331206 - protein, 355 aa, unidentified
MSQSTTLYVGLDVHKDSIDIALAEASRDAEVRHLATVGGGNEAVTKALRRLVSAGHRLHIVYEAGPCGFALQRHLSALGWRCDVVAPSSIPRPSGERVKTDRRDAMKLARLARVGELVPVRVPDSADEALRDLVRGREDAVREQRNARHRLKALLLRNGIAYSGRAAWSGAHLRWLASMKLAHPAQQIAFQEYLHAITEAGARIVRHEQALRDALSGWTLAPVVLALQALRGVQLIAAITLVAEIQDFGRFATPRQLMAYLGLVPCEDSSGPRRRQGVITKAGNAPAATHARRDRSSVPACRPRQPEHCASPERPRASQSRDRHRLERPDPPVRALPSSKRTTLASQQDRRGRRP

SEQ ID NO: 331207 - protein, 371 aa, unidentified
MHHRQNYLYVGVDLHKEQHTAVIINCWQEKLGEIQFENKPSAFSKFLLEVETYVCDGITVVFGLEDVGGYGRALAKYLVDHERVVKEVNPALSFLERKSQVMIQKNDSWDAECVARILVNKFNQLPDAKPNDLFWSIQQLVSRRNALVKAQAALKNQLHIQLNNHYPSYKKFFSELDGKTALAFWEKYPSPSCLEGTNIKRLTAFLLDVSNNTCSVKKASEILRLVKEDGQTMKEYQEMRNFLVRSIVREIEFKKKEMKYIERELKQVVNLLDYQLETMPGIELVTASALIAEIGDVRRFPNANKLARFAGIAPVYFGSGGKGKEQKSKQGNRALHALFYNLAVQQVQVAKGSKLPRNPVSCLLPTKAERR

SEQ ID NO: 331208 - protein, 354 aa, unidentified
MPSKVTKPNTSAYPKLMSIGIDIGKDVFHIVGFDHNGKVVLRRKFRRLELDAVFEKLPRCVVGMEACLSAHFVSRRLRALGFEPRIIPAIYVKPFLKGQKNDYNDAEAIAEAALRPNLKLVKEKTQEQLDLQACHRVRSRLVSRRTATINQIRAFLIEHGIAIRTGANSLRRSLPEILLQRADELSPRMRVLIEELHGDWLRLDARIEALNEEIEEISRQEKSCQNLMTIPGVGPLISTATVAAIGNGEAFERGRDFGAWLGLVPRQYSTGGRPILGRISKRGSKYLRTLFIQAANVILMRPQNWPRYSFGGWLVTAATRLHRNKLATALANKLARIAWSVLRYNERFDDAQTV

SEQ ID NO: 331209 - protein, 339 aa, unidentified
MPYGRRRAAADRVDAHIERSRAVLDRQFIAGPGGYAAALAWARQEAGEAGLAWAIEGTRHYGLGLARYLTAAGEHAGEIDASKHAGKRRNGKSDALDAVRAAREMLARPVAAQMRAAGDREALRLLMCDRDNAVASAKTARTLLTSVIVTAPATVREQLRHLSRDRRATVCASLTSPPGADRQTRVLYQTLARLGQRITTLARTAADLQKQISALVEDMTPGLVAAEAGLGALTAAQLLLSYSHHGRIRSEAAFGMLPGTAPVPVSSGRTDRHRLNRLGDRQLNRALQVIAVARMRSHPPTQAYVQRRLTEGKTLREIRRCIKRYSPATSTARSETSPV

SEQ ID NO: 331210 - protein, 343 aa, unidentified
MQAITTIGLDIAKSVFQVHGVDADGQVVLRRKLKRRYVVAFFEKLAPCLVGIEACASSHHWARQLQALGHNVRLMPPAYVKPYVKRQKNDATDAEAICEAVSRANMRFVPTKTPEQQSGLVLHRTRHLFIRQQTSVINAIRAHCAEFGITAPVGRRGVEELLRVVADPSDKRMPEVVRACLAALGNQLLNLKKQILDFDRMIMAWHRSNQTSRRLNCIPGVGPLLATALVASVADPKTFRSGRNFSAWIGLVPKQHSSGGREKLGSISKRGDRYLRSLFVAGAFAVIRYAKIHGTKHRPWLTALLTRRPTKVAAIALANKLARMAWAMMATGARYNYPASLKV

SEQ ID NO: 331211 - protein, 466 aa, unidentified
MTPSKDYCLEAPCPPTPLLPPLPVLSDALQVCNPHAAGIDIGEAEHWVAVPPGRDPQPVRRFGTFTVDLDALADWLIDCGVITVAMESTGVYWIPLFELLEARGVQVLLIDPRQAKRAPGRPKTDRLDCQWLQRLHAYGLLAGAFRPDDQVCVLRAYLRHRQMLLTYAAHHIQHMQKALQQMNLKLTQVVSDITGVTGMAIIKAILAGERQPLHLAKLRNPHCHHDADDIAKALQGTWRAEHLFALRQAVELYDVYHQQMAQCDQQIKRHLETFADKSDGQPLPPKARRHKKTNEPRFDARTPLYRLAGVDLTTIEGIEENTALIILSEIGTDMHRWPSVKHFCSWLGLCPQHKISGGKVLSRRVRPGAHRVTVALRLAARSLHHSQSALGAFFRRMKVRLGTPKAITATAHKLARLVYSLLQHGSAYVQQGLDAYEAQYRERKVTTMAKQAKALGYTLVPLAAQG

SEQ ID NO: 331212 - protein, 338 aa, unidentified
MGLYCGIDLHSNNNWVVVLEGTDKVVKEKKLPNDLGRVIEELDPYREELEGVAVESTWNWYWLVDGLMEAGFPVRLVNTSAVKQYEGIKHTDDKHDARWLAHLQALGILPEGYIYPKEDRPVRDLLRRRMYLVEKRTSMLLAMRGAFECRTGDRVSVNDIKGWTDDDVDTQIEDQIAALSITCLLEPVAMLSGQIKRLEDVARARARRRPGHRRLQTVWGIGRLLSLVILYEVGDISRFPTVGDFASYCRLVKSGRFSNGKRKGGGNPKNGNRYLSWAFHEAAHHAVQHYPKAKHFVQTKTAEVNGIVAIRALAHKLARATYYVLRDQVDFEPSKLFK

SEQ ID NO: 331213 - protein, 391 aa, unidentified
MDKAWVGVDAGKEFHWAHLLDASGRELLSRKVENDEADISKLIDEVLFLAEEVVWALDQPGGGAALLLALLRERNQRVLYIPGLSVDRARDTYRGESKTDARDAHVIADQARMRPDLGELKPGEEEIVELQLLLARRRDLVTDQTRIVTRLREALLSLFPALERALDLNCKGPLTLLTHYQTPAQLRRAGHKRVAAYLRNRGVKGSDSVAHKALSAAKAQSITLPAQDVASGIVAELAGEILALKESIQGMDEKLGQRFSVRPEARILTSLPGMGPILGAEFLVAVGDLCAFENADQLAAYAGLVPAVHDSGKRVGNNKRMRGGNKILKRVFYQSAFSSLRASAESRTFYDRKRAEGKRHTQALIALSRRRVNVVWAMLRDGTTFVAQSGA

SEQ ID NO: 331214 - protein, 343 aa, unidentified
MSNVPVFVGLDYHQDSIQVCVLDERGNVLLNRCAGNDWRELGRLVSPLGVVRRVGIEACCGAADLGEELTERLGWDVSLGHPAYIAKMKGSPDKSDFSDGRLVADLTRVGYLPGVWLAPAGVRDLRRLVSHRQRLVDRRRALKLQVGGLLREQRVRIDKGRGSRWSKAWTASVRDNDALSKHARWVANDLLDDLKYTEGKVAAADARLREATKDDPVVRRLMKQEGIGEVTAWVLRAYVGDFRRFKTAKQLSRYCGMSPCNASSGRRQADAGLVDGCNKLLRRTVVQAAHRLVRTCERWSGLAESMRARGKPACVIAGAVGNRWLRNLHHAMKATEAAEATGV

SEQ ID NO: 331215 - protein, 423 aa, unidentified
MSQDINHRIRNVKYYTSTTEYNCGIDLHARQMYVCLMDRQGKKLVHCNVKDNDFNFFLKLVEPYKNNLTVCCECMFGWYWLADACQGAGLTFVLAHALYVRAIHGGKNKNDRIDSEKLTHLLRSNLIPPAYVYPAQKRPLRALLRQRIFFVWRRAELLARIYSHQLAHNRTPAKQTRRHRDSWKEQLLAAEAHPLRRAALENDLAMIQHYDDRLAMMEYELMRLTKELQGRDYELLQSVPGIGRSLGLTILYEIGDIERFPTVKDFISYCRLVKGTVASAGKIKGLRGAKLGNPYLRWAFGEAAVIAKRAHFLLRPLAQRLEQQMAGNKFKANTVVAIKLARAVYFMLKNKTVFDPQRLVASMQKCFSPGRRQPAGLTGRDKKAMPSPVADHASCASSTPVCVGQVSSPADSIETCGQVLPSI

SEQ ID NO: 331216 - protein, 409 aa, unidentified
MTVATDYSADIYLGIDVGKTNHHACALTTDGTKVYDKPLVQNETKLRDLFTTLATKHGQVLVIVDQPNTIGALAVAVARDCGARIAYLPGLAMRKAADLYGGKSKTDRKDAYIIADTARCMPHTLRAVDCDDKLLSTLKVLAGFDEDLANDTTRARNRARGLLTQIHPALEQALGPKLSSPIVLEILAHYGEPTKLAVAGRTRVTAWVDKRSTRDCSRLVDEIFTALDAQTVTVPGTRAAELVLPQLARHVTALLEQRATVAREVEEMVADYPLAEVLMSMPGVGIKAAAKILLCIGDGSDFPTPGHLAAYAGIAPVSRISGSSIRGEHPARSGNKMLKNALSYSAFASLRSHGPSKGYYERKRSEGKRHNAAVMCLARRRCNVLFAMLKNREFFKEVPPKPAPVPLAA

SEQ ID NO: 331217 - protein, 352 aa, unidentified
MEYFAGLDVSLEMTSICIVDADGVVMKEAKVASEPDDLVAFFEQCGMAMKRIGLEAGAPSQWLYGGIAEAGLSVVCIETRHAEAALSAMPNKTDRNDARGIANIMRTGWFRAVHVKTQSAQELRFLLVARQTLVRKLMDIELAIRGMLRSFGLKMGVVSKRNFEARVLELAGDRTMLMRALNPMLTARRALAVEYANLQKVALDFTRDDDVCRRLMTVPGVGPIVALTYRATIDVPSRFRRSKSVGAHLGLTPRTWQSGEVDRNGRVSKSGDLMARAALYEAAHILLTRVKRWSSLKAWGMRLVKNRGHKRAVTALARRMSVLMHRIWVEGTVFIWKTGDGQVAAPAAVAGA

SEQ ID NO: 331218 - protein, 414 aa, unidentified
MEKQWNIVCGADIHKKFLIATILSRDCTKITKRFGMTLDELLNFKNWVIENGCEQVAVESTGTYWVPIHTVLEGSIGLIVGNAYKIKHTPGNKNDLGDADWIAELCLNGMIEPSRIFPKADRDLRRLTRIREGYVNDMTREKNRIHHALESCGIKLSSVLSDVFGKAGQSILSGLLEGRTIDDILKGVNLKRIKATAEEIREAIKGSLDFTQILLIRGSLEQMEAIQKRIAEICREIKSRIAYRKEDLKIAMSIPGVGFTSASTLLAEIGDITDFKKPEQLAAWAGLVPSVYQSAGKLITGSITKHGSRHIRWILVQVARVIARGRNSKLKRFFLRVKSKKGSNVAVVALARKILCILHHLLTNREMYKEDGTNKKIKIDIGNEFSQREMDLEEMIKYIVRAGYEVRKGSAGGG

SEQ ID NO: 331219 - protein, 451 aa, unidentified
MAKRAKKRCEQLPILHPDAAGIDVSASELFVAVSPDRDFQPVRSFPTFTRDLNALADWLQQCGIRSVAMESTSVYWIPVYQILESRGLEVCLVNAQHVKNVPGRKTDVSDCQWLQYLHSVGLLRASFRPAGFICAIRSLWRHRSSLIQMAAEHVLHMQKALDQMNLQIHRVLNDITGMSGLRILDAILAGRQDPETLARLCHGGVKSSEDTIAKSLEGDYRLEHLFALRQSLAFRYYQQLVVEVDQEIQRQLGTLKTATTAEPTVPKRTKASAYQRRRYEPKTFDLRGELYRIFGVDLTNVPGISAITAQTILCEIGTDVSRFRNASAFASWLGLCPENKISGGKVLYTKSRRVRSRVATALRMAANSLHHAKDYLGEFFRRITRKLGKSQAITATAHKLARIVYHLLGTREAYNESVFHRCAEEAIKRAQYRLRKQAAQLGFQLIPVQNE

SEQ ID NO: 331220 - protein, 408 aa, unidentified
MNTLYVGIDISSKSNVVYMMLPNGDKHSNFSVASSHEGSIQLVKRIYSALTSHSLDTVLIGLEATSVYGDNLVYFLREDATLAPFNSRIHVINPKQVKRFHNAYNDLPKNDYVDSFVIADCLRFGRINKEVYSGDYRYQALRNLTRARFFTVQNLIKEKQRFMNVLFKKYSTMTQEKVFSNTFSATALAVYEEFDSAEALANMDLHELTDFIIEKGKNRFQNPDAVAKAIQKAARSSYRLPKTVNDSVNQVFSISITSMKALESQIKEFDKAIKAQTELLPNVLISIPGICPVYSAGIMAEIGDINRFDNQAALAKYAGLAWKQYQSGGFEAEVTRLIPSGNRFLKYYLCEAAFSLVRCDKEYSDFYHLKYKEVNRCQHKRALALTARKFVCLVFRLLKDNRLYCPAK

SEQ ID NO: 331221 - protein, 350 aa, unidentified
MMIIGCDLHTRYQQIAMVDTETGEFVQRRLEHESGEARGFYAGLKGAVRVGIEATGHTHWFEAMLSELGHELWMGDAAKIRAAVVRKQKTDARDAAHLLDLLCSERFPKIWRPGLAERDLRQLLWHRQKLVWMRGAVKNQMHALAMGEGVCRKKKLFSAKGRKELEGLTLGPWASYRRQELLRMFDELQGSVTKLDEAVEQAAQSQPLAVRLMTHPGVGPITSLAFVLIIGPIERFERSKQVVSYLGLNPQEHSSGGRQRLGSISKQGNPMMRSLLVEAGHTAARLDPQLQRMYQRLKFRRGAAVAKVAIARKLAVRMYWMLRSTADYAQLVRMRGSSWPTLVEDNPSLG

SEQ ID NO: 331222 - protein, 413 aa, unidentified
MEVLYRVCAGLDVHKKTVAACLRGPGPKGTRTEEIRTFGTTTRELLQLADWLTGAGCTHVAMESTGVYWRPVYQVLEGRVELLLVNAQHIKTVPGRKTDVKDCQWIARLLEHGLLRASFVPPAPFRELRELTRYRRQLVEDRARDANRVQKVLETANIKLAAVATDVLGTSGRAMLKALIAGERDAEKLAALAQGLLRKKAAQLREALVGRVTDHHAFMLQGLLSHIEFLDQQIALFDARIMAQTRPFAAALERLDTITGVARRSAEQILAELGDDMSRFPTAAHAASWTGICPGNNESAGKRKSGRTRKGNRWLRATLVECARGAVRARHGYLAAQYHRIARRRGDKTAITAVGHSILVIAWHLLRNGGSYRNLGHEYFDRLDRDRLVRYHTRRLAELGVVLPPPSPASAAS

SEQ ID NO: 331223 - protein, 376 aa, unidentified
MTWGCQAGVETANLITVMKNYKITPTESYESIKLGIDAHAKWYYVARQLDGATPQPVQKMDFEGLLHFVARQKRMAREVHTCYEAGAFGYHLHHRLAALGVTNYVVQPQDWDERGKGVKNDRIDAQALCQRLDRYVRGNRKAFSVVRVPTAEEERERAISRQRQQLVRERQRLQAMGRSLLAMHGIHVSGKWWQGKTWSKIRSEAPEWVIERLEVFSRLIAPLEAESAKLTSQIEAAATDQKIPKGVGPLTFEVLRREVGDWSRFTNRRQVSSYTGLCPREHSSGGKRRSGSVSKSGNPRVRAMLVEMVWRMTRWQPGYHGLQKWLPVLVDPARGGAARKKAVVAIARQLAVDLWRVFTGQTTAENLGLVYLPDAA

SEQ ID NO: 331224 - protein, 431 aa, unidentified
MDIQQFEVIRPKCAGLDVHKKTVVAAVCTSDPVTLTASYKTKVFNTTNSDIAALRDWLLAQDCHDVCMESTGKYWIPIFNILEPHMHVVLTHPKYVKAIKGKKTDKRDAKWIANLFRFDIVKASFISPADIRALRELSRYHLKLSYMRTAEKNRYQNSMTISRIRIDCVLTDPFGLSATRIMDYLLSDEPFDEEKCRSLIDHRVKASKDEVMDTVHGYHILEEQKFKMTHAKSHIDFINKSIDEIEAELFLRSRQYDEQIKRIATVTGITELSALFILSEIGTDMSVFESDRHLCSWAGLTPANNESANKKKSTRCSKAGQYLKPLLAQCALAAVKSKTEPYFAIKYQHLAKRRGKKKAIIAIARMMLTSIYHMLSENEDFHPDDYEATVNPPKQNPVILTFDNTIQFLREQGADPETLKLIQQQCAAQKG

SEQ ID NO: 331225 - protein, 316 aa, unidentified
MNDKRIIGVDIGKSWLDVAWEQAGRVQRYSNDAAGIAALTEKFDPARDIVVFERCGGWERNLEAAVAQKTVCWAIVHSRRVKAFREAQGIKAKTDRIDARLLRDYGCDRFNAGKLRPGRLEDVTLDGLVARQRQLKAMLHAENCRLATAALEAVRASIGRMITHLDEELAAIEAELVRYEQEHAEQVFKQQVLCGQIGVAKATARALLAELPELGRLDRKEITALGGMAPRVHQSGTSRRRRGLAPGRAAIKVILFNPARSAMHYDPQIKDFCSRMQARGKPGKVIMVAVMRKMLVRLNALLRDAMLQAPAAAAAG

SEQ ID NO: 331226 - protein, 317 aa, unidentified
MAKRVVKITLGVDVAKDECVVCNWETTEILSLPNQTDTIAVWLRTLSGPVQIALEPTSHYHLAWVEAARTLGHAIYLINPRQLVHYREAVNVRNKTDPQDAWLLARYLVHEGSQLRAWQPPCQQAQRLWALLKRRALSVTTHRQLQQSFGEIRLPAQALFTQFRRLLARIDQQIHRLIQALDWAGDYRRCLSIPGIGPLNAAALVAAFHRGTFANSDAFIAFLGMDVRLRESGRYTGKRKLTKRGEAELRRLLYCATQPARCYLPFEHCYQHQLDKGLSKIAAKVILARKLARIAFSLMNNQQMFMKKLNAELVLMP

SEQ ID NO: 331227 - protein, 365 aa, unidentified
MPSIVGGFDIHRKQLTFDYLDTVAGEVRRGQITPADRGHLRSWLAQLENPQDAAFAAEACTGWRYVTEELARAGVQAHPAEPADTAAARGRKKRAKTDRADARLLRDLLAEGRLPECWIPPEHIVECRALLECYHDLRAEHTAWVQRIHATLFHQGAPPFQGLRQADGPGQLTALAREHLSPAGQAQIAVCLRVLAALEAELTAMRHRLLAAAAHLRGAKALTGAIYGVGPITGLALTCWLGGAGRFSSARKAVRFAGLDITVYSSGGKRSPGHLSRQGPPVLRWCAYEAGKVSAHATAPDHPYYAAVKDRAGGKRAALAEARKIIRRACHILTELGDDAFTSVCPPTVRAPADGRIRDGAIISR

SEQ ID NO: 331228 - protein, 392 aa, unidentified
MIIVGIDVASEKHDYFMLHKETGESFSSSAITIPNNEAGYKKLHKDIQTFCGATGDSKVRIGLESTGIYHANIIAFLQEQNYETMVINPILTNMVRKASKVHTPKNDNLDAQAICKYLVDNESSFAPYTPTLYHIQALKSLSRKRFSIAKDLRKAKLAVSELIQLVFPEFKKMFKDIYCVSARSVLKAYSSPQKLARAHAAKVASLLHGACKCTAEQLIEAAKHTVGLKGDFYAFELLDAIEELEHIQCRIKSYDAQIKRYVDELCPNLLSIPGVGYTNAGLIAGEIGDVNRFHSADSLLSFSGADCTVYESGKYKAQHNTPSKKGSRYLRYALFQVSRNIWQWDPVFKEYYNKKAAEGKHYYVILGHIQKKVTRVVYSLMKSGKNYVKHTA

SEQ ID NO: 331229 - protein, 496 aa, unidentified
MKAKACKAKGKHSHSSKRGAEIAARRGAEGMEIVNPHAGGIDCGAQEHYVAVPPQSVEPGEPVVRCFSAFTEGLDALVEWLKACGVTTVAIESTGVYWIALCQKLEAAGIEVYLVNARHVRHVPGRKTDVKDCQWLQRLHSFGLLSASFRPEDMICRLRSLQRHRLNLVSTAGAEIQHMQKALQQMNLHLHHVVSDITGVSGLRIIEAILAGQRDAVQLAKLRDHRVYKSTLAQMQAALVGDYRPEHLFVLGQSLQAYRFYQARTQECDLEIERQLQQLTQRFESSSALGAELSQPEALDEADAPSQNPQPAKRKVKRKPQANEPKIDLADYLRRICGVDLTQVVGLNVLSVLLIVSEIGVDMSKWRSAKAFSAWLGLCPRNKISGRKVLDTRTCKVISRVATTLRLAAQSVGRTDTALGIFYRRKKGHLGPAKATTATARKLACLVYHLLKYKEQYREPDPNTYQLKVQKSILVKIQKQAATLGFKLLPTALVPA

SEQ ID NO: 331230 - protein, 351 aa, unidentified
MNGIHIAVDLAKTVFQIAECSASGKIISRKRLNRTEFHHYLIQPREQATIIMEACGTAHHWGRVAQAAGHRVVLLHPHYVKLYRRRNKTDRNDSDAIFNASRAVGIQPVPVKTGLQQQIQQLHCMREMWKSNRNQRINLLRGILREHGFENAAKTDDFLRQCSEAIDSVELKALAPQMHIVLAEIQHLSEWMATSEQQLNQLVAQDEIIERIDEVSGIGVLTASAFVAAVVTPERFKSGRMVSAWLGMTPKEFSSGTRRKLGAISLAGNVYVRTLMIHGARSALLAAKRCASRTPEKLTRLQQWAIQACERIGFNKATVALANKMVRISWAIWKHARQFDGNFVPNINRVV

SEQ ID NO: 331231 - protein, 340 aa, unidentified
MKLCGAMDLHSNNNVTVLSNEKDEVVYRKRLPNDLKLILGQLAPYQSEIEGIVVESTYNWYWLVDGLMEQGYRVHLANTAAIQQYNGLKYTDDDSDARWLAHLLRLGVLPEGYIYPREQRPVRDLLRKRGQLVRQRTANLVSIQNLFTRNTGSSMSANEIKGLQVEDIDGNVPANDLALAIKANLSVMQSADEQVQILEQTVTGRVKLRAEFKFLKTVPGIGQILALTIMLESGDIRRFASVGNFASYCRCVGSQKISNGKKKGKGNTKNGNKYLSWAFVEAANFAIRFSPKIKSFYQRKKSKTKGIVALKAVAHKLCRACYYIMRDRVAFDVTKAFGQK

SEQ ID NO: 331232 - protein, 347 aa, unidentified
MNHYAGLDVSLEETAICVVDSTGRIVKEARAASEPETLIAALREIDLPLERVGLEACSLTAWLHDELHSAGLPAVCIETRHANAAMKTMPNKTDRNDARALAQIMRTGWYRQVHVKSRQCRLWRSLLVARRTVLNEMRSIENVVRAVLREGGLKLGTPSRAAFAERVRDLMAEDASVKPLVHPLLTILVTMLDQFARLTKQVLDIVRREKVCRRLMSVPGVGPITALAFRATIDRPDRFRRSRDVGAHLGLTPARYQSGETDVSGRISRCGDELARTALYEAAHTLLVRSRKWSSLRAWGMKVAKTRGMARARVAVARKLAVILHRMWSDETEFRFGRNPAAALAAA

SEQ ID NO: 331233 - protein, 388 aa, unidentified
MQGKANRLEASSAIRSDLGAIFVSMELSRSIWLITSLSPGGGEKMSKHSVRAGDIGALLARFSGIRQKALTRTERSFPIIVIQEAGLDGFWIHRVLESEGIESHVVDPASIATSRRRRRAKTDGIDGEALLRALLAYKRGEPRVCAMVKAPTVEEEDQRRLCRERKVLTNERVLHVNRIKGLLFSQGVSGYEPLRRDRRQRLDELKTGDGRALPVHLKAQICRELDRLELLIKQIKAVEAERDAMLAPQQVAAPEPAAMLLAIKGVGPEFAAVLWSEGLFRHFDNRRQVAAYAGLAPTPWQSGSVDREQGVSKAGNPRLRTTLIQLAWLWLRHQPQSALALWFEERVRHNGGRFKKTTIVALARKLLVALWKYVTAGIVIEGAAMKAV

SEQ ID NO: 331234 - protein, 338 aa, unidentified
MAKITTIGLDLAKNVFHMVCCDRHGKIIKRKMLRRSGLLTWFANLPACLIGMESCASAHHWARALQAQGHRVKLIPAQHVKPFVRGNKNDYNDALAIAEAVTRPEMRFVSIKTPQQQDIQALHRLRERRLRDRTALCNQLRGLIGEYGIVFSRGVNVLRKRIPEILEDSENGLSDLFRSLLSQGYQHLTELDAHIDAYTEALDAHSKRDDACVRLQKIPGYGPIISSAFYSAVGNGEAYRRGRDVSASLGLVPRQHSSGDKQVLLGISKRGDRYLRSLLIHGARSVVIQAANKEDALSRWINKTRAARGFNKAVVALANKLARIGWAVLANSTVYQAR

SEQ ID NO: 331235 - protein, 319 aa, unidentified
MTKIISVGIDISKKTFDVSLFKNKKFKQKKYSNDNRGFKLFFEWLKKQDALSAHICMEATGIYGEALAEYLYDKGLSVSIVNPVRIKGFAQSELARTKTDKMDAKLIARFCTAMNPGLWQPQPIEIRGLRNLVRRLEALNAMHQQETNRLEAASDMIEEQLLRHLKFLKQEIKDTKSLAKDYIEQHPELKKRQALLESIPGIGEATIHVILSEFGSIAQFKNAKALAAYIGVAPRIRQSGSSLRTRGMMSKMGRSKLRKAFFMPALVALRYNPLIVKLKERLTDSGKSKMTIVGAAMRKLVHLIYGVLKNGVPFDQHFA

SEQ ID NO: 331236 - protein, 377 aa, unidentified
MLSIGIDVSKGKSTVCGMKPGGEIVYTPFEIQHTREGMSELLSLLRGSGEEVRVVLESTGSYHCPVVAALLENGIFVSVVNSLRMKRFCSQSIRRVKTDQIDAMQIALYGLAYWQELQPTRLPENTYRELQLLARQYYQMTSILIKAKVDFNALCDQVLPGMQELMSDHAGRHKLSDFVLRYRHTTHILEMGETRFRKDYCKWAEKKGYRNRERMAALIFATAQNGIPVLPNAPSTQIVITEAIRVLHTVEASRDAILTQMQALAKTLPEYSLVREMPCIGDTLAPRLIAEIGDVRRFHSKRALIAYAGIDAPPYQSGKFCANNRHISKRGNRYLRKTGYEVMQSYVMHKPANDPIFTFIEKNAARGRVVNSLWWRA

SEQ ID NO: 331237 - protein, 342 aa, unidentified
MDIDILGIDLAKRVFQLHGADRGGFAKYGAKVMRAELLTTVRKLAPRIVAMEACSSAHYWGRRFKELGIEVRLISPQYVSPFVKTNKNDANDAAAIVEAASRPTMRFVTVKSVEQQDMRAVHRVRELLVHQRTALINQVRGLLGERGVIIAQTPAAFKRAMPTVLAQCEGDMTNTFQAILIELLEQLRVLEERIARTNQWIAAFTKNSALCQKIQAIDGVGPITATAMVAAVGDAKEFKNGRHLSAWLGLVPRQYSSGGKSRLQGISKRGDTYLRTLLIHGARVVLRYAIGKADARSRWLQDLIARRGYNRAAVALANKNARVIQVLLSHTDSYRLPDGLAG

SEQ ID NO: 331238 - protein, 365 aa, unidentified
MKNIAYVGIDYHLKSLTIAVMIEGQNQLHDVIKMNNEDKPITKYLKKLAKDFEIKACYEASFSGYSFKRKMDAWGYHCDVIAPSLIPKKKGDHRKNDKRDAMELAKLYAGGLLTIVHAPTEYEESVRNLIRCRMAFKDSEKRAKNQINSLLFSQGISYGHNKWNNKHRSWLAKVQMPEKYLQVTLDEYLGHLSYLETRIKALDDQIEEIAKTDIYAPSVIKLRAFRGIGTLTAMLLIAEITDFRRFPDAKALMAFLGLIPSEYTSAEKHRGGAITKAGNSRIRKCLVEAVQHCSKNPRLSQQMKENLSQLDAYSANIAVNCMKRLHKRYWHLILKGKIRSVALTAAAREFTGFMWAMMQPEPANV

SEQ ID NO: 331239 - protein, 363 aa, unidentified
MTVYIGVDFHPYEQSVAYASDEDGEIRYRRFLHSDKQSIRAFYRKCGADAVIGVEATGCLWWFEKMLADGGHKLKIGDPRMIRRAALSRHKNDFRDAETILDLLMRGAFPSIVPRSEESREVLDLLHYRQTLVQKRTSIANQLQAFARGKGLARFRMPAVKGRRKLVAAPVTEIETLLVTSRLVLFDEITAQMKALESRLEQLAAADERARLLMTHPGIGVINALALVHTLGEVRRFRRKEEVVAFVGLDPLEKSSGQTKRIGQISKHGSRLARHLLGQAAQACRDHRIRKFYLEVSRRRGRPKAKVAAARKLLINCYVMLRDGIGYEEFQRRGEVGLCEGSGEVRAKASVSGGLRARPAISR

SEQ ID NO: 331240 - protein, 348 aa, unidentified
MRLYKQQHRYYAGIDLHARSMYAHILDDQGKTVLDQDLPASPAAFLDAVKPYRDGLVVGAECMFAWYWLADLCEDQTIPFVLGHALYMKAIHGGKAKSDKIDAGKLAALLRGGLFPMAYTYPRAKRQTRDLLRRRSSFVRQRAQLIAHIQNTNSQFNHPPFSKKLTYAGNRTAELTERFTDPSTKLSVEADLGMIGSYDEQIATMERHLTKNAKVDDPVTFGLLKSVPGIGPILGLVLLYEVDDMKRFPEAGNFLSYSRLVRCEHSSAGKVKGSGGKKIGNAHLKWAFSEAACLMLRSCPAAKSWLQRREKKGGKRKALALLEAKLGRCVYHLWRKQVPFDLKRFLNS

SEQ ID NO: 331241 - protein, 429 aa, unidentified
MVCTRVPHPAKPGRRATKVWQVPATTNAIIELADQLACQGIQRVVVESTSDYWRAWLYLLQARGLVVWLVNARDVKHLPGRPKTDKLDAVWLARLNERGMLRPSFVPPAEIRQLRDYTRLRSDLTAERGRQVQRLEKLLEDALIKLSTVATDIMGVSGRAMLEALIAGQRDPKVLAELARGRMRGKRGALVQALTGGFDDHHAEPARMLLDHYDALTGQIDRLTVRIQELIGAIPAAQAPSDGAGPTGGGDGGTTGVGAHPPVAQPPLGALDRLDEVPGVGAKAAQVIIAELGLDMGQFPTPGHLVSWARLAPRTIQSGAKHRAGATGKGNPYLKGVLGEVAAAAAKTDTFLGERYRRLVRRIGKLKALVAIARSILVIIWHLLADPTARFHDLGAGYYPSRIDRDHKTRNHVRQLQALGYSVTLTPAA

SEQ ID NO: 331242 - protein, 419 aa, unidentified
MICVLDVHKESVLALEADGDGKEQGHQRLKADRQNMEGYLKGLPENSTVIMETCYAWEYIYDLASERGLNAIVVNTGALYPNGKPEKKNDLEDCRRMLRLHRIGELPTVHVLDVKVRVLRDLLRQRMFVTQKITAFRNRTHFQVDRLGLRLPNSELFGVEKADLSKLRIDRANMVQIASNQRILDALEAEEKALEAELIKQLAPTEEIRTVLTIPGVGFILSAAIVLEIGHISRFPGMENLTAYSGLVPKLDISDGEEGPGRLRKRCNKHLRWAAIEAARHAMQCDEAMRQRYLRRLGCPEGLATKERRGKAVVAVARHLLEVVWCMLTRGEVYRTPQKTVPEKKMRIITRKAKAYNLPEIENLAGKVGETLQKETDLVWSPSGQWEGGWEGNVVDRAVEQCGHRAPARAAITPASIFL

SEQ ID NO: 331243 - protein, 369 aa, unidentified
MQNTIVHQEGAASLETARTKIKLCASIIKIGLDVHARIYVAVAQYDQLLPKPARRLTPSEFVPWVEALLRAGHTVHVVYEACGFGFNLYRGLKALGAHCYVIAPRQLDEQCTRIKTDPRDATTLCQRLSRYVEGNTRELAVIRVPSEQEELDRHVSRQREQLVRHRQKLEAQGRSLLINHALPTPAHWWKQQTLEPIGKHLPAWIRLRLEVARPALLSLQEQINALTSELEAAAPASIPAGLGKLTSVVLTREICNWHRFHNRRTISSYTGLCPGERSSGSKRVPGSVTKRGNPRLRAALVECAWRMVRFQPNYPPVKKRLGVVAKGARATGAQRKKAIVAVARRLAVDLWRVHTGRCSAQQLGLNISN

SEQ ID NO: 331244 - protein, 348 aa, unidentified
MLADQLDYVVGVDPHRDSHALAIVHVVSGAVVFEAAVDASSDGYAHALKLADQHAPGRRAFAVEGTGSFGAGLTRFLTGRGEWVLEVGRLRRERRSGGKTDALDAVRAARSMLTSERAATPRAGGERQGLQALVAAREGAVNAKRAGLCQLRDLLITTPEPLRSELRPLTRARLLQRLAATRPGGGRDPELRGSMLALRSLARRVLQLTAEERELAREIEALTRKLAPQLLDQPGVGPHAAAQLVLSWSHRGRISSEAAFARLAGAAPIPASSGQTIRYRLDRSGDRKLNRALHMILVTRKRSHPATTAYIERRMQEGKTRREANRCLKRYLARSLYRLLEHGTPIAT

SEQ ID NO: 331245 - protein, 372 aa, unidentified
MRKSIMHVGLDVHKDSIEITTADHGRDGEVRRFGKIGGDLASLDKAVRKLQSTGRKLQFVYEAGPCGYTIYRHFTGKGFDCKVVAPSQTPRKPGDRVKTDRRDATSLARLDRAGELTYVHVPTPEDEAMRDLVRARADAKRAETRARQQLSAMLLRNGTAYAGRTAWTPAHERWIAKLKLPLPAQQIAFQEYVTAISEAAARVERLTRQMLELLQSWRWAPVVEALQALRGVAQLTAIITVAEIGDIARFNHPRQLMSYLGLVPSEYSSGARRSLGEITKAGNSHVRRMLVESAWAYSHPARVTPILKKRLEKQTKQIREISWKAQLRLCGKYRKLARRGKVKQQVVTAVARELVGFIWAIAREVQLSPTQV

SEQ ID NO: 331246 - protein, 338 aa, unidentified
MKKYIGIDLHSNNSVVVVSDEEDRIIYQKRLPNDLAQILMALAPHKEDAIGVVVESTYNWYWLVDGLADADYQVHLANPGGIKKYEGLKYSGDFADAAYLAHLLRLGLLAEGYIYPKEGRAARDLSRKRMQLVRYQTAQILSIESILVRQTGTRMKCEAVKRLTAEQVDELGFVPDVALALESNRAVSQVLQQQIETLEKRLKERVKLKPEYRLLKSVPGIGETLATTIMLETGSIARFAEVGNFSSYCRCVESLRESNGKKKGKGNTKNGNKYLAWAFIEAANFALRFCPQAKSFYDRKKRKTNSIVAFKALAHKLARACYHILREQKPFDVNRCFV

SEQ ID NO: 331247 - protein, 346 aa, unidentified
MNITQVGIDLAKLVFQVHGVDARGKVALRKQLKRSQVAEFFAQLAPCLIGMEACGGAHFWARKLMEFGHTVKLIAPQFVKPYVKTNKNDAADAEAICEAVGRPNMRFVPIKNIEQQALLGLHRVRQGFVAARTAQANQIRGLLTEFGLVIPVGIRSIERKVPEFLEDGENGLSGASRALFARLFEHFRELDRQVAELEREIHAWHREDARSRRLQAIPGIGPLTASALVASVGDAKLFHNGRQFAAWLGLVPRQNSSGGKTKLLGISKRGDTYLRTLLIHGARSVLFSLKRDPDRAERWLTRVAVRRNPNIAAVALANKNARTVWALLAHDRDFQAGYRSMAPAAA

SEQ ID NO: 331248 - protein, 408 aa, unidentified
MIFVGVDWAEVHHDVCILDEGGDVLARKRIPDALAGVQQLHAMIAEHLGEKNDAESVVVGIETERGLLVTALVAAGYQVFAVNPLAASRYRERHHVSGAKSDPGDAKVLADLVRTDRHNHRAIAGDSVLSDVIKLLARNHQNTIWECQRQVNTLRSALKDYYPGALEAFGTELSGPDAVAILSIAPTPTKARALTKARIETALRKAGRRRLLHERVNRIYEILRREQLTQPALLEDAYGVATEATIANIAQLNASIQKLEASLSTHFEQHPSAKVILSLPGMGTVLGARVLGEFGDDPNRYADAKSRKNYAGTSPVTKASGKSRVVLARHSRNKRLASALDQWAFSSLLPSPGARSYYNELKSRDKHHRKAIRQLANRWVGILHGCLENDTPYDEAIAWSHQQSDVAI

SEQ ID NO: 331249 - protein, 355 aa, unidentified
MNDAKYIGLDVHQATISVAVRDCTGKLVMEAILETKAETILQFFRGLRGSLHVNLEEGTWAAWLYDLLQPHVTRVVVSDPRKNALLKDGNKNDRIDARKLAELLYLNKFNAVYHGQHGLRTLKELARSYLTITRDLTRVMARIKAIYRGWGIPCAGQHVYALSHRAEWLGKLSEAGVHRRAEFYYQQFDALALLRQEARRELLVESRKHSAVKLLRQIPSIGPIRAALLVALLQTPYRFRTKRQLWAYIGLALTTHASGEYRFERGQLQRSKKVLAIRGLNRNHNHDLKNIFKGAATWAAANSGPFKNFYEACVARGTKPHLARLTLARKIAAITLLVWKKGVCFDAEYLKPQAA

SEQ ID NO: 331250 - protein, 360 aa, unidentified
MMIIGCDFHPRFQQIAYIDQETGEYGERRLSHPEEAERFYRSLAGRQVRIGAEATGNFRWFRRLMQEQGLEFLLGDASAIRACCPRKQKTDQRDARHILTLLVEDRFPAVWQPPVENDDLRQLLLHRCRLVRMRTRVKNQLDSMAKDDGLLISRVWSPRRRCEIEALPLPGWYAQRRADLLGLLDGLDKQIRPLDEAVRKAAEGNREACLLMTHPGVGPIVSLAYVLSIGDWRRFPRGKQVGSYLGLIPAEESSGDKRRLGHISKQGNSLLRWLLVEAASKAQSSDASWHRQYVRLSMTKHHGVAKVAIAHKLAVRLYWMLRSGEDYSKEMERGSYAGSPCSAVARLVAERLIGRPASSL

SEQ ID NO: 331251 - protein, 412 aa, unidentified
MQVIHPRCAGLDVHQKTVVVTSMITQQDGTVQRERQTFSTMTADLLVLDDWLRQRQIEIIALESTGVYWRPVFTILEEGRTVILVNARHMKAVPGRKTDIKDSEWIADLLRHGLLQASFIPPEPIRELREVTRYRKTLIQERADETNRLQKVLEMANLKLAVVATNVLGTSGRAMLEAILGEQQDAQVLAELARGRLRSKLPALQQALEGRVQPYHRFLLTRILAQLDFLEESLLVLQQDSEERLTPYTEAVELLKGIAPLQEKASATVRAEIGVDMDRFSSDKHLASWAGVCPGNYESAGKRLSGKTTHGNPYLRAVLCELAWVVAHMKGTYLSAFYHRIARRRGKKRAILAVAHKLLVIIYHVLKTKKPFVDLGADYFDKLETSRIQRRAVNRLEQLGYQVTLTPVQVAS

SEQ ID NO: 331252 - protein, 361 aa, unidentified
MGGRREIELSLAPEAVMKQDPRRPRGINPNSRLSRRRSPRASSSHSQDRVTPMSESKSIGIDVAKDSLSVASSPAGLTLDVLNSPEGRRQLIKSLKEHTVSLVVLEASGGYERALAADLLEAGFKTVVVNPRQVRDFARGLGELAKTDPIDARVLARFAQVVQPAPRSAKSAQQAELAELVSRRRQLVDALTQESNRIEKVRLPQIRRSIEAMRHTIEKHLEKIDDEIAKIIEADESLSSKDKLLRSTPGVGKGSSAMLLSHLPELGQLNRQEIAALVGVAPWDCASGKWTGRARIWGGRADVRAMLYMAALSAMRFNPAIRAFAERLKAKGKAFKIVITACMRKLLVMLNSMLRSKTLWR

SEQ ID NO: 331253 - protein, 336 aa, unidentified
MKKIFVGIDISKMWIDVCVTLNGNITTHQQFENNKMGFKAMVKWIRQFSRVQQEWLLCMEHTGIYALPLWYFLTEEKISYCVVPGSVITSGLEIRRGKNDKIDAEDIARFTMHYADELKPHQLPTQVLQRLRMLFAYRERLVKASVLLKVPAKEAKEFAARESKEVRTDSSSLVQIIEARISKVEKLMLEVINSDEQTATCYQPIVSVKGFGIVTACYLLIITQCFTVLTKSRELANFGGVAPHPHKSGKSIKGKTRVSPIADKKLKALLSRGASSLIQYDEGTKNYLTRMMAKGKHENLVKNNIKNKMLHTVCAVVKRGTPYIKNYVSPYAQHVA

SEQ ID NO: 331254 - protein, 360 aa, unidentified
MVQTMTWVGLDVHARSVHACVVDAETGEVRRSRMGGDADEVMRFLGALRGPVRAVYEAGPTGFGLARAASAEGIEMIVVAPGKTPRAAADRIKTDQRDSELLVRLLMAGSLRAINVPSVTREAARDLVRAREGLRQDLMRARHRVSKLLLRYGRVYPRQRGTWTLAHRDWLAAQRFDEPALALAYIDSLAAVDALVARRVVFDQHLSQIAATPELWPLVSRLRAFRGIETLTALGLVTEIGDFERFGRPRELSSWLGLVPSIHQSGQSLTRGGITKTGSQLARRLLVEAAWHYLRPPRVGQMLRNRHDGQPAQILEIAWRAQHRLYRTHTRLRERGKPGNVATVAAARELSGFIWAAATA

SEQ ID NO: 331255 - protein, 345 aa, unidentified
MEPMYYIGLDVHKRKISYCVKDSGGKVYSEGSLSATRLDLDVWMKTLPQPWSAAMEATMFTGWIYDHLKPHAAALKVAHPLMLRAIAAAKKKNDRIDANKICDCLRCDFLPECYMAPTAIRERRRTLRYRNLLVRQMVQMKIKISSLLMEAGVSYNKQRLHKAGYFRELLATNPDIDEGLRSLLRLCRETVVRLQKTESALVRSLESDSLLMDRVERLMTIPAVGPITALTWALEVGDVQRFSSIKKAISYCGLCGAEKSSGNTVQRTPLSKQRNKHLQTTLIEAAKMAPRNSPELAMLYDKEKQKGNANRATLAVARKLVAYLVAVDRRQKEFLTVERENRTAA

SEQ ID NO: 331256 - protein, 366 aa, unidentified
MKKLTTKGICRNGKLQDQQLTIGLDLGDRSSFYCVLNGAGEVIAEQKVSTTPDAMKKTFGKMARSRIALETGTHSPWVSRLLADLGHEVIVAHARNVRLIGESRRKDDRLDAQALARLARVDPQLLSPIQHRSAQAQADLSVIRARHALVRARTALVCAARGLTKSFGERIRGYSAKGFKQATGEALSPQLQVALAPLLSALETMNERIREYNVQIEKLAEESYPEVALLKQIKGVGTLIALTYILTLEDPKRFRKSRDAGCYIGLQPGRRNSGQSEPQLHITREGDSYLRMVLVQGAHHILGPFGEDCDLRRWGLKLAERGGKNAKKRAIIAVARKLAVLLHHLWSSGEEYEPLHNTHKRTLAAA

SEQ ID NO: 331257 - protein, 413 aa, unidentified
MEVLYPRCAGLDVHKATVVAAVRLVAGGKVAREVRTFATTTAGLLALAAWLGENGCTHVAMEATGVYWKPVWHVLAEGGFDLVLANAAQVKNVPGRKTDVNDATWLAELLAHGLVRASFVPDAPTQELRSLLRTRKQLVRERASHVLRLQKTLEDANVKLDAVLADLLGRSGRAMLEALVAGETDPEKLAAFAHPRLAATPERLQEALRGRVTAHHRFLLRLHLDQVDALEAAIGRIDREVEERLAPFSTAVDLLASIPGVGALAARVIVAEIGLDMGRFPTAGHLVSWAGLCPRNDESAGKRLSARLRKGAPWLKTILVQCAWAASRKKASYLQAQYHRLRARRGARKAVCAVAASILTAAYHMLKDGTVYRDLGPGHLDRRSRETQARRLVRRLANLGYAVELAPLEPAPA

SEQ ID NO: 331258 - protein, 662 aa, unidentified
MPAAPAAPLDVIGVGIDTARHGHRAAFLRPDRRPAAPPLTVLENRAGYQALRDHLERLHQQHPQARFHVRIDAAGQYAANLEHFLRGLPLPLVISIGEPKRNKDYQKAHFPKRTTDDTESQAMARFAVVEQPPATPAVPPPMALLREVASRLHAGVKQTTRAVNRLHNLMARVFPELADLARDFSAGWVLDLLDRYPTPQRLARARVASLADIPYLPQDLAEPLRQAAASSIGSQHGEVAETLVRDLVSQVRHGLRHEEQMRRLLTEAFEALPPSGHRQLLTIPGIGPATAAVLVAKVVAIERFASPEHLVGYFGIFPQEDSSGVTPDGQPRPAGSQPMSHKGNDLVRAYLWNAARSAIQHNPAVRALYRRLTAGGKRGDVALGHCMRKLLHLVHAVWTTDRPFDPEHFPWEGPPETPSALDQPSAPAPAASAPAAAAPAAPATPAAPAVSAAPVTPAALDRDADPDRVAAPAAPSASALPAPTVPAAVAVAANEEAVGHMREVPAGSVVTTASAKGAPPPPPVNRPSARAARPRVDYTFLREQVGMEQVLRHLGVFAQLRGRGQQRRGPCPVHRPAAGCLPTFSVHLGKNVWQCFQTGCEAHGNVLDLWSAVHRLPLYEAALHLAETFGLRRNREEEPVNSGRPRGEPASKNGPVITADDP

SEQ ID NO: 331259 - protein, 336 aa, unidentified
MKITVMGIDLAKNIFQIHGVDEKGKVVRKKLTRKKLMEFIANTPQCLIGVEACGSSHYWVRQFKKHGHTVKSMVPQYVKPYVKTNKNDFNDAEAICEAVQRPTMHFVSEKTIESQDIQCAHRIRSRLIKSRTALTNEIRGLLSEYGIIVPKGNKALKTKLPEILETAENDLTSLTREMFSELYEELSEIEEKVQAFDNRIQKIFKASETCQRLAKIEGVGPLIATAAIATIGDPKAFKNGRQCAAWLGLVPRQSSSGGKTNLLGISKRGDSYLRMLLIHGGRAVVKNVSNKTDARSVWIAEKEKSRGKNRAAVAVANKNARIIWKMLKTGEDYRMA

SEQ ID NO: 331260 - protein, 417 aa, unidentified
MTEDVHWLVGIDWASQKHQVCLLDLDGRVVGEREFDHEGTGLSQLCNWLIEQTKALPGQIAVAIETSHGPIVEMLLERGFQVYSINPKQLDRFRDRFTVAGAKDDSRDAHVLADALRTDRRAFRRLSVENPLLIELREWSRMLEDLKQERNRLSNRMRAQLWRYYPQALEIADDLAANWFLDLWQQVLTPAKAARVKQATIETVLKANRIRRFDAAEVLRVLRQKPLWVAPGTTEAACAHIRTMAARIRLVNQQIAEANRQLDELCDKLEAEADNAPGQKCEQRDVTILRSCPGLGRINIATLLAEAPEPLRRRDYHALRALCGAAPVTRRSGKQHIVVRRFACNKRLQNAVYHWARVATQHDPISQRRYAALRGRGHSHGRALRGVADRLLSVMCTLLQQQMQFDPHYASSQMATA

SEQ ID NO: 331261 - protein, 428 aa, unidentified
MNYNQNEKIAQITSQTLIIGVDIAKFKHVARAQDFRGMEFGTPCHFENSHAHFDLFLSWIKQLMDQNKMDKLIIGMEPTGHYWLNLAHYLKEREIKFVVVNPMHVKKSKELDDNSPTKNDVKDAKVIAQLVKDGRYAEPQIPQGVYAELRVARKIRDLLSVDLQMLQGQIHNWLDRYFPEFLTVFKDWEGKSALQLLKLNVLPQELEHISDQDILTHLRKAVKRAVGLRKIHELKRAAKDSIGIREGSKMAKLELRTLLEKYELVVERFEELDSDIEGLLEQIPGVPQMLAITGIGKDTVAGFFAEVGDIRNYSHPRQIIKLAGLNLKENTSGKHKGLTKITKRGRKALRALLFRVAMPLVAKNAAFKALHHYYTTRQSNPLKKMQSMIAICNKLIRILFTIGTKQCEFSEERMLKDIPHLASLQAAA

SEQ ID NO: 331262 - protein, 350 aa, unidentified
MIIIGCDYHPSFQQIAFVDTETGELQEQRLTHHEEAEKFYRDLAARGEKLRVGMEASGHARWFERLLAELNFELWMGDAAKIRAKRVRKKKTDREDARHILKLMLKDDFPKIWVPSWDNRDVRQLLWHRHRMVQMRTRIMNQLQAVALNEGLRCKKRLWREKGRKQLESIRLAPWATRRRRDLLELLDRLNPTITELTQLIEQEVEKYPAAQRLMTHPGVGALTALAFVLIIGEAERFECGKQIAAYLGLVPEEDSSGESRRLGHISKQGSGLMRFFLVEAAQVTVRSDPEWRNKFFHLAMRRGRKIAKVAMARRLAVHLYWMWRKQWDYEQLKKFGPHAGKPGTGVGVQ

SEQ ID NO: 331263 - protein, 373 aa, unidentified
MDAPTRNGIVCVPEWKCHQPLEPEGASIMNITTIGIDLAKSVFQVHGVDARGKAVLKRQLRRDQMASFFANLPACVIGMEACASSHHWARKLQGLGHTVRLMAPQFVKPYVKTNKNDLVDAEAICEAVGRPNMRFVAVKSVEQQAVLSLHRVRQGFVKARTAQANQIRGLLGEFGLVMPKGIVNVAKRVPDLLEKAGEQLPATFCQLITRLLCHMKELDRQVGELEAQIKAWHRNSTLSQRVAKIPGIGALGASALVASIADARSFDNGRQTSAWLGLVPRQNSSGGKPKLLGMSKRGDTYLRTLLIHGARSAILSAQRRTNVDPWLAGLLHRRHPNIAAVALANKNVRTVWALLAHDREFRPNNIPAPPAAE

SEQ ID NO: 331264 - protein, 338 aa, unidentified
MSSVTVYVGLDYHQSAVQVCVMDASGKVLLNRRCPNCWRTIAAVVHRHGGCVQAAIEACSGAAELADELVQQGGWSVNLAHPGYVARLKQSPDKTDFGDARLLADLERVGYLPRVWLAPEPVRELRRLVRFRQQLAQQRRNTKLRIRALLRELRLVVPAGRSAWTRSWIDWLKRTDVFGRQTRWIMDRHLNELERLDREIRQVEQLLTSTTKDDQLVQRLMQTPGIGLVTAVTLRAEIGRFDRFRSGKQLARFCGLSPRNASSGQRQADAGLIKAGNPQLRAVLMEAAHRLMRYEDRWIALGHSLRRQGKPNSLVVAAIANRWIRWLYHQVPAYELAA

SEQ ID NO: 331265 - protein, 392 aa, unidentified
MIFVGIDVAKSKHDCCILDSDGVIHTDSLRINNDKEGFEKLYSTILSILNSNTIDNVKIGLESTGHYSNNITNYLYSKGFEVHILNPLATNLFRKASTLRKTKTDKTDAKVIATMLFSDESKSYSPSSYQIQELKSLTRHRYRMIGYRSKLKLSVTRLLDIIFPELEGFVWSVHQSSSYALLLELPTPQEISSCHLTKLTSILKKASRGKYGKDKAVALKELASNSIGSGNRSTSFELQQTIRLIQSVQSEIDALDKQIKIVVDELNTPLLTIPGISYTLASIILAEIGEIERFATPAKLLAFAGMEPSTYQSGKFTASKTPMVKRGSTYLRWAVLQAARLVSMRDYTFSVYMNKKRSEGKHYSVVQSHVGKKLIRVIFYLLKNNETFVPQS

SEQ ID NO: 331266 - protein, 318 aa, unidentified
MTNITTLTAGIDTAKDKLDVAIHGQTAVWTVENSLPGWKRLAGELAKAGVQRIGIEATGGYERGVTRHLQGAGFTVVVLQPLQVKAFAKLHLRRAKNDRIDAILIAACTVAIDAQNKLPPDPRFDALTDHLTFIEQVEEDIARYKTRLEHVSNKRLRRSIDADITRLERRRTEELKRLIGAMRGHADLARRFDLVLSVPSIGERTALALVLRMPELGQVSREEAAALAGLTPFVHQSGKHQGETHIGGGRARLRHSLYAAALPGAFRWNPALKDLYARLMARGKTHKSALVACARKLLVFANTVAARGTPWLNKPAGA

SEQ ID NO: 331267 - protein, 351 aa, unidentified
MPATARTAIAVIGIDIGKNSFHIVGLDDRGAIVLRQKWSRGQVEARLANVPPCLIGMEACVGAHHLSRKLKALGHDARLMPAKYVRPYSKGQKNDFRDAETIAEAVQRPTMKFVATKSADQLDLQAMHRVRERLVSQRTGIINQIRAFLLERGIAVRQGQRFLREELPRLLAAPPEVLSPRMVLIIEGLASDWRGLDTRIEDLSAEIEDLASRDAGCERLMSIPGIGPIISTAMVAAIGTGDGFSKGRDFAAWLGLVPRQISTGDRTILGKISKRGNRYLRVLFVQAAWVVLVKVKPDRWEGHGLKPWIEAAKKRLHHNVLAIALANKLARIAWSVLARGRAFEASKLQVA

SEQ ID NO: 331268 - protein, 417 aa, unidentified
MQVVYPHCAGLDVHKRTVVACCLTPDPKGGWHTQTRTFQTMTVDLLALADWLHEREVTHVAMESTGEYWRPIFNILEAEFETLLVNAAHVKNVPGRKTDVRDAQWLAELLQHGLLRPSFIPSVPVRELRDLVRHRSNFVRERATLVNRVQKVLEAANIKLASVATDVLGVSGRRMLDAIVAGEADAAVMAELARGRLRAKRAELAKALDGRVRPHHRFVLTELLCQIDSFDETITRFDEQIMEACRPFEHAVERLDTIPGVGRETAEMIVSEIGVDMTRFASANHLAAWAGVAPGNHESGGKRLSGRVRKGNQALRKGLVQAAHAAAHTKNTYLAAQYQRLARRRGSKRAVVAVAHSILVIAYHLLQRQEEYRELGGDYFDRQRPEATVNRLTHRLEQLGYQVILQQPALVEVCASA

SEQ ID NO: 331269 - protein, 341 aa, unidentified
MEKFIRTAIDLGKNYFQVHGLESEGGRSISRKVKRSRMHEVYSQIAPCRVGMESCGSAHYWARQLTAMGHEVVLIPPAYIKPYVKRGKNDAVDAAAICEAMSRPDMRFVPIKSADQQAVLMLHKTRELLVKQRTMAVNALRGHLAEFGIVAARGIGRVDELLALAEADAALPHIARAAVACMAQHLEGLDLSLETMEEEIAKAHRQNPTSRLLDEIPGIGTLIASVTAASVPDPGVFKSGRDFAAWLGLTPRQHSSGGKEKLGAITKQGNRYIRKMLVTGATSVLRVAGKRKGALADWINALRARKPERLVAVALANKLARICWAIMTTGEGFRTEMYLKA

SEQ ID NO: 331270 - protein, 427 aa, unidentified
MNQKDSSRIKEFRQIRKEVRGSREYLVVGIDVAKDKHYAYFGTATGETLLRRLVFENDIEGFTKLHDRTEALKVRHCLSKVVYGLEPTANYHKPLAEYLIKRGDNLVLVSGVAVDRNRGTLDGRWDKHDTKDAANVADLISQAKFQYYDYPSIELRDLRNLLSFKRRLKKQEHGTKVRIRNHLLAQYFPEMDRFVGKGASEGLSIVKWCLNPSVISSMGYDEFVRLVAPRIKTIGQENRLKAIWTLAKDSIGCEVGEALGFEAKLMVEDLQQIRESINKVDEHIKAICLGFPEYNCLLSIPGFGPDVSSKVIGAIGDPFRFDNGSQILKLAGFDLSATRSGKTSEKAVPVISKKGKASLRYAIYQAAFIACTKNEHLIVYYTNKLRGREREKGIKIKMIVKLAAKMLIIAWTLMKKQVFFDPKHLKI

SEQ ID NO: 331271 - protein, 340 aa, unidentified
MNIKRIGLDLAKNVFQIHAVDHREHVVLRKTLRRDRMAAFFTQLSQCLIGIEACGSAHYWARELTRMGHTVRIIPPRLVKPYLKGQKNDANDAEAICEAVSCPGMRFVAIRTERQQTLQAEHRVRARLIRARTALSNEIRGLLGEFGVVLPAGIAQLRKALPEIVSQQVQWDECFIRLLCELSEELQGLDERVARHDRRLQQSARDDIRIKRLLAIEGMGPVVASALVAAVGDGRQFRSGREMAAYLGLVPRQHSSGGKARLGHISKRGDRYVRTLIIHGARAVLNACQNKTDRRSQWLQGVSERRNRNIATVALANKNARIAWALLSREEDYHGIQVTG

SEQ ID NO: 331272 - protein, 422 aa, unidentified
MLEEDRHTEEIIERVAALDIGKAEVMACVRVPHHDGTGRRLQEVKPYPTMTRSLLRLADRLSELGVTRVVMEATSDYWKPVYFLLEAHGFQTWLVNARDVKHLPGRPKTDKLDAVWLCKVAERQMIRPSFVPPPEIRRLRDMTRYRCDLVEARTAEKQRVEKLLEDAQIKLSVVASDIFGVSGREMMAALIAGQRDPQVLAQLARGRMRVKITQLEEAFTGYFTGHHGFLLTKMLARVDVLSADIAELETRIEEMVAPFGTAPERLDEIPGLGMIGASVVLAEIGLDMTRFPTAGHLASWAKFAPGVKESAGKKKGTGSTGHGNRYLAKVLGEAAVAAGRTDTFLGERYRRIARRRGKKRAIVALGRTILVIIWHLLSDPNTRFTDLGSDFYDTRLDPERRKRAHIHQLEALGYKVTIEPAA

SEQ ID NO: 331273 - protein, 357 aa, unidentified
MALVGLDVHQAQTVAAVLDPVSGELRLERLRGAPLEVVPAFLERLERPVRAVYEAGPTGFGLARAATARGLDLRVIAPSSIARASGDRVKTDRRDAKRLVRLFAAGELSFAFVPSEADERFRDLVRCIDDARKDLMRSRHRLSKFLLRRGMRFAGRQWTQPHQRWLGTRRFDDALSQATFIDYCCAVDALVQRRRTLIEVLEQAVPASGHAEVIARLRCFRGIDTLSAAGLCAEVGSFDRFAKPALLSGFLGIVPCEYTSDSKRVQGSITKAGPTHARRLLVEAAHHYRRRPRVGDGLAARQAGQDPRVVQIAWRAQRRLHSRWAHLGQRRGKPTGTVAIACARELAAFCWEAATLN

SEQ ID NO: 331274 - protein, 345 aa, unidentified
MKKVSTLSIDLAKNVFQLLGVDSQGYPCLSKRLSRSKFKETIVNLPPCDIVMEACASSHFWGRACLAAGHQVNLIPAQHVTPFVRGNKNDKNDCLAIYEASRRPNIRFVPVKTEQQQAVLIPHRMRERVLSARTACINQTRSLLLEFGIDIPQSYNKFKQELRGLLTHSLQPAVLLMISEVCDELTCFERKIHLLDDLFKQENTRSEAAQIIQSIPGIGLINTSAFVASIDKGQAFKSAKEFAVWLGLTPSQYASGNTNRLGSITKRGDGYLRKQLIHGARTVVTHANKKDDDLSRWITTLKQRRGHNKAVVATAHRLARLMWILLQKNEPYRPQYTQQGAVHNV

SEQ ID NO: 331275 - protein, 399 aa, unidentified
MNDNNAPRVFLGLDVGKSDHWACALDEAGTILWNKTLPNDQAKLEELFNNLNTCGQLLVVVDQPATIGALAVGLAQQMGIEVAYLPGLTMRRVADLYPGEAKTDQKDAFIIADAARNLPHTLRELTAQDKDDAALGMLTGFDLDLTRQVNQVSNRIRGLYTQIHPPLEKALSTKLDHDAILEVLATWPTPEQLRRAGRARIDAKLQKHSARRHLAWAQELLDALAQQSIIVTGTDAAGAVIPHLVRQLILLHAQRADVALRVEELVKDHPLHIVLTSMPGVGIKTASIILAELAGKHFATPAALASYAGLAPTTRQSGTSIKSERVSHSGNKRLKRALFLSAFATIRSDAISRAYYDRKRAEGKRHNQALIALAHRRLTVMFAMLRDGCLYDPPISKAA

SEQ ID NO: 331276 - protein, 345 aa, unidentified
MDQISRIGMDTSKHIFQLHGVNAAEAPVLRKKLRRKEMVTFFEKLAPTVIGIEACSASHQWARLLQSFGHSVKLIAPQLVKPYVKRGKNDAADAEALCEAMSRPTMRFVPVKTAEQQAALMLVGVRDRLIRNRTQLTNAIRGYAGEFGFTAAKGKAHLDPLLERIQADESLPALARELFAAQAKEYAQLQAQIDEVDARLMAWHRADECSQRLTKIPGVGPIGALLLKMKTPEPELFRSGRQFAAWIGLTPKDHSTAGKVRLGGITRAGDEGLRAVLVVGATSVIQHVQRGGRPSPWLTELLKRKSPKLAAVALANKMARIAWKLMVTGENYVAKSAPATLAGAA

SEQ ID NO: 331277 - protein, 315 aa, unidentified
MTHIGIDISKAFFDAHLSGRNRRFKYDEAGIKDFIAILPVDAVCVMEATGPYSYRLAEALYYRSIAVSMVNPLIIKRFGQMSLRRTKTDSMDALLITEFARRESLKPFVPLDDAKNRLKQMVSALETLKEQSQALGNAVGALRALPRVCDDAVMGMETSIAAINEAMAKLKKIIALETNAAYGKLAENLLTIPGFGSATVPILLVSTDGFASFNSSRQLAAYVGLCPGTKESGTSVRGKGTICRIGNSVLRAKLYMCSMTAARKNKACKALYDRLVANGKPKKVALIAVAHKLLKQAFGIAKNGVAYDKNLSEVA

SEQ ID NO: 331278 - protein, 362 aa, unidentified
MAETMTVAGLDVHARSTHAAAVHVPTGELVQIRFGDGGVRGPIEWLGSLPGPVRACYEAGPTGFGLYRAAVAAGIDMRVVAPGKTPRGRADRVKTDRKDAELLARLLLAGSLTTVVVPPAQVEAARELMRCHDAVRRDLMTARHRVSKHLLRHGRVYPGPSTWTISHRTWLSGQQFEHPASELAFADEMAAIDGLSSRKVALAERLSRVASEEQWWPTIARLRCFRGIDTLTALALHLELGGNWQRFPRAPALGSWLGLTPSLSQSGESSHSGSITKTGSTLARRLLIEAAWHYSRPPRIGATLANRQQGQPDHVLQIANRAQQRLHRVHRRMRARGKPGNVIVVACARELACFLWAAVTAD

SEQ ID NO: 331279 - protein, 516 aa, unidentified
MVPKECANISGDTCGGRVIPFGRMQRAHLRARRVPMNPRCKGEPPMSTTPTRAKRRRQVRIASKLKVPLPPQLQRVNLNAAGVDIGSEEHWAAVPPGRDREGQDVRRFGAFSGDLCALADWLQRCEIETVAMESTGVYWIALYELLVERGFEVLLVDARRVRNVPGRKTDVLDCQWLQELHTYGLLRGAFRPADQVCVLRSYLRQRSMLVAYASHHIQHMQKALEQMNLKLAHVVSDITGVTGMGIIKAILGGERDPVKLAKLRDPRCNSSEATIARALEGHYREEHLFALQQALELVEFYQRQINACDCQIEACLQQFEDRSPKTPLTDRSRRRRRSGVGFDARSYLYRITGVDLTQIDSIEANTALTVIGEIGLDMSRWPTEKHFGSWLGLAPGSKISGGKRLSGRTKPSANRAAAALRLAAQSLNQSQSALGAYFRRLKARLGAPKALTAAAHKLARILYRMLKYGAGYVDQGETVYEERYRDRLLRNLKRRAAELGFELTAISSSTGQPALT

SEQ ID NO: 331280 - protein, 315 aa, unidentified
METTNPAPTATYVGLDVSKDRLDYTVDDTRCDHVPNTESGHERLLATLRQRKAVRVICESTGGYERALVAKLLLAKIEVCVVNPGRVRAFAQAEGLLAKTDRLDAQLLRRFGQKVQPRLHAPMDQAAIVLRELLDYRRQVSDQLVAVRNRLELAGKVLRARLDAQVLFLQKELTETDRLIQEHIDHDDTLRRKASRLRELKGAGPVLTATLLAYVPELGEIESPQLSALIGVAPFARDSGRRQGVRHVRGGRGVVRHVLYMAAVAATQHNPLLRAFYTRLVAAGKPKPVALVAVMRKMLHVLNRLIADPNFVLVR

SEQ ID NO: 331281 - protein, 343 aa, unidentified
MSCKLYFGVDVSKLWLDIAYYDGVDVDWKHGHIRVDNNEKGFAQLGRWLERLGVGKGTCIFCMEYTGLYSQEFRQWLERMKIVYGMVSPRKMHRFEPDLGENERALDRIKTDEMDSFRIAIYCKEHSMKIRRKPSHLPSDAYFKLKRLLAERRQYVKQSTLYKQQLHDIGKYDTEASRHRKEAELASLTEKVLQTSKEMETIIREDADIRRNYDLLCSIKGIGLVVAAETIVLTENFTSITNPRRYACYVGIAPGRKESGVSIQGGDHVGRKGFTQAKADLSMAALHAIHYDKGIRAYWLRRKTEGKHSGVVLNAVKFKIVLRMFAVIRRRKPYVEMEEYGKK

SEQ ID NO: 331282 - protein, 437 aa, unidentified
MDWIAVRNVAATRVSGLVCRTQMKRDPEDAMAPSEHHYDVYLGLDVGKADHHACALDPAGRKIHDKALTNDEAALRAVFTKLTERGRVLAVVDQPAAIGALAIAVARDLGIEVAYLPGLTMRRLADLQPGQAKTDARDAYVIADAARSHPHTLRRVGTDDETLADLGVLAGYDDDLAQQATRLTNRLRDALTHVHPALERLLARHFDRDGVIDLLAAAGTPAALAALGTDGIAEVLRPRSPRLARTLPAQITAALATQSVTITGTGAFGRVITGVAAQLREVRDERAALAVELEARLESHPLAEVLTSMPGVGVRTAIKILTIVGDGSAFASAAHLASYAGLAPVTRRSGSSIKGESHSQRGHHALKSALFLSAFAALSDPASRAYYDRKRAEGRRHNAALICLARRRVDVLFAMLRDRQPYRPRTTPTSSEVALAA

SEQ ID NO: 331283 - protein, 358 aa, unidentified
MPKQINKMDFTGQNIYCGIDVHNKDWKTTILVEETFHKTFTQPPEPLVLSAYLENNFPGGTYFAAYEAGFCGFWVQKELSRLGVETIITNPADIPTTDKEKRQKEDFRDSRKIARSLKNGDLQAIYVPSDIALEDRLLIRSRYTIAKDLRRNKHRIKSFMHFYGIRLPEEFSNSKSHWSKKFMVWLEGIKLRDDSGNAALAILIKQVNTLSCELTSVKKQLTTLSNQPRFKQNCDLLMSIQGVGLITSMRFLSEIVDIKRFRSLDKLASYVGLIPSTNSSGDDQKVGDITPRGHRALRTALVESAWKAVGKDTVLMAKYYQLCKRMDSNKAIIRIAKKLLARMAFVLREKKAYEISMA

SEQ ID NO: 331284 - protein, 339 aa, unidentified
MSIVMGLDQHRGQITGEWIDTETGEIQRARVAPADRVHVRKWLARFRGRDLEVALEATTGWRFVVEELRLVGAVVHLAEPAETAGLRGPKKRAKNDRADARHLRELVMVGRLPESWIPPDHILDLRARVRLRHTLSEQRSEWQQRIQATLYHQGCPQRRQLMTADGRAWLAEQPLPAPAREQITVAIAMIDALELQIAPLDKELRAYARRQVGCKALMAHYGIGELTAVTILAELGDCTRFSSSRQAVRYAGLDITVYQSDQRRAPGHISRQGPPALRWALYEAAQVARRGERSPDREYYLEAKERIGGGRACISVARKLLKRSYHTLRELGEEALAPA

SEQ ID NO: 331285 - protein, 371 aa, unidentified
MKQIVSVGIDVSKGKSTVCAMIHPNTIIKESFEVLHTVEEMSMLADYIGSLDGEIRIVMESTGHYHLPVAQFLYQKGFFVCVENAYIIRQFSRIMLHGAKTDPLDAKKLAKYGLAYWSELKPYKFHPSCYTELSLLSKQYQTYIKLLIAAKQNVIHLMDEMLPGFKEALDTASSVQFSKVKYMDFAKEFYHVDMIKTMGKEIFRENYKQWCKEKGYRFQSEKADELFHLAEDGIPTLPTEFPSTRLCMEVATEQVSQLGYALEQILSQMQNLAKTLPEYQTIRQMGGMGEKLCVRFIADIGDVRRFHNGKALVAYAGIDAPPYQSGQYTGTKRRISKRGNSALRKTGYEVMKSLKSHPPKTDTRVYDFQGA

SEQ ID NO: 331286 - protein, 357 aa, unidentified
MSSDMKKYIGLDVHKDATSIAVLNGVGKLVMESIIETKAATVLEFLHGLRGELHVTLEEGTWAAWLYDVLKPHVEEIVVCNPRRNALLKEGSKSDKVDARKLAELLRAGLLRAVYHGENGLRTLRELARSYLTISKDQRRVMSRLKALYRSWGIPCAGRQVYAPRHREQWLSKIAHAGVHRRAELLYQQLDGLLVLRHTVRGELLAESRKHQAVKILRQVPSIGPLRATLLLALMQTPHRFRSKRQLWTYSGLGVETHDSAQHRYVDGQLQRSKKPQQIRGLNQNHNHEMKEIFKRTALSASRCAGPLQDFYAGLLAKGMKPDMARLTLARKIAAITLTLWKKGEHFDAEHLKSQAA

SEQ ID NO: 331287 - protein, 406 aa, unidentified
MSYSQLFVGIDISKFKHVVAIISEAKQLLGKVFDIVETQAGYQQLLAKLQHLQREYHTHEFRIGMEATGDYWKNLYHFLIRQSPAFLVTVINPLQTKRFAQSELRRAKTDAVDAIMIARFMAEKKPRPAVPRAALLDSIIDLDRQIHAVHKQQTMTLNKLRIELGKVAPEIEHHVALSHHQQVLVLLKHYPTAEAIAHASPEELRTLRYGKKCWRLSVPFITKMRALATDSIAYKTGPGAGLVVQALVNQIFHQRQMVTTLKAHTIQLYQGVKEQPSLLATIPGISPETAIALEAYIGDIARFPSAKNLVAYFGMNPTVNLSGIVTKRASSLQKKGCATVRHKLFMAVLSMISNQGEPFYSYYQRLVAAGKPKLVAIVATMRKLLVIIYTMLNNQQPFYPKNNPSS

SEQ ID NO: 331288 - protein, 317 aa, unidentified
MNDAKYIGLDVHQATTTAAVRDATGNLVMEAVLETKTETILQFFRGLRGSLHVIFEEGTWSAWLHDLLKPHVARVVVSDPRKNALLKDGNKNDRIDARKLSELLYLNRFTPVYHGEHGLRTLKELARSYLTITKDLTRVMGRIKAIYRGWGIPCAGQQVYAPGHRAEWLAKLSEAGVHRRAEIYYQQFDGLAPIRQQARRELLVEGRKHAAVKLLRQIPSIGPIRAALLVALLQTPNRFRTKRQLWAYVGLALRTYTSGEYRFEHGQLKRSKKVLAIRGLNRNHNHDLKNIFKGAATWAAGNTGPFQNSMKLALREG

SEQ ID NO: 331289 - protein, 352 aa, unidentified
MVLVTTEQEASVSEVSTIGLDLAKRVFQAHGADASGKVVFRKRLRREQVLAFFAGRPACVVAMEACSSAHYWAREIGELGHTVRLIPPAYVKPFVKRQKNDTTDAEAICEAAQRPTMRFVSVKSEAAQANAVVFRARDLLVRQRTQAINALRGHLGEYGVVVAKGPSHVAQLIAHVEDPDAGVPEAARTVLRVLTASLQFLSERIDLLDREIARRAREDKEVRRLTTIPGVGPVIATALAAMAPPADAFKRGRDFAAWVGLTPSQHSSGGKQKLGATSKMGERTLRRLLIIGASSVVQKAIKHGTPSGSWLGRMLARKPRMLVIVALANKMARTVWALRATGEIYRAPIVAV

SEQ ID NO: 331290 - protein, 375 aa, unidentified
MSEHSEAFVGFDTSKLRNAVAVAEGGRDGEVRFFGEIDNTTEATAKLVRKLVGKYERLTFCYEAGPTGYGLYRQITGLGQACSVVAPSLIPKKPGDRVKTNRRDAVSLAKLLRAGELTAVWVPDEGHEAMRDLTRARETAVIDLRAKRQQVSAFLLRLGRHYPHKRQTWTKAHLNWLASQKFEYPQQRFVFEEMRLAMRQAQERLTRLEEAIRGAVPEWSLAAVVTALMAMRGIDVIAATTLLAEIGDLSRFRTPHELMAYLGLVPSEDSTGDTVRRGSITKAGNTRARRMLVECSWSYQHPPRVGAHKQHKVDAAPPAVREIAWKAQCRLHKRYRALIRRGKLKTVAITAVARELAGFIWAINREVTTACGVVR

SEQ ID NO: 331291 - protein, 446 aa, unidentified
MPVPKKRSPAPPPKVVHPNAAGIDVGSDAHVVAVPADRDPEPVRTFGVFTADLRTLADWLKHCGVTSVVLESTGVYWMSLCDFLEEQGFEVLVIDPRSLARNLKKKTDVSDAAWLQELHAFGLLKSCFRPSQEVRALRTLWRHRDHVITEAAKLLQMMQKVLVQMNVYLHLAVADIAGVTGMRILRAIAQGQHDPQTLAAMRDPNCKKSKEEIAKALEGTWDAAHLFELKQLLKAWDFYQNQLHVCEKEYAKSAGKLPDQTQGRPLPEPEKRPNKHRNCPTTFDSDALIFKMTGVRLTEVDGLGASTVLTVLSETGPDLGARFASDKQFAAWTTLAPRKHQSGKRTKYPAQTASRVAKAFRLAARALLNCKSVLGNFLRRLRARLGIGTAIRATACKLAKLFYRLITKGEAYRRDSTEAEEAKQRERQLQALERKARELGMQVVPV

SEQ ID NO: 331292 - protein, 327 aa, unidentified
MTFHLVALRTAGNVLVRKKFTQKQLLAYTANMQTSLIGIEACSGAHFLGRALHKQGHDGRLIPAQFVKPFVKSNKNDFIDAEAIAEAVERKNMRFVPIKTDDQLDLQAIHRVRDRLIARRTAVINQLRAFLLERGLVFARTPTKLKASMADILENAESNLTSRIRNLISGLWSEWKLVEQQIEELNDELERISAADAGCTRIRKIPGIGPIVATAIVAAIGNGAAFRKGREFAAWLGVVPRQYSTGGKAKLFGISKRGQEYLRRILIHGARAAVLHIKRDRAPIGAWLDALDARAHKNVVIVAMANKLARIAWAVLSSGNEYRPVAT

SEQ ID NO: 331293 - protein, 427 aa, unidentified
MNCTQNHKIDQVTEQTLVVGIDIAKRTHYACFVDDRGRVLRKSFPIFQSKKGFRQLNEAIQEAMQAFGKSQVIVAVEPTGHYWLNLAYFLEENGIPLVMVNPAHVCRSKELDDNLPTKHDAKDALVIARLAKDGRFLVPRLLHEIEADLRVGSTLKEKLRKEQTAVKNAIIRWTDRYFPEFWTVFRDLGKTALSVLEWTPFPADMAGRTAEELIEVYRQSEGLKCPQKAKIQALIDAAKDSIRVTEGTTMARFEIAALVRQYRQFEAEIAALDAELNALVQTTMEYQWLKTVDRLGDATIIDLLAEIGSFSHYRDPRQLVKLAGLTLKENSSGQRKGQKRISKRGRKRLRSVLFRAVIPLIRHNEAFRALHEYDTTRSVNPLTGKQSIVALCRKRLNVLFAICTKKQAFDAERMMQDVLSQVQNRAA

SEQ ID NO: 331294 - protein, 318 aa, unidentified
MNTKITQEEINVGVDTGKHQLDIYIRPLDIYFTVPNDEKGISKAISEIKKHQPTRIIIEATGRLEHAFILACSKANLPFVVANPLHIKKFAGAIGRLAKTDRLDAGLIAHYGESIKPKLSLLKPDKIRTMSDLLSRRRQLTTMQTMEKNRLKIMPKRLSSLINPILTVIKNQLIKVDKKLLNLIEECPEYHEKNEILQSMPGIGNVVAFSLLADMPELGSISSKEAAALLGVAPFNRESGSYKGQRRIKGGRYQVRTVMFMAMMSAIQCNPVFKHKYEQLLAQGKPKKLAIIACVRKMIVILNSMLRDGVKWEVDYAK

SEQ ID NO: 331295 - protein, 341 aa, unidentified
MTKNIYYVGIDIAADNFVASIYQSPQHPVITKEGFENTFNGFNQFHSWLETQKVKPTNSVTCMEATGVYGEGLAHYLVTQGFKVSVEPPLKVKRAFDPVGHKTDPVDSRQIAEYAYRYSDELRFWQPKDEIIEKIRHLLTAREQFTKQSVALQNSMSAYKKHVVQVNLITNAHTHILKELKKQIAEIDKELEQLIRRNPTITNMKNQLMSLPGFGLLLSSSLIAMTHAFREITSYKTLAAFIGICPYQHQSGSSVYRTPHIRPFGPAYARKLLMLAARSVVTHNADFKKYYLRKLAEGKAKKLVLNNIANKLIKIACAMIKSNLRYISTYRSVNPMCLISA

SEQ ID NO: 331296 - protein, 416 aa, unidentified
MNAVGIDVSSRKSTVAVLRPLGEVVCLPFDVTHDIAGLASLAEKLKAIDGETRVVMEHTGRYYEAVAKALHEAGFFVCAVNPLLIKEYGANSLRRVKTDKADAVKIARYALDNWADLRDFTPMDAIRYDFKTLNRQFQLASKQRTASANNLIALLEQSFPGIRKCFDSPVRSDGTQKWVDFAHSFWHVDCVRKQPFAAFCERYRKWCKRHAYLFKLSNAEEVYALAKRAVVLTPKSKVVKVLVQEAANQLISISRSVEVYRAEMDRLAAMLPEYPVVMAMYGVGKSYGPQLMAEIGDVRRFERKQALIAFAGIDPMPNQSGDKNVRSNKSSKRGSPYLRKTLFNVIRTYLQCAPQDEPVFQFLNRKRAEGKPFYVYMLAAANKFLRRYYAKLRDYFASLDTLQPVAPIPATLKATL

SEQ ID NO: 331297 - protein, 335 aa, unidentified
MSKVIYFVGLDYHQHSVQVCVMDQEGKILTNATRPNDWAQVAQVVPEDGAVFAAIEACCGAADFAEELINHAQWSVDLAHPGYVARIKQSPDKTDWADARLLADLERVGYLPKVWLAPEAIRELRRLVRYRQQLAHQRRNTKLRIRALLRDQRIKGPGDANPWTKAWRRWLEDCLEIGESSRWILAQHFQQLDEVCASIRTVEKRLAEQTSDDPVVAKLLEQDGVGLVTAVTLRAEIGRFDRFRTGKQLARFCALTPRNASSGQRQADAGLIRAGNQELRRVLIEAAQRLKQYNDYWSTFAERLKDRGKAPNVITAAIANRWVRGLYYEMAQLAA

SEQ ID NO: 331298 - protein, 415 aa, unidentified
MKVVYPVCCGIDVHKTFLVGTIISTTDEVQPNYQKKRYSTYNSDLHRFADWLHQNNCLDVCMESTGKYWVPVFNILEERSIRVTIANPKWVKAVKGNKDDTKDSKWIGDLFRLGLVPGSFVPSKEIRILREYTRYRYKLVSMKSSEKNRFQNAFTVCNVALDSVVSDMFGKSATAITDYLISEDTFDPEHCISLLQRSLKKKADSVLDSIEGYSITPEQKLRMRIVRSHLDYIESAIAQVDCAIGSMVEKHDGLIALLCTIPGVDRNSAITIISEVGTDMAQFGSSKRLCCWAGLTPGNNESAGKKKSVRITRAGVYLKPALVQVAHAAVKATDNSYYRLKYEQIAKRRGKKRAIIAIARMILTAIHQMMTTGEVWNPTDLFKVDMPETLKEKQLAKAVKQATKFLEKQGLTVAS

SEQ ID NO: 331299 - protein, 347 aa, unidentified
METAYDGRQVVGMDLHRRRSVLVRMTEDGRRLGTARITNSPQELRREIARAGKSPRVVLEATYGWYWAADTLAAAGAEVHLAHPLGVKAFTYRRVKNDLRDSADLADLLRMGRLPEAWIAPAEVRELRELTRYRQKLVSLRTSCKDQVHGVLAKLGVPVTCSDIFGVAGSVWLDGLGLPQPYAGKVLSLRQLTGELTTEITMLSEVIADLLAGHRGYQVIQQLPGIGPVLAAVITAEIGEVTRFRNAGQLCSWAGLTPRHRESDTKVTRGRVTKQGSRLLRWALIEAVQHVPADTVTAALKQRIIARRGTKAKNIAKVAVQCAVQGCRAAIRPVARGEGRRVIRVRC

SEQ ID NO: 331300 - protein, 342 aa, unidentified
MQITTIGLDIAKNVFQVHGIDASEKVFVRKQLRRSQVLAFFKALPPCLVGMEACGTAHYWARELKKLGHQVRLMPAKDVKAYVKRNKNDAADAEAICEAVRRPTMRFVQVKSAEQQGRLMQHRTRDLLMRQRTQVINALRAHMAELGIVATQGREGIEELLTIIASEEDARLPVDAHASLVVLAAGLQAVQTMIGSIEKRIIVQHRSNEASKRLETIPGIGVIGATAIAATVPDPKAFRSGRDLAAWIGLVPRQDSTGGKQKLGPISKQGDQYLRRILVVGAHAVLRRARQQPEKYPWLTQLLARKPFKVVAVALANKMARIAWALLAKGGTYRAPALAAGA

SEQ ID NO: 331301 - protein, 419 aa, unidentified
MKEWKEITHYAGFDWARDHHVVVVVDRQGQIVADFQFDHSVEGWKRFRQKTAALESVAVAIETSQGAVVDQLLQYEYTLYPVNPAAAASYRQRKAPSGTKTDHLDAWSLADALRVDGHGWKALAPMDELSAQLRLLCRDEVALIEQRTALVNQLQQALLEYYPAALEAFEDWTMPSTWDFIIQFSTPEALVKAGKRRWKKFLHTHRLWRAQTLEKRLALFAQADQFKAGAAITRAKSQLALSLCKLLRTLQEQLDQYRKQIEALFETHPDHHLFGSLPGAREKLAPRLLAAIGSDPKRYGSFQVLQSFAGTAPISFQSGQLRRAKVRCACDKFLRHTVHLWADCFRKASAWGQAYYRKKRQDGKSHACALRCLGQRLLKILFRMLTERKPYDAELHARNQQKHGSWVLALLPQPTPPPQ

SEQ ID NO: 331302 - protein, 318 aa, unidentified
MGDEKLFVGIDVGKYHVEIALSDEGEVSRFKNDDEGFDGVLGLLKGRNVGLVVLEATGGYERQILASLLGAGIPAVAVNPRQARDFAKALGKLEKTDAVDARMLSRFAAVVRPPVRPRVSAELEEVQGWLTRRRQLIEMLVAEKNRTQHAKHGVLRDIRAHIDWLKKRIRDSEKDLREILSHAPEWDAEVELLDSIKGVGRTTALTVLAAVPELGTLNRKKIAKLVGVAPLARDSGTLRGKRTCWGGRADARACLYMAALVAARFNDTIRSFYRRLVFAGKPKKLALVACMRKLLTIFNARIRDHRAAAIAARPVGLA

SEQ ID NO: 331303 - protein, 331 aa, unidentified
MNIYIDYLGIDISKETFDVINKVGKHSQYSNNNKGFLKFNKVIPKGSLCVMEVTGIYHLRLAKFLYSKGIAVSVVNPLRIKRFSQMHLRRNKTDKADAQIISLYAQKQEIEQWKPAPQVIEQSKDIYQIMEQYIEFRAGLKNKLDALKSKDAPERLIESVISQIDHITGSINELQAELDELIKGYNPVMLSNITSIVGIGQRTAALLIVATEGFKNFDNAKQLCSFFGLAPTETSSGTSIKGKSKISKMGNPLVRKKLYMCSLQASRYNKTCIDLYQRLLAKGKPKKLALIAVANKLLKIVFAIAKSGLPFDREYISYIASRQKELRVIMS

SEQ ID NO: 331304 - protein, 320 aa, unidentified
MSDEIFVGVDVCKAWLDTAQVCSSSAAVPGELTARVNNDEAGRAELVNQLKRLSPTLVVLEATGGFEAALASELCAAGIAVAVVNPKRVRDFARSMGVLAKTDRLDARVLAKFALAARPQVYALPDETQQEITELVDRRAQLVTMRAQEKNRLATVKQVARTSVRHHIEWLDKRIKEIDKDLDGRLKDSTIYQPKYELLDSVPGIGRVTISTLLGRLPELGTLNRKRLAALVGLAPMADDSGRRHGQRYIQGGRADVRAVLYMAALSARRCDGPIKDLYTRLRASGKPYKVAMTACMRKLLIILNAILKSGQPWRLIESA

SEQ ID NO: 331305 - protein, 363 aa, unidentified
MLKTPDRVVIAVDPHKASWTAAAVNASLQPLDIIRAPVSRDGYRALRRFARRWPDPTWAIEGASGLGAPLTARLRADGADVVDVPAKLAARVRMLSTGHGRKNDDADAVSVGIAALSARTLNTAAVHATVTALRAVVEHRDDLVKTRTQTINRLHVLLTHLVPAGARRELTADQAAELLRGVRPHDAAGKALRGLAADLVAEIRQLDRYIAKAAANIQTAVSASGTTLTELSGIGTLTAGKILGRVGTIKRFRSAAAFATYTGTAPIDVSSGDVIRHRLSRAGDRQLNLCLHVMALTQIRQDTPGRAYYQRKRAAGKSHKEAMRCLKRRLSDVVYRQLVRDETRLEAGPGGHSGAALLSSAAS

SEQ ID NO: 331306 - protein, 387 aa, unidentified
MAQVNDLSRSLTGFDPISTLVVVVEMSKSTWLVRGTVPGVERQPLKKLEPDATALLGLIERWRSEAVRADRPISRIALTYEAGRDGFWLARWLIAREIEAHVIHSASVAVSREHKRAKTDRLDSAMLMRVFLGWLRGERGHCGMVAIPTIEEEDARRPSRERESLVNERSRIINRMKSALIRLGIKGFKPHLRKAPERLASLRTAEGAALPPNTMDELRRDMARLALIREQINSIEETRAERLERAPDTEPHAMVRLLARVIGIGIETADMLVREVLSRKLRDRRALGRYAGLTGSPDESGLKSREKGLAKAGSARVRRGLIQLAWRFLIFQKDSALARWYRARTEGPNGARKTTMIVALARKLLIALWRLVTTGEIPEGVELRPAV

SEQ ID NO: 331307 - protein, 337 aa, unidentified
MQAAIIGFDIAKSSFQVHAADERGKMVLRKKLARGRVLEFFANLPPCVIGMEACGSAHYWARELVKLGHEVRLMPPQYVKPYVKTNKHDPADAEACCEAVQRPGMRFVPVKSEQQQSLLMLHRIRDRLIAERTGTINAIRGHMAEFGIVAAQRRAGLKDLLAIVSDLEDERLPPLARELLLDQAEHLRAIEARIADLDGRLVRQTRDDEACRRLTEAPGVGPVIATAVVATVGDAKLFGSGRSFAAWLGLTPRQHATGGKERLLGISKRGDGYLRRQLMHGARSLVRVAKGRNSQPWAWINALLARRPFNVVVAAVANKLARIIWAMLSRGEGYGTA

SEQ ID NO: 331308 - protein, 348 aa, unidentified
MAMTIVEVVRLITGGVDTHLDVHVAAALDATGGVLGVRSFPTTPAGLVELHGWLGEFGTIGRVGVEGTGAYGAGLSRHLRAQGLEVIEVDRPNRQARRVRGKSDSLDAVEAARAVLSGRACGIAKSADGNVEAIRTLLIAKRSGRETRIACLNQIRHLGFCAPDDLRERLRDLPRSHLAAVAASLRPQAGTEPVAYATKVALRTLGRRVQAINNDADLLDAHLGELVEATAPGLLALHGVGVDTAAILLVAAGDNPERLRTEGAWASLCGVAPLPASSGKITRHRLNRGGNRQANHALWRVTLTRMGSDARTRAYVARRLDEGLSKPEIMRALKRYIARETYQHLPRS

SEQ ID NO: 331309 - protein, 386 aa, unidentified
MAAVMIGAGPHKRSHTAVAIGGAEEPLGKLRVRASASQAGRLVAWAAAWPERTWAAGGAGGLGHLLGQQRVAMGERVLDVQPKLGARVRLLATGASNKNDPDDALPVAVAALRSKTRRLVTADDHGAVLRVWSRRHRDLGRAKNQAAGRLRAVLCELVPGGVPEEITAAQATRILRSAQPSGAAGQARPDLAAELPDDMLGLDARIREPAKKLAVAVKASGTTLTDLFGAGPFTAATVTGDAAGVARFASRDHFASRNGTAPIEVSSGDRKTCRLSLRGNRRASHAIHMAAITQIRHSHSDGRAYYDKKVAEGKTHKEALRSLKRRISDAIYSHLVADARRAAAAARTEGPGGQPGNDSDSSAAGSHPERRLFGQVVVSLRDAVPA

SEQ ID NO: 331310 - protein, 416 aa, unidentified
MLHPFVVFVPCMFKAASIGSTDVCRIRGTTSGARSHADATAGPQPIVPRLATPVTKHGSSRRRVLTPEQPTEPSLRSKRSHSQERVHAVTDTPPTPDLPVTPKPFAGIDVSKDFLDSACSDSPNTWRVANDPAGIASLVRQFQSLGPACIVIESTGGLERPLLSALLEADLPVALVNPAKVRHLAKGLSIMAKTDAIDARVLALFAQKATPRLLEKRPQIQAELDALVTCRRQLVKTRTEQANRQLTTFSKSAKKALQAVLNILDKQIAKLDKQIRDHIDSNDQWKHLDALIQSAPGAGNVLASTLVANLPELGHTESRQLTALVGVAPFNHDSGRFKGQRTIQGGRVDVRSVLYMATLAAMRCNPVIKNFGDRLIQAGKKRKVAIVACMRKFLILLNTMVRENLTWPQLNVVKNT

SEQ ID NO: 331311 - protein, 472 aa, unidentified
MKIPTNIMAVGIDPAKQVHQAVAIVYPEVVLLNCRFENNYEAISSFDEKVMKIAKKNNLRLIYGLEDSGAYGRTIKEVLTSRYREVREVNPLKTNRQKDFYGGDKSDEIDAKCIAQILLRSHENLPKIEEDNQVYISIREAERFRETLVKAKTQNVNRLHFYLTKTWGGSYKKFFSSLQNKIALEFFSSYPIPQTLKEIKAKELAKFLYEASSHHLGKGNPWELAHEKVKFILSSIKTVKDLPLNWEREIKAEIIRQLIANISQAKDSIKAIERKLEKDLLPQTGQRLTSLKSISTVTASVLLGETLNPDRFSTRDKFARYNGTAPQEISSGGKIKHRARKGCNHRLKKTLRQISITATVREPLTKAYYQRCLSRGLSKSQALKRVDRKISDIVYKMMRTKQPYDRELAIRNIIERKQRTNNLGRARWQSRNLRIKKSSDEIESLVLPPLDIISELREIKKKDRSVSEKILT

SEQ ID NO: 331312 - protein, 377 aa, unidentified
MKKELYLGLDVHKDCIPTAVAEEGRKGEVRETGALSNDLHAVEKWIGRLRKAHGKEVILRACYEAGPCGFGLARRLKQLGVECEVVAPSLTPTRAGDRVKTDRRDARKLARLLRAGELTPVYIPDATDEAIRDLCRARTDAVDDRRRSRHRLKGFLLRHGYRYQGKSSWSAAHERYLRELVLPHPAMKVILEEYLQSIGAAGERIGRCEAAMGVLLEQWRLAPAVRALMAMKGFQTVAAMILVSELGEVHRFSHPRQVMAYLGLVPTENSSSDRRRQGHITKCGNAHARWLLVECAQHYATPPKVSKELSRRQEGQSHEVRAISWRAQNRLHRRYTRLLARRLQRNKAIVAVAREMCGFIWELLRTQDCYQASSPSL

SEQ ID NO: 331313 - protein, 441 aa, unidentified
MAMRKREEDEVFPNAAGIDVGGSSHWVAVPRQADDEPVREFGAMTDDLNAMADWLLSCGVDTVALESTGVYWIPVYEVLERRGLVVWLVDARQMKYVPGRKSDVQDCQWLQKLMSLGLLRAAWRPGDEVCVVRAVVRQREVLLTEQADWVQRMQKALVQMNLQLTEVLTDVMGMTGQAIVRAIVAGERDPKVLARHRNGRVKASERDIERALTGNWREEHLFVLGQALAMVDSLAQRVLECDAKIEALLAPLGYHEVELSGPGKRRGKNTPQFDARTALARWAGVDLTRINGLAVTTVMTILSEIGPDLSRFANVKHFCSWLGLCPGTKVSGGKVLSARTRRSTNRVRQALKLAAMSLSRNDSALGAFYRRLCSRMDKPRANTAVAHKLARMVYFMLTRGEAFVDQGQQHYEEQQRQRSIDALRRRATALGFQITPAAQTP

SEQ ID NO: 331314 - protein, 348 aa, unidentified
MASYVGIDLHRRRSVIVVLDEAGDRVWSSRIENSRLSLEVELRSIIEAVEGPVDVVMEATWGWYWAADVVEEVGLTLHLAHPLAIKGYENRRVKTDWLDAELLADLLRMGRLPEAWIAPRPVRELRELVRYRRKLSQLRSGLKAQVHQTLGKEGAIPETQSIWWSGGQRWLDELAMADAYTNRVGSLRDLLAVYDREITALDGLIHRTIIANDDWRDGYEAIQAIGGVGRVMAAVFIAEIGDVNRFPHPRTVASWAGLTPSHKESDVKIRRGRMTKQGPVLVRWAAVEVVTNGYCEPRLRAIKRRVGERRGVKIGRVAAARELLALVFYGLRDGEIRCLQDRHQSTAA

SEQ ID NO: 331315 - protein, 503 aa, unidentified
MVSDPCFEDVGKDTTLRNVCIAGDDGPVLDAETEGAEMTEVRLGIDVACRADHQASLADDRGEFIWSGWRFRTTPADLERLWAKIPAGVDVVVVMEPTRNAWVPLAGWLKARGARIVVVPPEQSADLRDYYNKHTKTDRLDSRVLARLPLLHPEGVRQVDGLGAAEPLKRAVRHRSSLVKRRTSAALRVDALVELLGPVWAEVLGAGTYTKTALVVLERYADPRTLKRLGRKRLGALMIRHSGGAWREPKADELLAAADETLELWAAGGLDFAELAEDIASEVRVINSLGAEIAAIDDRIAVLYQQADPDGIVRSAPGLGVTLAAGILGRTGDLNRFANLAGVRSFTGIVPKVDQSGLTDNHKGLTKAGDPGLRQTLFMAADQARKVDPTLAARYRRLVVDEGKHHVSAICSIAPVLLTRIAACWRTGQHYILRDVDGTEITQAEGRAICADRYKIDPAVRAARRRTNRAKQLKPRASRRRKESTTAAPATDSPTNHPTENVA

SEQ ID NO: 331316 - protein, 343 aa, unidentified
MQAVTTIGLDIAKSVFQVHAVDCNGQVVIRRQLKRRYVLTFFEKLAPCLIGIEACASSHHWSRQLLALGHDVRLMPPSYVKPYVKRQKNDATDAEAICEAVSRANMRFVPTKTPEQQSGLVLHRTRHLFIRQQTSVINAIRAHCAEFGIVAPVGRQGVEELLNIIADAEDEQVPEIARTCLSALGEQLHRIKAQILEFDRLIGAWHRSCETSRRLDEIPGVGPALATALVASIADPRTFRSGRDFSAWIGLVPKQSSSGGKPRLGSISKQGDRYLRGLFTAGALAVIRYAKIHGIGHRPWLTALLARRPTKVAAIALANKIARMAWAMMARGERYREPVALAA

SEQ ID NO: 331317 - protein, 456 aa, unidentified
MKIPQSTIRLLTGRLVKILLYREVSTMKSNTQNAKIEAITEKTLVLGIDVGSETHYARAFDYRGIEYSKKPFKFSNTEAGFATFKEWILDLKERHEKDKVVPGMEPTGHYWFNLGKFLQDNEMKPVLVNPHHVKKSKELDDNNPTKNDRKDPKVIAGLVREGRYMIPYLPDGVYADLRTASNIRFQLQAELTRIQNRISRWFNIYFPEYKTVYGKPDAKSGMLILKAAPLPEDILTLGIDGVNQIWRDAKLRAVGKARAKTLIEAAEHSVGSKEGAVSARMEIRMLLEDYESRNTRLQEVMVLIEELVRKIPMAEKLLEIKGVGIRTVSGFLAEVGDISRFNNPKELQKLAGLALVENSSGKHKGETTISRRGRKRLRYLLFEVAMSLVSKNQEFRELHNYYTTRRLNPLKKMQSLVAIAAKLIRVFYAMLTKGVDYDPKKMVSDIKRPAVYLQAA

SEQ ID NO: 331318 - protein, 341 aa, unidentified
MEVTRIGLDIAKNVFQMHGMDKHGKTVIRKQLRRAELLPFFAQLPPCLIGIEACAGSHDWARRLKKVGHDARLMAAQFVSPYRQSGKTGKNDKTDAEAICEAVGRPHMRFVPVKSEEQQAVLAVHRVRELSVAERTALVNQIRSLLGEFGLVVPQGRERLQRELPTLLEAADNGLPAILRAVMAELSGRLGELNTRIAHYDALIEALVQAMPPAQRLMHLAGIGPITATALVASVGDAKAFASTRQFAAWLGLTPRQYSSGGKSRLGGISKRGDGYLRRMLVHGARSVLRLAKDKTDRLGRWAEAVKQRRCENVAAVALAAKHARIVWALLVKGEDYRPAV

SEQ ID NO: 331319 - protein, 313 aa, unidentified
MTKLNTAFSGFIGCDVGKAEIVIHDSRDGTTTAIANSAKPLAAFAATLKTTCLVVCEATGGYETVLLNAMLKAKIPAHRADARKVKAFIRSFGIRGKTDAIDARALAQYGRERADKLRLWEKVEVAQGQLQSLVLGRDDLVRQRVANKNRLGAPGNAAIKPSLTAVIACLSKQITKIEAQIKLLIETNPKLARNAEILTSIHGVGPVVANALQALMPELGTLGRREVAALAGVAPHPNQSGGRDKYRKTIPGRPIRSILFMAALSASQSQSGLGDFYRKLLAHGKTKMVAMVALMRKIIVIANAKLRNADLPA

SEQ ID NO: 331320 - protein, 394 aa, unidentified
MAFKIFRKNCCGLDVHKTWIYACMGITDTNGRTEYKQARFSSFTKGLQKLADWLAKYDCNDVCMESTGKFWIPVFNILEKTCWVTLAYPKYTKPQKGNKTDHKDAKWICDLYMCDMVNPSFIPPPDIRQLRDLMRYRSKLTNIMTSEKNRALNCLTVSNLKLDDVFSDVFGKSSRSVIRYILEHPGETFQVAPFIDRRCKHPVEEIQAVIDGTISHQQAVKLRECLQYLDELEVHKTNVEKEILCLVQQYPYQLELLQTVPGFSGNIMTAIALISEIGADMSVFPSAKHLISWAGCCPRNDQSSKKVKSTRISRAGVYLKPLLVQVAIQPFTANADKLSAAGALEIRCQICDGRFLSMWAALFIFLGCPLPPCPKNLHVHNGRIVILASVAWIF

SEQ ID NO: 331321 - protein, 318 aa, unidentified
MPDSIVVGIDVAKRTFDAALGVGGCIKTFPNEDAGHDALVTELGGQSVELVVMEATGGLERDLACALQAAGFAVAVINPRQGRNFAKAMGYLAKTDRIDAKALAELAQVLSRHPERERFVRALPTAQQQTLQALVARRRQLVTMQVAERQRLSNSHAAARSSIEAMIIAIRAQLDAVEAELAAHIERHHGDLARQLGSVRGVGPATVASLIAEVPELGRLTRREISALIGVAPFNRDSGQMRGKRTIFGGRGQVRRGLYMCALSAIRFNAVIRAFYDRLVLAGKPKKVAIVACMRKLLTILNAMVRSGKSWDDSFHSA

SEQ ID NO: 331322 - protein, 346 aa, unidentified
MKITTIGIDLAKTVLQVHGVDKHGKAGLKKQLKRKDVLSFFANLEPCLIGMEACGSAHYWARKLSALGHTVRLMAPQFVKPYVKTNKNDRNDAEAICEAVARPNMRFVAVKTAPMQAVLALHRARQGFVKARTAQGNQIRGLLAEFGIVIAKGIGHIAKRLPEILEDGDNGLPGMMRELLQRLGANLKDMDKQVGELERQIVLWHRENEASRKLEAIAGIGPLTASAMVATLGDAKSFKNARQVPAWLGMVPRHDGTGGKVTLGAISKRGDVYLRTMLIHGARSVVAHIDERKPDQADEWLKKLLARRNKNVAAVALAAKNARIAWALLAHERSYQHDYVVTRKAA

SEQ ID NO: 331323 - protein, 417 aa, unidentified
MDVHRDFCEIAIAEPDGQVRSAGRVNSKVEELELFAGSLAADDVVALEATSGAGLIAEIIQPHVAAVVVANTRKLPQISRAKAKTDRLDARTLARLAASGFLETVWAPDERTRALRRLCARREALVRARTRAKNEAHAVPARNLCGRPPATDCFGKKGRAWLAELQLPVDERLTLDGCLRQIDFLDGEIGALEAALATQALGSPEILRLITVPGVNLHTAAAFMAAIGDIRRFPSARQLVGYLGLDPRVRQSGNADARHGRISKAGSSLARGMLGEAAWSVAQTPGPLRAFFERIRARKGPQVAATATARKLACLFWCLLTREEDYAYARPSMTRSKIRRLELAAGAPPRKGVRGIAGNKNAQTREAEREIARRAETAYRRTIADWKATAPTRAGAGATPGRASSRPTKGKAARQTP

SEQ ID NO: 331324 - protein, 410 aa, unidentified
MEVLYQRCCGLDVHKESVVACLRIVSGGEVVREVRTFETTTASLMALSEWLAENGCTHVAMEATGVYWKPVWHILDDGDFQLILANASHVKNVPGRKTDVNDATWLADLLAHGLIRASFVPDNQTQELRTLLRTRKQLVREKSSHILRVQKTLEDANIKLDSVVTDIMGMSSRAMIEALIAGESDPAKLARLANYRLKAPQDKLREALRGRVTKHHRFLLRLHLNQIDALDASIATIDEQVEAGIAPFRVAVAQVMTVPGIKDIGAQVIVSEIGTDMSRFPSEHHLISWVGLCPRNDESAGKRRSNRLRKGAPWLKTTLVQCAWAAVRKKDSYLKAQFLRIKARRGPKKAIMAVAASILTAIYHMLKDGTLYQDLGFNHFQTRSKGQQTKRLVKRLADLGYDVALTPLAS

SEQ ID NO: 331325 - protein, 433 aa, unidentified
MLKLNYMSTLFVGIDVSSKTNAVYAMDFEENKYISSSFGNNQPGADKLVNMIAECMHKHKNLDTVLIVLESTSVYSVHISNFLSTSEVLMPYKPYVFCVNPKATSNYRKSYIGMEKTDPTDAYLIADFGRVGRTKKLEPWRGGQFIALKRLTRHRMHLSECITREKTYMVSNLYLKFSELQLLEGDDKPFGSLYGATSSAVLTEFLSPQEIIDMPEEELLTFLAGKSRNRISDLSKTSELLRKAARDSYRLDKCMYEPLNVSLASSFNCIHAYQKEIKLIEQAIEKCINGMNPNALVILQSIPGIGPIWASGILSEIGDITVFHSSDALAKYAGLYWPKGDSGDFTSEDNKMSKAGSPYLRYYLGEAANSVRKHIPEYADFYARKYAEVTKHQHKRALALTSRKFVRLVFGLLAKNQLYTGEKLDAEYNIKSN

SEQ ID NO: 331326 - protein, 427 aa, unidentified
MNYTQNRKIAQVTETTLVVGVDIGSQWHYARAFDWRGIEITKKAFRFSNDLDGYTAFEKWVRETAKNSAKMEVLIGCEPTGHYWYTFARYVGLHGMKLAFVNPYHVKQSKEMDDNSPRKTDEKDPKTIAKLVTEGRYSFPYLPEGIYAELREAVSVRDQIVKAMNAAANRIQRWLTIYFPEYLKVYKVFDSVSGLTMLWQAPLPEDVVKLGADGIVALWHEKKLRAVGKKRAQTLIEAAKSSIGMPGGNCAKMNLHLLLEDYFTKKEQLERITAVLQEELLKVPNSEKLLAVKGIGIITVAGFLAEVGDLRRFTSPKQIQKLAGLEPKENSSGKHKGRTSISKRGRRKLRRLLFQAVLPLIRSNEDFREVYTYYSTRKDNPLKGTQAVIAVGCKLIRIFYVLLLHGADYSSTRFRADILRPGQAKAA

SEQ ID NO: 331327 - protein, 368 aa, unidentified
MWYIGIDVHKNMCNACIKDQEGTIQKELEFPNKSTGTDKLLEAIEGREAKAVIESTGNMWLRLYLGLEEAGVDVVLANPKKTKAIAEAKLKNDKVDARTLADLLRAKLIAQCYVPPGSVRALRGLVRHRINITKDMTRVKNRIHAILDKYELEFTATDLFGKAGMVWLRGITSKLTELDQFVFDTELRHVETLKGLIKEVETRIAKESAESEDVKLLLGIPGVNYYTALLLTSEIGDFSRFPSANKLVSWLGLAPRVHQSGDTIYNGRITKEGSPRVRWALVQAARSAVQWDDHYRIKYQRIKERRGDGKAIVAIAREIAVAMYHMINRREEYRFSTDAFKTKKLKKLEGKSNKRAKMMEVPVGGMKA

SEQ ID NO: 331328 - protein, 331 aa, unidentified
MKKHGEAFVGIDTAKTRNAVAIAEIGRRGEIRYLGEYDTTPDAVAKLVRRLADRYEVLHFCYEAGPTGYGLYRQILALGDNCTVVAPSMIPRKPGERVKTNRRDAQSLARMHRAGELTAVWVPDATHEAVRDLVRARSAAVEDYRRKRQQVSSFLLRHGRSFARSTTWKGQHLRWLNAQNFTHPAQRLAYQESLNAAFTAAERVIHLEAMLEEIIPAWTMAPVVAAFQALRGVAFTTAATVVAEAGDLRRFDHPRQLMAFLGLVPSERSTGETRRQGGITKTGNIRARRTLIEAAWTYRYPAGIVASQSCRRTFAILPGTRRYAFARAIGD

SEQ ID NO: 331329 - protein, 357 aa, unidentified
MDTILRQCLGIDVSKLSLSLSLGHLTNDLSKKFESHEDDSNDLTGYKTIVKWLERSLDTSVNFIIVMEATGVYHQHVAHYLYERGYDICIMQSGRVKRYAQSLDQRSKTDALDCRMLSMLGLERAPRLWHPPSLSLQELKALSRERSSLLKDRTVETNRQGALLSGVSQSARASKRHKARVKLLNLQIESIEQEMRALILEDQELKRKLCYLESIPGISFISAATIVGETLGFESVTNGKQLASYAGYDVVLREFGNFKGKTRISKKGNIYIRAALHMPSMTCVRCNPTLKAFYNRLKPNKAKPLVALVAVQRKLLILMFTLWQNEENYDADFENKKQQKHKALAAQDNNLINQFVS

SEQ ID NO: 331330 - protein, 441 aa, unidentified
MAMRKRDEEIVFPNAAGIDVGASSHWVAVPRHSTDESVREFGAMTDDLNAMADWLLACGVDTVALESTGVYWIPVYEVLEQRGLTLWLVDARQMKYVPGRKSDVQDCQWLQKLMSLGFLRAAWRPNGEVCVVRAVARQRDVLIADQASWVQRMQKALVQMNIQLTEVLTDVMGLTGQLIIRDIVAGERDPKALARHRDRRVKASAEEITKALTGNWRDEHLFVLHQALAMYDDIAGHLAECDRKLQTLLSELGQRNVDLGKAPRAGTKSRTDFDARQILANWAGVDLTRINGLGVTAVLKILSEIGPDLSRFATVKHFCSWLGLCPGTKISGGKVLSSKTKRSANRVRQALKMAAMSLKHSDSALGAFYRRLCSRMDKPSANTATAHKLARMVYFMLTRGEDFVDQGQQRYEEQQRQRSVAALKRRAAALGFDINPTSAPA

SEQ ID NO: 331331 - protein, 435 aa, unidentified
MIQAAIEKCAGIDVGKKWLAVCIMVGPLEAEPRTETRRFGTNVADLQALRDWLQAEGITHAVMESTGSYWKPVFNILEESLTVYLANPHQVKPRKGHKTDNKDGHWLAHLLRHAMIQPSFIPPRPIRELRDLTRRRKKLIGTATSEKNRIQKVLEDANVKLGNVLSDVFGVSGQLMLDALLEGKAGPREIAGMAKRRARKKIPDLVAALEQHRMSDHHRRIIRYSVEHMELLEKQIAQLDEDIVAQIRDIGLATQWELLQTIPGMQALSAATILAETGADMRQFGDERNISSWGGVCPGNNRSAGKSKSSHTNKGNPWLRSALTECAQGASKKKDCFLKDKFWRITTKHGGKRAPGVMAVAHNLLRFVFQILSTGNAYHEKAATPLEPQQRERMIRHHMRRLGKLGMAVGQRGAAAPRPRRRPAAKGAAARAVST

SEQ ID NO: 331332 - protein, 342 aa, unidentified
METAVTIGLDLGKSVFQVHGVDAGGTVVVQRRLTRGKLLGFFAKQPPCLVGMEACAAAHHWGRELQKLGHRVRLMPPSYVKPYVKRQKNDAADAEAICEAVIRPTMRFVEIKTCEQQGTLVLHRVRLMLMRQRVQLSNAIRGHMAEYGVVAPVGRSGLQRLIAILGNPDDDRVPEVARASLAPLVCQFGLVNGQVLENDRRVRASARSTELGRRLMEVPGVGPVLASAMVATVPDPTVFKSGRNLAAWIGLVPRQNSSGGKEKLGGITKQGDRYLRQLLVAGALAVIRYAQRHGTKRPWLVHLLARRTPKIAAVALANKMARMIWAMMMTGERYREPAVAAA

SEQ ID NO: 331333 - protein, 354 aa, unidentified
MSQKLNSAIAVIGIDIGKNSFHIVGHDQRGAIVLRQKWSRGQVEARLANLPPCLIGMEACVGAHHLSRKLQMLGHDARLMPAKYVRPYSKGQKNDFRDAEAIAEAVQRPTMKFVATKTADQLDLQALHRVRERLVGQRTGVINQIRAFMLERGIAVRQGLRSLRSELPGILATRTDVLAPRMLRIIEDLAGDWRRLDARIEDLSSEIEALARQDKGCERLMTVPGIGPIISSAMVAAIGTGDVFSKGRDFGAWLGLVPKQISTGDRTILGKISRRGNRYLRVLFVQAAWVVLVKVKCWERYGLKSWIEAAKKRLHHNVLAIALANKLARIAWAVLNKGRAFECVKTNEMASRPA

SEQ ID NO: 331334 - protein, 339 aa, unidentified
MHTTIIGIDLAKTVFQLHAEDASGKLLWKQRLRREELEPFLAKQPAALIGMEACGSAHHWGRVIGELGHTVRLMHAKYVKAYVKRGKSDLRDAEAICEAVQRPNMRFVPVKSVDQQLARSLERARDLLVKQRTQLANAVRGLLAEQGIIAGVGPAGFARLAAKLDAGDGAIPRLLLVALKPLVDQWRALHASIAVLEARITARAKSDERMRRLMTIPGVGPLSAHTLVTAIGDPQRFSSARDFAAWVGLTPLTNNSAEKTRIGHISRQGDHALRRLMVLGAANMARHAKAKPTEARAWLLGVMTRRPVKVTMVAQAAKNARTAWALLRSGEDYRATATA

SEQ ID NO: 331335 - protein, 346 aa, unidentified
MVEYIGLDVSKEMTAYCVKSREGKVLARGKVETDPDALFEALKEHCPCPERIILETGTLSHWLGRELRRRGLPVKVIDARHAHAVMRLQHNKTDENDATVLAELARTEFYRTVAIKSEAAQMQRILLKARDHLVGARRSAQNTIRGLMSGLGIRFARGAGPFVRRVREILQDRRELATIIEPLLALVEAAEQQIKKLDREVTAHAKSDPACRLLMTIPAVGAVTALAYVSTVDEADRFGKSRSIGAYVGLTSRRNQSGDMDYSGRISKKGDTMLRSLLYGAANTLLTRFRRAHPLKTWARQVKKRTSHKRACVALARKLAVIMHAMLMSGEAFFWPPVNTKEKAAT

SEQ ID NO: 331336 - protein, 453 aa, unidentified
MEQPREVHDEEHERVWERVAAVDVAKGSGVVATRVPDEDRPGRRRTHVHTVPARAGAIIELGDYLRGLQVQVVTLESTSDYWRIWFVLLEAAGLKVQLVNARTVKNVPGRAKTDKNDAVWLAKLTERGMLRPSFVPPPEIRRLRELTRLRADLVHDRTRHWARMEKLLERALIKISDVMSELNCVSGRAMIEALIAGQRSPRALAGLARASLRKKQAELIEALTGRFEDHHGEQAQILLDLIDALTARIETLNTRIGELISQIPAAWGIDADGATGPDAGTGPGARVLPAIMRLDEIAGCGVAAAQAVIAEIGLDMTVFGAPARLVSWAKRCPQTRQSGSKTSHGKAGKGNPYLGGILGEIAASAARTDTFLGERYRRIAKRRGKRKALAAIARSILIIIYHLLADPEARYHDLGPDHYDTRTDRDRKIRNHIRQLQALGLDVTLRPQAEPAA

SEQ ID NO: 331337 - protein, 366 aa, unidentified
MKKIAYVGIDYHLKTLTMAVLIEGETEFHAIKRIVNEKKTIRRFMKKLSKEYEIKACYEASFSGYSFQRVMNSWGYHCDVIAPSLIPKKKGDHRKNDTRDAKELCRLYANGLLTTVHAPTEYEESVRSLIRCRLSFKDFEKRTKNQINSLLLAQGVACPFKSRWSQSHLIWLSKLEFPEKHFKTILEEQLGFLTYIQARIKSLDSQIEEIAGSEIYAPSVKKLRAFKGIGTLTAMILIAEITDFRRFPNARALMSYLGLIPSEESSGEKVRPGSITKAGNSRVRKHLIESVQHYSKKPIISQQMKQNLGKVDAKSSNIAVNCMNRLHKRYWHLSFKGKTRQKALTAIAREFAGFIWAMMQPEPVTA

SEQ ID NO: 331338 - protein, 504 aa, unidentified
MRGVEVSVSLRSELRGRFWSNHFGWQSLFDVGHAPSWEHWTKSRPADQSLTGHPMSFDRLKRTQGRKRLPGHKLKPSRATLFVQNSKPHLSMKQTYILAIDVAKHKVRAALSGADERLLFEKDLPVSAGGLRELLVRLREHVAEPEGLLVLLEATGMLHLNWSVALIRAGYAVVVINPLIARRLYTLGNSIRDNKSDPIDARQLCGIGRLHGERLLSLYRFALKPERLCLQRLQSVRKAVRKSLSNLKKSYRSLLDVSFPELGRLLEIDGVGIRQLLSQAPTPCAIARMRRSSLEKNWMLRPKAAQLKKLAAESMADPELAQASRPALLAMLQSIEAMETRLRELDWQIEALTSQSVDPQTKALVESIPGFGALNAAKLLAFLPGEILHAGSNRQAAARLQAYMGNDPRVRQSGQWQGQTKMSKRGVEMLRTALFQCAFSASQHDPELRSFYQRKRAQGKHHEVALSHLMRILTRRLVAVLRSGQPYQPNYNSELKNAAQNACH

SEQ ID NO: 331339 - protein, 501 aa, unidentified
MYPATALTYDIACATQRLALSGFGRSQLSQNSLPKLRADVRSTVLLVRRSQWGLLRRAVFAARATPIDETTVTKESRMERTPLIAKIPQINICCDVGMDQIHLVCPPLGESPFAQAVRLDNRSDTIRTELERIRNSATRDEISRLQIVVEPTGIYHHLLTRIARELGYHTALVNAEHVAKMRSVIFGDSGKTDQRDPLAIAAVADQGRLIADRVLPEAFQLLRGWSSLCQIAEDAIIEAKGRVHRALKYLFPDFDFSSDFLYGSSGQAVMECYQLDPHRIAGETPSHMHRRLRRRSRVLRSSVVRLINQARSSIRSVPHGALRELSIEHLRLAWNDYVTQHQRREAARAKLEQIYAAARCDHPHLPSAVHRVVTTSGLARLFAEPGPLDDFQSWRQILRYGGLNLRERKSGRYVGLTRITHQGRPQLRRVVMQVVLPLVRQRELFGDYYRRKTLVEKMPGTKAMTAVKRKFLKMLWGWYQSATGFDATRVFQQQSTHQQVA

SEQ ID NO: 331340 - protein, 337 aa, unidentified
MTLYCGIDLHANNSVVAVLDENDQTIYEKRLPNELATIIEVLSIYQTELEACVVESTYNWYWLVDGLMAAGFPVRLAHTSALPEYSGLKYSNDFSDARQLAHLLRLGLLPTGYIYPKEERALRDLLRRRLLLVRQRSLHHVSLQSLIARHSGQRLNTRQIKTLMREQLADYLEGHALLSGEITHQARCWLDRAVMRIEQELQHQINPREDYQLLQSVPGIGPILGTTIALETGTIERFASAGNYASYARCVKSEKISNGKRKGQGNKKNGNKYLAWAFMEAGHYGAIWNPRIKRYYQRKKAKGHILVAKKAVANKLARACYHMLKRHEVFDVTRAFS

SEQ ID NO: 331341 - protein, 373 aa, unidentified
MNHIIYCGVDFHARQQTVCYLKTETGELVTHELKHDNKDELRKFYSQFSGPVIVGLEASGYSPWFEQLVEELGHEVWLGDATEIRRRARRRQKNDRRDAELILDLLIHDEFPRIHRPTPESRDILRMLRYRHKLVKLRTIIKNSLQALAIQSGLSRQAKLFTRQGEQQLLASMMSPVMSQQRQQWLELLKELNQRITETEWWLKQEALKDPRISLLRTHPGLGLLSSLGIVHTLIPVSRFPNQRKVAAYGGFDPMEDSSADKKRYLGISKAGSRLLRFLLIEATQTAVKADPDLKRFYRRLAQRRGKPKAKVAVARKLLIRGYIMLRDEINYAEFQQRAVAARLARDYARTNLPGHLIGQPASPANGSEERAD

SEQ ID NO: 331342 - protein, 410 aa, unidentified
MKYVGIDIAKHNHVVAVREADGAPRGKAVSFSNDEAGFRALVDRLAELEVEPGDCVVAMESTGHYWIALWSFLSDCGWPVAVVNPVLTDAFRKVDSLRKTKTDSIDAFLIASFARFKGLGPESVSPEVTDGVKQLTRYRSHLVRERTALKNRATACADRVFPELAGVVGGMGSATARALLRDYGTPERISKTDIRTLERAVRRASNGHFGRAKAEEVKAAAKRSVGAAFAAGSVAFELRKLVELIGYLDGQIGELEAEAARVMDQEVRALLTSIPGIGDVTAATIAAEMGAPERFDDPKKLVAFAGIDATRSDSGQFESSDNHMSKRGSSYLRCALMNAAEVARIHDPYFGDYYDSLVARGKHHFVALSGVARKLCGVILAVLKERRPYEPRPSVQSRQGAQERGRQRQG

SEQ ID NO: 331343 - protein, 367 aa, unidentified
MSDLLPVVGIDVSKATLDVHWGSQKGKRFQARFSNDACGLEQLEAWIIQHQGSQVHCSLEATATYSDAVATFCFAQGHRVSVIAPHKLHAFRSSEGILSKTDQIDAWLLSCYGEQKRPAAWHPVSASAQQLKRDLDRLDEVKAMHRQEKNRLENQRLDAQARERIQAHLRWLEEEIVSWNVLLETRFAQAYEQEHHAPPVSVPPQCTPKTPTKRSQKQLMQLPPLDTFMQLVGLGRLSALRMYAVFATVQEVTSCQQMASYFGVVPHQHESGTSVKGKTRRRGGNPQARAWLYMCAISSQRFDPDMKQWAQELQARGLCKKAVIVAVMHKLVRILFGLFTTNAPYDATKAFPAHYLQAAAKEGALAA

SEQ ID NO: 331344 - protein, 403 aa, unidentified
MYVLALDVSMGKSYVVIYHENTCLFEQEILHDKTHFNALLQEIYALPERPQIVFEATGVYSRVIETFCQKNHFAYCLLNPLEAKKQLNIDLRSVKTDKQDAHRLAQTHGQFLRKQKQSQTEVYKQTRDFARFYQQIERDIKRTRMNLHTALQLTFPELETLFTNRLSKLALNLVELFPHPDYLAHLSQTKVKNVLKKNTDKKISDQKALAKAQTLLSLAQNSYPAESGQSISVQKVVYYAQQLKQLLVTKEQLAKQLVEIAKQTIEFDFYQSIPGIGELSAGLIIGELGDIRRFSSHRQLNAFVGVDTRRYQSGKYTAKEHMNKHGNPKARKNLYFIMMNMIRQQAAGPNHLVDYYYKLKTQPSPKKHKVALVACINKLLKCLHSMVRHSSPYDYSYTASNDQ

SEQ ID NO: 331345 - protein, 360 aa, unidentified
MFKERTSVGLDVHARSVVAAAIDGQTGEVLSRRLTPAYADVVTWLAGLPGPVAVTYEAGPTGFGLYRALTGAGIECVVAAPSKLQRPAGDRVKTDARDALHLAKLLRLGEVTAVEVPTVEREAARDLVRAREDVRADLMRARHRLSKMLLRHGIVYSGGRAWTQDHDYWLRRQRFDQRAAASTFDAYYDTVKLIEARRDVLDKEIVAMAGDGEYTAVTNRLCALRGIATLTGFALAVEIGDWHRFSGRTIGAFLGLVPTEYSSGASRSQGEITKTGNAHVRRLLVEAAWHHRTRYAISAHMLKRWEQASPAVRARADAGNRRLHQRWVTFADRKKRSTVACVGVARELAGWCWSLATLEE

SEQ ID NO: 331346 - protein, 466 aa, unidentified
MQVTYTHCAGLDVHKKTVVACASVPGPGDQPHPVIRTFGTMTADLLALGDWLHSLNVKAVAMESTGEFWKPVYNLLEGHFELLVVNAQHIKNVPGRKTDVKDAEWIADLLRHGLLRGSFIPPRPQRDLRDLTRQRTNLVQDRATVVNRLQKALEWANLKLSAVVSDVTGVSARAMLEAIVAGETAPAALAELACGRLRAKRDLLEQALTGRVREHHRFIIAEHLIQLDNLDEQIGRFDAQISAYLEQLSALPPASDGANDAAPTSPPPTAAPTSPPPTVAPSSPPPTAAPTSPAPAALTWNAALVFADAVPGIGLRLAQDILAETGIDMTRFPSAGHLVSWAKICPGHNESAGKRFSGATGHGNRWLRTKLVQAAWAAVKVRTSYFAACFHRLAGRRGVKRAIIAVAHRILIALYHVLSRQEPFRDLGATYYDARSQAQLIKRTERRFAQLGLKVTVEPLAPASAA

SEQ ID NO: 331347 - protein, 354 aa, unidentified
MSNVVLRSSKVTIGLDLGDRSSRIYEVDARGRRRAEASIATTRQGIAQYFGQRRRCRVILEAGTRSPWVARELATLGHEVVVANPSAMFGTRRGRKRNDLLDAEFLARQGRADVQLLHPIAHRRPETQQHLEVLRARDQLVRTRTQLINHVRGAVKTVGVRIRSCSTDAFVDRAAPDIPDDLHPALQPVLEIIRELTRRIRDADHHIRTLVRERYPVAARLQQPQGVGPLTALAFTLLVDDPRRFRRGRDVGAYFGLVPRLDESSASRPQLRITKSGDELGRRLLVSAAQYILGPFGPDCDLRRFGEAIAQRGGNNAKKRAAVAVARKLAVLLHHLWVTDEPYDPDHVLKRRSA

SEQ ID NO: 331348 - protein, 363 aa, unidentified
MTSMTPTTGSVTGGVDTHGQTNHAAALDQLGRQLGDQEFPTTPDGYRALLRWLRGHGQLELVGVEGTGAYGAALARYLRAQGASVVEVDRPDRRARRARGKSDPLDAYAAARAALAGTSTGTPKSRDGRVEAIRMLRVARSGAVKARSQAINQLKALLITAPAALREQLRHLSTTTLLATCAQLRPTVELADPEQAAKTALRRLARRHQHLSEEIAAADAQLKTLVTAAAPQLLALSGVGVEVAGQLLVSAGDNPERLHSEAAFAHFCGVAPVPASSGRTHRHRLNRGGDRAANNALYIVVLGRLRYDPRTRVYTDRRTKQGLSKPEIIRCLKRYVAREMFTALTARAVDSPPATTSTLSTAA

SEQ ID NO: 331349 - protein, 457 aa, unidentified
MTRQKHSRPARDIAPVHPHAAAVDIGATLHVAAVRPGCDPEPVRTFGTFTTDLHRLADWFEQCGVETVAMESTGVYWIPLYEILDQRGFEVVIVNARDAKNVPGRKTDVSDAAWLQRLHEYGLLRASFRPKGEIATLRSYLRQRERLLDQAAAHIQHMQKALTEMNLQLHHVVADVTGVTGLRILRALVAGERDPDTLAAYSDPRCKAPAETLRAALVGNYREEHVFALAQALELYDIYQAKVAACDQRIEAVLERLKAANPPPAAALPPARPRRRQANEPGFAVREALHAILGADPTQIDGIGPSLALTLVGECGTDLSAWPSAKHFTSWLSLAPHNKISGGKVLSARTRRSGSRAAALLRLAAVAVGRTATALGAFYRRLAARVGKAKAVTATARKIGVLFYNMLRHGMDYADPGASAYEARYRQRVLSNLRRRAKSLGYVLQKADPASAAIAVS

SEQ ID NO: 331350 - protein, 403 aa, unidentified
MVFVGIDWAEAHHDICLVDEQGQVLAKRRVPDGLEGVGRLHAIVAEHAEDPANVVVGIETDRGLLVGSLVAAGYQVYAINPLASSRYRDRHATSGAKSDPGDALVLADLVRTDRHKHRPLAGDSNLAEAVQVLARAHQGLVWTRQRQANQLRNALREFYPGALAAFDDLDAADAVAVLERAPTPSLGRALSQAKIISALRQGGRERNLEAKATQIQGQLRLPQLQAPALLAQAYGHSVSATVAVIKQLNLQIAALEQELAASFELHPDAEIYLSLPGLGLVLGARAMAEFGDDRTRFLNPKARKNYAGTAPITKASGTRKVVLARVARNRRLADACYQWAFSALTRSEGARHRYDVLRARGQTHHQALRALGNRLVGILHGCLTNRQAYSEQVAWSAHLEVAA

SEQ ID NO: 331351 - protein, 399 aa, unidentified
MLYLGNDLHLKQMTISLRNGDGDVILRRQVSTRWPKLAEFREQLHQALAAEEKYVAVVEVCGFHDWLVKWLQQDERCHQVLVIQPLGRSANKTDRRDADALSELLWVNRDRLLRGDRVRGVRLVYLPSAEQQADRYLTQLRERLVRRRTQTLNQIHKILRRHNLEWERPTKTFQTRKVTEWLKTLPLDPMDRLAVDHLLVQWRLSEEQLLATDNRIAERFLANPDAQLLATMPGVSMFIALAIVCRIAPIGRFPHGRSLANFLGLTPGSNNSGDTERLGSITKVGSRMVRLLLAQVILHLLRRDATVRAWYLRIKRRRGSKIARVAVMRRAAVIMWRMLSTGEPWRPGNAAPETTVTRDPRPVHLWRPRRTVLSALLAHEIKATSNTGSSSLSPGEEVI

SEQ ID NO: 331352 - protein, 356 aa, unidentified
MQTNTYATTVGMDLGNTAHTICALNTDGAVDHITTIENNREGINEYFSRYDDPGSVLVVVETGTHSPWISHHLQRQGYRVLVGNARKLRVIWCQKNKTDVRDAEMLARIGRFDQVLLAPIKHRNRQAHRDLALLKARDILVRTRAKLVNHVRGTLKTFGHQVRSCSTSSFANQLRGTLPGELQHALEPILDTLAEITSRIRAYDRQIEQVSQDRYPETARLRQVAGVGPVTALAYVLTLERADRFRKSRDVGPYLGLTPRRDQSGETDRQLRITKAGNGYMRRLLVGAAHYILGPFGSDCSLRRYGERIAARGGRIAKRKAVVAVARKLAVLLHRLWVSGQEYKPLGRCRPSDAAA

SEQ ID NO: 331353 - protein, 402 aa, unidentified
MPELWAGTDAGKAAHHCTVIDTNGTKVLSRRVPNNEPELLELIGDVLALAEDSPVTWAVDLNAGGGALLIALLTGHGQRLLYIPGRTVHHASRGYRGDGKTDAKDAYVIADQARMRRDLQPLQEWDEIAVDLKILTGRRYDLAADRTRAINRMRAQLLEYFPALERTFDYAASKAALVLLTGYQTPAGLRRVGPSRLATWLKNRKVRGAQAMAGAAVAAAQAQHTAVAGESTAAAVVNTLARSVLALDEEIADIDARIAARFREHRDAEVVLSMPGMGPLLGAEFIACTGGDMDAFGSSGRLAGVVGLAPVPRDSGRISGNMRRPHRYHRRLLRVFYLSAQIAARFCPTSKTFYDRKRNEGKSHKQAILALARRRLDVLWALIRDQRQWTAQPPQPDLVGVA

SEQ ID NO: 331354 - protein, 344 aa, unidentified
MNEDYVGRQFVGIDLHRHRSVLVRMTESGERLGGVRVNNDPYAFRSVLEDAGEHPEVVLEATYGWYWAADLLAELGAEVHLAHPLGVKGFAYRRVKNDFLDAADLADLLRMGRLPESWIAPPAVRELRELVRHRAKLVHLCTSLRCQVHAVLAGQGVTLPVSDLFGVRGAKLLREVQLPAACRHRVDSLLQLIEAFDREIAQTAQLTSDRLRDDPGYAAVRTIPGVGPILGAVFVAEIGDVHRFARPEQLASWAGLTPKHYESDKTVHRGRITKQGSRLVRWAAVAAVQHAPAGTPMKQVRDRIVARRGKDARNIATVAAARELVVLVFYALRDHHVRRLATAA

SEQ ID NO: 331355 - protein, 363 aa, unidentified
MFTERTSVGLDVHARSVAAAAIDSVTGVLKQTKLTPSYEQIRAWVSDLPGPVAVAYEAGPTGFGLSRMLNQAGVRCVVAAPSKLQRPSGDRVKTDAKDAVHLAKLLRLGEVTPVAVPSEGQEAARDLVRAREDCRGDLMRARHRLSKLLLRHGHVYSGGSAWTGAHDVWLRQVGRDQLAGPGTRVAFESDYDAVLTTLARRNRLDQEITTMAADSEFTAVVTRLGCLRGVATLTGFALAVEIGDWDRFDGNTIGSFVGLVPSEHSSGASRSQGSITKTGNSHARRLLVEAAWHHRARYIAGKTLRDRWDMAGPAARARGDAGNQRLHARWARFTDRRKRPVIANVAVARELAGWCWSLAVLQE

SEQ ID NO: 331356 - protein, 396 aa, unidentified
MFIVGIDIAKHTHQASVMNTDGSLVGKSIKIPNTSVGFDAFISKLKEIDRDISHFEFGMEATGHYWLNIYTHLADLGCIVHVINPVQSDALRGLYIRQTKNDIKDSAIIADVIRIGRYCETSVSDDKMLALRDLTRQRFYLVDMVSDLKRKSLTLIDRIFPEYPTLFSDTFGTTSLELLANCNTPEDILAIETDKLVEMLSTASKGRFKQDKAEKIKETARNSFGALLCTDSASFMLKQFVEQIRFLENQIDELDEMISESLAELDSPITTITGIGDTLGAAILSEIGDIERFESADKLAAFAGIDPSVSQSGNFLGTRNRMSKRGSPYLRRAIWLAATAAILHDPAIKAFYDRKKAQGKHHYVCVGYICRKLVNIIFSVLKSSQPYQPVFPKNLD

SEQ ID NO: 331357 - protein, 420 aa, unidentified
MEELTEEPAELLERVAALDIGKASLVCCVRVPHESRPGARRQEVRTYGTVTPALLELRDWLICQGVTRVVMEATSAYWKPPFYLLEDDIECWVVNARDVKNVPGRPKTDKLDAVWLCKLAERGMLRPSFIPGRPQRQLRDLTRYRRTLTHERTREKQRAEKLLEDAQVKLSSVISDIFGVSGRDMLAALIAGERDPHALADLARKRMRAKISVLRQALTGHFTEHHAFLLGMMVDRVDALTAQIDTLTTRIEKAIAPFAAEVAQLDEIPGTGITTAQEIIAETGTDMSRFPTPGHLVSWAKFAPKARQSAGRSKAAATGKGNPWLGGTIGEAAAGAARTSTFLAARYKRVVKRRGKKRALVAVGNSILTICWHLLSDPGAHFTDLGPDWHDRLAPQRRKRQLIAELERLSGKKVTLNDAA

SEQ ID NO: 331358 - protein, 426 aa, unidentified
MSERDYSKQVAKRQRIGSRTLVVGVDIGCASNAVGFMSKEGKVLGSYPNMLNSREGFEQFVKVTEGLKAKHGLSDVLIGLEPTGHYWRKFAYFAKAKGCEVRFVRTTALKHHREIDESASAKSDPRDALTITNITREGKYIDTVIEDGRMRPLRTLVKVREKIQKRNVSAKNSLHAVLDDYFPELKEVFWSMHSRGLWALLERCPFPADVLPFKVSVLKEIIGRASRRRAEASRKAMAVYQAAKKSIGLKQIGSADRYRLKMCLEEVKRTQFMIKDMEREIKRMLKEIPQAEYLLSIPGIGPLSAAVFLGELGNPSYFQGARQIVKYAGYDPQESDSGYRVSRKFISKKGRWLLRKHLFLMSMRVVVLSRYFQQYYQRKLQTKNRFGQLPRKKEILCAVAIKLIKVIFALLRDQRNFEDTVTFSVQ

SEQ ID NO: 331359 - protein, 337 aa, unidentified
MEKATIIGIDLAKRVFQVHSASKDGRPVLRKKVSRAQLLGFLAKQPPAIVAMEACATAHEWGRAISGLGHDVRLVPPIYVKPFVRRQKNDAADAEAASRPTMRFVALKTEEQQARSMIFRTRDLLVRQRTQLVNALRGHLAEHGIVAAHGLAKVKVLATAIQDTGSLHPLVRELGQRYLDHIARLDVEIVELDNRLRRHSNDDETAKRLQSMPGLGPITAAAIEAFAPPMATFKRGRDFAAWLGLVPRQHTTGGKPRLGRTSKMGQRDIRRLLIIGAMTVVRWAVRKGAAKGSWLARMLANKPRLVVAIALANKMARSVWAMLSKGEEYRGSALAPA

SEQ ID NO: 331360 - protein, 433 aa, unidentified
MQEVTGEPLYRDRVCGIDIGKAELYATIRVPSDKNPARRASETRRFATTRRGVVALADWLRCWQVPAVVMEATSTYWMGPFFRLEAEGFECVLADAKQVKNLPGRPKRDPSDSGWLAQCFERGAVRPCFVATAQFRVIRLHTRYRRDLIEDRTREKNRAEKLLESAAIKLSSVVTDLHGVTGRDIMNQLIGGHRDPKALAQLARGRARRKISELEHALEGAEFFTDHHARLLKTMLERIDRIDAEITRLSEVIETLLTPYEEQLQQAESMPGWGRRSAEDAVAETGPDMSRFPTPAHLASWAGRTPLDHQSGKRVGRARHKKGNRYLGGVLGETAVCAGRTQTREGARYRKLARSRGKNKACVAVGNTQLKVYHKLLSTPGMRYADLGPDYYQRRAQTRRTIDYHVRELQALGLEVTLCRLPEPGQAATTPAA

SEQ ID NO: 331361 - protein, 394 aa, unidentified
MKLVGIDVGKNSHHFCVMDKETGEFNVTPTSFSNNKEGFDFLINSLKPYSKKSILIGMEDTGHYHVALLKFLLSNGYTVALINPKTTDLTRKMEGGITKNDKLDTITICDVLDTPERKKQYRITKVDRFDLYEQRQLTRHHHNLKEELNVYCNRLQKSIDLVFPEFNTLFGSKYGVVYMNLLKTFGSAEAIASTDIRTIRKCFEIKGRGNRISLTPEKLKECAKNSIGISSEVETIQIKHLVSQITLIKEQIAEIDKKIEEFSITNNSPILSIPGISHFSGTSILAELGDIGNYSKPSRIIKFAGVAPYHYESSQYNAQHTAITKKGSKYLRKTLYQIILPVINNNPVFKKYYLLKISQGKGHRCAQGHCIRKLLRIIYHLLETGQSFDPALLR

SEQ ID NO: 331362 - protein, 349 aa, unidentified
MKRTTIGLDIAKRVFQVHAVDHETGEVVRRQLKRAEVLEYFAQLPAALVVMESCGTAQHWARELTKLGHEVKLIAAQFVRPFVKTNKNDAADAQAIWTAAQQPEMRFVAIKTPEQQAILALHAIRQRLMKNRTAYVNQLHGLMAEFGVCLPRGWRAMLPQAVGALGEEVSPIPGVLRTELQRQIERIKEVSAQMTDVDRQIGCWKRKERECERIAAIPGVGPLTATAAVATIGDARTFKSGRQFAAYLGLVPRHSGTGGRVQLLGISKRGDTYLRTLLIHGARGVLSRMEPAAKNTWLGRLASRRPNNVATVALANKMARQIWALMAYRRTYEPNYATVATATVAKEST

SEQ ID NO: 331363 - protein, 362 aa, unidentified
MEFFCGLDVAMDETALCVVDDKGAVHLETVVMTEPEAIVAALQPFLARLRRAGHEAGSLSPWLHPELIRLGLPAVCLETQHVRAALSAQRNKTDKADALGIAHIMRTGWFRHAHIKSQACYRMRLLLTQRRNLKRKVLDIENTVRHSLKSFGIRIKGTGRGGFEKAVRDAVASDGLTAELMDAMLTARAVLWKQYCRLHDLVVRFVAGNELARRFMAIPGVGPVTALSFIAAIDDPSRFRRSRDVAAYFGLTSRRWQSGTSIDVQGRISKAGDPDVRRALYEAASALLTRFRGKDKVKTWGQILAKRSCQRKACVAVARKLATIMHAMWTDGTLYAGDPAASDSELARRAARKDRKLLGAHR

SEQ ID NO: 331364 - protein, 430 aa, unidentified
MWRGDEAAVLAESEDNEEIIARVAALDIGKAELVCCVRLPAPRERRKRLQEVSTHSTMTAPLTELANHLVELGVQRVVMEATSDYWKPVFYLLEAHGLDPWLVNARDVKHLPGRPKTDVIDAVWLCKLAERQMLRPSFVPPRPIRRLRDLTRYRVDLVTARTAEKNRVEKLLEDACIKLSVVASDIFGVSGRAMMAALIAGERDPKVLAQLARKRMRTKIAQLEEAFNGHFGDHHRFLLARMLGRIDSIDADIAAVDEQIEAHLAPFAQAAARLDEIPGIRPTAAAAIIAEIGLDMSRFPTAGHLCSWAKFSPGINSSAGNTKGNGSTGHGNRYLARALGEAAVVAGRTDTFLGERYRRIAKRRAKKRAMVAVGRSILVIVWHLLANDDARFTDLGPDHFTKHLNPDRQKRNHIHQLEALGYTVTLTPAA

SEQ ID NO: 331365 - protein, 352 aa, unidentified
MNQIKYIGMDVHVATTVIAVMNSKGKVVTEAIIETKASTIKDFFRGQRGTLHVTFEEGCQADWLYDLIRPYVAKVLVCNPRKITRSDRRSDRIDAKRLAELLRTNAITPTYHGEHSTQNLKELVRSYIAIMHDSTRVKNRLKAVFRGRGIDCKGTSVYSQEDREDWRRKIDNAARLSRANRLWKELDYLSELAEEAEKDILKEAPKHAAIKILQSVPGIGPLRASIILGIAVTPHRFPTIRQFWNYCGLAVRSKITGEYEMVRGRIRRTKKQPLIRGLNRNYSRALKDVFKGAAATAANGPWKNHYGAKVKEGTKSSLVLLTLARKISAITLSIWKKGEKYNDKKLKFTHAG

SEQ ID NO: 331366 - protein, 405 aa, unidentified
MNAVGIDVSKGKSTVTIRRPGDIVVMSPRDIPHTQSAINDLIDLIRGLDGETKVCMEHTGRYYEPIATWLSDAGIFVSAVNPMLIKDFGDDSLRSPKTDKADSKKIARYTLDRWAKLKQYGNMDKTRNQLKTMNRQFGFYMNQKTAMKNNLIALLDQTYPGANDFFDSPAREDGSQKWVDFVHTYWHVDCVRSKSLDAFTEHYQNWCRRKGYNFSTAKAADIYQLSSDMIAVFPKDDSTKLLVRQAVAMLDTASATVESLRLKMNETASTLPEYPVVMAMDGVGPTLGPQLMAEIGDVTRFTHRGALTAFAGVDPGKNDSGQHIQKSVPTTKKGSPYLRKTLFQIMDGLIKRSPADDAVYAFMDKKRAQGKPYYVYMTAGANKFLRIYYGRVKEYLSTIAETEEI

SEQ ID NO: 331367 - protein, 392 aa, unidentified
MVVSVGIDVSKDKHDCFIVSSEGEVLADAFIIPNTMDGFHCLLQRIRHCTAPQDKIKVGLEATGHYSYNLLGFLLDNGLTTYVLNPLRTNLYRKSLSLRKTKTDRVDARTIASMLLSDAGLKPYTDTAYHNEELKSLTRYRFDKVKERAKLKSSIARLVCILFPELEKLVPSLHIASVYALLEAFPGAKQVANTHLTRLKALLETASNGHYKRDMALKIRNAAKNSIGSQMPAKSLELQHTIRLIRELDREIDEIEEQIQSIMDELHSPITTIPGLGFRMAAMILAEVGDFTRFDSPDKLLAYAGMSPSTYQSGQLKNCYPHMEKRGSRYLRYALYNATKYVCHWDPAFADYLAKKRAEGKHYNIAISHAAKKLVRLIFAMEKSRQPYCSAA

SEQ ID NO: 331368 - protein, 348 aa, unidentified
MKFYNRQHEFYCGIDLHANSMHVCIVGNDGQKHLHRNFNTKKPERFLIALQPFEKHDLIIGCESTFNWYWLADLCHLQNLPFVLGHALYLKAIHGGKTKSDRIDSEKLAMLLRGGNFPTSYVYPKKMRGTRDLLRRRCIIVRRRSATIAHTQMVNHQQNLPAFPRPISYRTNRQGIADRFQGDSVRRMVQLNVDLIDFYDEQIKQLDLYLEQNAKIDDPDTFYRLMSIPGVGRILAMTFLYEIHDIRRFPNVGDLLSYSRLVKGTNSSAGKQYKPTGSKIGNPHLKWAFSEAISLLKRECPQARDWMQRMEKKTNKARANTLLAIKLGRAVYHMWSRKVAFDPNVFLK

SEQ ID NO: 331369 - protein, 421 aa, unidentified
MTAALQPSPEHLLVAIDIAKRFHDVLVRWPDGRERAFKVQSNRDEYDALCAFLVSHNLPVIVALEPTADFHRTLAWRLAEAGIEVHLASSLAGARVREALYTSWDKHDRKDAKVLMYLLMHGMTKPFHDPLRGGFFDVQELSNTYHQIVQARSRCQHSLVNHYLTLYFPEMERYLHTTRSAWFCRFLLAFPTPSSIATMDREAFIAAAWDVVGRKVQKQRFLEELYETASRSIGLPIPADALATETFRLQLKRYLELTEQRQHLEAQANDQLGEHLDFKRLQTMPGVGPIIALMILAESGDLRRFRHHRQYLKFCGFDLAASQSGSQCSKRRLSKRGNARLRYAYWLAATVAIQRTENSFRAKYERYIRADPTSGDLKRKAITAIAAKMARVAHALVKRESEYRGYYEHAVPGGGTPLSGP

SEQ ID NO: 331370 - protein, 343 aa, unidentified
MDYFAGLDVSLKSTSVCIVDGTGKIVREVKVASEPEALLTVLRDSAYRFKRIGLEAGPLSQWLFSALAEADLPVICVETRHMRAVLKAQINKTDRNDARGIAQMMRVGLYRPVHVKTLRSQKLRMLLTHRKLLQAKAIAVENDLRATLRNFGLKVGAVGAVKFEARIKELIDNFPDLVALVEPLLVVRRVLREQISILHRRVLAAVRNDEVCRRLMTVPGVGPVVALTYRATVDVPARFRKSKSVGAVFGLTPARDQSGESDRPGAISRCGDEMMRTTLYEAAQVMLLRSAKWSWLKAWAMKIARHRGMKKAIVALARRLAVIMHRIWIDGTEFRWTRDAAAA

SEQ ID NO: 331371 - protein, 356 aa, unidentified
MISRSCLHVPRVIVGVDTHKDQHVAVALDRLGVRIGQRNLPTTNKGYESLERWASGLGEIDVFGVEGTGSYGAGLARFLRVQGHRVVEVNRPDRSARRRLGKSDPTDAEMAARAVLAGVARDLPKSGLDKVEMMRMLRSTKNSAMKGRTQAINQMKAIIVTAPAELRTVLRGLTTSQLVACCARSRRRQLRTPRAAAKYALRSLARRHIQLTQEIEAIDAELARLTAAFAPALTASLGIGPDTAAALLVTAGSNPERLKSEAAFAALCGVSPVPASSGKTNRHRLNRGGDRQANAALYRVVVVRLRYDVRTRAYFHRRMEEGKTKTEVIRCLKRYVAREVFSILHYIGKRHTAQNA

SEQ ID NO: 331372 - protein, 358 aa, unidentified
MAKSIKGTGSGMAAIGLDLADVWSDWVGLDEYGSMVRRDRVKTTEGELRKVFGAIASTTIALEVGTHSAWVSRVLKSLGHTVVVANARKVALIHRNKRKNNRIDAEFLARLVRTDKTLLFPIKHRDERSQADLAVLRARDLMVGARTKLINHVRGTTKAFGKRLPKCSAPAFVSRCSDQVPVDLLTALNPILKQIAEMTVAIKGFEREVSAMVKRHPEATRLMQITGVGELTALAYVLTVEDPHRIVRSRSAGAYFGLVPGSDDSGEKHEQRRITKEGDRFCRRLLVSAAQYILGPHVKVDSDLRRHGLAIASRGGKNAKKRAVIAVARKLAVVMHRLWITGAVYVPLFNASAESVAA

SEQ ID NO: 331373 - protein, 514 aa, unidentified
MSEGTALPPFSRLSPRLLFKHSAWHMRHIPLTQNFHPQPLAPARKADWVHAHCARFRSPYAAQDKPFASGFKNPHRNGGDIMLKINYMSTLFVGIDVSSKTNAVYAMDFEENKYLSSPFDNNQPGADKLVNMITECMHKHKNLDTLLIVLESTSVYSVHISNFLSTSEVLMPYKPYVLCVNPKTTANYRKSYIGMEKTDPTDAYLIADFGRVGRTKKLEPWRGGQFIALKRLTRHRTHLSECIAREKTYMVSNLYLKFSELQLLEGDDKPFGNLYGATSSAVLTEFLSPQEIIDMPEEELLAFLAEKSRNRISDISKTSELLRKAARDSYRLDKCMYEPLNVSLASSFNCIHAYQKEIRLIEQAIEKCINGMNPNALIILQSIPGIGPVWASGILSEIGDITAFHSSDALAKYAGLYWPKGDSGDFVSEDNQMSKAGNPYLRYYLGEAANSVRKHIPGYADFYARKYAEVTKHQHKRALALTSRKLVRLVFGLLVKNQLYTGEKLDTEYNIKSN

SEQ ID NO: 331374 - protein, 425 aa, unidentified
MNYKQNEKINQVKESTLVVGIDIGSTTQYARAFDWRGIELGKVFTFSNSREGFESFKAWMQHLQDKYRKSDVIIGIEPTGHYWFDLGAYLEDEGILLVMVNPYAVKQTKELDDNSQSKNDRKDPKVIAKLVTEGRYSAPYTPDGVYADLRIMVANRKRLIREMTQIKNRFARWFAIYFPEYTDVFGDYEAQSSMLLLKKVCTPEAIVELGAEKINQIWRDAKLRAVGMKRATTLCETAKRSIGLKKGSSAARYEMKLLLEDYEYKKAQLDAVMEEIEKLCRKIPESEQMLAIKGIGVITVAGFLAEVGDVRRFESPRQIQKLAGLSLRENSSGKHKGQTTISKRGRSNLRAVLFNAAIPLIAKNPEFKSLHEYYTTRANNPLKKKQSVIAISCKLIRVFYAILANGVTYDAQKMLSDIHRQPQTA

SEQ ID NO: 331375 - protein, 342 aa, unidentified
MRIIGCDLHASQQVIAMLDRETGEISERTLKHEAQTVREFYAALPAPVVVGIEATGSMWWFLRLMEELGITCHVGHPARIRQQETRRQKHDRRDAALLMNLLAENRFPSIWMPGAELRDLRALVRHRHQWVCLRTRVMNALQGLALAHGIRRRAGLWSDAGRAALAAVRLLPHDGERRSALQALYDELSTQIKRLDQRVEAQATARPQACRLMTHPGVGPVTALATEVFLGDPTRFADARALASYVGMIPSEYSSGGRQRLGRLSKQGNPMLRFLWCEAAIHAVRRDAALGRFYRRKLQQKGFGNARVAAARKLGIRLWILLRDQIDYTEFCRRAPSRPAVR

SEQ ID NO: 331376 - protein, 343 aa, unidentified
MSEITVIGLDLAKHVFQVHGADPDGRPVLRKRLRRGQVLEFFASLSPCLIGMEACAGSHYWGRELQALGHEVRLIPPQYVKPYVKTNKNDAIDAEAISEALTRPTMRFTAVKSAEQQSVLMLHRTRELLVRQRTMLVNALRGHCGEFGIVAAQGLSRAGDLIKRIEDPADTALPDLARQALQCLTSQIRAIQEQIALIEKKLLAWHSSCGASRRLAEIPGVGLMTATAVVASVGNATQFRSARQFAAWLGLVPQQHSSGGKERLGHISKRGDGYIRRLLVHGARAHLSWSRRKKQIRSAWLTGLLARRPTNVVLLAMANKTARIAWAMLSRGERYQEMIAAAA

SEQ ID NO: 331377 - protein, 343 aa, unidentified
MQAITTIGLDIAKSVFQVHGVAVDGQVVIRRQLKRRYVLAFFQKLPPCLVGIEACASSHHWSRELKALGHTVRLMPPAYVKPYVKRQKNDAADAEAICEAVTRANMRFVETKTPEQQSCLMLHRTRHLFIRQQTAVINAIRAHFAEFGIVAPVGRNGVEELLNVVVDSNEKRLPEVARGCLAALGTQLRALKAQILEFDRRIMAWHRSNETSKRLDDIPGVGPVLATALVASVADPKAFRSGRNFSAWIGLVPRQHSSGGKDRLGSISKQGDRYLRSLLMIGALAVIRYAKIHGTKHRPWLTALLARRPTKVAAIALANKIARMAWAMMAKGERYKEPVALAA

SEQ ID NO: 331378 - protein, 414 aa, unidentified
MTDISNDNAQTVFVAIDIAKKNHDVLIQPPSGNTQRLRISNTLEGFEALQGKIAAIDSPRVQCGFEPTADYHRNIAHWLAQQGHEMRLVSSLACARAREMLFKTWDKNDRKDANVILYLLKQSMSESFHDPLISGLMDIQEICNTYQQIVLSRSRVTHSLLNHSVTLFFPEAERFYHNTRSEWWCEFLLKFPTPGSITKHRKQTFVKRAWKVVGRKRDKQLFLEEVYEIAEKSTALPVAENSQSVAMFRMQLRRMLDLTRQRQELEQLADGLLQERSDYQRLRTLPGVGPIIALMILAEAGDLRRFKHHRQFLNFCGFNLSAQQSGQYRGRYQLSKRGNARLRYAFWLAANSAIRNRENSFRDKFSRYVARDPEDADLKRKGRVAVAIKMARVAHSLVKNNCDYRGYHEYGYGT

SEQ ID NO: 331379 - protein, 346 aa, unidentified
MEQISRVGMNTSKRFFQLHGVNAAEEVVLRKKLRRKEMVEFFQALAPTVIGIEACGSSHHWARLLRSFGHEVKLIAPQLVKPYVKRGKNDGADAEALCEAMSRPTMRFVPVKTAEQQAALMLIGLRERLIGNCTQLSNAIRGYAAEFGFTAAKGMAHLDPLLERIQADESLPLAARELFAVQSKEYAQLRGQINEVEAKLKAWHKSDECSQRLIKIPGVGPIGAVLLKMKTPAPEQFRTGRQFAAWIGLTPQDHSTAGKVRHGGITRAGDEALRAVLVAGATAVIQQAVRYGGRASPWLDALLKRKPPKLAAVALANKMARVAWKLMVTGDSYSTKSAPAALASRI

SEQ ID NO: 331380 - protein, 370 aa, unidentified
MDQLIRIGIDTSKSVFVLHGVNGAEQPVLRKKLRRKQVLEFLGQLEPTTIGLEACGSAHYWARELMALGHQVRLLPPQYVKPYVQRGKNDAADAAAICEAMSRPRMRFVPVKSAEQQAALMLMGVRDQLIARRTQLSNTIRGHAAEFGLIAARGLDKIEPLLARIASEPAVPALAQELFAALAQEYDELKPKLRRIEMQLRAWHRQNDVSLRLAEVPAIGPIGAALLVMKVADPRAFRSGRDLAAWLGLTPKDHSTAGKLRLGVITRAGDETLRRVLVAGATAVIQQVRRGRGKSSPWLAALLRRKPPKLAAVALASKTARIAWKLLVSGERYDPQHSRTGLASPTASLAPRARRQGRVAPPAAVACGQP

SEQ ID NO: 331381 - protein, 335 aa, unidentified
MTSLYIGVDISKDTIDVAYWNGSAAKSIGTYANSETGFAEMVPHLTKLAGTQQICLVLEATGSYHLSLSLFAFNQGWDVTLPNPKRVKDWAKGMGYRAKQDKIDGRKLAHYGGLCQPPVQPPLPPELDQLDNLLKRQQDLEHLLRQERNRLHALKVRPTVDPHVLASVERSIAFLSQELALLNQAIDDFFDSHPEHNQALHNLRLLPGVGPKNSPHLFLLLARWDNLTAGQGSAKQLTAFVGLDPQPFVSGTSVFKRPSISKMGDSHLRSLLYMGALGGVRGHNPLRNFYQGLVNRGKAKKLALVASARKILVWAWTCFSRNVPFDPKKVDPNFV

SEQ ID NO: 331382 - protein, 369 aa, unidentified
MSARLTNSSRDMRLKGGAVQKIYIGVDFHARQQTICYLTTDSRELLRHQLKHQDKAAVRAFYAQFSGDVIVGLEASGYSPWFERLLEELGCEVWLGNATEIRRRARWRHKNDRRDAELILELMLHDEFPRLYLPPFQSREVLRMLRYRQKLVKIRTMGKNSLQALALQSGLAKGSHLFSKVGLQELCTVPMSPAMRWQRDQWLQLLEPLDQRLLETMQWLKLQSIEDSRIALLRTHPGIGLLTALCLVHSLAPVTRFRNTRKVAAYAGFDPLERSSAERQRFLGISKAGSRVLRYLLVEAAHTTIRHDEDLQRFYKRLVARRGSPKAKTAVARKLLIRAFIMLRDEIDYAEFQRRAVAARHARQISSTP

SEQ ID NO: 331383 - protein, 451 aa, unidentified
MTTMKPQVIDDQEHERVHERVAAVDVAKDTGMVCTRTPHPSRPGARRSTIWTVKARMGAVRALGRQLKHDGIEIVTLESTSDYWRIWFFVLEACGLAVQLVHAAQAKNLPGRPKTDKLDAQWLARLTEMGLLRASFVPPRAIRDLRDYTRARTRLVQERTRCWQRLEKLLEAALVKVSSVASKLTTVSAQDMIKAMIAGQRDPHQLAGLARGSMKAKHDDLAEALNGMFDDHHGELAQLLLDHIAFLDSRIAQLGTRATELAAAMPAAWGADADGTTGPGAKTGPDARVLNAVARLAGIPGISEDLARAIIAETGLDMTRFPTAAHLVSWAGLCPSARQSGPRARAGNKGQGDTWLRGSLGQAAIGAARTATFLGERYARIARRRGKAKAQVAIARSILVIIWHLLADPAARFTDLGYGYYQARTDTDRKLRNHIRQIQALGFTVTLTRAA

SEQ ID NO: 331384 - protein, 353 aa, unidentified
MRNVCGLNVHKDNVFVCIDKEKGEKIQFKTGILTKDLDALRDTLVANDVTEIAMESTSVYWMPIWRVLENDFKLYLVNPYAIKQLPGRKSDIKDAEWIATCLRKELIRGSYVPDSTIQQLRQYNRRIFDINKQSVYIQNKIDAALQRCNIRIGNYISNVRAKSYCQIVDMLSEGKTSPELLIVKVHKRTVNKWGRETILAALEGVVNKTDCRILKQLKEELDMLRKHKIECLVMLREICMENYKEQLLDIQTIPGIGEQGAMQIIAETGVDMKAFITAAMLVGWAGLKPRNDESNGKFKSRSTTHGNKYLRKILIECAWGASRTQGCFFNKFSYHQTMVRKKNRQKVQQYNIL

SEQ ID NO: 331385 - protein, 340 aa, unidentified
MSEITTIGLDLAKHVFQVHGIDAQGTTVVRKRLRRGQVLAFFSRIPRCVVGLEACATAHYWARELGALGHEVRLMPAQYVKAYIKRNKHDAADAEAICEAVGRPTMRFVPVKTAEQQAMALLHRGREQLVRQRTMLVNALRAHLAEFGIVAAQGLRNVGELIAIVRDDGDTRLPDVARQVLQVLANQIEQIETAVAALERQLLAWHKTNPVSQRLASIPGIGPIIATAIATTVADPKVFRSGREFAAWLGLVPRQNSTGGKTRLGGITKRGNRYLRRLLINGASANLLRSKATKADPWVIGLRRRRPPLVVAVALANKTARIAWAVMLREKEYQPRAMAA

SEQ ID NO: 331386 - protein, 342 aa, unidentified
MTITIGIDPHKGSHTAVAIDSNEHVLDEIRVRSCSTQTTQLRDWAQRFEERTWAVESAHGLGYLLAQQLVAAGENVIDVPPMRASRVRVLGSGRSQKNDPNDARSIAIAALRADDLAVVRADDHSRVLKLLSKRHRDLGRLKNKASNRLHALLLEMVPGGASFRITSVTRVNAVIDDFEPVDAMGRQRQEIAREFSVDIDRYNQLLDASKQRINTAVAASSTSLTTICGVGPITAAMIIGQSGDVDRFKSKHHFASYNATAPVEASSGSKVRHRLNQRGNRQLNWAIHVVAISQLRHDNVGRAYFDRKVAEGKTSKEAIRALKRRLSDVVYRHLVADARQQS

SEQ ID NO: 331387 - protein, 389 aa, unidentified
MKIFVGIDIAKLNHFAAAISSDGEILIEPFKFTNDADGFQLLVSKLESFDKNSIIIGLESTAHYGDNLVRYLVAEFYQVCVLNPIKTCQMRKNNVRKTKTDKVDTFVIAKTLMMQDDLRFITFFDLDMMDLKALGRFRQKTIKQRTRLKIQLTTYVDQVFPEIQYFFKSGLHQNAVYALLKEAPSPKEIASMHMTHLANLLKVNSHGHFTKEQAKELRVLAQKSVGANDSAISIQITQTIQQIELLDSQLEKIEVEMTDIMKFNDSVIMTIPGIGYINGGMILGEIGDIHRFSNPNKLLAFAGLDPSVYQSGNFQAKTTRMSKRGSRVLRYALVNAAWNVVRNNATFKAYYDAKRAEGRSHYNALGHCSGKLVRVIWKMLTDNVEFNLK

SEQ ID NO: 331388 - protein, 414 aa, unidentified
MRIVHQNVAGLDVHKKVVVAAIIVQQEDGTWLKVTRSFGTMTADLLELSDWLMGQNVRDVAMESTGEYWKPVFNILENNFEVIVVNAQHISKVPGRKTDVKDAEWIAELMQYGLLKASFIPPVGQRELRELTRFRSSFVRERATLVNRVQKVLESANIKLASVATDVMGVSGRAMLAAIINDQAKPEEMAELAKGRMREKREELAKALEGRVKAHHRFVLTELLCQIDNFDETIARFDQEIETYCRPFEEAVRLLDTIPGVGRAAAEIIVSEIGVDMSRFPTADHLAAWAGVAPGNNESAGKRRSGRTCKGNHALRNVLNQSAHAAAHTKNTYLSAQYHRLAGRRGAKKAIVAVEHSILVIAYHLIERHEPYRELGGDYFDKRRPEATTNRLVKRLEQMGFQVNLQPAPVPLAA

SEQ ID NO: 331389 - protein, 344 aa, unidentified
MDHFAGLDVSVKETSICIVDDTGKIVREVKVPSEPEALLAVLKNPAYNFKRIGLEAGPLSQWLFGALAEAELPVVCVETRHMQAVLKAQINKTDRNDARGIAQMMRVGLYRPVQVKTIRSQKLRMLLTHRQLLQSKAIAIENDLRATLRNFGLKVGMVGKVRFEARIKELVEKLPDLAALVEPLLIVRRVLREQIVILHRRLLAVVRDDEVCRRLMTVPGVGPVVSLTYRATVDAPARFRKSKAVGAVFGLTCSKYQSGEIDRSGRISRCGDEMMRVMLYEAAQSMLRSKKWSWLKAWAMQIARRRGMKKAIVALARRLAVIMHRIWVDGTEFRWTREQAPAAA

SEQ ID NO: 331390 - protein, 380 aa, unidentified
MQQHSPTDPTGARPNDAVLFVALELSRASWLVAIQAPGRDKISRHKLAAGVSAELLELVGRQRARAEHRTGGKLRVMSCYEAGRDGFWLHRLLVANGIENLVIDPASVAVNRRARRVKTDRIDVETLLRAMMAHARGERRVCSVVRVPTPEAEDARRLTREREALLEERVRHVNRVKSLCALQGVYDFEPLRPRAAERLDGLMTGDGRPFPERLKAEVRRHLERLGQVVHQIAEVEALRDKPASPLAKGVARLVALRGVGPNVASVLQAEILGRCFANRREVAQYAGLAPSPWASGRAQREQGIGKAGNARVRAAMIELAWLWLRHQPDSALSHWFRERVGQARGLVRRIAIVAVARRLLVALWRYATDGVIPEGAVARG

SEQ ID NO: 331391 - protein, 460 aa, unidentified
MNPKRSKSRNGGKIPMVHPNAAAIDVGATMHMAAVRADRAPEPVRSFGTFTADLHRLVDWFTECGVETVVMESTSVYWIPIFELLDARGFTVFLVNARDAKHVPGRKTDVSDAQWLQRLHSFGLLRASFRPKGQIAELRAYVRQRERLLEYAASHIQHMQKALTEMNLQLHHVVADITGATGLRIIRAILAGERDPEALACLRHYSCHSSAETIAKALTGSYRAEHLFALEQALALYDAYHEKASACDARIEAVLKELSIHRGHGHGPAPRASRRRNRTDQANALAFDVREALFALLGKDITTIDGLGPYLSLKLIAECGDDLSSWPSAKHFTSWLGLAPSNKVSGGKMLSSRTRRSGGRAAALLRLAAVTVGRTDTALGAFYRRLSARIGKAKAVTATARKIAVLFYNAVRYGMDYVDPGASSYETRYRTRVVNNLHRRAKAFGFVLQPLEPKVGAAVS

SEQ ID NO: 331392 - protein, 460 aa, unidentified
MARRIWSDRPGLDVVHRDAAGIDIGSREHYVAVGPDRDAEAVRVFGCFTTDLRRMAEWLQRCGIKSVVLQSTGVYWIPVYDVLEQYGLEVWLVNAQDTKNLPGRKSDVQESQWLLKLHTYGLLRRSFRPAPEIRGLRTCWRERGEYVQQAGSCIQRMQKALTEMNIQLATVLSDLSGETGMSIVRSIVAGERDGKRLAEFRDPRVKASKQTIAKSLEGTWLPEQLAVLQRQLGDWDHIQRQIAACDVDLQAMLQQIPAAKVQQQQSLTPAAAPAGKRKRKKNGKSSKNEPKFNLAAELQRVTGVDLSRIDGIKAMTIMTVISEAGLDMSKWATEDHFVSWIGLSPRNDVSGGKVLKRKTRKVKSRLATALRTSATTLRQSDSYLGAQFRRLRSRLGPPKAITAMAARQARLVYRMLKYGQEYVDKGAVIYEQKYREQQIRFLEKRAAQNGFALVPLHQNA

SEQ ID NO: 331393 - protein, 412 aa, unidentified
MGTTIAGIDVHKKVLMVVVMKVASGQAEAMWQRRRFGAMGSDVRQLRLWLVEQGVEEAVMESTAQYWKPVWYELEPHLHLHLAQAFSNRAPRGRKRDFKDAERLVRRHLAKELILSFVPQPEQRAWRTMSRMKTQLAQDRARLHNQMESLLEEMQIKLSSVLSDLLGASGQRILRALAEGETDAEKLASLGSQQLRSTRQQRIDALSAMPSAMHRRLLGLYLQRLQQIDAQIEELTQMIATTMKPHEDTVMRLAEVPGFGADSAQQVIAEVGPEAGAFDSAAQFTSWAGTCPGKEESAEQNKSSRSAKGNKYLRRVLTEVAQAAVKTKGCHYQIVFRRLLPRLGYKQALWAVVHRLCRLVWKILHDHVSYIEQAPFRDPGALKQRARTLARALRRLGYDVKLQPTQTNILNV

SEQ ID NO: 331394 - protein, 409 aa, unidentified
MDVILDRVCGLDVHKDSIKACVRVPGEGRKRDQHIATFGSKTEDILALRDWLEQWKITDVAMESTGEYWKPIYYLLEDRFHVLLANAAHIKNVPGRKTDAKDGAWIAQLLECGLVAKSFVPPGPIREIRDLTRYRKTLIRQRTEEVLRLHGVLQRAGIKLSSVASNIMGVSGRAILKALVKGEKDPEAMAELARGQLRVKIPLLKRALEGQFTKHHGQLVSHMLSHIDYLEEMIADISKELAELLVPYEPQLALLETIPGVQRRTAEMIIGEIGVDMSQFPEDRNLSSWAGVCPGNRRSAGKRKPEKIRKGGQWLKPALTEATWAAVKENNSYLSAQYHRLVPSKGKKKAAVAVSHSMLVCVYHVLKKATAYRDLGSDYFLRRNQEATKRRCLRQLEQMGFGVTLQKLA

SEQ ID NO: 331395 - protein, 407 aa, unidentified
MRIIGMDIHRVAAEVVSLLDGEIVKLGRVQMLRDKLEEFARKELTHDDHVVIEATGNAAAVAEVLSPFVDRVVIANPKQVHMIAHAKVKTDTIDATVLAKLYASGFLPEVWVPDPETLALRRQVTRRTQLVRQRSRLKNLIQSILHAHLIPPCPHGNLVGISGRKWLARQMLPADERAAIERHLSLIDQINEALTVVEADIAVHALQDPTIRRLMTLPGLDVTVAASVAAAIGDIRRFSDPQRLVAYLGLNPSVRQSGEGPAYHGRITKQGRGHARGMLVEAAWAAARSPGPLRAFYQRIAARRGKHIAAVATARKLAMIIWHMLSKDADYIWARPALLARKFRSAELRAGLPTKHARRGMAYDYNIPAKRAEERSRVEKGEAAYVDLTSRWRTRPKGKEAVEKLAL

SEQ ID NO: 331396 - protein, 342 aa, unidentified
MYYIGLDVHKKTICYCVKDASGQIHREGTIGATRNELDCWVRTLPQPRMMAMEATIFTGWIYDHLLPYAEQVKVAHPLMLRAIAASKKKNDRIDAGKIADCLRCDFLPECHMASTEIRDRRRTLRYRHLLVRQMVQMKNRISGLLLETGVSHNKQRLHKVGYFRELLSSNKEVHENIRPLLRLSRETVVRCQRTEYALVSSLERDPLLAERIKRLRTVPGVGPITALTWALEIGDVSRFRSVKQAISYCGLCGEEKSSADKVLRTPLSKQRNKHIQHVLVEAAKLAPRQNHELALIREREMQKGNRNRATLAVARKMVAYLLAVDRRDREFVPAEGHSTAAA

SEQ ID NO: 331397 - protein, 345 aa, unidentified
MTVYIGVDFHARAQTISYLTTEDGEIQRLQLDHGQPQEVRRFYQQFDGQQVVVGFESSGYAAWFEEMLEELGCEIWIGHATAIRLFARRRQKNDRRDADLILDLLVRGDFPRIHRYSAASREVLQQLRYRQRLVKMRTMIVNSLLFMASSRGLSLRTQLKSRRGLERLQQLALPQPLTDQRDELCQLLLELKTKVDKVEEWLAAKAESDVRVKRLRTHYGIGPLTGLCLVHTLECPERFANPRKVTAYVGFDPVEDSSGERRRIGSISKQGSRLLRFYLVEAGQIAIRQDQDLARVYQRVLVRRGHAKAKVAIGRRLLVRAFIMLRDEIDYAEFQRRGVAARSSR

SEQ ID NO: 331398 - protein, 446 aa, unidentified
MSHRKQAPSRGVARRNAKLRELRRLVSRDRAILAVDLASGRQAAVVLDHDSVVLARRMFTGSAWCIREILAWAEPIAVKAGFAGLVLACEPTGHRWKPLVVTARAAGSPVVCVQPLLVHRSREGEDFTRNRSDFDDAVIIGRLTAELRCYVPYLPEGPWARLRHLGARRAELLVRATAARQCLRDLLECAWPALLAAAAKPLDSATWRAALAISVHPAAIAAMSEQEFLAALQGQVRAAGGQRVCRRVGRAIYAAAARPGGITAERDAALERAEFAFSDWMTALAAIAGVEARMVAVLDDLHLTHLVATIPGLSAVSAAAILAETGDPHRYDTPRTWVKHAGLAPRANESGNFRGQTKTSGRGRPGLRTAAWRAIWGALPHNPVWSARHAALTSRGTNQLHDGQARTAAAAALLRQLFVVITKRVAWDPAIAAGTAAPQGVTATAA

SEQ ID NO: 331399 - protein, 353 aa, unidentified
MSTPNTAIAVIDIDIGKNSFHVVGHDARGAVVLRHKWSRGQVEARLANMSRCLIGMEACVGAHHLSRRLASLGHDARLMPAKYVRPHSKGQKNDFNDAEAIAEAVQRPTMKFVATKTAEQLDLQALHRVRERLVSQRTGIINQIRAFMLERGIAMRLGIGFLRTELPTILATRTDALSPRMLRVIEELAVDWRRLDQRIAGLSKEIEAIARQDQACSRLMTVPGIGPIISSAMVAAIGTGDVFSKGRDFGAWLGLVPKQISTGDRPILGKVSRRGNRYLRVLFVQAAWVVLVRIKNWERYGLTSWIEAAKKRLHHNVLAIALANKLARIAWAVLAKERAFEQTRIDDANVRPA

SEQ ID NO: 331400 - protein, 341 aa, unidentified
MDKELYFGVDVSKKTLDLAYYDGETIDWKNAHIKVSNDDAGFKKIGSWVAKAGKDFDTFLFCMEYTGLYNQNFRLWLESKEYIYGMVEPRKMHRFEPDLDDDQRSLDRIKTDELDAFRIAIYCEQNHKKILRNPSKLPSPVYFKLKRLLAERKQNTKQSVLYKQQLHDICAYDTDLSVERKKLLLKNMKENQKTIDKEIDCYIQEDASISKNYNLLTSIPGIGRIIALETIVLTENFTTISNPRKYACYIGIAPFKKESGTSVRKKTGVSKKGFSEAKADLSIAVLSAIKNNPSIRDYWIRKRKEKCGGIVLNAIKFKLVLRMFAVIKRGTPYVETDAYKN

SEQ ID NO: 331401 - protein, 375 aa, unidentified
MKRSEAFIGLDVHKETIAVAIADSGRDGEVRYWGTMPNTIHHLGQLVTKLSKKHSRLEFTYEAGPCGYDIYRHLKDKGFACQVIAPSHIPRRAGDRVKNDHRDAVTLARLARAGELTAIWVPDPVHEAMRDLVRARHAASKDLKQARQRIQSFLLKHAASTYEAKAWTGRHRLWLAGRRFPHECQQVAFQSYLNAMEQCLSRRSDLEEQIRGLVPTWSLGTLVTELQALRGVALLVAVTLVSEVGDMLRFATAKHLMAVLGLTPGEHSSGASIRPRGITKAGNTAVRRILYEAAWSYRVTPRVGSHMHAYMPPNISQEVKDIAWKAQLRLCKRYKQLIVKGKKPQVAITAVARELVGFIWAIGQKVQPPAAAAPS

SEQ ID NO: 331402 - protein, 379 aa, unidentified
MQTITLYLGLDVHKDSITIAIAQAGPRGEIRPFGTITNSLHALERTLIRIRKAHPGARLEVAYEAGPCGFGIARRLKQLKVPCLVAAPSLIPKQPGSPFKTDKRDARTIARLLRAGELTGVYVPEPTDEAIRDLCRARTDAVDDLRRCRLRLKSFLLRHNYRYQGKANWSEPHMRYLRELVLPHPAMKAILEEYLQGIDAAHQRVQRIEAAMLTLLETWRLKAAVQALMAFRGFQLVAAMITVSELGDIHRFAHPRQLMTYLGLVSVEHSSGPHQRLGRISRCGNGHQRWLLTECAEHYALPPKVSKELARRQEGQPPAVRALSWKAQTRLHLRFTRLLARRLQRNKAKVAIARELCGFIWALLRTQPCYTQPLAGTAS

SEQ ID NO: 331403 - protein, 451 aa, unidentified
MSKDRTRSKPSGLPIIHPFAAGIDIGSRFHVVAVSPDLCDEPVQTFQAFTGDLQRMADWLVATGTKTVVMESTGVYWVAVYEVLESRGLEVILANAREARAVPGRKSDVNDAQWLQRLHACGLLRASFRPGRDIAELRAYLRCREKHTDYAAAHIQHMQKALTFMNIQLHHVIATLTGVTGMRIIRAIVAGERDPDRLAVMRDVRCKESLETIRNALVGNYQPEHVFALKQALALYDFYQQCIDECDVEIERAVAILNIAHSFPEAPLPKAKHRNKMPSDPNFDVRTAMYQLAGTDLTQIHGIGPFLALRLIGECGTDLSRWPTAKHFTSWLTLSPGCKISGGKILSSHTRKTSSRITVALRLAAVTVGRSNTALGAFYRRLAGRIGNAKAVSATARKIAVLFYNAMRYGMDYRDPGADHYEQQYRDRVIKQLHRRAAQFGYSLQPQDPPV

SEQ ID NO: 331404 - protein, 437 aa, unidentified
MTSTFSRLLDPSLEDAHDPFQGYDPRGEPLDDRLYLPCGIDPHADVCGVAFVHPLPQCADVLEARVIDNHCWSDLTWLIDTGRRLAAPFGAQPIYVFEATGPFWRPYRHALHQAGLATATICGRQAKHARATQTRKTKTDLIDAASAARVFKQGESHATRIPPEPMASLREYTRLHLFFVEQGVALQNRMYTVRYQIHPDFDALFSQPILATTLALMRAELVHPHKVLACDREDLTDLVRRASRGKLGAPLAHALVRSARTTFRFDYAAQALSFNLRLLAEAYVYLHDHLLPPLRQRIADLLTQVPFEQHLDELPMFGPIVIGSFLSELGWPAWFHSVESVVAWFGLEPSLSESADKRTGRSHLTKRGSVYGRRTLWLAARNWSLYTPEGRAWFRKERQQHHLSYDGAVCAIAAKLVRIAFAMLRDGSHFDPKALSL

SEQ ID NO: 331405 - protein, 319 aa, unidentified
MAQNEVVVVGIDVAKDKVDACIRAFKLRQTWLSTAQGHRKLVAWLRKYQVNKAVMEASGGYERAWARVLREAGIEVRIVDPKRVRSFALSAGRLAKNDAIDAEMIAWFAETFSEAPGQPHDAAREELQALVKARLDLIDFRMRLVSRSEHAAPGLVQKAHAHILKSLASEIAKLEAAISAKIKSTPDFAERAEIIESVPGFAQTSSANLVAGMPELGQVSDEIAAALIGVAPYDDDSGKRRGERHIKGGRRWVRNAIYMPCVGAATQNNPVLKAYYQRLLAKGKEPKVAIIACMRKLIVILNTMIARRQKWDPSRYVLS

SEQ ID NO: 331406 - protein, 344 aa, unidentified
MQHYVGLDVSVKETSVCIVDKAGKVIREVKVATKPVPILAVLIGGALAIERIGLEAGPLSQWLYSALAEAGLPVICVETRHMKAALSAQINKSDRNDARGIAQMMRVGLYRPVHVKTLASQKRRMLLTSRQLLQAKALDIENDLRGTLRNFGLKVGMVGTVKFEARIRELVADHPDLAAIVEPLLIARRVLREQLGVLHRQLLEIVRQDEVCRRLMTTPGVGPVVALTFRATVDVPSRFKNSKAVGAALGLTPRRYQSGEIDRMGGISKSGDAMMREMLFEAALVLMTHSRKWSWLKAWGMKIARHRGMKRAIIAVARRLAVIMHRMWVDGTEFRWSRKEAAAA

SEQ ID NO: 331407 - protein, 341 aa, unidentified
MKKQCVGIDISKDHLDCCIGCIDSDQNHKLQNNKRFSNNETGFKALLHWVSDLQVTENLMYVMEATGVYYENLIYYLTENDCKASVLLPNMVKHYVKSLNINTKTDKVDAEVLCRLGLERRLGFWQKPSGIMRELKFLSREYREIKYKINQVKNQLHARFYSCQCPESTEQRLKRQIALLETQALEIEAEIRTLVMTDRSFYDKIQRVCTIPGVSFITVVCVVAETNAFALISNSKQLTSYAGLDIQQNQSGSREGKTRISKKGNSFIRYALYMPALCASRFNPSMKSFYKNLTERKPAKKIAVTAVARKLLCLIYVLWKKEEEFNMNYEENKNTDRVSPV

SEQ ID NO: 331408 - protein, 402 aa, unidentified
MNCVGIDVSKGKSMIAVMRPFGEVVVSPFEVRHTTSELSELARLLKNLDGETRVVMESTGNYHAPVAWLLHGAGFYVSVVNAMLVHDYGNNSLRRGKTDKKDAVKLANYGLDHWLTLPRYVPEEDTRLMLKTCYRQYQQYSKVQTMLKNNLISLLDTAFPDANRLFTSPPRADGSEKWVDFVATFWHCECVCGLSKKAFTAKYQKWCRKHGYNFSQDKALDIYASACGRFGVMPKTNTAKLLVEQAISQLQTTSAALAALKQEMQSLAASLPEYPVVMEMFGVGPTLGPQLIAEIGDVRRFHSKKALVAFAGIDAPPYQSGQIDVRSRSISKRGSASLRRTLFLVMGVLLQCAPMDEPVYQFMNKKRSEGKPYRVYMMASANKFLRIYYASVKAYLDSLEHD

SEQ ID NO: 331409 - protein, 337 aa, unidentified
MIVVGVDVHKHSLTAVAVDEVGRPVAEQTIGDGQLLLEWAASVSEERLWALEDCRQLTRQLERTLVDAGERLVRVPPKLMAPQRRSGRVRGKSDPIDALAVARAALREPRLDHPREGEQRLRELKLLVDHRDDLVDERRRAQQRLRWHLHELDPQLAVPAGALDRAVWLDRLARRLARQEQTVLVRIARELVGRCRSLTRTILGLERELEKQTSATAPALLALPGCGALSAAKLLGEIGPIERFQTDAQLARHAGVAPLEASSGTHQRHRLDRGGNRQLNCALHRIAITQARMHPPARAYLARKQTEGKSRREALRCLKRQLARTVYTTLKNEPPLT

SEQ ID NO: 331410 - protein, 392 aa, unidentified
MSNKVKTVWVWGDSVKLFYRGSLMFFVGIDIAKRSHEAAVINQDGTFKVKPFKFQNSTDGFNKLMEVVLGVSQTLSDFEFGMEATGHYWLNLYCKLVDRGANVHVVNPVQSDALRGLYIRKSKTDSKDSLLIADLIRIGRYSETTLSDPDIISLRELTRQRFYLVDCVSDAKRKVITLIDKVFPEYEQLFSDMFGATSLALLEQFPTPDLLCEISTAKLTNFLKSVSRGRHGRNKAEEIKSLASNTFGSAVFAAGSAFALKQFIEQIELLERQISDIEDYIAELLPKFNSTLTSIKGVGSTLAAIIVAEIGDVARFDSPEKLAAFAGVDPSVNQSVEFVGTKAKMSKRGSPYLRRAFFLAAVAGTMHNPALKALYLRTALFWTANCSSGLEH

SEQ ID NO: 331411 - protein, 346 aa, unidentified
MVHVGLDLSRTRLDVHVMDEAGAALAVTTAVPDRGGLTVLADRIGGFGGPVYAAIESMNGARFVHDQLELAGWQVEIADAQKVKGLAPLACKTDKIDAWVLAELSRRDLVPAIWLPTPAVRAERERARWRLHLVRHRTALKNRIHATLLTFGHPCPVSDLFGVGGRELLARLELPEPWAADTVAALHLIDELDHQIVECERALRRMGADHRYVPLLMTTPGVGWVLGYTIAAEIGDIERFPSPTKLAGYTGLCPRVYQSGGKDHRGPLAKNGPKYLRWALIEAAVHAARHPVYAQRYRRTKARLGRQRGPKVAQVDLARRLAEAIWHMLSTNRPFAPAGAAESLAS

SEQ ID NO: 331412 - protein, 353 aa, unidentified
MTNTKYIGMDVHKESISIAIRNVAGKIVMECVIETKANAILDFIHGLRGELQVTFEEGTWATWLYDLLKPHVTKLVVCDPRKNSRQGNKNDQIDARELADRLYMNKLSSVYHGEAGVRTLKELARSYLTISKDLARVMSRVKAIYRSWGIPCAGKQVYAPRHRAEWLAKITEVGVLRRAEFYYQQLDALRSLRHEVRRDLLAESKKHKATKLLCQIPAIGPIRAALLIALIQTPHRFRTKRPLWKYSGFAIETHSSADYRSVKGQLQKSKKQVSVRGLNRDCNHDLKNLFKSAATIASVKPGPFQEFYAALLAKGMRPEMARLTLARKIATIVLIVWKKGVSFDAQYLKPQTA

SEQ ID NO: 331413 - protein, 413 aa, unidentified
MTEENFAWFAGIDWGSERHQACLVDAQGRIVGEREFPHGGKGLADLCDWLLSMCGAADTVAVGIEVPHGPVVDTLIDRGFVVHAINPKQLDRLRDRHSVAGAKDDRRDAYVVGDGVRTDRRLFRRVHVTDPRLVELRAWSRLAEELTEERVRLSNRVHHELWRYYPQMLKIADGDVAATWVLDLWDLAPTPARAHRLRAAPVEKLLKHHHIRRIDADTVLRNLQEPAIKVGKGVAEAASVHLRSLFTRLRVVNRELRQADAKLDALCAAIGETDTDSGEGLQRQDVMILRSMPGIGRINLATLLCEGSGPLSRRDYPALRTLCGAAPVTKRSGKSHIVIMRYASHVRLRNVVYHWARVATQHDPKSRERYAALRRRGKSHGRALRGVADRLLGLACVLLQRQTPFDPNFAQAK

SEQ ID NO: 331414 - protein, 402 aa, unidentified
MKEAKQYLRFCGIDMAKQKHVACIIDQNGRYLLRPKSIRNDADGFQQILNCLKQTGRAKSILTGMEATGHYWYSLHEFLTRQGYTVAVLNPIQTAQQAKQAIRKCKTDKYDAFHIANLLRSGQYKAAVVPGELAMTCRQLTRLRYRIVKQAAMIKQLANSRLHPVWPEYEGLFSNKFGTTSMKLLQTASTPKELIGLDFDDLSELIRKASRGRFGPAQTQRILHTAKNSVGMQRGHYGISTGIKFLLEQIQALEPVRKKLDAEIIKLAARLPAYLFTLPGATELTIVSLYGEVGPIESFQKPSQLVAFAGLDPKVFQTGQYDAPRRQVSKRGSPYLRRTLWQMAYRAVCNEGDLRDFWRRKHRQNKHHLVAVTAAANKLCHIVWRIMTDRRDYIPKGYNPKS

SEQ ID NO: 331415 - protein, 358 aa, unidentified
MSHYRVGCDAHRRYSQFAVLDRDGRLSQQIRVDHEPGAIQAFLEDMPEGTPVALETVGNWYWIADEIEAAGCVPLLTHAAKAKVMMGNVNKTDKLDAKGLAKLLHLDSLPTVWLPPGEIRDERELHRTRMALSKLRTALKNRIHSTLAKYGISTAEHSDIFAGTGRDWLESALSRLPPETGRCVLQEIEALDGLQFQIAQIEDRIRERVALTPSIQLLKTLPGVGDILAIVIEGEIGSIDRFDTAGQLTSYAGLVPTVHASGGKTRFGHMRKPSSQYLKWAFIEAANVIVRHRHHPAWKTKYVCQVYDQVRQRRGHAVAVGAVARHLAEAAFWILKRQQPYRPPANRQASPKQVRGRA

SEQ ID NO: 331416 - protein, 372 aa, unidentified
MSKSSTLFVGMDVHKETIEVAIGTNRLNGTVRHYGRIPNRIDAIDKLVAKLKRQAATLMFVYEAGPCGFGLYRHLTRKKHRCAVVAPSLIPKKPGDRVKTDRRDAIRLAQLHRAGDLTPVYVPDVDDEAIRDLSRAREDAMLDQKAARQRLKSFLLRHGIRYQGRANWNEPHLRWLTTVIMPTPAQQIVFQDYVNTITERTERLKRLENMLKEHVKGWYFAPVVDALQAMRGIRFINAVTFIAELGDLTRFDHPRHLMCFLGLVPSQYSSGERTRLGPITKNGNRHARRNLVEAAWAYRYKAKISREIQLRQEKLPLRIREIAWKAQTRLCARYRKLMARGKNKNVVVVAIARELLAFMWDIAQQVHLKAPR

SEQ ID NO: 331417 - protein, 356 aa, unidentified
MIRIAKAKSSAIATLGVDIGKNTFHLVGLDKRGAIVLRERLSRSQIEIRLANMAPCLVGMEACVGAHHLGRRVEALGHDVRLMAAKYVRPFCRKQKNDFNDAQAIAEAVTRPTVRCVALKTPAQLDLQALHRVRQRLISQRTGVINQIRALLLERGIAIRQGWHALRAELPRALTMTDRLTPRMLHIVEDLAGDWRRLDERLEAVSTEIAQLAHADEGAMRLMSVPGIGPIISSATVAGIGKGDVFDKGRDFAAWLGLVPKQTSTGGRPILGRISKRGNRYLRQLFVQASRVVLLRPQTWQRYGLKHWIDAAAQRLHYNKLAVALANKLARIAWGVLHSGRTFETHRENGHAPQPT

SEQ ID NO: 331418 - protein, 340 aa, unidentified
MSEVTTIGLDLAKHVFQVHGIDAQGATVLRKRLRRGQVLAFFSRIPRCLVGLEACATAHYWARELAALGHEVRLMPAQYVKVYIKRNKHDAADAEAICEAVQRPTMRFVPVKTAEQQAAQLLHRGREQLVRQRTMLVNALRAHLAEFGIVAAQGLRNVAQLITIVRDEDDLRLPDVARQVLQVLANQLEQIEAAITALEKQLMAWHKTNPVSQRLASIPGIGPIIATAIATTVADPGVFRSGREFGAWLGLVPRQNSTGGKTRLGGITKRGNRYLRRLLINGASANLLRSKATKADPWVIGLRRRRPPLVVAVALANKTARIAWAVMLRRDQYQSRAVAA

SEQ ID NO: 331419 - protein, 339 aa, unidentified
MKVSTLGIDLAKNVFQLHGVGCNGQTVLKKKLTRDKFLPFLMQLEPCLIGMEACASSHHFARVLRQYGHEVKLIPPQYVKPYVKTNKTDAADAEAICEAVARPNMRFVQIKTAEQQAILVLHTERNILIRERTACANSMRAILAEFGIIMPRTLSQLYKKIPEILEEYDNELSPFVRCSVARQLEHLQGVEDQITLTEQELSRWAKTQPACQRVMKVPGVGLMTATYLVASVGNGQQFHSAKQFAAWLGLVPREFSSGGKQRLGRISKRGDRYFRYLLVHGARAVAAVIERHKDNMPWLYRLLNKKAYNVAVVAQANKTARILWSMLVHHTEYRTLSVV

SEQ ID NO: 331420 - protein, 367 aa, unidentified
MNEYIGCDAHKKYSVFVTVNDRGQASRPVRVSHEREVFREFLRQLPAGSAIALEAAGHWYWLADELEAAGHRLHLANAGEAKKRMGKTNKTDTLDAGGLGMLLRNGTLPEVWIPPAALRDQRALLRTRMRLVRMSTALKNRIHAALDRYGLPSEGYRDLFGRQGRIDLDRLREKLPEHTREAVRRELALLDQVQAQIVPLEKHIEKVVEPSGEIARLRTLPGVGEILGPLIAWEMGDVNRFAGPAKVAAYSGLVPRTMSSGGRCWHGRVSPAVNHYLKWAFVEAANAVVRHQEKYETWHVMRLYQRLRGPKGHAKAVTALARHLAEAAYWILRRGESYRDPAGNTLETAAEAADSSGPGQRGVTLAL

SEQ ID NO: 331421 - protein, 485 aa, unidentified
MDNYPIQENVYKSEEQTALTILKTSKHPINMEKNIKDRELSGFELINPDAAGIDISSREHYVAVPKDRDKESVKKFGTFTEDLHAIAKWLQSCRIKTVAMESTGVYWVQLFLVLESYGFEVFLVNASHVKNVSGRKTDVKDCQWIQQLHCYGLLRNSFQPENQIRELRNYVRHRRKLIEDKSRYVQLQQKSLEQMNIKLHNVISDINGTSGSAIIRSILSGERLPEELAKYTHPRIKASRAVIIKSLQGNWRDDQIFMLKQAYESGEFVDKQIFDLDTQIEAVVQSITEEFGKTDSQKIEKRGKSTYKNRLRFDSRTYLNSLFGVDITKMEGIDEISALSLLSELGVDIKGKFKTEKQFLAWLNVVPNNKITGGKIKSSKVMKKKNKAGQIFRNAAYTLFNSKGYFGQYLRSRKAKDGTPQAIVATASKMARVFYKMVTEKIEFNSDILYLSNEKYLRKKLAKMKSAIENIESVINTNTVNYAVC

SEQ ID NO: 331422 - protein, 390 aa, unidentified
MYIKFKPWSMPHIILTVIAMRHKNAGGQIMNNTNTEMYLGMDVSEKSIELFALSADNKTESRGKLVNNPTKVKAFLAGLKNTSKLTVALETGTHSPWLSKMMEEHGCKVLVGHARKLRAIWGDDHKCDQRDAEMLARIARMDPKLLHPIKHVSQEVRAEQAVIKARDVLVKTSTMLINHLRGTLRSFGISTSEIPTTSMHSKLMPLVPKELRPALKGIVKQLKEVRTEIKEYDKKLTELCKKHKETKILQQLNGVGPVTAITFALIIADPRRFSSAGRVGSYLGLTPKRDQSGEVDKQLGITKSGNGMLRKHLVKSANYIMGPFGVDSELRRYGERIAAKGGKIARRKAKVAVARKLAVTMWRLWINEAEYDPFFKEHQRQKKKAARVAA

SEQ ID NO: 331423 - protein, 403 aa, unidentified
MNAVGIDVSKGKSMVAVVRPFGELVVNPYEVRHTSSELSELANSLKSLGGETRVILEHTGRYYEPVAQMLHDAGIFVSAVNPLLIKEYGNNSLRRVKTDKADSLKIARYGLDNWTELRQHTPMDTIRYQLKTMNRQYGLYTKNKTALKNNLIALLDQTYPGVNALFNSPAREDGSQKWVDFAASFWHVDCVRNVSRTAFIEKYRKWCKRHGYNFSAVRAEEIHEEAKNLIAMLPKDALTKMLVQEAITQLNAVSKTVEAFRAEMKRLAQQLPEYPVVMSLYGVGDSFGPQLMAEIGDVSRFAHKGSLTAFAGVDPTPNQSGTYEAKSTSSSKRGSPELRKTLFLVMIALLQKAPPDDPVFRFLDKKRAEGKPYHVYMTAGCNKFLRIYYGKVKEYLTSLGVAE

SEQ ID NO: 331424 - protein, 344 aa, unidentified
MDHFAGLDVSVKETSVCIVDDTGRIVREVKVASEPEALLPVLKNPAYHFKRIGLEAGPLSQWLFSALAEAGLPVICVETRHMRAVLKAQINKTDRNDARGMAQMMRAGLYRPVHVKTLRSQKLRMLLTHRKLLQSKAIAIDNDLRGTLRNFGLKVGMVGKVRFEARIRELVENLPDMAVLVEPLLIVRRALREQFCVLHRRLLAIVRDDEVCRRLMTTPGVGPVVALTYRATVDVPARFRKSKAVGAVFGLTCSKYQSGEIDRSGRISRCGDEMMRVMLYEAAQSMLRSKKWSWLKAWAMQIARRRGMKKAIVALARRLAVIMHRIWVDGTEFRWTREQAAAAA

SEQ ID NO: 331425 - protein, 312 aa, unidentified
MTSEKFVGIDVSKRWLEVRVHGEEESRQIGNDPDGFRHLIEWLQQVQPVLIVFEATGGYENRAVKALSAAGFCVAVVNPTRVRRFAEALGILAKTDKIDAEVIAHFASVVRPARNAQQTPLEEQLSAFVERRRQLLVTLVAEKNRLSTCPEVVRADIEALITFLEERIEQLGDEIRTCILQNAEWQERAEVIDSAPGVGEVTASTLVAELPELGKLNGQKIAALVGLAPFNRDSGPKRGKRRIFGGRAGIRKTLYMATLSATRFNPVIRAFYQSLLKRGKEKKVALIACMRKLLVILNAMVRKGERWHFSPA

SEQ ID NO: 331426 - protein, 361 aa, unidentified
MFTERTSVGLDVHARSVVAAAIDGYTGEVFRKRLTPGNDDVIGWVRSLPGPLAVVYEAGPTGFGLARAFAATGIRCEVAAPSKIQRPAGDRVKTDARDALLLARLLRLDEIVSVTVPSVQREAARDLVRAREDVRGDLMRARHRVSKLLLRQGIVYYGGHAWTGTHLVWLRRQHFDVPGLQLAFDAEHEAVLQAEARRDRLDTAIEVMAAASEFTPVVHRLGCLRGISTLTAFGLAVEVGDWERLTGSSIGAYLGLVPTESSSGQSRSQGSITKTGNTHARRLLVEAAWHHRKPYRTPGATMAARWELAPAAARARGHAGNQRLHQRWLHFTDRKKRPVVANVAIARELAGWCWSLAVMND

SEQ ID NO: 331427 - protein, 309 aa, unidentified
MEHFVGIDVAKDRLDIRVRPSGESFTVARDGEGLAVLVERLRGLAPTLVVLEATGGYETVVASAVCAARLPLAVVNPRQIRDFARATGKLAKTDRIDAAAIAHFAEAVRPPARPIADAEAQALGELVARRRQVIEMIVAEGNRRRMASQRRVIRAIERHLAVLQAELSELDGDIDGAIRNSPAWQANADLLVSVPGIGKATLRTLIAELPELGRLTRRKIAALVGVAPINRDSGTLRGRRTIAGGRSAVRAALYMAALVASRRNPVIAPHYAKLRAAGKTGKQALIACIRKLVVILNAILRDRKPWQPA

SEQ ID NO: 331428 - protein, 309 aa, unidentified
MDHLFVGLEAKDRLDLHVRPVSEAFSVSHDEPGVTALLDRLRTLAPTLIALEATGGYEATVAATLASAGLPVAVVNPRQIRDFARATGLLAKTDRLDARVIAHFAEAIRPAVRPLPDAQLQHLGELVTRRRQLVEMLGAETTRRRLTQTPALERRLDAHIAWLERALRDLETDLPDTIRASPVWRDTENLLTSVPGVGPITALTLIAELPELGRLDRRQIAALVGLAPFNRDSGTFRGRRMIRGGRASIRRVLYMATVTATRHNPVIAGFYHRLRTTGHPGKVALTAAMRKLLTILNAILRDHRPWQPA

SEQ ID NO: 331429 - protein, 379 aa, unidentified
MSTGEGFRQCVGIDISKEKFTACLYMYDRLSDEGCCTGSVEFANTRQGFNQMVKWSRKEALKGRALTYLMEPTGVYYEPLAYHLDKIGQTLYVVLPNKARKFCEAEGIKTKTDAMDARCLALMGCASRKLRPWSPPKAIYRELRQLTRFRADLCKLRTSVTNRQESLLHMEGASKNVQKGCEELVSEIDKLMEKNEKDITAKLAEDKELEARINRIATAKGVGATTITCVVAETQGFHLIENRKQLTSYAGLDVKAKQSGKEDPKHTISKKGNANIRAVLYMPAMSAARCNRQAKAAYDRICQKHPKEKMIGITAVMRRLLLLIYTLWKNGEEYDETRDVTSTPRKKEHTPDHTQEDCIPNTNEPVDWNATGENGQPPF

SEQ ID NO: 331430 - protein, 340 aa, unidentified
MRVIIGIDPHKASHTAVAIGCDEQQLAEIRVRATCQQTAKLLAWAQPLGERTWAVESAGGLGYLLSQQLVEAGEHVLDVPATLASRVRVLGTGRSNKNDPNDALAVAIAALRSPGLRSVEPANHTEVLRLLAKRNHDIGRLRNIVVSRLHAALANLSPGGIAKELNASDAVRLLGDFNPKTAVEQTRYDLALELLDDVRRLDVQLKESHKRIKTAVQASGTTLTELYGVGPILACELIGYTGDVRRFTTRDKFASYAGVAPIELSSGGRIVHRLSRRGNRQLNHAIHMVAICQIRQTNSEGRAYFERKVAEGKTKREAIRSLKRHVANAVYRQLLVDANK

SEQ ID NO: 331431 - protein, 337 aa, unidentified
MEYFAGLDVSMAETQICVMARNGSVIHKAKVPSTPADIAAELAQLPTCRRIVFETGRMAPMLYHGLRQLGLPVICVESRQAYQALKLLATHKTDHNDARGLAHLARTGFFKPVHVKSLPAHAVRSLIIARKKLVGQRVTLENQIRGLAVVFGVRLPRALSSTFIRQALQASEGIPGLSAAMQGLVAARTAVLAAIVAIDGDIRRMVRASDACRRLMSIPGVGQLTALAFTAAVDDPKRFRRSRDIGAYLGLVPRRHQSGEIDYTGSISKCGDRRVRTLLYEAANVMLTRYKGALKLKDWAFAIAKRSSMRKARIALARRLAIIMHAMLRNGTEFKAA

SEQ ID NO: 331432 - protein, 420 aa, unidentified
MTVDLERGYTSKEPCGLKQYLNLLRRSIFMIYVGIDVAKDKHDCFVTSSDGKVLFPVFTIQNNREGFDDLFSKIQSVSSEVSNIKVGLEATGHYSYNLLGYLIDKGLTTYVINPLHTNLYRKSLSLRKTKTDKVDARTIAMMLMSDVNLKSYSDTSYHNEALKSLTRYRFDKVQERARLKQSVSRLVTILFPELEKLVPSLHSASVYALLSELPSAEKIASCHLTHLTKLLENASKSRYRREKAIEIRDAARISIGSNMPAKSLELRHTLRLIGELDSEITEIESEIKQIMDQISSPILTIPGISYRMGAMILAEIGDFSRFDSPDKILAYAGASPSTYQSGQLKSSYSHMEKRGSRYLRFALINAAKYVCHWDETFGAYLQKKISEGKHYNVAITHAAKKLVRLIYAMEKSGMPYIKTA

SEQ ID NO: 331433 - protein, 414 aa, unidentified
MEVLYPRCCGLDVHKSSIAACALLREQGRIRTERRRFTTMTQDLESLAAWLRQLQVTHVAIESTGVYWKPVWNVLEGHFTIVLANAQHVKNVPGRKTDAKDSEWIAELLQHGLLRSSYVPPEIIRDLRDLTRGRATLSQEASRLASRIQKVLEDANIKLSSVASNTLGKSGRAMLDALVAGQINPEQLADLALGHLRAKIPQLRLALEGKIREHHRFLLKRLLHQLRFIESEIDLLDQRLEELGQQDPALAAAVARWTTVPGVDRVAAWSLAAEIGIAMEQFPTAAHLASWAGLCPGNCESAGKRLSGKTRKGSPWLGRMTCQCAWAGARTKNTYLSAQFRRLAAKRGRKRAIIAVAHSILAIAYYLQKKQCDYRDLGSDYFDRLNADGLKRYLIRRLEALGHKVTIEAAGNAA

SEQ ID NO: 331434 - protein, 357 aa, unidentified
MLADVIDAVVGVDTHRDTHQVEIALPSGTPIATCSIDNDSAGFAELLAWVIDHAPGPRLVVSIEGTRSYGVGLARAAAVAGLLVVECEQPHRKARRGRGKSDPIDAHLAVLTALRLDADRLPTPRADGDREALRILLGARRDLSTTNTAQTNRLRALLLGGDDTDRQLARAALTDTVLAALIRRRSPRDADRAQAVRHGEVRRLAVAVREGGRALKTNRAELAVLVEELAPGLIERCGIGPVSAAQVIVSFSHPGRCRGDAAFAALAGTNPLPASSGRTVRHRLNRGGDRALNRAVHTIATTRMRCCARTRAYVARRTAEGKSPREIRRCLKRYITRELYRTLTTTLTPAPTGQAHG

SEQ ID NO: 331435 - protein, 371 aa, unidentified
MKDNSIFVGMDVHKNSIDIAIAEKGRAGQLRHFGTIEGSLTALDKVVRKLVSNGQRPCFVYEAGPCGYQIYRHLSAKGFDCAVVAPSLVPRQSGNRIKNDRRDCLMLARLHRAGELTTVCVPHDEDEALRDLSRAREDAKIDEKRAKQRLLAFLLRSGQRYSGRAPWSQAHRRWLADIKMPHHCQQIVLQEYIETLTHCSQRLQRLTDQIRQLVPQWRLFPVVQALQSLRGVSLIVAATTVAEIGDFKRFQNPQQLMSYLGLVPSEHSSGDKTRRGSITKTGNTHVRRMLVEAAWAYRFRARISRALLQRQEGLPQSIRDIAWSAQVRLCARYRRLWARGKIKAVVTTAIARELCGFIWAIATAVDGPTAS

SEQ ID NO: 331436 - protein, 356 aa, unidentified
MKYYTSTTQFNCGIDLHARQMYVCVMDRQGKKLVHTNVKNNDFDYFLKLVGPYRHDLTVCCECMFGWYWLADACEAAGLTFVLAHALYVRAIHGGKNKNDRIDSEKLTHLLRSNLIPPAYVYPAQKRPLRALLRQRIFYVWRRAELLARISSHQLAYNRTPARQGSRRNRAPWEEQLLAAEDHPLRQIALKNDLAMIRHYDLQLRDLEEELQRLTKKSAGRQYTLLKSVPGIGENLGLTILHEIGEIERFPTVKDFLSYCRLVKGTVASAGKIKGLRGAKLGNPYLRWAFGEAAVIAKRDHDIIGPLAQRLEARMNGNKFKANTVVAIKLARAVYFMLKNKTVFDPERLVSALAKK

SEQ ID NO: 331437 - protein, 414 aa, unidentified
MEVLYSHCCGLDVHKSSVTACALLCERGRVRKERRRFTTMTADLRNLAEWLTQLQVTHVAIESTGVYWKPVWNVLEGRFAIVLANAQHVKNVPGRKTDAKDSEWIGELLQHGLLRSSFVPPVIIRDLRDLTRARASLSQEATRISSRIQKVLEDANIKLSSVASNTLGKSGRAMLDAIVSGQVDPEQLADLALGHLRKKIPELQLALTGSVREHHRFLLQRLLGQLRFVENEIELLDQHLEQIGEREPTLAAAVARWTSIPGVDRVAAWSLAAEIGVDMEQFPTSAHVASWAGLCPGNCESAGKRLSGKTRKGSPWLGRMSCQCAWAAARTKHTYLSMQFRRLAARRGNKRAILAVAHSILVIAYSLQKNHCDYCDLGSDYFDRLNADGLKRYLVRRLEALGHKVTIEPQGEVA

SEQ ID NO: 331438 - protein, 309 aa, unidentified
MNPQCYGVDVSKETLDIAGDGQVVRIANTRGAIRCYVRRLPAGSLVGMEATNTYHLTLADHCHEAGLRVYVVNPRVTRHYREILAMHGHNDQMDARALASFVQRHHPELRPYTPKPVATRRLATLLRRRSKLVGVKVQLQQSLQQIPEIRTQVQAALTRIEAIIATIERLIEQHLQGNADRARLERITGIGPIVSAALICDLQSGPFRSADAFVAFYGLDPQPNDSGRLKGRRRISKRGQRLGRTLLYNAAMTTVRTAVWKPLYQRLLSRGLSKIQAIVAIARRLARTAWSIYTHKTEFDPARLCRPLT

SEQ ID NO: 331439 - protein, 346 aa, unidentified
MLYAGLDLSRQRLDVHVLDEEGRTVDVLAVHPDADALRTLASRVLRHGQEVSAVIESMTGSRFVHDQLELAGWEVAIADPVKAKGLAPLAAKTDKIDAHVLAELARRDLVPEIWLPDPTIRAERERARFRLHLVHHRTALKNRIHATLMTFGHSVPVSDLFGTQGREILGRLAIPEPWAGTLATSMRMIDDLNVEIAAAEADLRSLGPDHPYIRLLLTVPGVGQLLAYTIASEIGDIARFASPKKLTGYTGLCPIVRQSGNRDVRGPLAKNGPKYLRWALIEAATHAARDVRYRDRYERTKHRLGRQRGAKVARVDIARQLAEAIWHVLTKNEPFAPAGPAMTLVA

SEQ ID NO: 331440 - protein, 401 aa, unidentified
MPYRIAGIDVHKRMLAVVVADVGVETEYVFERRIVGTTPDQLRTLAAWLSERDVEEVVMESTAQYWRPVWEVLERQWQPSRRARAEAGPMSGALHLAQAQSNQGPRGRKKDFPDAERLVKRLVAHELILSFVPEMTQRLWRTVTRRKDQLTGNRVQLQNRLESLLEEAHIKVSSLVSDRLGASARRMLRAIASGDTDPATVAALGSPRLHATPAQLCDALGACHDLQPVYRRLLRMTLEELDVIEAHIRELDEELARLLRPHQAAVQRLAAVPGLGVDSAQQMIAEVGPTAATFATAKRLASWVGSCPGDQESAGVNHSHRSPKGNRQMRRLLNQAANAAVKTKGSSCIAGSSCVSDMRRPSAPSPIACVASSGRFSMTASPTRNVGRPSPKREPSDARRR

SEQ ID NO: 331441 - protein, 411 aa, unidentified
MNPVVGLDVSKGESQVQAFLDKGKPYRKSFKVSHTVEGLNSLVAFLEDVKRGSGKKPSVILEATGHYQTPVVHYLEERGYLLIIINPLISYKARGSSLRKVKTDAIDAYLLCELFYKEELEPYKKRGVQLLNLRNLTRQHENITGVMIQTKLQFQAVLEQVFPEYKGVFGDLYSVVSLLTLSEFPSSEDILKASEEAITDKIFELCKSRSIKWANEKAIQLKAAAARNPFEKTVYQSHILSLGMYINILLQYKEHLSKLETEIDALAKEIEEYTIIKSIPGIGEKIAATIISEVGEIDRFNHPKKLVAFAGVDPSVFESGKFTATKNRITKRRSSRLRHALYMAVRCAIRDCRKKKTTDEIIPRNKKMREFYDKKREEGKPFKVAIIACVNKLLHWIYALLKNKTTFQDIA

SEQ ID NO: 331442 - protein, 340 aa, unidentified
MPKYIRIGVDIAKNCFQVHALESEDCSATKRKLSRSGIVKFLAEVEPCAIGMEACGSAHYWARRFRAMGHEVKLTPPIYVKPYVKRGKNDAADAAAICEAMSRPNMRFVAVKSEDQQATLMAHKTRKLLIKQRTMSVNALRGHLAEFGVIAAKGISHVEELVERAAAADLPAMVQATLGVLLAQLRSLDAATDELERAIVANHRRDPVSRLAASVPGVGALAASAILASAPDPQAFKSGRDFAAWLGATPKQNSTGGKEKFGSITKQGNRYIRRLLVLGAISVLRAAPKRKGALCDWLAALRARKPAKVVAVALANKLARIVWAIITTGEAFRTSIYAKA

SEQ ID NO: 331443 - protein, 482 aa, unidentified
MKKRTIYTNQSQELLRLFEQVGNSAKVMCVPIDYAKKDHVVMFCNGYGDIVRKPFSVKNSAEGLKYLIDQVTRSCRHRRIRKEHVFFGGEDANSYAENFANALRSKGWLVAHVNAHDAKKQRQNLQASTDRLDLMGIATMLLNRRANCSPAQTGIYRNLRTLVRHRKKLVVMKTEVRNRVHAVVDRLFPGFLSEKKTSITPFSNSSLYLMENSFSAQQIRRRKHSTLVNILKRYGTAAPEGAAAKLRTYAAQVLTTQNQYAATLQLSLAHHIKLYRCLLDNTEQLEKEIALPLAQSQGAFLTSIKGIGIVLAAGVTAEIGSPFAQKPLNNLTSYSGIIPRVKQSGGPNAQAHTGRVSKRSNHLLKDSVVQSAFHIGHFGPKELSLDYKRRKAAGQHADFGMGRRFLRMAMSLMKTSQIYLPPPLRNEQLRAQERAGYYLAVWPQLRNKWNKVDALKVAFAKHNPLGQWRHIVQELYGIKLKL

SEQ ID NO: 331444 - protein, 309 aa, unidentified
MEQVFIGIDVAKGRLDVHPRPGHAFTVTRDGEGIASLVERVKALSPVLIVLEATGGFETVVAGALAGAQLPLAVVNPRQVRDFARAIGRLAKTDALDAEVIALFAERVRPEPRPLPDEDARYLSELVARRRQIVEMMTMERNRRRTLTGKRLLKSIDRLLVALQKELSDLEADLDDTIRGTPAWREAEDLLTSVPGVGDKLARTLIADLPELGRLSRRQIAALVGVAPINRDSGTMRGRRTTWAGRAKVRTTLYMAALVASRYNKTLKSFYQRLLQAGKAKKLALTAVMRKLLTILNAMIRDQTPWQNA

SEQ ID NO: 331445 - protein, 371 aa, unidentified
MIVLGADTHKRSHTIAAVAAGTGELLASQTIQVGRRGFDVLLQWARGLGEERVWALEDCRHVSASLERLLIERGERVLRIPTHLTAKERKRSRERGKSDAIDALNVARAALQEGLGGFPMARLEGPELDLRLLVDHRERLVRHRVELNSTLLWHLHDLWPELQLPGGALFSKKWSTRIGGRLARAEQTMRVRIARDMLRRLRELTATINQLERDITILVEQIAPQLLTEPGFGPLIAAKLVGEIAGAERFATPAKLARVAGVAPIPASSGNTQRHRLDQGGNRQINAALHRVIVTRARCHQPTRDYLERRRREGKSTREAIRCLKTYLARHVWRLLQPPHPDQRELPLSILDIEATGGALVRLGRGALLYA

SEQ ID NO: 331446 - protein, 332 aa, unidentified
MDTETGEFQEQRLAHREAEKFYRDLAAGSGKLRVGMEASGHARWFERLLAELKVELWIGDAAEIRAKRVRKKKTDREDARHILQLLAEDRFPRIWVPSWANRDVRQLLWHRHRMVQMRTRIMNQLQAVALNEGLRCKKSLWRENGRKQLEAFPLAPWASRRRHDLLELLDRLNPTIAELALKIEQEVDKYPMAQRLSTHPGVGALTALAFVLVIGEAEWFRCGKQIASYIGLVPAEDSSGEHRRLGHISKQGSALLRFLLVEAAQVTVRSDPEWRSKFFHLAMRRGRKIAKVAMARRLAVRLYWMWRQRWDYQQLLKFGPHAGQPETGNGVQ

SEQ ID NO: 331447 - protein, 421 aa, unidentified
MRGLGGKRVKAVKEGTLIATVDIGLATNTGYCTTFDGRDTKPFRFDNTKEGFEKFWCMTMASKHRFGCDEVLVGYESTGPYAEPLVHYLANKQVKIAQVNPLHTKRMKEVNDNSPLKTDDKDPRVIADIIRLGHALTIIVPEGDAAYLRRLNNARERHVGERTALLNRLQQLVFLIFPEFKIVLKNMKSKTAQYILKKYTIPERIAAVSKEVLGEEMRKRSMGKFGIQEAESLIGLARETVGIKEGLDGIFMDIKHILIQLEAEGRFISEIEAEMGATLERIPFSGRLLSIKGLGTVSVAGLIGEVGDFSKFSTQSEIMKLAGLDLYEISSGKRKGQRRISKRGRGLLRKILFYAAIQRIRKNGILYDYYTRLTGRGMERMRALIAASRKLLRIVHAIVRDNSDYVRQYQAPERMMIRIAA

SEQ ID NO: 331448 - protein, 340 aa, unidentified
MRKLYAGCDLHGNSNFWGIRDETGEKVFHKKLPNDLALMLAMLEPLREELVGIVVESTYNWYWMADGLMEKGYQVHLANPSAIQQYEGLKHADDKHDAFWLAEMLRLGILPEGYIYPKQERPVRDLLRKRGHLIRLRTSMVISLENIICRNLGRKVSANDVKRLGEDRVTPYLEGQEDLALAGQVSKNTVDFLSEQIQEIEKAVLKRVRLKKSYRLLLTIPGVGKILALVIMLETGPISRFATVGDYGSYCRKVPSQWTSNEKKKGSGNRKSGNRYLAWAYAEASEFARRYYPEPRAYYQRKIQKTNAAVAHSALAHKLARAAYYIMRDQVPFRMEKLFG

SEQ ID NO: 331449 - protein, 312 aa, unidentified
MANLVYAGIDVGKDKLFVNIHLDSQVRDFSNTHSGLERLSRFLIKNAVNLVVMEASGGYERLPASDLRARGLSVAVVNPTYVRRFAQGMGTLAKTDTIDARLIAHFASVKQPKPQQAKTVEEEELAALVERREQLVSLLSVEKNRLSKASDYSKASLQISIQFLTGQIASIETEIKALVAKSPERLARLRCMCSFIGVGDITAVTLLTEMPELGMESGKHIAALAGVAPINRESGKMKGKRRTYGGRARVRRTLYLAALSASRHNPIIRAFYERLLAAGKEKKVALVACMHKMLTILNAMLKKGELFNPEYS

SEQ ID NO: 331450 - protein, 319 aa, unidentified
MLVGIDVAKAELVVATRPGGERWTVTNDERGVHTLVERLRRDGAELIVLEATGGYELGCVAALAAASLPVVVVNPRQVRDFAKATGQLAKTDRIDADILALFAERVRPEVRALPDAEAQELEALLARRRQLLEMLQAERNRLGQVFGRGKAPVKKSLKAHIAFLERELRMTDADLGDQVRQSPAWRERDDLLRSVPGVGPVLSLTLLAHLPELGRLSRRAIAKLVGVAPLSRDSGTLRGRRFVQGGRASVRGVLYMGALVATKRNAVIRAFYTRLLAVGKPKKLALVACMRKLLTILNTMIRTGQRWCAELAHHSLVHA

SEQ ID NO: 331451 - protein, 346 aa, unidentified
MFNLTEKGKSVNNVTTVGIDLAKNVFSLHGVDGQGREVLRRTVRRGQLMALVAQLPACLIGLEACSGAHEWARQFAAFGHTVRLMAPKFVAPYRRGGKNDGNDAEAICEAVSRPSMRFVPVKSAEQQAVLSLHRVRQGFVEERTATLNRIRGLLAEFGHVLPQKAVEVRRRLPPLLEKLPALAARALGDLQAHVRILDERITEYERELARLAKADARAQRVQELYGVGPLTASAILASVGSAHEFDNGRQFAAWLGLVPRQFSTGGKTRLGHITRRGDPYLRTLLILGARAVLQAASRRQDRLSRWALSVRERRGYHRACVAIAAKNARIAWALLAKDEPLRTVMA

SEQ ID NO: 331452 - protein, 434 aa, unidentified
MEEVTDEPLYRDRVCGIDIGKAGMAATIRVPSEENPARRASETREFATTRRGVLALADWLRCWQVPAVVMEATSDYWKGPFYRLEAEGLECVLADPKQVKHLPGRPKRDTCDSAWLAACFERGAVRPCFVATPEFRVIRLHTRYRRDLTGERTREKNRAEKLLESAAIKISSVVTDLHGVTGRDIMDHLIAGERNPKVLAQFARTRARRKITELEHALEGAEFFTPEHAALLKAMLERIDGLDAQIARLSQVIERLLAPHEEQLAQAESMPGWGRRSAQDALAETGTDMSRFPTPAHLASWAGRTPLDAQSGKRAGRAQHKKGNKYLGAITGETAVSAGRTQTREGARYRKIARRRGKAKACVAVGNTQLRVYHKLLSNPGMRHEDLGPDYYERRAQTRRKIAYHVRELEELGLEVTLCRPSPAQDDPEPTQAA

SEQ ID NO: 331453 - protein, 345 aa, unidentified
MKKIAIGIDFAKEKFDVTVKNVETGASGYGQYPNTPAGGRSMVRMVRKFAKGIDSSEWLFCGEDTGYYSQTIARYLTEKGYFMWLQNPYSIKHSEGDIRRGKDDRADSAAIADYAHRYEDKARKWELPSKVSEELHLLLTRRDAYVRAKRVIQSGASEIPKRDKQGESVSLIKSSAKRLLREIDEEIERLEAQMEKIVKEEEAMQKNYEILRSFTGIGLVNSMCFIAYTDNFKKFDLNARKIATFWGVAPFGKDSGKTVHVDPHVSQFCNHWLKAIISNAANSALKWNPIIIAYNERPEKRGKCEGIRRNNIKNKIIQTVVAMIRKGEKFNPEFKFTNEMVSAER

SEQ ID NO: 331454 - protein, 342 aa, unidentified
MKFYCGIDLSARDCQVCVIDEQLKVLVQQKLRNDLPQVCRLLRPYQANLQIVVESTFNWYWLIDGLQAEGFAVVLAHTLGLYLITSAKVKTDRRDAYALAKLLRVGAIPAAYIYPAETRPVRDLLRRRLHLVQVRAGEYGSLRRLLLRQGLLSHKQQEIKTATEAELEQWFEHPLVRLHARQELQRIELYSQQIAALEETILALAQTEPSYELLRQLPGVGQTIALTILYEVGELSRFANAKAFSSYCRVIPGIAQSGQVTRRGRGSKQGNHYLKAAFSQAAVAAVRCYPNVRRYHERQLKRHQGPGRKLVCYNIIAHKLAQAAFHVLKEQTEYRAELLFGR

SEQ ID NO: 331455 - protein, 327 aa, unidentified
MVMETKKLCCGIDVSHTKLDVCYQNNLGELFHLQVGNNIKGFAKIMEHTGVNYHFVMEATGVYYIRLAFYLHQQGCCLSVVNAISIKRFIQMHLERNKSDKKDAHWICRYAIEQHPPYWQMPDSAYFESKQLYNTIREYTEQIKRFNNQLHSLRLLPVPSKDTIRSLEKIIVCMEKEIKLLEQKLQLLLEQWQPEQLKNVSSIKGIGKRAAAMLIVFTQGFKHTENHRQLISFAGLAPTQYSSGTSIQGKPRIYKRGGKNLRDVLYMCSMNAMKTNVACKTLYERLRANGKTGKQALIAVCNKLLKQVFAVVKNNTLYQPNYCSAKP

SEQ ID NO: 331456 - protein, 453 aa, unidentified
MSNGSSRRLSRGDRRRNEKLAWLREVITRDSAVLAFDLAADKQVCALTDPDSRVLARRTVRVKAWQLADAVAWGLARAGEAGFSSVVVACEPTGHRWRVLDQICLAHGVALVCVQPLLVCRAREAEDFTRNKNDDVDAVIIARLVTELRCYLPERADPIWARLRHLGARRTALTVQVGAARQQVRDLLECAWPAVLDAAGKPMDSASWLAAVTVALDRIGTGGDLGVLARAGWDEFAAAVRAELGATRWYSAIVRAVFDAATDPALSHVGVAGQRAGVCERVAFALADLAARREEITQVEARMLGVLDQLDLTELVSSIPGVSTIGAAAILAEAGDPTRFSSARALVKHAGLCPRENSSGTYQGTTTISGRGRPELRLAAWRAVFTALQHNPVLAARHRHLTTRAQNPLTDTQARVAVAAAVLRQLHAVVVTRTAWDPAIAAGLDRNQEVAAA

SEQ ID NO: 331457 - protein, 408 aa, unidentified
MQVLYTRCAGLDVHKDTIVACVRCVSPPMHQEVRSFGTTTTQLLELADWLGEHGCTHVAMEATGVYWKPVWHVLEDEFELVLANAAHIRNVPGRKTDVNDAMWIADLLAHGLIRSSFVPPHAIQQLRDLTRTRKQLVREVSQHSLRIQKVLEDANLKLGSVLSDVLGKSGRAMLDAIVAGETDPARLAALAQGTARNKTAELREALRGRITEHHRTMLRLHLQVIDALHRTLGELDTAVGKALAPIQQRTRLLTTMPGVSDLTASVIVAEIGVDMSRFPSAGHLISWAGLCPRSDESAGKRRSTRVRKSGTWIKTTLITAAWAAVRVKTSYLRAQFLRIKARRGAKKAILAVAASMLTAAFHMLRDGTEYNDLGSEHLDRQDRSKTIRRLLKRLQDLGCEVPQMAHET

SEQ ID NO: 331458 - protein, 343 aa, unidentified
MERKKVYIGMDDHRLSVQVCVLDEDGRVLVNRSCHNNLPEIAAAVPEGAVVAAALIESCCGAFDLTDALRTELGWPVTEAHPGIVKRMRHNPDKSDYTDAQMLAELSRVGFVPPVWLAPPWVRELRLLVRLRADLAKHKRAVKTRILAVLRGQRIAEPDEFNRWTKRWLAWIISPGVCSDAGLFVIRSHLAKLDWLCTQIKEVEYKLGDQTAGDPVVERLLCEPGVGPVTAWTMRAIIGEFDRFASGKQLARFCAVTPRNASSGQRMADAGLVRAGDPLLKTVVIEAAQRLRRYEPRWSSFSDQLAERGKPTSVIVAAIANRWVRWLYHQIKELPEQEHPMAA

SEQ ID NO: 331459 - protein, 308 aa, unidentified
MATSSYVGIDVSKARLDVAELGEREWQMDNTPDGIAQLVQQMAEMQPELIVVEATGGYQRSVVDALFHAGLCVAVVNPARVRQFARASGLLAKTDKLDAQLLAVFGQRMQPKRYEGKSETEKQLSALLVRRKQLEEMLKAEQNRLRTIVPSLRGSVERMIAILKDEKKRLEEQIEQFLKEQKGWQEQREILSSAPGVGKVTSATLLADLPELGKMDRKKIAALVGVAPMNYDSGKRRGYRKTKGGRTDVRSVLYMSTLVATRYNPVIQAQYEQLLKRGKVKKVALTACMRKFLTILNAMVRDQQPFRD

SEQ ID NO: 331460 - protein, 350 aa, unidentified
MTHCSWVGIDLHRSRSHVAVLDDEGTQLLSRRVANDPAIFLELLAEIDGESKIALEATYGWEWLADVLHDAGYELHLAHPLRTKAIASARVKTDAVDARTLAHLLRADLLPEAYVAPRELRELRDLLRHRVALTRMRSALKNRAGAILAKHGVQRPFSDMFGPGGLRFLDALELREAPRRRLDSTLALIADFTREIDATSGEIDARARQDAYVEVLCQIRGVGHYIAMLVIAEVGDITRFQTARQLCSWAGMTPTVHSSDQRTRLGHISHQGSPALRWALVEAAQHAARGGGPLREAFERIAKRRGRQVAKVAVARKILTLCFYGLRDGEIRCLAPRAGARTFRTTAVTA

SEQ ID NO: 331461 - protein, 375 aa, unidentified
MREKVRFLGLDVHAETIAVAIAEPDGEVRSLGTIANRAESIRKLVKKLGPVSQLRACYEAGPTGYVLYWQLAALGVKCEVIAPTLVPVKAGDRVKTDRRDAEKLARSYRSDDLTAVWVPDESSEALRDLVRAREAAKQDQLRARHRLSKFLLRSGQRPAPGVKAWTQIYMAWIRQIRFGQMAQESTRLDYLHEVEHMGERVARLEQAIAEAAKLAPPELQEVIKGLQALRGIAHISAVTIAAELGEFSRFFGARQLMGYSGIVPSEESSGERTQRGSITKTGNAHLRRIAVEAAWSYRLRPCVGPALRKRQEGVAEEIKEIAWKAQHRLHKRYCKLTGTRKDQRKIITALGRELLGFIWAIGIKAETAARQRIAA

SEQ ID NO: 331462 - protein, 451 aa, unidentified
MTETKKARRKRDISPTHPNAAAIDIGATLHVAAVGPDQDPEPVRSFGTFTGDLHRLAAWFEQCGVRTVAMESTGVYWIPVFEILDQRGFEVILVNARDAKHVPGRKTDISDAQWLQRLHEYGLLRASFRLKGEVAVLKGYLRQRERLLDYAGSHIQHMQNALTQMNLQLHHVVTDITGTTGMAIIRAIVAGERNPAVLAAHRDRRCHASTETIRQALVGNDREEHVFALTQALELYDVYQAKVALCDMRIEAVLKRLRKASSSPAGKPPPVRTPKKQSDDLAFDVRAALHGLLGCDVTQIHGLGPYLALKLVGECGTNLSAWPNAKHFTSWLCLSPSNKISGGKVLSSRTRRSGSRAAALLRLAAVAVGRTETALGAFYRRLSARVGKAKAVTATARKIAVLFYNTLRHGMEYSDPGASHYEERYRRRVLTNLERRAKSLGYVLQEAPAPA

SEQ ID NO: 331463 - protein, 415 aa, unidentified
MKQVYRRCCGMDVHQQTVVLCVLPPDGTEGEPIHKVYGTFRNELIRMRVWLKQLRVSEIAMESTGVYWRPIWNVLEEQGFERLLLVNPVQVKALRGRKSDGRDCQRIAEFLQDRRLDPSFVPPREIRQLRQLLRHRLALIQQRTKIHNQIRDLFETASIKLSSVVSDLMGLTGRRIIEALIGGQDSPELLSWKAQGRLRKKEKQLKESLKGCFDAFHRMMLEALYGQYQFLTAQISAFEQRIAEYMQPYSAQIELLLGIPGVDQIVAWSLIAELGADMSVFPTAGHCASWAGLVPGQDESAGKQRSTRCKKGNKFLRRILTQSAWAASRTKGSYFQALFRRLRGRRGYSRAIVAVAHKLLVTGFTILQTGQPYQDLGGEYFDQKNPARTTRKLSQRLEKLGWHVTLAPRSIDLTS

SEQ ID NO: 331464 - protein, 396 aa, unidentified
MKHSELIRHRAFRQLRMEIRGSREHLIVGLDIGKDRHHAFFGSATGKTLLKRLLFDNTPEGFQKLLLQTEVLRVQHGFLQVVFGLEPTANYHKPLGEHLIRRGHQVVLVSGVAVKRNRELLDGRWDKHDTKDAANVADLISQGKCLFYEHPDAKLRDLRTLLALKRRLKKQEQSWRVRIRNGLVAQYFPELDRSFRRLIAPGKERDWLSTIGQRTSSMGCEVHPAVVFEAQVMVEELRRVRGALKGIQEKIQQLCSQCSEYPYLLSIPGFGPEVSAQVLAAIGDPFRFQNGKQVLKLAGLDLSADRSGKRADLAIPVISKKGKADLRYALYQAALIASVRNLAFRAYCTPNLQGRKERGIGTKLRVKWAAKLLLIAWTLMKKKEAFDPQRLILSPI

SEQ ID NO: 331465 - protein, 402 aa, unidentified
MAYYFVIGVDVGKYFHHACVLDPQGRQVLSKRINQHEGSLRKLFGQFLADDASVLVIVDQPNNIGRLTVAVAQDMGADVRYLPGLAMRQLSRIHVGNSKTDVRDAYVIAHAGLNLPDSLRSVDRVEKVFIQLKVLNGIDEDLARAYTRLINQMRSALVGTYPAFEHVLRGQMIHRKWILNLLAKYGGPTKIRRIGRTRLAAFARSHKARNPEPVIDAMLAAIHGQTVSIAGAEYAELGVAMSAKDALAKLEHRKEIEAQVLKLIQDIPQTEILLSMPGIGPRSAAQILMTVGDMSDFPDAAHLASYAGLSPRTNQSGTSIMSNSPNRAGNKKLKNALWQSSFASIRFHERSRQFYERKRKEGKRHNAAVVALARRRLNVLFAMMRSGELYRDIPTVQKAAAA

SEQ ID NO: 331466 - protein, 338 aa, unidentified
MYEHYLGVDLHKRRTYLVLMDAHGQVKDQRRLANEAVATYAAQLPSSTFAVLEATGNWSYMYDVLSRHVDQVVLAHPKQVRAIAAAKVKTDKIDATILAHLARADLLPTAYAPAVEVRELRETVRHRAKLVRERTRHKNQIHRLLSLYNLQPPCKDLFGKRGREFLRQVREQLSLIHQHLLDDHRLLIDMLDERIATMNQRISLWANQDPRAQLLMTLPGIGEYSAAVIVAEIGAIERFPDAKHLCSYTGLVPSVRNSDSKVHHGHITKEGSPWLRWIMVNAAQRAPAASPCLAVFFERIAQKHGRKTARIALARKMLSIVYAMLRRSEPFREMTLPG

SEQ ID NO: 331467 - protein, 345 aa, unidentified
MQTITTVGLDIAKSVFQVHGVDAQGKVIVRRQLKRRYVLAFFQKLPPCLIGIEACASSHYWSRELQALGHTVRLMPPAYVKPYLKRQKNDSADAEAICEAVTRTNMRFVPTKTVEQQSCLMLHRTRHLFIRQQTAVINAIRAHFAEFGIVAPVGRTGVEELLKIASDGNDKRLPDVARVCIAALGAQLQMLKARILEFDRLIMAWHRSNQVSKRLDEVPGVGPALATALVASVADPKAFRSGRDFSAWIGLVPKQHSSGGRERLGGISKQGDRYLRSLFVAGALAVIRYAKKRGSKNRPWLAALLARKPTKVAAIALANKIARMAWAMMAKGERYKQLAALAAVW

SEQ ID NO: 331468 - protein, 348 aa, unidentified
MTVYIGVDFHARQQTISYLTTEDGEIQRLQLDHGKPDEVRRFYRQFAGQRVVVGFESSGRAAWFEELLEELGCEIWIGHATAIRLFAGRRQKNDRRDADLILDLLVRGDFPRIHRYSAESRAVLQQLRYRQRLVKMRTMLLNSLVFMAASRGVVLRSQLKTKRGLERLQQISLPPALREQRDELSQLLLDLKPKIDKVERELAAKAESDIRVRRLRTQYGIGPLTGLCLAHTLECPERFANPRKVTAYVGFDPVEDSSGERRRIGSISKQGSRLLRFLLVEAGQIAVRRDQELARVYQRVLVRRGHAKAKVAIGRRLLVRAFIMLRDEIDYAEFQRRGVAARSSRGIA

SEQ ID NO: 331469 - protein, 360 aa, unidentified
MFTERTSVGLDVHARSIFAHAVDWQTGRHMSQRLVPTNDEVLAWLRRLPGPAAVAYEAGPTGFGLARALSAAGIRCVVVAPSKLERPPGDRVKTDKRDAARLARLLHIGELPAVRVPGEAEQAARDLVRAREDARADLMSARHRCSKLLLRHGIVYNGGSAWTAAHEQWLRGQRFDHAGLQVAFDEAFDAVVTTLARRDRLDTAIAGLAATGPWASVVTRLACVRGIATLTAFGLAVEIGDWQRFTGSSIGAYLGLVPAEDSSGDRRAQGPITKAGNSHARRLLVEAAWHHRRPLRAPTKPVRTHRAAVSPAVRARAQAADRRLHHRWITLDGRGKRATVSVVAVARELAGWCWSLALME

SEQ ID NO: 331470 - protein, 435 aa, unidentified
MDEVTDEPLYRDRVCGIDIGKAQMVATIRVPSDSNPARRASETRSFATTRRGVLALADWCRSWQVPAVVMEATGDYWKGPFYRLEAEGFECVLADPRQVRNLPGRPKRDPSDSRWLSACFERGAVRGCFVATPEFRVIRLHTRYRRDLIEERTREKNRAGKLLESAAIKVSSVVTDLHGVTGRDIMDHLIAGERNPKVLAQLARGRARRKLTELEHALEGAEFFTSYHAALLTAMLQRIDRVTAEIGSLTEVIESLLAPYEEQLAQAESMPGWARRPAQDAIAGTGVDMTRFPAGAHLVSWGSRAPLDHQSGARKGRAKTKKGNRYLAGVLGETAVAAGRTQTREGARYRRLARRTGKNKAQVAVGNTQLKVLHKLLSNPGMRHQDPGPDYYDRQRGLRRQIHHHVTKLESLGFEVTLARTPEPDPDPASHTQTA

SEQ ID NO: 331471 - protein, 426 aa, unidentified
MHLTQNDRIKQVTTDTMVVGVDIGEETHYCRAFDWMGVEFSAKAFKFSNTSGGFHTFLLWSRELMQRHGKSKILVGCEPTGCYWLTFQRYLKKQNIQLVVVNPYSVHKAKELDDNSPEKDDQKDPKTIAGLVREGRYSISYIPEGIYSEIREASRCRDRLMKDHVRLSNQIQEWLQKYFPEYLECYAKYDSASGITLLEEAPLPEDILRLGVTGIVQVWRDRKCRKVGLKKAKELLEAAQESVGIPGGEAARLDISILVTDYQTNLKQLERVEALLEEDVRKVPNVEKLLAIKGVGLNSVEGFLAEVGDIGRFTDPKQIQKLAGLEITKISSGKRKGQPGISKRGRAKLRCVMYELARAWRTWDPAVQEVYLYYRNRLQHPLNNMQTKIVIACKAIRVFYTILRTGCDYDQEKMRDDIRRSVCTAV

SEQ ID NO: 331472 - protein, 343 aa, unidentified
MPEVTTIGLDIAKHVFHAHGADARGGGVFSRKLSRAKLLDFFAAQPRCTVALEACGGAHHWARELMALGHEVRLIPPAYVKPFVKRHKNDAVDAEAICEAAQRPTMRFVAVKTEEQQASALVFRTRDLLVRQRTQLINAIRGHLTEYGWVAPKGPSHVAMLGDLLEEEMASSLPPAALAMFRVMLDLLAELDGRIVDLDREIARRAREDETARRLMTIPGIGPITATALIALAPAAETFAKGRDFAAWLGLAPLQRSTGGKQKLGAISKMGERTLRRLLIIGSSAVVHQASRRGALKGSWLEQMLARKPRMLVTVALANKMARIVWALLAKGGSYRTPAVTTA

SEQ ID NO: 331473 - protein, 362 aa, unidentified
MQKVTTWAGLDVHAGGIVIATLTGQSREPSMLEVPNAPKAIRRTFQRLAAESYELRCCYEAGPCGFELHRQLTALGIACEVVAPSLIPIRAGDRVKTDSRDAQKLARLYRAGELTTITVPGAEQEAVRDLVRARDDVRKDLVAARHRLDKFLMRHGRLYASGVKWTLRFWAWVSKLTFERECERLTFEHYVAEVQHLVGRRTGLDREIERIAKTKPYVGPVGRLLCLRGVSTLTALALVAEIGDFKRFATPRQLMAYLGLVPREHSSGGKEKRGGITKTGNSHARRLLIEAGWSYRHRPALGERVRAAMVGQPPKVTEIARKAQARLHRRYTRLVSRGKSSQVATTAVARELCAFTWALVTA

SEQ ID NO: 331474 - protein, 325 aa, unidentified
MYVVTDQADKVVFKKRMPNQLPVIVSALKPFKSKLVTVAVESTYNWYWLVDGLMDQGYPVVLANPAAIDQYDGIKDANDLTDAAFLAHLARLDILPTGYIYPKEERPVRDLLRRRTLLVQQRTATKLSLQNMFMRQAALNIDWRKIRKLTPAQRVDVLGDNEFLLFVTESQIELIEVFNKKILQFEKKVLEHAKLKPEFELLLSIPGVGLILALTIMLETGAIDRFKKVGDFTSYCRCVRAKRQSNGKSKGSNNSKNGNPHLAWAFVEVVHHAIRRSPQAKKFYDRKKSKRNGALATKALGAKWSKGAYYVMKRQEPFDLKRLFS

SEQ ID NO: 331475 - protein, 390 aa, unidentified
MRYFIGIDVAKFKHTACVIDTDGIALVEPFDFTNDIIGFQSLLKNIKPFLKKKHLVGMEDTGHYGDNLRNFLLEKQYKVVMLNPIVTSHIRKASNKAKNDRIDCFIIANTMMNPNFYRDQHAQSIDYATVRQLTRMHHTHTEEINRYKCQLQKSIDIVFPEFNSLLNTKYSKTYLEILDTYHSAYTIANTDIRLLRNTLKNDGLGRSVSISAEQLKKAAKESIGQHNLAIEMDIPFLISLIRRLTSILGEIDTKIEEFSHQLNSPILDISGISHFSAMSIISELGDITYFSNEKKLIKFAGVNPCVYESGTYSMTHTRLEKKGSKYLRKTLYQIIDSVIRFNPIFQAFYQKKISQGKSYRCAQGHCIRKLLRVIYKIISTGEGFDSAKLK

SEQ ID NO: 331476 - protein, 422 aa, unidentified
MSYCPVAGIDVSKQFSDMCILSPDNKIFAQEKIYHDETSINRANALLQKAERLFFSKPVIVMESTSHYHLILFQFFSEHGYDVIVVNPLQSNSMKDFSIRKRKTDRVDAFKLAMMYRTKTLRPSQIPQSATRALRQLCRHRAELLNDVSSYKNRLTALLDQTFPGYDKVFSDVGGVTSCAVLVRFPTPTILLVEEESELVEVIAAASKSGYSFAKKKAGLLISAAQKAQTLGVHSCADETLIVCTIQMLRTLSESVLQIETAIDNLLAQIKEMRNNVSLLQSIPGVGSHSAALLLGEIGDISLFKKPKQLAAYFGLDPTERQSGSFRGTKNKLSKRGSPYARAALHMGVVNSICKRGKDSAANPVLLSYYEKKCKNKPAKVAQAASMHKLVFIVFAVLRDQKPFKLKTPEQHAVEQGFVKAA

SEQ ID NO: 331477 - protein, 394 aa, unidentified
MILVGIDIGKNKHTFSIIDKNSGEILLSPSDFSNNLKGFLFLIQKLSSYTKSELLIGMEDTGHYHFALLKYLLDRRYTVALINPTTTDLTRKLQGGITKNDPLDSLTICDVISSNHRNKPYRVTTLNRFDLYEQKQLTRHHHNLKEELNTYKNRLQKCIDIVFPEFNSLFHSKYGIVYMNILKAFSSAKAIANADIRSIRKCFEFKGQGKRISLSAEQLKLTAKSSIGIPSVAEEIQIRHLVSQIELLEKQLSEIDKRIEEFSLKNNSPILSIPGISHFSGTSILAELGDIGNYSKPSQIIKFAGVAPYHYESSQYNAQHTGITKKGSKYLRKTLYQIILTVINNNPVFKKYYLLKISQGKGHRCAQGHCIRKLLRIIYHLLETGQSFDPALLR

SEQ ID NO: 331478 - protein, 337 aa, unidentified
MIIIGCDFHPSFQQIAILDTETGAIEDHKLVHASGEAERFYRGLASAALVGIEAVGNDQWFVQLLQKQGHEVWVGDAAQIRASYVRKQKTDRRDAKHILQLLMEGRFPRIWVPSAEMRDHRQLLVHRHKLVQIRTRVKNELQHLMLNQGMQKKQKLWSAEGRAALASLPLEPWADRRRHDLLNLLSMLDEQLQQLNDAVIQVARQYPEVGLLMSQPGVGAVTALAFVLTIGDVRRFPRGKQVASYLGLIPREYSSGGKQRMGGISKQGNRLLRFLLVEAANIAVRFDPVFRKEYLHRCHQKHFTVAKVAAARKLAIRMYWMLRTQTPYPDVLSSRVA

SEQ ID NO: 331479 - protein, 363 aa, unidentified
MIIIGADYHPGFQQIAFVDTETGDCGEQRLQHREETEKFYRDLAAQGMKVRVGMEASGHARWFERLLAELNIELWIGDAAEIRTKRVRKRKTDREDARLLLRLVQEDRFPQIWVASWENRDLRQLLWHRHRMVQARTRVMNQLQAVALNEGLRCKKKLWREHGREQLQSLRLAPWASRRREDLLKLLDQLNPTIAELTQAIEQEAENCPEARRLMTHPGVGALTALAFVLIIGRAERFQCGKQIASYLGLVPMEDSSGERRRLGHITKQGNALLRFLLVEAAQVTVRTIPQWRSKYFHLAMRRGRKIAKVAMARKLAVRLFWMMRQEWNYEQVQKFGSHVGQPENRHGVQENTELLTGASRSS

SEQ ID NO: 331480 - protein, 360 aa, unidentified
MVTMTAVGLDVHARSTQATSVDMVTGEVSRARLSGDADQVVAFLAGLPGPVRACYEAGPTGFGLARAARAAGIDLEVIAPSKTPRKRGDRIKSDRRDADHLVRQLIAGALTPIRVPSADEEAARDVLRDREQVRADLLRARHRLSKLLLRNGRIWPAGKSAWTGEHREWLDRQRFTDDLQLVANDLIAVVDGLTDRRARLNRALEQIAHRDAYWPRVSRLRAFRGVDTITALGIQLEIGDWTRFRRAKDVGAYLGLVPGLDQSGETATGLAITKTGSRYARWLLVEAAWHGMHPPRVGVVLRRRQDGVPEPIRQISWACQRRLHHISQRFNARRINSNKANVARARELACFLWAAAVWEP

SEQ ID NO: 331481 - protein, 345 aa, unidentified
MTNQPCFAALDVSLEKTTICVMSLDGTVLREAVVTTDPNAIATCLAVDQERLERIGLEAGPLSEWLVRGLADHSITAVLMETRQVRAALSAIIVKTDRKDARGMAHLLRMGWFRPVHVKTMDAREQRTMLSARSTLMARLKDIENSVRGLLRGFGLRLPLRLRGRWDAGVREAVAGHPSLLQILDPLLTARRVLREQLILLDKRVRDAARNDQVCRRLMTTPGVGAIVAMTFRAAIDQPERFRSSKKVGACFGLTPRKYQSGETDRDGAISRAGDASVRVALFEAAHVIMTRVASWSTLKAWAMNVARRRGAKRAKVALARKLGVVLHAMWIKETDFRFTRPTSV

SEQ ID NO: 331482 - protein, 322 aa, unidentified
MAMLSFGGIDVSKDRLDIMVLPDEQCSWVSNDAAGWAELVEQLRGSSITAIGVEASGGYERGVVRALLAAGMSVRQINPFKLRQFAKASGTLAKNDRLDARMIASFVAIMPTRPAQRQAPMIEQLAAMLTVRRQLSDHKVATENASRLLESAMLQRLSRRRIAGLTADIDLLDQRLVEIVTADPALAHRFRLLTSMPGVGAVLACTLIALLPELGQMSRKQVAALVGLAPYDFDSGKLKGRRCIWGGRARVRHVLYMAALSASNWNPGLKAFHDRLEATGKKPKVVIVAVMRKMITTLNAMLRDGTTWVDRYSGRRSASTAR

SEQ ID NO: 331483 - protein, 436 aa, unidentified
MGSRYAGVDWAADKHDVVVQDEAGEELFAGSFAHDEKGLRSLCRMLVRMNASLVAIERPDGLLVERLLDAGMRLLPLHPNQVAATRARFRAAGGKSDRFDAFVLCELARTDHHRFRVLEPDSEQTKALRAMTRAREDLVGARVALCNQLRSELERFWPGPIGLFKDLDSPISLAFLARYPSPRDARALGPKRMEAFLADQRYSGKKPAGELVAKLRSAPDGRAGEGEMTARRQVVLALVATLSPLVAQIRGLERQIATAVRAHPDGEIFLSLFKGSTITAAELLAEIGDCRSRYPTRDALAGDAGQAAVAIESGKRKTACFRWACNKRLRDAFTTLANTSRQWHPWAADHYAAAIARGHDHPRAIRTLGRAWSRVIWQCWQNRVPYDPAKHRALQQRLTVTIPTTSGPVIDHAATARMAAGLLATNPADSFEVSVA

SEQ ID NO: 331484 - protein, 340 aa, unidentified
MEQIIGIDLAKRVFQVNIVSAQGEKKANKMITREKLTAFIVQQPPSRIVMEACGSANYWSRQFRQYGHEVKQISPQYVAPFRMGSKNDKNDAAAIVEADSRPGMRYVPEKSIEQQDIQCLHRVRQRLMKNKTALINQIRGLGLEYGIAIPEGAHKIMAHLPEHLEDAENELTTLSRELFHEMLQELQDNQQRIKTLDLRLALISQQNEGTLRLKSIPGIGPLGASALTVALGDSADFQNGRHFASYLGLVPKEHSSGGKVRLLGITKRGDGYLRGLLIHGARSVVYRVINLPEERCGGLQRWLKGIIARSGVNKAVVALANKNARIAWALINQKTEYIVK

SEQ ID NO: 331485 - protein, 482 aa, unidentified
MNSTRLSNLAVVLGSGNEYSDEDESSLETITSGYKEFASVSGRANNHYPLLNMNKAASEQPLSPKVAAFVGIDWADQKHDVVLRLAGDPAKAEHQVIKSEINALNDWIAQIQERFGTKGKVLVCLEQSRGALIYQLMAYELFELYPINPSQLANYRKTFFSSGAKDDRPDADLLSELVMCHRDRLKAWKPDDQLTRELASLNEGRRNAVNRRTELANEIKSQLKLYFPVALQILENDITTALAADLLVQWQTLAELQKVSPGKLRKFFYGHNSRQEKKILERLALIKEAKPLTTDVAIIRPNALRVKLLAQQLKSLLPFIAEYERRIAELFGSHPDRFLFDNLPGAGPALAPRLLTAFGTDRDRFEVAGDLLNLSGIGPVRIASGKKTGKSASVHCRRACPKFLRQSFHEFGECSIRYCPWAQACYQAQRGRGKGHHAAVRAVTFKWIRILFACWKQRTPYDPQRYFQALQTRGSDYAQTTA

SEQ ID NO: 331486 - protein, 367 aa, unidentified
MKKISTVVAKRSKNFREQKLTIGLDLGDRSSWYCVLDEAGEVVLEQKLSTTPKAMKEVFGGMPRSRIALETGMHSPWVSRVLSELGHEVIVAHARNVRLIGESRKKDDRFDARTLARLARIDPQLLAPVQHRSAQAQAHLMVIRARAGLVRARTSLINTARGLTKSYGERLRGCSPRNMNAEKAQQLSPELQTALEPLLAAIESLSERIYEYHQQIEKIATESYPQAARLKQVKGVGTLIALTYILTLEDAQRFRKSRDVGCYVGLQPGRRNSGQSEPQLHISKEGDPYLRTLLVQGAHHILGPFGADSDLRRWGLKLAERGGNNGKKRAVIATARKLAVLLHRLWVSGEAYEPLRNSRPLRLPAAA

SEQ ID NO: 331487 - protein, 444 aa, unidentified
MTNSGMILISKGEDAPVIMGISKPAGLKSPHGEVKIVNPLFVGIDVSSKNNVAYLMKPDGSKHSNFSVQNNLGGAKLLSERIVSALRSMQLSDVVIGLEATSIYGDSLVYALREDGSLGRFQRKIHVLNPKQVRKFKEAYSDLPKNDWVDAFVIADHLRFGRINREVYMDDYRYKALQTLTRARFDVIQNLTREKQRFANYLFLKCSGMAQDKDIQNTSATTIALMEHFETVDDLANADLEELTAFITETGRGKFADPDATAKAVRAAAKGSYRLPKTVNDTVNQAMAVSIASMRALKGQVKVLDKAIEQQFEIIPNTLTSIPGIGKVYSAGIIAEIGDIHRFDSQASVAKYAGLVWNRSQSGDFEAEHSRMIKSGNRYLRYYLLEAANSVRRCDSEFRRYYDLKFKEVNKYQHKRALALTARKLVRLVFRLLKDNRLYIPPEG

SEQ ID NO: 331488 - protein, 337 aa, unidentified
MEYFAGLDVSMEETHICVVDRDGAVVHEGKAISSPVSIAAALMEAPRCTRVVFETGRMAPMLYHGLAELGVPVVCIESRQAYQALKTLATHKTDRNDARGLAQLARTGFYKAVHVKSLPAHTIRALIVARKKLVGQRVTLENQIRGLAVVFGVRLPRGLSPAFVDEVVRMSDGITGLAGAMRGLVAARDAVLGAVAAIDADMKRLVRASDTCRRLMTIPGVGQLTALAFTAAVDDPSRFRRSRDLGAYLGLVPRRYQSGEIDYVGSISKVGDQRMRTLLYEAANVMLTRYKGKLKLKDWALAIARRSTMRKARIALARRLAIIMHAMLRHGTEFRPA

SEQ ID NO: 331489 - protein, 388 aa, unidentified
MVNNSTLFVGLDLGDKFSQVFILDAEGEVFEESRVPATKAALQLKFASLPHSRIALEVGAHSRWVSHLLKDLAHEVLVADARKLRLIYHNPRKTDRVDAETLARLARLDPKLLSPVHHRAPEAQAHLAIIRARDALVRARTLLINHVRGTVKSTGTRLPAGSAASFHNRIPPAIPEPLRPALSPILDTIADLTHRIQAYDRQVQALCQQHYPETNLLRRPQGVGPVTALAYVLTLEDPRRFSKSRDVGPCLGLVPRRDQSGDRDPQLRITKTGDSYLRRLLVGSAQYILGPFGPDCDLRRWGLKLAGRGGKYAKKRAVVALARKLAILLHHLWLTGEIYDPFHSAPTCSPVPSIASPSAANQVSTMISPPQLRGRHSDTLIPGPFVTR

SEQ ID NO: 331490 - protein, 428 aa, unidentified
MDFEVKHLICAGLDVHKKTVVAAVCITDPVTLEATYKVKSFSTNNSQIAAMRDWLLSYNCLHVCMESTGKYWIPVFNILEPHMHVILTHPKYVKAIKGKKTDKRDAKWIANLFRFDIVKASFIPPADIRALRELSRYRLKLSYMRSAEKNRYQNSMTISRIRIDCVLTDPFGKTASSIMNYLLSDVPFDEKECAKLIHGGIKVSNEEIFDSIRGFEILSEQRFKMSHAKQHMELPSSYMDEIETELFRLSRPYDEVIKRISRIAGFTERSALFVISEIGADMGVFESDKHLCSWAGLTPANNESANKKKSTRCSKAGQYLKPLLIQCALAAVKSRKNPYYAIKYNRLAKRRGRKKAIIAIARMMLTSIYHMILNNEEWKPDDYEAIIHPSKPEKVALTLDNVIQFLGEQGADPETLKLLQQQCAVHSG

SEQ ID NO: 331491 - protein, 358 aa, unidentified
MSSKAFVPRNYDVFAGLDVDKRSISVTFTNHQGFIRSMRMPYSVEYLVNHVRKHFPDQKVAFAYEAGPTGYGLYDGLVANSYPCLIASPSMIPKAPGQRVKTNRIDSVGLAENLRGGQLKSIHVPSPVYRELRHLTQLRDTFVSEMVGMKQRIKSLLLLEGIAFPPAPAGSQWSFMVKAKLRKLPCSGTVRFKLDELLDSLEFNEKRVVKTTQQIRRFCQTDPELSRCIKYVMSVSGIGWIVASQLLARIGDWRELKNVRQLGGFLGLVPTEHSTGDRIERGSITHTGDGRLRSKLIQASWSAIRQDDELREFFGSVCQSHARHLASRVAIVAVARKLSVRISVVLMKQRAYVVREKV

SEQ ID NO: 331492 - protein, 343 aa, unidentified
MELHAIGIDLGKTVFHLVGLDSSGKVVVRKRCSRTQLLAYTANVRVQVIGMEACSGSHFLGRALRVQGHDVRLMPAQYVKPYIKTNKSDYIDAEAIAEAVQRPTMRFVPIQTEEHLDLQAVHRVRERWVMRRTAVVNQIRGLLLERGLTLPKGRSHVDHALPEILTDPALRLSGSLRVLLGQLQLELEQLTARIEQMDAVIQQTARENEACQRLTAIPGIGPVTATALVAAIGNGAGFRRGKDLAAWVGMVPREYSTGGKQKLLGISKRGNSYLRRLFVQGARVVMQYRTKQAPGLSVWLSQLMARTHQNVAAVALANTLLRMAWAVLCKNERYRVPLLATAP

SEQ ID NO: 331493 - protein, 352 aa, unidentified
MKIIGCDFHPSYQQFAMVDTETGELQEGRLEHEQGEARRFYQALAGQTVRVGIEAVGNSQWFEQMLAQMGHELWIGDAAEMRRLVVRKQKTDRRDAKHILNLLRDGRFPKLWVPSQQIRDVRQLLRHRQKLVEMRTQVKNQLQHLALNQGVRRKRRLWSVQGRAVLEQLPMQGWTARRRSDLLVMLDRLQEQVGELDGAVRAEAEQRPEVRLLMTHPGVGPVVGLAYVLTIGPTARFERGKKVASYLGLIPGEHSSGGRQSFGPISKQGNTMMRTLLVEAAQTAARFDEELRRAYGRLRAKKHSAPAKVMVARKLAVRMYWMLRENKSYAELYARRPVARMQGSSGHSVVAS

SEQ ID NO: 331494 - protein, 359 aa, unidentified
MGNGTFVGLDVHARSVVAGLIDEATGELRVVRAPHATDGLVGWLGALPQPVRTAYEAGPTGYGLARAARQAGIECLVAAPSLIPPAPGDRTKSDRRDAERLARLLRAGELVAVAVPTMADEGARDLVRAREDARADLMRARHRLSKMLLRHGRIYDKSAWSGVHDAWLRRQRLDEPAAQVALVDYYDLTLQARLRRDRLDGAIAELATRSDLAPVVGRLSCLRGVSTLTAVALAVEIGDWHRLSGATIGAYLGLTPSESQSGAHHTRGPITKTGNGYARRLLVEAAWHHRRAHARSVALERRREGARPEVRARAEAAGVRLHRRWVNLESRRGLRSTIVAVAVARELAGWCWSLAVMDD

SEQ ID NO: 331495 - protein, 410 aa, unidentified
MEVLYPHCAGLDVHKATVVACVRHMTGGKVKTEVRTFSTMTGSLLELSCWLGAEQVTHIAMEATGIYWKPVWHILCDGDFQLLLANAAHVKNVPGRKTDVKDAEWLADLLAHGLIKASFVPDEPTQQMRDLLRTRKQLVRERSSHTQRIQKALEDANIKLDTVVTNILGLSGRRILQQLIDGETLPQALATLAHRNLKASPEELQAALRGRVTRHHRFLLKLHLDQIDAIDSAIASIDKEVEGNLEPFRQAQQLLSAIPGISQLSACIILSEIGLDMSRFETAGHLVSWAGLCPRNDQSAGKRRSTRLKQGAPWLKTILIQCAWAAMRTKGSYFQAQYYRLRSRRGSRKAICAVAAALLTTVYHMLRNGACYQDLGANHFDQKAKAKHVQRLVIRLENLGYDVKILPKAA

SEQ ID NO: 331496 - protein, 428 aa, unidentified
MNIEDTIRRKQFCQIKDEIAGCDDYLVVGIDVAKDKHHAFMGNTTGKTLSRKLVFENSLDGFRKLMEHSKAVKARGALSKVVFGLEPTGNYHKPLAAYLIRCGCHVVLVTGKAVKINREQLDGRWDKNDDKDAANIADLVSRGRCLYYDLPSPDLGQLRQVLSLRKRLKKEEHRLRMNIRNNLLAQYFPELDAYYSACESETLAIVSRCLDPHQIAGKHFDEFFTQVASKRRGIAQKLRLQKIHRAASQSVGCEMGPAVQVEAQLVVNKLGEVRRQLKDVEQWMEDIACGFAEYPYLLTIPGFGPYVAATVLAAIGNPQRFNSANQVLKLAGYDLSASRSGKNSHRAIAVISKKGNGQLRYALYQAARVASSRSADFINYFTGLLRGRERERGIKTKMRVKLAAKMLRIAWAIMKKKQVFNPDYLFIK

SEQ ID NO: 331497 - protein, 361 aa, unidentified
MELHVGLDVSLESTSVCIVDETGKKVLETSVASDPEAICITLRPHVSAIARIGIEACSTGIWLARELRNEGLPVTVVEARHMRSALSAMRNKTDRNDAHGIAQMMRMGWFRAVHVKPLETQRLKTFLANRRLLKRKLVDLQNHLRGALRTYGLKVGQVGAGRFDGRVRELLEGNGDYMFTTMIESMLEVRAVLFESFRKLHRILLLIVKHDPICRRFMTVPGVGPVSALSYKVTIDDPTRFTRSRTVGAHLGLTPRKYQSGTSVDWGGRISKMGDVDTRGALCEAAASMLLRVQSYSALKAWGMRIAKRSSMMCAIVAVARKMAMILHRMWIDGTDFEAKSGAKITEKRKRDPQTGRLLPC

SEQ ID NO: 331498 - protein, 254 aa, unidentified
MAVGVHAPTLSLGNNTDGFDALLAQLAARRIALVVMEAPGGLESALACTLQAAGYALAVINPGQARDFARAMGQLAKTDRIDARILAQLAEVLQRHPERDKFVKPLPSAEQQRLAAIVVRRRQLMEMLAAERNRLAQAHPHTRNSLSAIIKALTQELARINKDMDEHIQSHFAGLSALLDSAKGVGKATISTLIAEVPELGKLSRREISALIGVAPVNRDSGLMHGRRTIFGGRGSVRRVLYMAALVASRATTQ

SEQ ID NO: 331499 - protein, 315 aa, unidentified
MSDVPCFVGIDVAKAQLDIAVRPSGERWAVPNDAGGVATLVEQVQALHPTLIVLEATGGLERIATAALATAGLPVVIVNPRQARDFARATGQLAKTDALDARALAHFADVIRPTPRPLPDTQTQELRALLSRRQQLIGMRTAEQNRLAGTSERLTQDIEAHIAWLNARIATLEADLETLLRASPLWRANDDLLQSVPGIGPVCARTLLLELPELGTLTRQQIAALVGVAPLNCDSGTLRGRRTIWGGRAHVRTVLYMGTLVATRFNPRIKAFYQRLLAAGKLKKVALTACMHKLVTILNAMLKHRTSWQAQEVQN

SEQ ID NO: 331500 - protein, 321 aa, unidentified
MTYVGIDVSKATFVVAYSSAKGSRTNSFKNTAKGIHEFIQTISVAEHHCVLEATGNYSALLVYLLSEAGIAVSLENPLKIKNFARVMLSVTKTDEIDARLIAMYGEKMQPTSYKLRNDTILILKQKRTVIRQLKKQLVATGNLKGSMEVLPFFDPKCKKTIEKTIIFLEKQIKGLEEELASLAQSEYKKQMDLLTSIKGIGVTLAAALIMATGGFTYFDNAKQLTRYLGLSPTYQQSGTSVNVKGHINRNGNSSLRSQLYVAAFASLRCNTECKACFDRLRSNGKPGKVALIAVANKLIRQAFAVVTQEKLYVDGFKSEKP

SEQ ID NO: 331501 - protein, 429 aa, unidentified
MLRDSWVLPSLLTSNTQRKVVNIMDKLYVGIDVDSRSNTVYIMKPDGDKHSCFVVPNSLNGSKILSKKIVSAMDSLSLSTILIGLEATGIYGDNLVYFLREDRHLAPFYKKIHVLNPKQVNKFKQSYSDLPKNDPVDAFIVADALRFGRINNEVYMGDYRYDALKKLTRARFFVVQNRTKEKLRFLNYLFLKNSSFAQEKVFSDTFSATALAVYQEFDSVDELAYMDISDLISFITKVGKNRFPNPEEISNSIQAAARGSYRLPKTVNDSVNQVLAISINSLRALDDQIKALDKAIANQIELIPNTLTSVKGIGKVYSAGIIAEIGDINRFPNQAALAKYAGLTWNQYQSGTFEAQNTRLIKSGNRYLKYYFCEAAFSLVRCEPEYKLFYDLKYKEVNKYQHKRALALTARKFVRLVFRLLKDNRLYIP

SEQ ID NO: 331502 - protein, 350 aa, unidentified
MVILGIDAHKQTHTVVVVDEHGRKLGERTVKTTTTDHLDLLVWAARFGAERRWAVEDCRHLSRRLERDLLGAGQQVVRVPPKLMANARTAGRSYGKSDPIDALAVARAALREPELPVARLDGPAREIRLLVDHRDDLVAERTRVINRLRWHLHELDPSWQPPARSLSRAPATHLAATEAFLSRLDGMVARLAGQLLARVQELNAQIDQLEADLVPRVRRLAPSLLALRGCGVLTAAKLVGETADIRRFHSKDAYARHNGTAPLPVWSANTQRHRLSRTGNRQLNLALHRIAITQARHHPDAQRYLARRRANGNTPTEAIRALKRRLSDVVYRALLADTGLTDQASQAAAA

SEQ ID NO: 331503 - protein, 341 aa, unidentified
MKKFIRTAVDLGKNYFQFHGLAGEDGVFVSRKLKRSKVLEFFAQIEPCRVGMEACGSAHHWARELMAMGHEVVLIPPAYIKPYVKRGKNDAVDAAAICEAMARPDMRFVPVKSADDQALLMLHKSRELLIKQRTMSVNALRGHLAEFGLVVAKGINRVDELLALAQADARLPQIAKEMVTELARHLEGLDQSIDAVDDEIAKAHKQNRKSCLIDEVPGIGTLIASVVAASVPDPGVFKSGRDFAAWLGLTPRQNSSGGKEKLGAITKQGNRYIRKMLVVGARSVLRVVGKRKGALADWINALRARKPERLVAVALANKLARICWAIMTTGESFRTDTYVKA

SEQ ID NO: 331504 - protein, 344 aa, unidentified
MDLHQKTSTFSVKEKEGTVIAAKTVSTTKEDIKKFLSPFAGSSLTLEPVSQWYCYADFIESLGLDVKIANPMKVKLIAASRIKTDTIDAGVLADLLRVNMLPESYHAPADVRAWKEEVRLRMSLVRLRVQVKNKIHALVWKQGLRSPYTLFTKNGLIWLDQQTFSKEATVALTTYRETLALLDRQINDAEERMITDNKHREEVKLLITIPGISYLSALTIMAEIGDISRFPSAKKLMGYAGVVPSTYSSGGKVRHGKIIKQGSSWLRYVLIEAAHHQLHCTKRKGLIDYYNGIKERKGSKAAAVATARKLCAVIFRVLTDKQPFVSPEVWDDRRAHHHVIAISN

SEQ ID NO: 331505 - protein, 387 aa, unidentified
MPKHNDLSKCLVTLEQASTLIAVVEMGQSSWLVAGIAPGLDRYPLKKLGPDRDALLQLLHRWRNEAAKAGHAINRIAVAYEAGRDGFWLARWLRSQSIEAYVIHPSSVPVSREHRRAKTDRLDTELLKRAFLGWLRGEPKHCSMAAIPTLEDEDARRPGRERQILVGERTRILNRLKANLARLGIRGFRPNLARAPSQLGALRTPEGVAIPTNTLAEMRRDLDRLRFVKQQIKEIEKTRAERLAKAPDERRHAAARLLTRVVGVGIETADMLVQEVFSREIRDRRALARYAGLTGAPDESGQRRRERGLAKAGNARVRRGMIELAWGHLVHQKGSSLTTWYRRRTVDARGGARKTMIVALARKLLIVLWRFATTGEMPAGLLLRPAA

SEQ ID NO: 331506 - protein, 536 aa, unidentified
MIQSVGIDFGKTGPHKVRCLDERAQQCDGFIFQSTLEGLEKLEERIFRDGSNPIVIFEPTGLAWLPVVLYLRARHPDCRLVRAKTQKVAALRKYLRSSSKSDRIDALTLAKMPFIDPEQLYEVYLRPAELQTLHRLNGQRWRLEQGVTARKNRIIAIIDGYFPGLRQAFDDRWSPRARAFFREQLNPLAVVRAGEEALHAFLKKAAPGSKASLVETRQVYMACQCAAAMYEASMEAGAVNEDSFADLQEEIACEMRLLEAEEGEGENLARRIKELYRKLHPEDHLQTIPGVGEHTAPVFLAGLGEPRRFRNQSAFANWNGVVPGARQSAEFEGKGLRMTKAGPAIMRWGFYVAGDVGRQWDPQLAHVYYRQMVHHGKTHYQAMGAVMSHLTARILAVRREGRPYELRDIEGNPITKKDARQIILSEYQVPEDIRRQRRRRNRPKTSASMVGTKKRGTEEHHKIHEAASAPQLEAAPCIPHNPVYLAQPTTSSKTAALVVGAVKPRERSPDEAGRSERENNLPPYETTSGLERLDNI

SEQ ID NO: 331507 - protein, 402 aa, unidentified
MIQRACGVDVHRDNFVAAILTSRGCESRDFEKSLEEIEAFKAWLRASRCRAVVMESTGVYWIPLYAALEGKFDVKLANPERTRKTPGRKTDQSDAEWLAYLLRAGLIEASYVPERKIRVLRELTRLRTKMVQNRTDYKNRVHKVLQRCNIRLGSKLHSVFGKAGLEVLNGLMTGRSLDEIVNESKSQLLKERHGELEKVVRTGLDQEDVFVLKRCLRMVEHLDGELKELDARISMLIGDREKDMKNISKVPGVAQVSASSILAEIGDAKRFANGKKIASWSGLCPSVYQTADKNLTGSLKRGSKNLRRMMIQVAHAASRASDSKLRLFFLRVTARRGKKKAYVALARKILCIIHHLLVNGEEYVEEGFAKRLRVRMRTLEDIPLQEMAEILIGAGYLVQAPA

SEQ ID NO: 331508 - protein, 419 aa, unidentified
MLYDSRVHMDRTLVEFLPSSAHLLGGVFMTYFIGIDIAKYKHDCFIMDQDGSVIRDSFSFSNDSAGFCLFLSVLDSLDPSYEKRIGFESTGHYGLNLKCFLEEHDLSFMEINPILIKRFSSATTLRRTKTDKADAALIASYLTTVEYITYPTQSYHIHNLKSLTRSRDALVKLRSGQLVMITNVMDKIFPEFKPFFNKSLKSSTAMYLLRNYTVPSKMASMNSESYRKMSSKLKKTISYARFSKLRELAKNTVGREDPCLTFELNTYLDIYQSLDSKIKEMEAHIEEEFKKIHSHIQTIKGIGWMSAASIYSEYGGIENFQTPNQMLAYAGLDPSRSESGEHAYKGHMVKHGSSHLRYVLLNCAEMVILHNPVFYDYYRKKREEGKHHRVALSHVARKLVRIIFFLEKNNVDYDPKKMR

SEQ ID NO: 331509 - protein, 344 aa, unidentified
MKDVRILGVDLGKNSCSIVGLDGAGRVLLRRRTRREGVIALAAKLPGCVVAMEACCGAHHLGRLLVEQGHEVRLMSPEYVRPYVKAQKNDDRDAEAIAEAATRPTMRFVALKSEAQLDVQVLHRVRDRLVGQRTSLTNQIRSILLERGIVVPQGRRSLLEALAVLSSEPDGRRVGTRVQRLLDDMLDQWRALDARIKALDDEFAEMARNDPAARRLATIPGIGVLNATALVAAIGDGRTFSRGRDLSAWLGLVPHQATTGGRPKLLGITKRGSRYLRKLVIQGARAALPSLARTATPLGGWLRGLLARAHGNTVVVALASKLIRIAWALLRNETTFVAGGAAVA

SEQ ID NO: 331510 - protein, 284 aa, unidentified
MPHVTSIGLDVHARSVAAAAFNPFTGEVVHRDFGTDAAEIAEWALGFEEPRACYESGPTGFHMARELRALGLDCAVAAVSKMQRPAADARRKNDRRDAEFIARMLATHNIVEVPLPDAAVEAARDLDRALDDATAEYRRARQRLNMFLIRLGHVWDERNADGTRKGSWTRAHWRWISGIRLEGPQRDVLEYYVTAARCAESDRRQLEKKVLALARTDRWRPAVEALSCIKGIDTLTAFRLAAEAGSFTRFRTAPAFASWCGLVPSERSSGETERRGGITKTGNC

SEQ ID NO: 331511 - protein, 343 aa, unidentified
MDHFAGLDVSVKDTSVCIVDETGRIVREVKVASEPNALVAVLTNRAYHFKRIGLEAGPLSQWLFSALAEADLPVVCVETRHMRAALKAQINKTDRNDARGIAQMIRVGLYRPVHVKTLRSQKLRMLLTHRKLLQSKAIAVDNDLRGTLRNFGLKVGMVGAARFEARIRELVEDLPDLAVLVEPLLVVRRVLREQMGVLHRRVLTVVRDDEVCRRLMTVPGVGPVVALTYRATVDVPARFRKSKSVGAVLGLTCSLDQSGERDRPGAISRCGDEMMRAMLYEAAQSMLVRSTRWSWLKAWAMQIAKRRGMKRAIVALARRLAVIMHRIWVDGTEFRWTREAVAT

SEQ ID NO: 331512 - protein, 316 aa, unidentified
MESPQPFVGIDVSAKRLDVVVLPAGTHFTVAHTDDDIASLVRRLLDLSPQSIVLEATGGYEIPVAYAMSEAGLPVVIMNPKILRHFAKSTGKLAKTDKLDAQVLAHYALAIQPPVRPLRDPQQLELATLMSRRRQLRDMIVMEENRRRTSTPKVRHNIDQHLAYLRQLLKDLDREIQDFIRRTPLWQEKAEILREVKGIGPKLSASLIADLPELGTLPGPQISALAGVAPMNRDSGQWRGKRTIQGGRPAVRQALYMAALVASRHNPLIREFYQRLRAAGKPAKVALTACMRKLLIILNAMLKNRTHWNPQLPIAA

SEQ ID NO: 331513 - protein, 343 aa, unidentified
MKHYAGLDVSVEETSVCILDETGRICREVKVTSHPEDLRRILQDPIWHFERIGLEAGQLSQWLFDALADAGLPVVCIETRHAKAFLKAQVNKSDRNDARGIAQMMRVNLFRPVHVKTLTSQKRRVLLTARKLLQEKAIAIENDIRGLLLNFGLKVGVVGAAKFEERIHELIRDMPDLAEIVERLLEARRRLREHFAALHRKLLDLARGDAVCRRLMTIPGVGPVVSLAFVATIDTPARFRKSKAVGPVLGLTPVRSQSGNTDRVGRISLCGDGMMRTLLFEAAQTMLRQTTRWSWLKAWAMRVAQRRGSRKAVVALARRLAVIMHRMWCDGTEFRWTREAPVA

SEQ ID NO: 331514 - protein, 374 aa, unidentified
MTNHSEGFVGLDTSKLRNAVAIADGGRSGEVRFFGEIDNNGTAMAKLVRKLAAKYERLTFCYEAGPTGYGLYRQIKSLGHQCILVAPSLIPKKPGNQVKTNRRDAIELAKLLRADELTAVWVPDRGHEAMRDLTRARETAMKDLRSKRQQVSAFLLRQGRSYPQKKTWTKAHMNWLASQKLEYPQQRIVFEEMMLAMRQAQERLARLEQAIRDVMPDWSLAEVVTALMAMRGMDLISAATFMAEIGDLSRFRTPVQLMAYLGLVPSEDSTGDKIKRGPITKAGNRRARRMLTECAWSYQHPARVGQAKQLKLDATAPAVRAIAWKAQCRLYGRYRALIRRGKLKTVAITAIARELAGFIWAVNGAITAAGAAAK

SEQ ID NO: 331515 - protein, 384 aa, unidentified
MNKHSMIFIGLDTHKEFHEVAYCEEQRGASAVHYGRIPSSKVSVKKLIRQFESKYPGATIHVVYEAGPCGYWIYRLITSLGHCCYVVAPSLIPKKPGERIKTDRRDALKLVKLLKSEDLTPIYVPEPEDEAVRDLSRARELAMKDLKEAKYQLKALLLRNNIRYEGTANWSKKHLRWLTELILPHPAQHIVLQEYLQTIEERIRRLERLDNELTHHVHQWRYYPVVKAIQAMRGVRLLVAVGVVAELGDLNRFDHPRKLMAYLGLVPSEHSSGGKRHLGAITKAGNGRARRLLIEGAHSYRYPANVSTDIQLRQEGLPKDIVDIAWKAQLRLCKRYQRMSKKGKHYNLIITAIAREMAAYIWAIAKEVVLTPVNPKLRLSRVPA

SEQ ID NO: 331516 - protein, 426 aa, unidentified
MISAAIERCAGIDVGKKFLAVCVMVGPLQGEPQVEIRKFGTIRAELEGLRDWLQQQGVTHVVMESTGSYWKPVFNVLEDAVKVYLANPQEVKNRKGHKTDNKDGWWLAHLLRHAMIHPSFIPPRAIRELRDLTRRRKRLLSAGTSERNRVQKVLEDANVKLGNVLTDLFGVSGQLMLEALLKGQATPEEMAQFAKGRAKKKTPQIIAALEGHQMSEHHRRMIRYSLDHMRFLEEQIEQLDHDIVAKIQESGLEPHWQLVQSVPGLQATSAAAVLAETGTDMTQFPSEKHISSWTGICPGNNRSAGKNRSSRTTGGNRWLRSTLTECAWAAAAKKHCFLKDKFWRITTKSGGKKAPAVIAIAHSLLILTYQVLSTGQAYQEKQAPVSDPRHKQRMIRHHIRRLGKLGVSVHGHDLGSSPTATSPTES

SEQ ID NO: 331517 - protein, 433 aa, unidentified
MQDVQDEPLFCERVAGLDIAKAEVEVTIRVPSDTRPGRRQQETRTFGTTRRELDALADWLRCWGVTKIGMEATGDYWKPVFFLLESRGFDCDLYNAAQVKALPGRPKTDRADSIWLAKIVERGMISSSFVPPEPIRRLRTCTRYRRHLTQARTAEKQRVEKLLEDGHLKLSSVISDIHGVSGRDMLEAITAGERNPNVLAQLARGTMRAKIKRLEEALDCAFFTGEHAAVLAMMLAAIDHYTAQIDQLTARIEVLAEPYLHQVAQLDEIDGVGQVCAQDIIAEIGADMTVFPTAAHLVSWAKWSPQVRQSAGKRKGSNATGRGNPYLSAALGEVSISAGRTQSFLGARYRRLTKRMPKKKALVATGNSVLTIIHALLSDPAARYTDLGADHYEQRTHVRRQDRNHVRSLERLGYKVAIQAINPDTGELQAATT

SEQ ID NO: 331518 - protein, 473 aa, unidentified
MIKSVGIDLAGIGEHKVRCLDDRAQLCDGFSFETTTAGLAKLEERVFSDGSNPIIIFEPTGLAWLPVAVYLKARHPDSRLVRVQAQKVVALRKYLNRSSKSDKIDSLTLAKMPFIDPEKLEEIYFPPGKIYAIQRLARQRRRLENEIAGRKKRIGSVVDGHFPGIRSAFSDPWSAHARAFLRSRLNPLAVVRAGEKALHAFLTKTRKHCKVDAFVESHGVYLTCREVATLYKASSSVGTIDGDFLSALQDEVSRELRLMEMEEAESAAIAKRLEKLYLEVHPSDNLRTIPGVGDITAPIFLATVGDPARFRSQSSFANYCGIVPGASQSAGSEAKGLRMTKAGPSIMRWALFQAGGIGRAHDPQLACVYYREMVHNGKTHMQAMGAVMSHLSSRVLAVLREDKPYKLRDIDGTLVSHEEARKIILSKYQVPEEIRRERRHRKTPGNYKLQKTLREMLVPRTYEAAEAPQPVLT

SEQ ID NO: 331519 - protein, 338 aa, unidentified
MRYVGLDAHWRQSTFCVLDDRGRKILSQTVQGPWSKVLEELEKIRKPFEVCFEASTGYGYLFERLQGLARRVVVAHPGELRLIFRSKRKNDRVDAEKLAKLLFLDEVPPVHVPREDVRAWRRMIGHRRKLVASRIRSKNAVRALLRSQGIEAPKGLWTRKGMAWLRSASLATELDELQRDILCEQIASLTRMIQRAHKLLNGIARRHPGVQLLKTIPGVGVRTAEAVVAHIDDPKRFHRVKTIGRYFGLVPSQDASGPTNRLGHITREGPSIVRYLVTEAAWQGIRRSRKLRTFYDRVLRDDRGRRKIALVATAHHMLRIMLAMLQSGELWRSDQTAA

SEQ ID NO: 331520 - protein, 349 aa, unidentified
MKKLSKMQKPLPETIGIDLGDKVSRYAIVDQDGEVIEEGSFRNQVSSIEKHFGDRPRRVALEAGAQSAWISRELKRLGHEVIVANPREVKWITASDTKNDPVDARKLARLARADVRLLAPVEHRTAQQQAELAVIRARDAVLRARTLLVNSARGIAKGFGVRLPKSITGTFGQRAVEALPEFLRTALGELLDTIDTLSRGIAGYDRQIGELAEKHPELERLESIPGVGRLTAMTFVLTLGRAERFAHSRDVAGFLGLRPKQRQSGARDPELGIAKSGDRYLRKLLVQCAHHVLGHWGRDSALRRWGLAKGEGGRRATLRAIVAVARKLSVVLHRLWASGEFYKPFPKMA

SEQ ID NO: 331521 - protein, 365 aa, unidentified
MNHLAIDLGSRESQICVRNSEGVMLEEERRATTGLWKYLAGKEKCRVVVESCAEAFAIADAARKAGHEVRVVPTSLVRALGVGSRGIKNDVRDAQNLSKASCRMEDLPSVHVPGEVSRERKAMSAMREALVEVRTKLVNTARSWLRTQGVGVLAGGTLPTFPVRYRRHAEKKGKPLQSHVERVLQTIEELNPKIAEADKELEATAEQDATCKLLMTAPGVGPVTAVRYAAAIDEVRRFNDAHGVESYLGLIPGENSSGDAKKRRMKGITKAGPPRVRWALTQAAWTALRCRKHDPMVAWARQIEARRGKKVAVMALVRKLAGVLFAMWRDGKPYDPRHESMGKVERARGGEATRGADVTATPLPS

SEQ ID NO: 331522 - protein, 335 aa, unidentified
MALYCGIDLHSNNHVVVVIDEEDRRILERRLGNDVTLTLQTLEPYRSELAGVAVESTFNWYWLVDGLQEAGYPMRLVNTTAVQQYVGLKYTDDRYDAYWLAHLMRLGILPTGYIYPKEQRATRDLLRRRMQLVQAASTQLISVQSQIWRETGERIATRRLKQADFVVDLPGAAQQLSAQSALLVYRAIHAQQTVLEQVLLQVIGPQPDYQLLTTIPGVGAILGMTIALETGDIRRFPGVGHYASYCRCVRSEKVSNGKKKGEGNAKSGNKYLSWAFAEAAHFAVRYQPLAKRFFDRKQRKTNGIVAIRSVAHKLARAAYYMPRDQVPFDAHQLFA

SEQ ID NO: 331523 - protein, 367 aa, unidentified
MSIVARFVGFDVHAKTISIAVADIDAGEPAFVGQVPNDWSVLMKQLRRLGPLGSLYCCYEAGPTGYDLQRRLSRVGVKCIVVAPSLIPKRPGDRVKTDRRDALNLSRLLRSGDLTPVWVPDSETEAIRDMTRGREAAKRLQKVARSQLDKMLLRHGQRYPGKTKWTKKHDDWIRKQRFEHEAQQYTYDEYVHAVDEATQRVSRLDAKIAELVKHWSRWPLVRALQAFRGVQLTTASAVVAELGDLQRFGSAPELASFVGLTPSESSSGQRTQRGRITRAGNSRVRRLLVESAWSYRMRARKSTAIAKRNEGVSPGVQAIAWKAQVRLCGRYRRLLARGKRKQQVVTAVARELAGFLWSAAQEPELLA

SEQ ID NO: 331524 - protein, 391 aa, unidentified
MFYIGVDIAKNNHEASIIDSNGKLVSESFSFSNSIRGLEKFQKFISSFSIDSNNCIIGMEATGHYWLSLYSFLIDLGFSCVVINPIQSDAFRKMYIRQTKNDSVDSFVIAQILRFGEFSVSHFSDEDTFALRNLSRFRFALVDEASDWKRKLVAILDQVFPEYSSLFSNIYGVASKELLSKFPLPEDMISIPADELAKMLSKCSKGHFGLDKAKEIQEKASNSFGVKFALKSFSFQIKQIIAQISFLEDQIADIEDEISSMINSLCPVITSITGIGDILGGAIFSEIGDISRFERANQLVAYAGLDVAVKQSGNFNATDTKISKRGSPYLRRAIWLAASVAAFKDPALSVYYQKLRQRGKAHGTAIGAVARKLTNIIFAVLRDNKTYVPNI

SEQ ID NO: 331525 - protein, 473 aa, unidentified
MPRRTSPSSPPDPSAVALLQTLNPHAAGIDVGATDLWVCVPPGAVSSPHASVPGAPAVLPPNVRRFGPFTADLHAIAAWLRQCQVMTVAMESTGVYWIPLYDLLESDGFQVLLVDPRQVQRAPNRPKTDVHDCQWIQRLHSLGLLTAAFRPEEPIRVWRSYQRHRASLIEDAGRHLQRMEKALEQMNVKLPEVVSDLTGLTGMSILRAIVQGERDPHALARLRDHRCKESVETIARALQGTWQPEHVFALQQSLALYDYYHEQIRDCDRVIEAHLTGMALPEVPPLEPKRRVRRRKDNEVTFDARQRLPQVAGVDLTAIEGIEESTALVVLSEVGTDMSRWPSEKHFGSWLGLAPNPKKSGGRVKSSATRPGSNRAAQALRLAAKNLQRSQSALGAFFRRIAARRGVAKAITATAYKLARIIYAMLKHGMAYVAQGMAAYEAAYRERSVRQLKRKAAQLGLIVTEREAVAPLS

SEQ ID NO: 331526 - protein, 419 aa, unidentified
MKNSKTKNLKTVNERTLIVTIDIGKSVHHGYFRAPGGQDITPFPFYNGQKSYEDFWAKIVTFKQKNNLEEIVAGFESTGPYAEPLMNFLATKSVKLVQVNPMHTKRLKELTGNSPNKTDTKDPRVIADVISLGHALTVVVPKGPAAELRRLTQARQRASKNRTALVNQLHHLMYVVFPEYTQVMKKITSKSSLYLLNNHTSPEEIVELGFANLQVILKKVSLGRMNHSKAKALFEAARNTTGIDEGRESLITEIRHLVSCIERESQFMDHLENQMSQYLNQITYSRSILSIKGIGEITAAGLIGEVGDFRQFKTISEIMKLAGLDLYEISSGKHYGQRHISKRGRSYLRKLLFFIAINTIRTSGIMHERYLGMVDRGMPKVKAVVAISRKLLRIIFALVRNHSTYIENYDHLNCLKLAA

SEQ ID NO: 331527 - protein, 350 aa, unidentified
MSNHKFAAADVHAATTTFAVLDSSGKFVMETVVETKAESLLSVVKSMTGSVHLTFEEGTHAAWLYDLLRPHVAELLVCDPRKNRNDKGNKSDRIDARQLARWFRSGDLSPVYHGHDSTKVLKELVRGYENLVVDSVRVKNRLKAIYLSQGEWASGGDVYSLEKREEWLSKLRSSGLRSRAEWLYLQMESLHDLRGEAERAVIREAKKHRPCSLLKSVPGIGPIRSATIVAHVATPFRFRTKRQFWSYCGLAVVTRGSSDWEIDGEKLRRKRQSVSTRGLNRNHNRHLKDAFKSAVRDARAFRPHLDSLVESGMRKSMARLTVARKIAATTLAIWKKGEKFVLKKAVIRSE

SEQ ID NO: 331528 - protein, 339 aa, unidentified
MQAPRHIGIDLHRNQFTCCVRLENGRNYLTEWKLEDLPRFVKKLRPNDEIAVEMTGNTRLFRDAIARHVARVVVVDPNQFRVISHSVKKTDPNDARNLALYLEKELLPEVRMKDKTQAQLASLTQTRDTMVKLRTALKNKINNILSAHGINLEKEALSSEKKLNEVVALHFDPMVRIELKVIVEQIRSLNQSIAELEKTIADEGSKLEGHKNLTSIKGIGPLTGSILLSVIGDIHHFADEGKLAAYLGIVPRVSKSNQTEHTGRITKRGSKLGRTALVQCALIAQRYSPYLQRYYQRMKAQTHSTGKAIIALARKLLGIIYRTLKNNWVFEDFPNFVLA

SEQ ID NO: 331529 - protein, 480 aa, unidentified
MNVKTRRTKKQVNVENQAINLLSKEELNKKIEVVEKELRSYTWRELETNGKFAKNDKLSFITDDMLIVGCDIGSETHYIRAIDVRGRELSSGAFEFSNTSEGFANARAWVLALAAKNDKKQIVLGLEPTGHYWFALAAWMISNGISVVQVNPYAVKQSKEIEDNSQLKDDRKDPKLIANLVKDGNYGMPYLPEKVYADMRRLSMFRDQLTEDRIRNINRLHRELKIYFPEYMDAFGKIDGAFTLEVLKVSAIPTDITVLGAEGMKNIWHNAKLRGRGYSRANEIVSYAEKSVGLTDGTDVGREAVKWYAEQILRLDEQLSEIESALHEKCREIPYAENILAINGVGENILAGILAEMGDISRFDDVKEIQKLSGMGLVACSSGKHKGQTKISHRGRKRLRYWLFQAAKSAVSHADEFKQLHEYYTTRSNNPLKKMQSLVVIACKILRVIYTILRTGTTYDPQKLLKDIKHPAASQAPMAA

SEQ ID NO: 331530 - protein, 410 aa, unidentified
MIFVGDDWAEAHHDVYVCDDAGVKLAARRLPEGIEGMAKLHDLVATHAADPSDVVVGIETDRGLWVHALVEAGYAVYAINPKAASRYRDRHSLSGAKSDPGDAKMLAELVRTDRHNHRQVAGDSALSEGIKILARAHQSLVWERTRATNRLRSSLREYFPAALDTFAELADRDTLAVLAAAATPSEAARLTPGKIRTLLRRAGRQRNIETRADAIAAGLRSDALRAPAAVEGAHGATTRSSVAILAALNTQINALAAELADHFEQHPDSDFYLSLPGVGVVLGARALGEFGDDPNRYADAKSRKNYAGTSPITRASGKRHVALARFVRNRRLADALDQWAFSSITASPGARAFYDRRRAAGDSHHKALRALANRWVGILHGCLDHRTGYDENTAWGHRIDTDLKEIARAA

SEQ ID NO: 331531 - protein, 420 aa, unidentified
MKVVYQTCCGVDVHKSFLVATIIKTTSGVQPSYQKKRFSTFNNSILEFKKWLLDNSCRDICMESTGKYWIPVFNLLEDEINVTIANPKWVKAVKGNKDDTKDSKWIGDLFRLGLVPGSYIPCKEIRILREFTRYRYKLTSCRSSEKNRFQNALTVCNVALDSVVSDIFGKSATSVIDYLLEQSDNSINHEEISSRLLRSLKKKSESVIESIEGYQMTDSQKYRMRLVHAHMDYITSTISDIDSMIDSLVEPYDNAVKLLCTIPGVDRNSAITIISEIGTDMSQFSNSKRLCCWAGLTPGNNESAGKKKSVRITRAGVYLKPALVQVAHAAVKSNKSPYYKAKYERIMKRRGKKRAIIAIARMILTAAYQMLSTGEVWNPTDLYKIDMPEPLKEKQKEKAIKQAKKLLIAEGIIEESLLAS

SEQ ID NO: 331532 - protein, 407 aa, unidentified
MRLFVGDDWAEDHHDVELMDAAGRVLARGRLPEGVAGMARLHELIGQQLGEDGEDAEVVIGIETDHGPWASALVAAGYVVYAVNPLQASRYRERHGVSGAKSDRGDAHMLTDMVRTDSHQLRVVAGDSPDASAVKVVARTHKTLIWERTRQVQRLRHQLREYFPAALAAFEDLDAADALELLGKAPDPARAARLTRAQVSAALKRARRRDIPAKATAILAALRSPQLGQPEAVTAAYAVTVRSLIAVITVLNEQVKTLQGQVEADFGRRPDAEIYRSQPGLGTILGARVLGEFGDDPHRYATGKARKNYAATSPLTRASGKKKTVMARFIRNDRLTDALMAQAFTALSTSPGARALYDAERARGTEHNAALRKVANRLVGILHGCLKTRTLYDEKTAWPHHENKLAA

SEQ ID NO: 331533 - protein, 440 aa, unidentified
MSGKTKTSIVMNTEQLTFQATIGLDWADKKHDLWVRPADGSKSQHVQLEHTAEAIHEWVAKLRARFPNGSVAIAVETSRGPVLSALRAYDFIVIFAVNPKCLKDYRAAFHVSGAKSDRSDAQMLEEMVRLHRDRLKALQPDDVLTRKIGGLTETRRMLIDQRTCLVNQTHASLKMYYPLAETLLGQELNTVMAAEFLIRWPDLEKLQAASPDKVRSFFYKHNCRSPKKLANRLEAIRQARPLTVDEGIIAPARAMVLALAGLMKSLHGSITQLDDQIKAAMDQHPDAPIFRSFPSAGPALAPRLLAAFGTQRERFESPTEVAQFYGIAPVKIQSGNSTVVHMRYRCPKFARQTFHENAACAAKTEAWARSFYKEHRKDPQKRHHQTCRALAFKLIRIYFRCWKSRTPYSSSYYEQALEKARKPKAQNTQTSHVNKSDENH

SEQ ID NO: 331534 - protein, 337 aa, unidentified
MRYIGIDLYTNSFTACYLTNGKPECIRTFCLQDLDKFIENLQATDEVAIEATGNSCFFYDAVSPYVKRVVIIAPWQFEVIRRSVNKTDKHDARAIAFFLSKDMLPEAKCKSKQCQQLASLLKTRDQLVKSRVSLINKIHGLFNYHGIKIKKEVLTTKLGFECSLDKHNWSYLEKVEIEVISSNLEVIRESLKKLEKEIIVFAKQLPGFNNLVSIKGIGAISAAVFIVTIGDINSFSDPEKLTSYFGIVPKVYQFNQHCTTGSITKRGSKMARTSLVQCTWIAIRYSPYLKNFYEHIKRKRGSAKAIIATARKFLTTIFYTLKNDWVFKDFTKYETYN

SEQ ID NO: 331535 - protein, 348 aa, unidentified
MPMLADTVELVIGVDTHKDTHTAAVVAAATGALVEQVTVPATPAGYQQLRRLADRQDGRRVWAIEGTGGYGAGLTRFLQANAEQVVELDRPKRAARRHGAKSDPLDATRAAREALGRDQLAQPRAAGHRAALSVRLAARRSAVQAATDAQRQLHALVVAAPDPLRERLRSLTTARLVATCGRLRQQAAWDAETAATAASLRALARRIQLLNAEIVEHTRAISALVRTWRPELLTRCGVGPIVAAIVLCAWSHPGRCPSDAAFAMLGGAAPIPASSGQTVRVRLNRSGDRQLNQALHLVVLTRLRYDPATRAYAQRRRAQGKTNREIRRCLVRYVARQLYRLLEANPAL

SEQ ID NO: 331536 - protein, 315 aa, unidentified
MYYLGIDVSKKTIDCCLTTDSIFYERRFDNTEDGFRQLDDWIKEYTVEVVYCCCEATGIYHEAIADHLRQNHIVSIVNPSKIKGFREAEQTRTKTDRQDARLIAEYCRRMQPQAWQPPTEEQKYLQAITDYIARLKQQRAAEQTKYQTAPDAIRNHIQTTIDHLNRLIAIVQTELKDFYRQNPKYNEKKNRLKTIDGIGESAASVLLAKLTRYDFANQNQFAAYLGLDPKIKDSGTSVKGKSRISKQGQKNARKALYMPALVAYRMNAFPAFIARLKAKGKPPKLIIVALMRKLAVIAYQLYKTGKDYDRSRYRK

SEQ ID NO: 331537 - protein, 416 aa, unidentified
MSKQQVSMEAIYPSCVGLDVHKKTVVACLKQIDSEGKVFQDVRTFGTMTKDLLALSDWMAAEKVTIVAMESTGVYWKPIWNILEGQFEVLVVNAQHIKQVKGRKTDVKDCEWIAHLLQVGLLRGSFVPQKSIRELRDLTRYRAKLVGEHTAAANRIQKVLEDANIKLASVASDVLGVSGRDMLQAMIEGVADPHALADLSRKTLRKKIPELELALEGRLTDHHRYLLKSLMKHLRFLESEITELDQRIEKVTHPFEEAVQLLDTIPGVDRCTAENLLAETGPDMNQFPTGRHLASWAGVCPGNNESAGKRKSGKTTKGNRALRRALTEAAWAATRTKDTYASAKYQSLVGRRGKKRALVAVGHHILLAAYHMLKKGVTYHELGPDFLLMKNGKNRTNHLVKQLEKLGHKVMLEKAA

SEQ ID NO: 331538 - protein, 424 aa, unidentified
MNLTQNDRLKQVTSDTLIVGVDVGSQTHFCRAFDWRGFELSRRVFKFSNTGMGFLTFLRWTEEIMNKTEMKKVIVGCEPTGCYWLTFQKFLQDHDVQLVTVNPFTVNRSMELDDNSPEKSDLKDPKTIALLVKDGRFSTSYLPSGVYAEIREASVCRDQIMKQHVRLSNQIQGWLQKFFPEYFECYADWDSTSGLMLLREAPLPQDILKIGAGGINQIWRDAKVRAAGIKRAQTLVEAAQNSVGLEAGEAARLEIWVLVNDYILKAEQLKRLDEYLEEKVKEVPNVEKLLAIKGVGMSTVIGFIAEVGDIGRFTDPKQIQKLAGLEIVKKSSGKKKGQPRISKRGRRKLRRTMYESAKALMTWNPAFQDVFLYYRNRTKNPLGGMQAKIAVACKAIRVFYVVLQTGCDFDEEKFRKDIIRPEAA

SEQ ID NO: 331539 - protein, 462 aa, unidentified
MINSCSATNQMAACIGLDWADHKHALSLQSIAGGSVEHYQVEQSQLSQWVAQLQARWPGQTIAIALEQSRGAVLYTLMSFPFLQIYPINPKSLARFRETFAPSGSKDDPQDADLLREMIQKHADRLRPWKADTIQTRQLQLLVEYRRQSVDERTRLINQATSLLKCYYPVALQCAGGLDTLQASEFLQRWPTLEALQKTTRGRLRRFYQRHGCRRTELIEQRLERIGQAQPLTTDPAIVLSLSLRLRTVVAQLQALLPRLQEFDTQIADLFAAHPDHAIMESFPGAGPALAPRLVAAFGSDRSRFEEAREVQQLSGIAPVTQKSGHSCWVHRRWACPKFLRQTFHEYARLSRQQSVWAEAFYQRKRTEGKKHHAAVRALAYQWIRIMYRCWQDHTLYDEARYQQACRQRHLRGLTAAGGKLPAAGDASSKARSGLVPISTLLPQVLDGVMKPATCGKPVQSR

SEQ ID NO: 331540 - protein, 338 aa, unidentified
MNIKALGIDIAKNFFELHGVDEHGKSILKKRITREKLPEFIAQLPLCLIGMEACGGSNYWARKFKAMGHDVRLMNPQFVKPYVKSNKNDAHDAEAICEAVQRPSMRFVGVKHIEQQDIQSVHRIRERLVKERTAIVNQIRGLLAEYGIVIAQGIQQIRKRLASIIEDTENELSTLGRQLFTDLMNQFYEADNKIGEYDSIVERLCKQNETCQRLTQLPGVGPLTATALIASIGDAKVFKNGREMAAFIGLVPKQHSSGGKERLLGISKRGDRYLRCLMVHGARAVMTRSKNLSAKKASWLKSLVERRGRNRAIVALANKNARVMWAMMTKQEDYKVSV

SEQ ID NO: 331541 - protein, 344 aa, unidentified
MLEVSIIGLDIAKHVFHIHGADERGRAVLSKRISRGKLLDFFAAQPSCKVALEACGGAHHWARQLTQLGHEVRLIPPAYVKPFVKRQKNDAIDAEAICEAAQRPSMRFVAVKSEEQQAAGLLFRTRDLLVRQRTQLINAIRGHLTEYGWIAPKGPSHVARLADLIEEEEMASSLPEAALAMFRLMLDLLAGLNGKIADLDKEIARRAREDEVSRRLMTIPGIGPISATAIAALAPPAETFAKGRDFAAWLGLTPLQRSTGGKQKLGATSKMGERTLRRLLIIGSSAVVQQASKRGAPKGSWLEQMLARKPRMLVTIALANKMARIVWALLVKQENYRAPVTARA

SEQ ID NO: 331542 - protein, 369 aa, unidentified
MGKQTVNSTILLRYCVGIDVSKDSLQICLSTIDINGKTTVKGTSKVANKVSSFDGLLTWIAKHCKEKQLPVRYLMESTGVYHEQIAWYLFQNDLPVSVVLPNKSKNYLKSLGHKSKNDKIDARGLAQMGLEQTPTLWQPLSKNIYSLRMLTRQHQRLQELKNQSENQKHAILHSQICDKFIIKQLDKLIKLYDQQVEQIAQEMQNLLSKDIVLKNKIDQLCKIKGLGLLSVATLVAETNGFEGFENLRQLVSFAGYDVVENQSGLRSGKTRISKKGNSRIRRILFLPAFNAVRFGEPACQALFERVFVKTRIKMKGYVAVQKKLLTLCYALWKKDVNYDPLYHSQHVKELEYQDKKIVLTIRTTQDVTA

SEQ ID NO: 331543 - protein, 307 aa, unidentified
MALSVGIDVAKHTLEWNAAGEEKIQHARNEPRPIAQLVRQLVALNPVRIVVESTGGYERTLVTKLAEAGLPVVLVNPRRVRSFGQALGILAKTDAIDARLLALFGEKAEPEIRPIRQGRARLLADLVARRRQLVAMVVAEKNRRDTASAAVRRSIDALLRVLAEQVCELDRRIDQALDEDVESAELVALLQTVPGVGPGVARTLLVDLPELGHLGRREIASLVGVAPFARDSGKLRGVRYIRGGRASVRTVLYLAAMTAARFNPTLRALYQRLRQAGKPPKLAFVAVARKLLVILNAIARERTAWQA

SEQ ID NO: 331544 - protein, 338 aa, unidentified
MQFYAGIDLHSSNNYLGIINTDDKRLFGKRLPNCIKTIRLALEPFRKDLAGIAVESTYNWYWLVDGLQEDGYKMHLANPSAFQKYEGLKHTDDKSDAFWLAHMLRLGILPQGYIYPKNRRAIRDLMRRRLKFVNQRTSHILSLQSMLTRHLALRLNANEIKKLKPADADKLFKDPFAALAAKNNISAIAFLGTKAKQMERKILATTKLDKQFQVITSIPGVGNILGLTVMLEGDDFGRFPSPGNYSSYCRCVKSEKKSNGKKKGEGNRKNGNRYLAWAYVEAAHQIIRYCPEANRFYQRKKAKRNGAVATKALGNKLARATYCMMRDQTQFDVNKIFR

SEQ ID NO: 331545 - protein, 400 aa, unidentified
MKGFLHMKLIGIDIGKNKHFFCVMDQQTGEIISQPVSFSNDKEGFDFLVQEIKSYPKDSILIGMEDTGHYHFALLKYLLDLQYTVALINPKTTDFNRKMQGGITKNDKLDTINICDVLDTPERKKQYRITKVNSFDLYEQKQLTRHHHNLKEEENVYKNRLQKCIDIVFPEFNKLFNSKYGIVYMNILKMFGSAENIANTDIRTIRKCFEIEGRGNRISLTPERLKECAISSIGISSSAEVIQIKHLTAQIELIEEQLTEIDKKIEEFSIQNNSPILSIPGISHFSGTSILAELGDISNYSKPSQIIKFAGVAPLHYESSQFNAQHTAITKKGSKYLRKTLYQIILPVIRHNPVFNKYYQLKISQGKGHRCAQGHCVRKLLRIIYHLLKTNQQFDPQLLR

SEQ ID NO: 331546 - protein, 377 aa, unidentified
MGDYSEAFVGLDTSKLRNAVAIADASRGGEVRFLGEIENTPAATAKLVRKLSARYKRLTFCYEAGPTGYGLHRQIKDLGFECVVVAPSLIPKRPGDKVKTNRRDALSLAKLLRADELTAVWVPDGRHEAMRDLTRARETAMLDLRTKRQHVSAFLLRLGRPYPESRKTWTKAHASWIASQKLEHPQQRLVLEEMMLAIRQAQDRLARLEQAIAAAVPEWSLAPLVTAVMAMRGMDLISATTLLAEIGDLSRFQTPTELMAYLGLVPSEDSTGDTVKRGPITKAGNRRARRMLVECSWSYQHPPRVGQAKQPKVDAAPLAVREIAWKAQCRLYRRYRALIRKGKRKTVAIVAIARELAGFIWAVARAVSTGRVAAATA

SEQ ID NO: 331547 - protein, 345 aa, unidentified
MKKPDYFIGIDVSSQTFSVSVGMHPWRILGGTCTSYENSAQGFEEFLTWLGKQGYTPDKSIVCMEATGVYGQALAYFLVAHNYPLAVEPPLRVKRAFPTHGHKNDITDSQHLAEYAYRFFDELHMWQPPDNVLKQARTLLKTREQLTKNLSSYQRTLKILKREVVRTPMAEQMYEDLIKELRSLVKEIDKQIVSLMEQHPFFRHKIKLLLSIPGVGLQLAAYILVITQGGRRELRPRELAAYLGICPYEHTSGTSVYRRPHSRKNGPGSIRKLIYLAALSLRTHQDSFHEYFMRKVAQGKPKKLVINNISNKLLRIICAVMRSGKPYIPGYVSLHPESLRIKKCA

SEQ ID NO: 331548 - protein, 359 aa, unidentified
MIAVGVDVHKRQCTVAIQTEDGELACFGPMENTREGWRELLRQLPPETEIALEVSTSGYFAMSVLEEAAWLDRAHWVHTAGIDSLRKQKYDRLDAKRLARKLSVAHQDRLPEAWFPPPEIRQLRLRARQRCWLAGLRAQVKNRLQSLLQMHGLRSPATDLFGAAGRAWLAAQVLAEATRETGEQLLRVHDFLSQELVKAEGSLRAVDCQFPELARLRTIPGIGEILAPVIWSEIGRLERFRSARALANYTGLVPSLYESGEVSIRGGITHQGSAWLRWALVAAANSAIQGVNPFARRYRRLRRSKTANVAKAALARSLAHCVYGVLKSGTNYQATRWGRHPGWRVRSWGAGQPEVGIGH

SEQ ID NO: 331549 - protein, 339 aa, unidentified
MMMCYAGIDLHATNSVLVVIDDADRVLYQKRLRNDLPLILAALEPYRVAVQGVAVESTYNWYWLVDGLMDAGYRVHLAHAPALPQYSGLKHADDQHDARWLAHLLRLGLLPTGYIYPKAERAVRDLLRKRSQVVRHKTRVVLSLQSLLTRLSGTRLSLPRLRQLTPEGVRALVPFPEQVQAVMSSMTVLQCLEQEIRTIEGTVREAGRTQPGYALLQTVPGSGPILAGTILLEAGDLQRFATVGHFASYCRCVGSEHVSNGKRKGAGNTKNGNKYLSWAFIEAAHFAIRYEAVIRNFYQRKQARTHPLVALKAVAHKLARACYHMLREQVPFDVSRAFG

SEQ ID NO: 331550 - protein, 442 aa, unidentified
MVAVMIGIDPHKASHTAVAIDPAEVPLGQVRVRACAAQAVRLLGWAQAWPQRIWAVEGAGGVGHLLAQQLAAAGERVLDVPPKLAARVRLLATGNINKNDPNDARSVAVAALRSAGVREVRRDDHAAVLKVWSKRYRDLGRARTQVACRLHQVLCELIPGGVPGEITAAQAERVLASITPAEAVQAARWELAAEFTEDLRGIDARIRQTRTKLAAAVAAAGTSLTGLFGVGPVIAAAVIGDVGHVARFPDRDHFAAYNGTAPIEVSSGGRKIWRLSRRGNRRLNHAIHMAAVTQIRHRHSQGHAYYHKKLAEGKTGKEALRALKRQVSDAIYACLQADARRAAAHLKSPGGQPGNGSGSSAAGSHPGHRLFGQATPGPATYPTTPAATCPAPLPSRASGRPAQGPGAARPRQRRPQGVLDPAAREPIMPAAGRKATGPAGHR

SEQ ID NO: 331551 - protein, 346 aa, unidentified
MKKVMAGIDLHSNNLVVGIMDQDGKRVGQQKLPCELKAVVKFLAPFKKRLEQVAVESTYNWYWLVDGLQALGYPVVLGNPAAMEQYRGIKHAGDTHDAFFLAEQLRLKILPTGYIYEAKLRPVRDLLRRRLLLVHQRTALMLSFKSLYTRTTGQEMTLGELKALESKEAQQLYDHPANQLIAGMQIKHIAHLSESIEKIEKAVLASARELPSYSKLTSLPGVGKILGMTITMEVGDIQRFVQAGHFASYCRTVAAQCISNGKKKAENNSKCGNKYLAWAFVEAANFARRYDEHCRQWYDRKAAKTSKVIATKALACKLAKAAWHVMSQGSEYDAQRMFGRPTKMKC

SEQ ID NO: 331552 - protein, 359 aa, unidentified
MDAQEGAVRRIIGGVDTHKDLHVAAVVDEQDRVLGTQSFASTRQGYRQMLAWMRSFGEVQRVGVESTGSYGAGLLRFLQQAGVTVLEVTTPDRQDRRRRGKNDDFDAQNAAHAAFAGIRTVTPKSRDGMIEALRVLSACRKTAVTARRIALQMIQNTIVCAPESLREMLRRMTRMQLVRTLAAWRPDLTAYRDVEAAYRISLKSLARRYLELHDEIADLDAMIAAIVDELAPNLVARNSIGHVGAAQLLLTVGDNPERLRSEAGFAALCGVSPVPASSGKTARHRLNRGGDRAANSALHIIAIGRLRTDTRTQAYVAKRIGEGHSKLEAIRCLKHYIAREVFMLIKQHQREINQTRIAA

SEQ ID NO: 331553 - protein, 397 aa, unidentified
MQKGKNGTGMKKSSKKKTKQAERKAKATRREELVQLSALVERQPNTLVIGIDLGDKTSSYCVRTRDRQVVTEGVVATKAEAILESFREIPRQLMVMETGTHSRWVAQLLHLMGHEVVVANARKLKLISENNQKSDRVDPRLLSELGCTNVDWLHPVYQRSEGKHCDLLVVRAREALVEERTGLINHVRGTVKSYGCRIRKCSAESFVGVAGLAIPEALQPASSGVLETLEEIGEQIYRYDAQIEHLCQTKYPETQWLRQVKGVGPVTALTYVLTIDDPHRFESSRDVGAYLGLVPKRRQSGQRDPQLGISKTGDELLRKLLVNCAHHMMGPMGAESDLRRWGLELVAASLRAGKAKGARKRAAAAVARKLAVLLHRLWVEEEEYEPLHKGKSDEAAA

SEQ ID NO: 331554 - protein, 390 aa, unidentified
MQPTQVQDVTRNDEVLAVSLELASKSWKVGLDDGKRKSPAVHGVDHAEPEGRLDEAMAVIEKAKKKWGLAPGVRVVVVYEAGQDGFWIQRALSERGYEALVVDAASIPVERKSRRAKTDRLDAVRLVVTLRAWLRGERDRMKVVRVPAVEAEGQRHLVRDRGTLQKEIGQHRDRMRKLLGTVGCWGSIEGDLKGRLERGEVTGYNGNALPAWLQERLVRECVRLKLVEEQLAQLDKTLPGQLPEAVRQRMVQLMQLKAVGRVGAQRLMLELFWRQFNNRREVGSCVGLVPQPYDSGESRVDQGISKAGNRRVRALLIEMAWMWLRWQPHSELAHWFAQRTRGTGSNKRSKRMAIVAVARRLVILLWRYLKDGVLPQGVELKPVKVTLKVA

SEQ ID NO: 331555 - protein, 410 aa, unidentified
MEPMHQRVAGIDVHRMKHVVTILIGQEDGAVSSQTREFGGFKRDMRALVAWLQTHRIQQVVMESTGIYWKSVFAHLEAAGIPALVVNAFHVKNVPGRKTDVGDSEWLAQLARFGLLRGSFIPPQDLRELRIVSRYRRKLTGMLAGEKNRLHKLLDDAGIKLGGVVADIDGVCASKMVEGLIAGGKPDELAALGRGKVRATTDILEAAMDGELSARHRLVLDMAYDHLRYLEGKLTALDRYLVAAMQPYAWAWRLLQTIPGIDAISAAMILIEIGDDPHRFGSSARLASWSALCPGNNESAGKRKSGKTRHGNPIVRYLLCEAANAARRTKTVFRAKYESLVIRRGHKKTIIALAHKLVRTIYFVLVRRKPYRDSTVDYEAASVAKNAPRWIRALKKYGYWPRSPLQTCQP

SEQ ID NO: 331556 - protein, 346 aa, unidentified
MEYYVGLDVSLKEISICVVDRDGETVARGVCPADPEGVAGWFRNRELTPRRIVHESGMLSIWLQRGLAGLGLPATCIDARKAHKSLSARLNKSDAADAEGLAQLARTGWFTPVHIRSEEADRLRSLVGARERLVRLRKDLEGHIRGVLKTFGIRMIGIGQGRQRQAFRDQLAAAGETDPVLRAIADAFIAAHAKLCQVADDLDKAVKKTAKAHPVARRLMTIPGVGPVNALSFIALIDDPGRFSRTSDVGAFLGLTPKRHQSGEMDWSGRISKCGDRAMRGLLFEAASCVIHQVKCFSRLKSWAVRLAGRRGFRKAAVATARKIAVLMLTLWKNGTDYQWTKEATA

SEQ ID NO: 331557 - protein, 371 aa, unidentified
MRFYQGQHRFYCGIDLHARSMHVCVVDHAGDIVFDRSLATRPEALLRALEPFRDGLVIGVECMFAWYWVADFCVMQDIAFVLGHALYLKAVHGGKAKNDRIDATKLARLLRGGNFPTAYAYPKGMRETRDLLRRRTYLVRKRAELLTHLQILNAQYNLTPFPKKLCFAGNREEMKIAERFRDASVQKNAAANLAVIDRLDEVIADLEQYLSRTAKIDRVQTYHRLQTIPGVGKLLALILLYEMHEAQRFDSAGQFLSYARLVRCAHESAGKKLGTGGKKIGNGHLRWAFAEAACLFLQRSERAKKWKERQAAQRGSGKAMAILAARLARAVYHMLRKGEAFDEERFWAGDARRTPTGSSSLFGKEAQHARA

SEQ ID NO: 331558 - protein, 343 aa, unidentified
MDHFAGLDVSVKETSVCTVDDTGRIIREVKVASEPEALLEVLRNPAWHFKRIGLEAGPLSQWLFSALAEAGLPVICVETRHMRAVLKAQINKTDRNDARGIAQMMRVGLYRPVHVKTLRSQKLRMLLTHRKLLQSKAIALENDLRSTLRNFGLKVGMVGAVKFEGRIKELVENLPDLAVLVEPLLVVRRVLHEQIVILHRRLLDIVRNDDVCRRLMTVPGVGPVVALTYRATVDVPSRFKNSKAVGAVFGLTPSRHQSGESDRPGAISRCGDEMMRVMLYEAAQVMLTRTNKWSWLKAWAMKIARHHGMKKAIVALARRLAVIMHRLWVDGTEFRWTREVVAA

SEQ ID NO: 331559 - protein, 341 aa, unidentified
MKNLFIGVDFSKEKVDVAIIFADGLTETAARVFNEFKTTVSGYKQLVKWVEQNSYGIDSSLWLFCGENTGDYSKGLCNFLYGKGYDMWLENAKSIKDASGLRRLKSDRADASMIAEYAMRNYDKAIMYVPLSESLAQLRELFLYRQMVVRHRCSFQVRRGEKRLTMEKSPVKTMISQSGRHIVSELNKEVEKIDRRIAELIKSDEELTEVFTIVTSVPGIGTQNAVCLMVYTDNFRRFNYDSRKISCYYGIAPFGKDSGTSVHSDPHVHYMANRQIKAMLTQAALAAVNFNPVMARYYMRLVERGKKKQVALNNVKNKLVHLVTAMVRNRQTFTPEYKISA

SEQ ID NO: 331560 - protein, 361 aa, unidentified
MGDATTSEETKVTVGLDLGDRHIQVCVLDEAGEVIEEARLATKPQALRRRFSGADPLRIVLEAGTHSPWVSRLLTELGHEVIVANPRKLRLIYQNDSKSDRVDAEYLARVGRLDPALLAPLTHRGAETQADLALLRSRNALVRARTRLISHARGTTKSLGARLPTCSAAIFAAKAGGCVPDELRPALSPVLAVIAGLCAEIRALDERIEEMARQRYPETALLTQVPGVGTLTAVVYVLTLEDPERFPRSRSVGSYLGLRPRQRDSGSLQPRLRITKAGDEHLRWLLVGAAHYILGPFGPDTDLRRWGLGLAAQGGRAGKKRAAVAVARKLSVLLLRLWVTGEVYEPLRNARLRRELLAAQT

SEQ ID NO: 331561 - protein, 387 aa, unidentified
MYHYTKGKEIQTFSTKTVFLLQLIDWIKKHNCTHVAMESTSVNWKPIVNLLEAEDIELLVVNAQHTKAVPGRKTDVKDAEWISKLLRHGLLKASYIPDRNQRELRELVRYRRSIIEERARQHNRIQKVLEGANIKLGSVVSDVMGVSARDMLNAIAEGEEDPQKLANFARRTMKKKKEELKIALKGYINSHQRLMLKTILKHIGFLTEQIEMLDQEVAERVSSHQDDVERLDSIPGIATRMAEQFLSEIGTDVKKQFPTAAHMCSWAGLVPGQNESAGKRKSAKTKKGNKYLRSALTEAAHSVRGSKNYLGALYRRTASRKGRKRAGIVVAHAMLRIAYYLLTRKEVYVDLGEGYFDKQREQSIVRHSLRRLESLGYTVSLHVPEAS

SEQ ID NO: 331562 - protein, 390 aa, unidentified
MEPKPRVTQIGLDCHKKFSRVTARDENGKIAWRQRLEHANRDELRARLKTWPRGVPVVLEGTFGWGWLSDELKEAGLEPHLANSGKVAAWRKARGIAKSNRTDADLLSELPTESTWWEVWLAPPEVRDQREWLRYRMGLVKAQTQLKNRIHALLHRHGIVHEYADLFGTQGRRFLSLLVAPKDVTLRDSARSTLKGHLQLLDQVRRHIATATRSLRRQIKRNPTGERLRTLPGIDRILAYTILAEIGRIKRFASAKRLASYSLLVPRANDSGDEDDEIPKGRHVGRIGRRTLKWAFIEAAHGAVRKGGRYRAIFDRRTNGGKRDRNRGYIAVGHALCHATYGVWKKEIAYTADPPPRPGSRSASRTSRPGTGQPDLARVAAVVGSLQTSL

SEQ ID NO: 331563 - protein, 355 aa, unidentified
MIAIGADVHKQQCTLAVQRPDGKLSMLPSMDNTRENWLDLLTQLPPEAQIALEVSTSGHFVMSVLEEAGWRDRAHWVHTAGIDSLRKQKTDRLDAKRLARKLSVMEQDPLPEAWFPPRPIRELRLRARQRCWVAVLRTRVKNRLKAIYRGRGISYQGAEIYQTKQQAEWLGKLNERGVKRRAELLYQQLESLDALVKEARREMLAESRKQKVSRCLRRISTLGSISVALLIATVDTPHRFRTKRQFWTYCGLAVVTRTSADYYFDQGALRRSRRPVVTRGLNQNYNRRLKRIFKQAALTASRRGPFKPYYERLLARGLSEELVRVTVARKIAAVTLAVWKKGAQFDPEKILKPTT

SEQ ID NO: 331564 - protein, 334 aa, unidentified
MALKIAYPIYCGIDVHKSFVAACIASTDDKSVTSYKRWRFSTFSKDLRLLAAWLSDNQCKDVCMESTGKYWIPVYNMLEASCKVVLAHPKYVKAIRGKKTDTRDAQWIADLFKHDLVAGSFIPPAEIRQLRDLMRYRAKLTNFTVGEKNRAQNCLTVSNIKLDDVFTDVFGKSASAITEQLLAYPDGSFDVVPLIDRRCKVSPEDVQAAINGLMCAQQVEKLKIIRSHMNALELCKANLESKLLSLAEQFRPQFELVMTVPGIRLFSAIAIISEIGTDMSVFPTAKHLCSWAGLVPQNTESAGKKTTRVSHACAYIRPLLVQCALTVCNSDKHP

SEQ ID NO: 331565 - protein, 346 aa, unidentified
MLIIGCDFHPGFQQVAIFDNRTGEMQEKRLQHRAEAEEYYGSLAGQSVRVGMEACGHYPWFERLLAGLGFQLWFGDAARVRAAVVRKQKTDRRDAEHLMNLLLQDRFPRIWVPSLEVRDVRQLLVHRHKQVQARTRTKNQLQAMALSQGVQKKYKLWTKAGREELEQLPLLPYAAQRRQQLLRALDGVEAEIRELDRRVAEEARQRPEAVRLMTHPGVGPVTALAMVLTLGPADRFESPKQVGSYFGLIPSEESSGGKQRLGRISKQGSSFLRFLLVEAGQTAVRLDPQLKRFYRRLAARKNRSVAKVAVARKLATRLYLMLREDWTYAQLSQALMQVSPSHSVAG

SEQ ID NO: 331566 - protein, 342 aa, unidentified
MAIAIVGLDLAKHVFQVHAIDETGRAILRRQLRRANVEAFFKTLSPCVVGMEACGSAHYWARRISALGHEVRLIAPAKVKPYVQHGRKNDANDAAAIVEALMRPHMVFVPIKNEEQQAVLMLHRTRDLLVRQRTMLVNAIRAHLAEFGIVAAQGRRKVKALITGLDNTEIPELARLALWQIADQIDECDKRIDALERRILAWHKSDEASCNLATIPGIGPITASAMAATVPNPSAFRNGRQLAAWLGLVPRQNSSGGKDRLSGITKTGNTYIRRLLVIGATSVIRFARSKAPGTAEWLKKLLQRKSARLASVALANKMARIAWSVLTRGEVYRDIHPVPKPT

SEQ ID NO: 331567 - protein, 392 aa, unidentified
MDKPKLQKPINDLSRSFTPFDPNHTLIAVIELSKSSWLVAGIIPGVERQPLKKLEPDENQLLKLLGRWRTEAEKAGHKIKRIAVAFETGRDGFWLARWLRARGIDAHVIHAASVAVSREHRRAKTDRLDTEQLKRAFFGWLRGEREHCKMAVIPSSAEEDAKRPHRERETLVGEQTTIINRIKGTLARLGIRNFNPKLKKAPERLEHLRTPEGEPIPPNTLAELHRDMQRRRLVNEQIRKIEKSRLEHLKQAPNTGPNLMVRLLARVIGIGIETADMLVQEILSRNLRDRRAVARYGGLTGSPDESGKKRREKGLARSGNARVRRGMIQLAWRFLEFQKDSALAKWFRARTENARGSRKKMIVALARKLLIALWHFVHTGAVPEGVLIRPAD

SEQ ID NO: 331568 - protein, 351 aa, unidentified
MKTQTKILSKLWIGIDFHKKTWRIHFRSDRFSGNPFSMEPDPDLLYQKVVSEYTDYEVEVVYECGCFGYWAHRKFVSYGWISVVVNPCDIPRVNKQRFTKTDSIDARNLSKLLKAGLLKSVTIPDVEREQLRSLFRRRVQTVMNTRSVKNRLKAQLLYYGIKIPIEMDNAAWTKNFKQWVKEIKWDYETGKQMMLSNMKQVEYLHYETNEISTQLRKYCRKNHKKEYDLLRSVPGVGPLTAICFISEVGNISRFKNFKQLACLVGMMPTTYQSSETKRTQGLTPRALRIMRSYLVEAAWQAVRIDPVLREYYKSHKGKKANDIIVKVARKLLSRMYGVLRTETEYEIGLLK

SEQ ID NO: 331569 - protein, 304 aa, unidentified
MFGIGIDVSKAMLDVAVHEEQFRQFSNDQRGFASLIRWLKKWPIKQVVLEASGGYERAALEALHSAGLPLVRINPARARRFAQGTGRAAKTDRIDATVLAQMAHLLSLTRYVPPAPWQQRLAEFAQCRRHLVQMRVSEMQRLRRVVDPDLIAMKQRPIAQLSEDLKQLDKAIAKQLEGQAGWRDIGSIKGVGPILVSTLACELPELGSLGGKAIASLVGLAPMNRESGTWQGQRRISGGRAVVREALYMAALTAIRYEPKLRDFYAGLKAKGKASKVALVAVMRKMLVILNARKRDAEVALGVP

SEQ ID NO: 331570 - protein, 345 aa, unidentified
MNITTVGIDLAKNVFQMHGVDVRGKVALRRQLRREQVATFFGNLPPCLIGMEACASAHHWGRTLERFGHRVRLMAPQFVKPYVKANKTDVADAEAICEAVGRPNMRFVPIKSIEQQGILSVHRVRQGFVKARTAQANQIRGLLGEFGLVIPQGICHVARCVPALLEDASNELPLAFRQLIDRLTGHLKDLDQQVRELERQIIAWHRGSELSRKLEKIPGVGPLAATALVASIADARSFKNGRQVSAWLGLVPRQNSSGGKSTLLGISKRGDVYLRTLLIHGARSSILAAKRQGGNKNVWLANLLNRRHANIAAVALANKNVRTVWALLAHGRDFKPDYVPIRAAA

SEQ ID NO: 331571 - protein, 460 aa, unidentified
MIVRIGVDIAIRAPHQATLADERGELLWSGHRFRTSPADLEQLWSRLPDGVAAADVTIVMEPTRNAWVPLAAWFRRRGAAVVLVPSERSADLRAYYAKHTKSDRLDSVLLARLPLLHPEGLYSERGLGPGDPLRRATKLHSTLVKRRTASIARLDALLEILGPDWHAAFSGDLSNKTPLHFLAAGYGDPVAVRRIGRTRLARFLGRHSRGAWGEPTADLILAAAAASREIWGDELEFSDLAEDIAVEARLALRLTDELKDLDDRIGALVRERDPHGIIASAPGVGPVTGAVILGRLGDPGRFRSLAAVRSFSGLVPSLDSSGVSGHHGGPTKHGDALLREALFISADQARRQDPTLAAKYHRLMVETGKHHNTAICHLAATLLTRIAACWNAGTPYELRDVDGTPVTKSAARAIITDRYTVPDSLRRTRTTTRTSRRSKESQRAPSTGPFHHQANHPSAA

SEQ ID NO: 331572 - protein, 338 aa, unidentified
MKFYAGIDLHSNNSVLVILDSNDKVIYSKRLPNDVQSILGVLAMYKEQIDAVAVESTYNWYWLVDALQAEGYEVRLVNTAAVVVYDGLKYSGDKADARHLAHLLRLGLLPCGYIYPKEPRALRDLARKRAQLVRQRTTQLLSIKNLLARNCGQDTSSAVIKKWTEEQITQLPLLPEQRLALQANWTVMQALEQQINVVESELLRQLKPNKEFQLLKTMSGVGDILSMTIYLETGDIKRFDSCGQFASYARMVDSTRESNGKKKGEGNRKCGNRYLCWAFMEASHFAIASNEAIRRFYQRKCSKGPKVVAMKAVAHKLARASYNMLKDGVEFDVKRAFS

SEQ ID NO: 331573 - protein, 340 aa, unidentified
MSTTTDHYLGIDVHKTDAYVAVMDEEGELVEEVRVANADLDEVAQKYEGSQAALEAGSNHFTIYDELEQYVDVTLANPAKADWLATQRQKSDRKDAKNLARYLRLNDVPESYVPPEEYRRYRALARGRKKFVDKRNDFKNEVNSLLDRNGITYDGSLWTDEGREFLDELTLGEPSQLLLEKWLEAIDEFTEKITEIQEKIEEVAVDVEEVDLLMTVPGIASYSGLMIHSEIGEVERFDRAAEVVSYAGLDPVIRESGDSRREGAISKEGNGNLRWILVQCANVAVHNVKDPYLSQFYWRLRNKRNKPHKVAIVATARKLLVALFNMLRKNEPYDPPEVSA

SEQ ID NO: 331574 - protein, 447 aa, unidentified
MFFVRAAPGCNLPNDLASGMLLAFLDTGVTRIGTDHVFPTVQQFVDLRDVRHIGRRDYHAMHQTRFIIDADMGFGTEVILVALMRWSARFEKLGESKLTRFLSFPKEDLMSTVTLLGIDIGKNTFHLHGQDARGNQLLRKKLNRSQLLPYLAQLPSCKIAMESCGGSQWLARQIEGLGHRVQLIAAQHVKAYVTGNKNDFIDAEAICEAASRPRTRSVPVKTLEQQILSTEHKLRKSWVDSRTRIINQVHAFLLEFGIIFPVGHAALEQVPALMEHHELPIRLRNAVERMLLDIQRLTKDIKAIDVEFKQQLSEDAAGMRLLSIPGIGPLTASALVADVGDASIYKSSRDFAASLGLVPRQYSTGGKTSLLGISKRGDKYLRCLLVQGAHALMIRIDKRNDALGAWVRNLLARKPPNKVACALANKMARIVWAVLARGGSYNVQHIA

SEQ ID NO: 331575 - protein, 430 aa, unidentified
MKKKNHSNEKLEAITFKTLIVGVDIAKHNQWARFVDCRGIEHNKALKFENNRNGFNAILTRIYEICKNEDFNMVIVGMEPTGHYWKAFANFMLKQAKITVVLVNPYHTKKAKELDDNSQTKSDKKDALTIARLVKDGRYFETYLPHDVYAELRGLTTTRHSMNKRKKSIINTITAVMDEYFPEFETVFKHPFKGKTSMHLLKVCPIPKFILELGEDGVLDEIRKAVKKTVGRKKAAQLVAAAKDSIGVDYGEYAARFKIQQLMEELELIIGQLDVLEAEMAETLKKTEISEYLLSIDGMGVVSLATCLGELGDPLRFEDARQMSRLAGYNLIEDSSGKNKSGTCISKRGRKNLRSVLYQISLTMVATNREMRQLYDYLKTRENNPLKKMQALVVVSKKVLTLIFTLSKKKEYYQPELVFGEYRKSQLLAA

SEQ ID NO: 331576 - protein, 407 aa, unidentified
MLNAVGIDVSKGRSTVAVLQPGGVVVRKPFDVYHKQSELQELSSFIKSLDGETKVVMECTGSYHRPIVEVLHRAGIFVAAVNPHLIKNFGNNTIRKVKTDPADSKKIARYTLDNWDRLQEYSGMDAKREQLKTMNAQFDFFMKQKTAAKTNLISLLDNTYPGVNDLFDSPVRNDGSEKWVDFAYSFWHVDCVRKLTLNAFRDRYMAFCNRHGYQYSESKADEIYNASKELVAVFPKEEGYKQLIQFSIKQLDLESEHVEKLRADMNELASQLPEYSIVMSMYGVGPTFGPQLMAEIGDIMRFSHREALTAFAGVDPGKDDSGQHNSKSVSASKCGPARLRKTLFQIMSTLIQKMPPDDPVYKFLDKKRSEGKPYYVYMTAGANKFLRIYYGKVKEYMRSLETDQSQS

SEQ ID NO: 331577 - protein, 283 aa, unidentified
MHKFSIVAATLPPAGGQPRVERIETTEKAIRRLIDRLGGGEGPAVCYEAGPGGFALWRLLTSTGVACDVVAPSLIPVRAGGRVKTDRRDAKKLVTLYRAGLLRFVAPPTPETEGLRDLLRCRDDIRCARTAARHRVGKQLLRHGHVFREGKKSWTARHRACVRRQRLAGRLAHEALVQMLICLDGLDRQLAALDAELEQIAGDERWGWQVAKLRAFGGIGALTALGLIAEIGDFARFGHPRELASWLGITPSEYSSGERQHRGHITRAGNHHARRLLIEAAWH

SEQ ID NO: 331578 - protein, 342 aa, unidentified
MVVLGADVHKRTHTFVAVDEVGRQLGQLTVSADGKGHAKALRWARARFVGERVWGIEDCRHLSARLERDLLTGGERVVRVPPKLMAQTRASARTRGKLDPIDALAVARAVLREPDLPVGAHDEVSRELKLLVDRREDLVGERTGMINRFRWQLHELDPHLDPSKGSLDRAKTRAQLAEQLASHTGLVAELARDILADIDRITDAINGLERRISHRVEEQGVALIGVPGCGALTAAKLIGETAGVARFRSEACFARHAGVAPIPVWSGKTAGRVRMARSGNRQLNAALHRIAVTQIRLDGEGRRYYRKRLMAGDSRTEAPPPACNQQRLDIGVTHADGPDHHC

SEQ ID NO: 331579 - protein, 462 aa, unidentified
MNNKPSTDRARKRLSKHLEQINLYAAGIDIGSESHYVAVPEGLDDEPVRCFSCNTGDLEKLADWLVQIGIQSVAMESTGIYWIPLFEILEERGLEVLLVNARHVKNVSGRKSDVLDCQWLQQLHTYGLLAGAFRPPEQVTALRAYMRQRGTLVRYAGSHIQHMQKALRQMNLLLDNVVTDITGKTGMTIIRSIVKGERDPNKLAAYRDRRCKKSEQAIAQSLHGHYREEHLFALRQSVELYDTYHAKILACDEAIEQQLKRFDAQGDPQQLPAGKKNKAANAPAFDVRGELYRMSGVDLTAIDGINDITALKVLAEIGTDMSRWKSEKHFSSWLGLSPGNKISGGKILSSKTKPTTNRAAAALRMAAFTLSNSKSALGAYYRRMRSRQGAPKAITATAHKLARLIYSMLKHGTEYVDQGQDYYEQQYQDRVMKNLKHRAALMGFALVPSSGDNGSVLEESTA

SEQ ID NO: 331580 - protein, 506 aa, unidentified
MLWPYHLGHVQKQRLVSYFAVRQKKHPAYNIFNTSDATCWRLFYKIKNMNKEEQKTERYERMPVVNPSAAGVDVGSSSHFVGIGQNKEDVTEFGVFTENLHALCKHLVANKITTVALESTGSYWQPLFVLLQQYNLNPILVNGKFTKNVKGRKTDVQDCQWIQKLHTMGMLEGSFLPDLFTEKVRQYYRHRQTLVDNAAGYINKMQKALRLINIRLDSVLRDVMGRSGKDIIEAILKGERDPKVLSSLAQPTVKKSKEEIIAALTGDWREEYIFELRQCYEIYQHYHKKIDECDEAIKQLLAAEIKRKQKEENLPLAKDIKIKKKKARKNEARINVQQLAVDLTGGVDISAIEGVGLGLVLCIIAETGLDLKAFPTAKHFSSWLGVAPNIKKTGGKVINSRTRKGKGRLAKAFMHSANAIGNMQNSNYLLHFFKRKERKIGRAGAITATANKLSKIIWNMLVKKQSYCPIMPQQYLDKIRKKEVKNIQRKINQLNIQDNEILFAVA

SEQ ID NO: 331581 - protein, 348 aa, unidentified
MIVIGIDSHKRTHTAVAVDGTGRKLAEKTLAATSAGHLELVRWAARFADRTWALEDCRHLSRRLSNDLLVAGERVIRVPPKLMAGARRSSREPGKSDPIDALAVARAALREDLPVATLDGPDREVRLLVDHREDLVAERTRAQNRLRWHLHELDPGHEPVARGLDRMVVLAAVERDLAAAPGTVGRIARELVVRIRDLTATINGLEREIEGLVADLAPSLLALTGCGPLTAAKLVGETAGIGRFRSRAAFARHNGSAPLPVWSGNTERHRLSRTGNRQINVALHRIAITQLQREGPGRSYLEHRRVQGDTKPEAIRALRRRISDEVFRRMRNDEAARAASPSGLAAAA

SEQ ID NO: 331582 - protein, 371 aa, unidentified
MSAKTLATKRRRKNEDKDEAREFSNDAAGHRELLKWIGKGARVCMEATGVYHLQLALMLAAARVEVMVINPRVAKDFGRALMNRSKTDRVDASTLLEYVWRMDFVAWKAPRAAVLELRELGRRLSELVHAGAEEKNRFHAKNVAAISRTVIRDVEAHVAQIEKRVQQIEKAAAVVIRGDAGLSEQYAILTKIRGVARRSAILLLTELAVLDPTMTVKQIVGHAGLDPREYESGSSVQKPTRISKLGNARLRAILYMPTLTAIRHDRGARLFYAQLMARGKKKMQAIVAVMRKLLHGIWIVLQRRMTFDSSILFAASLAKAESSDSAVAANQPEPRQDHPKGRSEAEELRQQLDPGSAEATRTRRRKRSKAA

SEQ ID NO: 331583 - protein, 560 aa, unidentified
MESCENVEKFHAKTQPGCFLVLAVNFSLRDNRINGTCNAPLRIAAALSLDDFLRTFERGAAFDYNAYSDDVLGRLYYRDCAGSKVRVQFGGKVMTEETVKNEYAAWIGIDWADEEHAVCLRPAGSDKTEHSQVKQKPEVIQEWIHQLRNRFHGGKIAVALEQSRGALIYMLMNFDFLVLFPVNPKTLKKYREALRSSGAKDDPADAELLLDFLQTHLKRLRPWKPEDEQTRKLRMLVEFRRKVVDEGSSLSRQMEQYLKGYFPQALEWITDLKTVMACDFLMKWPSLQALKKAKPAQLRKFYRKHNCRNNEVIERRISEILPAVALTHDEAIISASVLMIQAQVSQLRELLAAVERFDKQIQNTFESYPDRFLYESLPAAGPVLEPRLAVAMGLDRDRYQDAIQLQQFSGTAPVTNTSGKKRWVHWRWACPKFVRQTFHEFAGCSIPVSLWAKAYYQQQRAKGKDHHAALRSLSFKWQRIIFRCWKDGKPYDEKKYLEVLKRRNSPLVKLLNLPKPPKAPKSSHSSWTNAGEIITELRQNFVKNNVEKPKKEHKNIEKNT

SEQ ID NO: 331584 - protein, 327 aa, unidentified
MAKHTTICAGIDTGKRKLDVALDGSSEPLQIDNTPEGYKVLLDWLRCHRVKRIGIEASGGYEQAVVTELRRKRFVVVTFQPAQVRAYAKFHLQRAKNDKIDAALIAACTAAVKKIHPPPDARLLPFAEHLTMIDQIGEDIALLKNRLETCRNLRIQQVWKEDLARLAKRERVEFKALVAAIREHSDLAERLDLIYSVNGAGMPTAVTILVRMPEIGQLTREQAAALAGLAPYDDDSGNHIGTRHIDGGRKRLRRALYTAALPASFRWNPQLIALYKRLIAAGKGHKRALIACARKLLIFINAIVARGIPWDHEPPPNMAATALPQTG

SEQ ID NO: 331585 - protein, 339 aa, unidentified
MGLYAGFDLHSNNSYLGIIDETGKRIFKKKIPNEPATIKETLLPFKDNIEGIVVESTYNWYFLVDLLKEEGYRVHLANVLKSQQYSGLKYSNDKHDAFWLSEMLRLGILPEGYIYPKEQRPIRDLLRKRGHLVKLRTSLIVSLQNIVARNLGGYLKSNDVKILTKDRVSPLFQEHEDLALAGRVSKETIDFMTRQIKAMESIIDGRIHLSHPYDRLLSIPGVGRILASTIMLETGSIERFKNAGNYASYCRKVPAGRFSNEKKKGAGNRKNGNRYLSWAFSEASDHARLHDAESRKYYQRKLQKTKAPVAHNALAHKLARAAYYIMRDGVKFMPDKAFA

SEQ ID NO: 331586 - protein, 338 aa, unidentified
MNLSRIGLDLAKQVFQVHGVDRHEHVVCRRQLKRAQVRDFFRQLPPCLVAMEACGSAHYWARELRELGHTVRLIAPQFVKPYVKGDKHDAHDAEAICEAASRPSMRYVPVKSAEQQAVQSMHRVRSRLVRARTALCNEVRGLLGEFGLIATRRGRAATMALLETVMATEPASLPAPMGELLRELKDELQTLEARIARLERQIQAHVRGDARIQRLLAVEGIGPISASAVAASAGDARQFRTGRQFAAWLGLVPRQHSTGGQQRLGNISKRGDTYLRTLLIHGTRAVVRCCANKTDARSRWLQGLLQRRPANVVAVALANKNARILWALLSRETCYRPG

SEQ ID NO: 331587 - protein, 330 aa, unidentified
MNNYVDVIGIDVSKLTIDAQIHVRAVHRVFSNTPKGYRALLSWVETYLEEQVYFFCFENTGHYSTNLSVYLSENDIDYVEESPLAIKRSAGIVRGKTDKLDSAMIARYAWLYKEELVLSSPKEQDIQELGRLLSFRDQLVRDRTGKMSSLKEIQNLLSSPSTDDCCRIIKKTIHYLTKQIVALEDHIKKLMEKEESLQRNYELLNTLKGVGLILSCQILYHTGNFKRFDNWRQFSSYCGVAPFEHSSGTSIHRKNRIHHIGDRKMKTLLTLASVSAIQYDRELNQYYKKKVAEGKPKMVALNNVRNKIISRAFAVVRRGTPYVELQRFVA

SEQ ID NO: 331588 - protein, 387 aa, unidentified
MPQPNDLSRSLVALDQNSTIIAVIEMSQSSWLVAGMLPGIERQPRKKLEPSPERLLGLLHRWRDEAVRAGRTVARIAVAFEAGRDGFWLARWLAARGVEAHVIHASSVAVSREHRRAKTDRLDTELLKRGFLGWLRGERGHCSMARVPTIAEEDAKRPNRERDCLVGERTRIVNRIKSTLARLGIRNFKPTLRKAAERLATVHTPEGMPLPPNTLAELQRDMARLGFVVSQIKEIEDARQKRLEQEPETGPHAMVRLLARIVGVGVETADLLVHEVLSRPMRDRRAVARYAGLTGAPDESGARRREQGLARAGNARVRRGMIQLAWRFLMFQKESALALWYRARTADSRGGTRKTMIVALARKLIIALWRFVATGEPLEGVVLRPAS

SEQ ID NO: 331589 - protein, 389 aa, unidentified
MIVIGTDTHKRSHALSAVDEGTGRVRGSREINADESGHQAAVRWARTLDEERVWAIEDCRQVSRRLEQALLAAGERVVRVAPKLMGASRRGERERGKSDQIDAQAVARAVVKDGVDRFPVAYLDERAMEVRLISDHREDLVRERTRMQNRLRWHLLELCPELEAKLKRGALSDLRALGRLDRRLRRLAPSVRLRIAREELAHIRALTRQAGELERELLGLIRVYRPGLLEEQGCGTLTAGLLIGRTAGAQRFRSDACFGRQSGTAPIPCSTGQRTQHRLDRGGDRQLNRGLHTIAITRAQRDPATREYLARKRAEGKTKKGALRCLKRYLARRFWRLLTEPPVEPAHATEPVLAADPVAPDPITIPERPAPRREVDRTITGPMPMSCIT

SEQ ID NO: 331590 - protein, 386 aa, unidentified
MQKLNDFSRSLVALEPDGTLIAVIEMSLSSWLVAGIVPGVERQPLKKLTVDESALLKLLHRWREEAEKAGCRIERIVVAFEAGRDGFWLARWLKARSIEAHVIHAASVAVSREHRRAKTDRLDTQLLKRAFLGWLRGERDHCKMVDIPTIKDEDAKRPNRERENLVSEQSRIINRMKAALIRLGIRGFNPKLKRAAGRLDDLRTPEDEAIPPNTLAELRRDMERRRLVRDQIRQIEEARLERLDHAPGDGPHAMVRLLARVIGVGIETADMLVHEVLSRNMRDRRAVARYAGLTGSPDESGRKRREKGLARSGNARVRRGMIQLAWRFLLHQKDSALTRWFRARTENARGTRKPMIVAMARKLLIALWRLVREGIVPDGVVLRPAQ

SEQ ID NO: 331591 - protein, 361 aa, unidentified
MKTVRSNELNFDGQNIYVGIDVHLKSWSVAILSEHSVLRRFSQNPEPEALQKYLASNYPGANYFSVYEAGFCGFWIHEKLTGLGINNIVVNPADVPTMSKEKLRKTDAVDCHKLARELRSGSLEGIYVPGTETLEMRSLIRLRNLIVKDSTRAKNRIKSLLRFHGVEIPEEFIRCSIGCWSKRFLNWLHSVELSTEYGKKTLELHLEQFIRLRRMLLQETHAIREISRKEPFEKPIRLLISVPGIGITTAATLMVEIDDIARFSNAEHLASFIGLIPMCHSSGDNDAVGDITVRRHFMLRCLLVEAAWIAIRKDPAMTLAYGEYRKRMNPQKSIVKIARRLVNRVYYVLKHEKEYVPCVVK

SEQ ID NO: 331592 - protein, 346 aa, unidentified
MKNITTVGVDLAKEVIQVCNVTRDKVISNTEMTPQEFRCFLTKTKPCIVVFEACATSNYWKQVSLSQGHDARLISAKLVSQIRQNQKTDKNDALAIVQASQLTDIRFIQGKQFSQQELQSISRMRELAVKQKTATSNQLGALLLEFNIRVSNRNGGLNGVVQATLEDADNDFSSEFREALYETWQGYLALVSRIAKYDEHLSTSVENTPSCKKLMALEGVSTINAVNLYTTLACSGDSIFSSAKDASASIGVTPIQYSSGGRVKLGGIGRRVKNGLVRSNLISGAMAVIRQVSQREPRTVKERWLKALIERRGKKCAAVALANKTVRTAFAMLRDGTEYHAQALNA

SEQ ID NO: 331593 - protein, 525 aa, unidentified
MASTTATPPRGAIVRATVPASQGLSAIGVGIDTARYGHCVSFLRPDHQRAAAKLIVLENHAGYQALRERLEQLQQQHPQAHFHIRIDAAGQYANNLERFLRSLPLPMTLSIGEPKRNRDYQKAHFPKRQTDETESLAMARFAVVEGPAASAAVPEEMALLAEVAGRLQAQTKQATQAVNRLHNLLARVFPELATCVPNVAAAWVLELLAKYPSAAKIGQARLAALEKIPYLPKAKAQALHQAAAQSVGTLRGAVPEILVRQLVGEVQHTQATESTLRQLLVETYQTLPTGKHTHIASIPGIGVTTAAILVAKIIDIDRFATPEALVGYFGIFPEEHSSGVDKKGRPLPPGTMVMSPRGNDMVRAYLWMAALSGVRSNPALRALYRRLKAKGKRGDVAMGHCMRKLLHLVFAVWKTGKPFDAKHYPWIQEDDTQAPGTPAPETAATPAIGAASPVATLTTTPNEKAVGHKRDQVPEKQVVTTAPSSVDVGPAPVNPPSSACRPPLEMSPCYFIRNVPLGIRRGHLA

SEQ ID NO: 331594 - protein, 455 aa, unidentified
MQAARKSNDPRGYGLFPLRTLQTHPCSNSKTVDYTCTATKCPGRPSDVEIDSEYQFERRRFSSSPEQLRSLAAWLLEQEAEEVVMESTAQYWKPVWEALERYWKPICETREGARWKSGTLHLAQTLSNRGRRGRKRDFPDAERVVKRLVAQELTLSFVPDVKQRLWRTVTRKKYQLRCERIRLQNQLESLLEEAHIKLSSLVSDLLGFSARRMLKAIAEGETNPATLAALADQRLRATPEQLCDALGACTELNAVYRRLLMMALEELRLIDEQIGQLDQEMASLLSAHQDAVQRLAEVPGLGVDSAQQIIAEVGPTAATFPSQKCLPSWVGACPGDDESAGVNYSRRSPKGNRHMRRLLNQAANAAARAKGSLFEIVYRRSVPRLGHNQAIGAIAHRQCRLIWLILHQGVRYQERGPAVTKRSKQPRTWKMIRQLRSLGYRVEPPNPQPSQAQAQ

SEQ ID NO: 331595 - protein, 335 aa, unidentified
MDIAKNVFQVHGIDANETVVVRKRLRRSQVLAFFKALPPCLIGMEACATAHYWARELTKLGHRVRLMPAKDVKAYVKRNKNDAADAEAICEAVRRPTMRFVQVKSAEQQGQLMQHRTRDLLMRQRTQSINALRAHLAELGIVAAQGDKGVRELLFIVADEKDARLPIDARASVIVLAAQLQAVQTLIGSIEKRIKTQHRSNEASKRLETIPGIGVIGASAIAATVADPTVFRSGRNFAAWIGLVPRQDSTGGKQKLGPISKQGDRYLRRILVVGAHSVLRRAKQNPEKYLWLTQLLARRPFKVVAVALANKMARMAWALLAHGGTYRAPVLAAAA

SEQ ID NO: 331596 - protein, 401 aa, unidentified
MKNVAGIDVHKDVLEIAYRKAGDIQVEEIPYTPDGMTRIIKILRTHGIREVFIESTGDYYYPLYYALKGAGIWVNVMNAYKIKRPEPNKTDERDAVWLLRIGETKLFNPSYIPEDDFLALRILVRERMWLSDKIADLKRKVTSLCWRLGIRIKNLSSILRSRKRRRILLDILNGKGGGHGYDELSRVVKAVLRRRDVRAHIMILGIYLRTIDFLEEKLAKIDRELVSIASKFKGQVEILMSVPGIGFILAVGILSEIGDISRFPSPSNLASYAGLAPVVHESAGKARLVGASKKSNKYLRRYMFMAAMAAMHSKSPRIKAFAERLFSRGKHFKVVAVAVARKLLTIIWYLLTRNVSWSEENFSKMVKFPRRGGRKISVKEAILILERAGYEVRLKRFGEKS

SEQ ID NO: 331597 - protein, 373 aa, unidentified
MENSITYVAMDTHKKQHRVALVYPNDEEIIEFSVKNTPSEIRKMVRRIKRNAPGKVKFCYEAGVCGFTLQRRIEALGCKCSVIAPSLTPRKPGERRKTDRRDAKKLLGLFMADMLTEVYPPDEQQEAARELTRCREAAQENLKRIRHQMQKMLVRHGYVFIDGQHWTQKHLRWLEAVEFNQPLLREVFDCYFTEMRHCLQRVKTLDRELEKLAQSKDYREVAGILRCFYGINTLTAITIITEVFDFGRFASARDFMSYLGLTPSESSSGENEHKGPITKTGNKRARRLLTETAWHYRHAYTISKALNERREGQPQWAIDIADRAGLRLRKRYHRLVNRGKLPCKAVVAVARESAGFIWSVLIEYEARKKRKAA

SEQ ID NO: 331598 - protein, 370 aa, unidentified
MKVTRIGLDIAKQIYELHGVDRRGRVVVRKTLRRERVLEYFSQLPACEVALEACGGAHYWQREIGKLGHTVRLLPTNKVKPYLDGNKNNAHDAAAICEASSRPSMRWVEPKTIAQQDLQSLHRVRQVTVRQSTLLANHSRGLLLEYGIAVARGAAALQRARAELLEPDEQRLSPLLKQLLAAQWRMLKLHRQQVKVHDRRISSIARHDAGCRALLKVEGIGPITATALVAAAGNGRQFKNGRHLSAYLGLVPGHSNTGNQTVMLPITKRGNRYVRTLLVHGARATLYHARKKADPRSLWLQRLQAQRGHNVAAVALANKNARIAWALLRFGQAYRPNLAHAPTAERGATPCTARLPPIQNPAFFRPALKG

SEQ ID NO: 331599 - protein, 397 aa, unidentified
MYIVGIDIAKRKHEAAVIDGEGTVIIKPFSFTNNCSGYNRLLAMLAKAKLPLDEVSFAMEATGHYWLALFTRLQKEGFRVQVINPVQTNSIRSFYIRQAKTDPRDALLIAEVIRFGHFSESTLHPENIYELRELCRGRHAIVSMQADIKRKVVALLDQVFPEYETAFTNLFGDTSMAILQTCPTPKELSEMPLEELCHLIEVSSRKRFRMAKAQELQELARNSFGFAMAGDVFSTMIRLYAKHLVFLKQQVQEMDRKIAEIMDTLDTPITTITGIGPTLGAYILSEIGDISRFSSAAKLAAYAGIDPTMRQSGEYNGVRNRMSKRGSPYLRHAIWLAASSAVLHDPALKLYFQKKRDEGKPYMASVGHACRKMVSIIYAVMRDNKAYTPYIPNEISA

SEQ ID NO: 331600 - protein, 459 aa, unidentified
MARKKRAPEEIPDQEFEQVFERVCAIDVAKEFGQVCVRTPRADGQHASRVFEVDAITGDILNLGELLLEQGIEMITLESTSDYWRIFYYLLEGCGLRVQLVNARDVKHVPGRPKSDKHDCVWLAKLTERGMLRPSFVPPGEIRVLRDYTRTRVDLTRDRTRHWQRLEKLLEDALIKVTTVASKITAVSVRDMVDALIRGERDPEALADLARGVMRDKRRDLVRALDGRFDEHHAELATILLGQIDSLTAEIDRLTTRIEQLVDQLPTPEHPVDPDRGATPAPSHDNPQPATAPSQPRPALQRLAEIPGINLDAAQVILAEIGPDISRFPTPEHLCSWARLTPQLIQSGNKRRGGKTSKGNPYLKGALGTAAASASRTNTFLGERYRRIVKRRGKGKALVAVARSILVIIWHLLANPDADYQDLGANFYDSRIDKDRRKRQLIQQLEALGLQVTLSPAAA

SEQ ID NO: 331601 - protein, 457 aa, unidentified
MSAPKKVKKKSITKANVQLPALHPHAAGIDIGANQIQVAVPCDADPKPVRTFTTFTDDLFKLRDWLKACGVRTVAMESTGVYWIALYQTLEAAGIEVCLVNARHCKNLPGRKTDVSDCQWLQYLHSVGLLRASFRPPEQICVVRSFLRQRANLVRYASQQVMQLHKALTQMNVQIHNVISDIVGVTGLAILDAVLAGERDGQKLAQLKDHRIKASGDTIARSLVGDWRAEHLFALRQALATWRHYQQLITECDEATARALAGFESRVDVSANPPPPSTLRHKKPHANEPRFEARTELYRITGVELTQVPGLQVGTALVLFGELGPDFVQRFPTAKCFASWLGLCPDNRITGGRVISVKTRDVKSRSAEALRLAAQSLWQSKTYLGDCFRRWKARLGTPKAITAMAHKLARILWHLLKYREAYDPKVWMAAEEKLRTKKLKRLHQNATALGYKLVTVA

SEQ ID NO: 331602 - protein, 347 aa, unidentified
MAPVMIGIDPHKGSHTAVAIGADEEPLRQVRVRASAAQAPKLVAWAADWPERTWAVESASGLGYLLAQQLVAAGERVLDIQPKLGARVRLLATGASGKNDPNDARSVAIAALRPKTAAEVAVAGHAAVLKVWSKRHRDLGRAPNQLACRLHAVLCDLVPGGFGKEITAGQAFGLLERIRPSGAVAQARYGLAAEFIEDLRRLDAQLRDTRNKLTAAVKASGTSLTGIFGAGPVIAATVIGATGQVSRFASRGRFAAYNGTAPIEVSSGNRRIYRLSRRGNRRVNHAIHMAAVTQIRNKHSEGRAYFDHKLAEGKTRKEAPRSLKRHVSNAVYARLQDDARRTRPAAI

SEQ ID NO: 331603 - protein, 345 aa, unidentified
MEQISRIGMDTSKHVFQLHGVNAAEVVVLRKKLRRKEMVAFFEKLAPTVIAIEACGASHHWARLLQSFGHTVKLIAPQLVKPYVKRGKNDAADAEALCEAMSRPTMRFVPVKTAEQQATLMVVGVRNRLIHNRTQLANAIRGHAAEFGLTAAKGVAHLAPLLERIQADESLPALARELFAMQAKEYAQLQAQIDEVEAKLTAWHKADECSRRLAKIPSVGPIGAMLLRMKAPDPALFQSGRQFAAWIGLTPKDHSTAGKVTLGGITRAGDEGLRSVLVVGATAVIRHAESSGKASPWLLELLKRKSPKLAAVALANKTARIAWKMMLTGETYSAKPAAAASVGTT

SEQ ID NO: 331604 - protein, 347 aa, unidentified
MIIIGCDFHSRIQQVAVLDTETGEVVEKKLEHENGEAKKFYEGLKEPALVGIETTGYTRWFAEMLAELGHELMVGEAGKIRASETRKQKHDRRDAWHIMELMAEGKFPRIWLPSAEERDVRVLVEHRHQLVQLRTRAKNGLQAMALSYGLRRRRRLWSERGQEELKKIPLREGMARRREDLVQLVQQLDTWVKELDGRIEQEVARREDAQRLMTHPGVGPLTALGTVLVLGPVERFPDFRHLTSYLGLIPEEDSSGGKQRFGHLTKQGNRLLRFLLVEAAQTASRYDPRLQRAYRRLAFRKGAAIAKVAVARKLAIRLYIMLRDKIDYAEFCRRGSHAGMLGDVALV

SEQ ID NO: 331605 - protein, 343 aa, unidentified
MPCFAALDVSQETTAICVVDETGRVLAEKKVPTCPDAIADYLAIKAPELVRVGLETGPLAVWLWNELAIRRVPILCIDARHANALKMRPVKTDRNDAAGLAQIIRTGWFKEVRIKGRDSYQVRSLLVSREMLVRIRVKIENEIRGLLRTFGVLFGKRVGGFTGRADEIIAGELDASPEMRIIAETLMKARASVRDQIKVLDRRLMAIAKATPIVRLFMTAPGVGVITALSVASAFDDASRFKRSSSAGAYLGLTPRRYESGETSRNGRISKQGDKMTRKHLYEAATTLLTRNLRFSTLKAWGLKLAKVSGFKKARIAVARKMAVILHAMWKTNTPFRWSSSAA

SEQ ID NO: 331606 - protein, 320 aa, unidentified
MTASYVGVDISKNKFDAACLSAEGKYKHKKFDNTSVGFAAFIAWLLSLGVDKPLIGMEATGAYSIPLADFLVGQGYAVSVINPAKVHAFAKTELSRAKTDKADAKLIARFMKEKNPPPWNPPPANIRELQAMLRRVEHLLEMRQMEQNRLDTAAPSVADSIRAILKSLDSELEATRERIRQHIDNDPDLKRRRGLLESISGIGEATAAHLLVALSEHYGFDNAKQAVAHAGLAPKLSESGKWVGQTRLSKTGDPMLRKALYMPAVVAKRHNPAIRAFCERLKANGKKGKAVICAAMRKLMHIAYAVLKSGKPFDPKFKPA

SEQ ID NO: 331607 - protein, 333 aa, unidentified
MVEGTKGSHHKEGSTKMSKHTMMCAGIDTGKCKLDVALDQSPDRLQVDNDGEGHAELVTWLRKRRVERIGIEASGGYEQAVVSALRRNGFVVVVFQPAQVRAYAKYQLQRAKNDKIDAALIATCTAEAKKIHPPPDPRLAPFAGLLTIIEQLTDDVARYKTRREMSRDEEARRFWSEEIARLKRLVSQRLKQLVAAIRQHRDLAHRLDLIASVDGVGLRTAVAILVRMPEIGRITRGQAAALVGVAPYDADSGGHVGARHVEGGRERLRESLYTAALPAAFHWNPELIAIYRRLRAAGKPHKLALIACTRKLIIFVNTVVARDTPWVPRAAIT

SEQ ID NO: 331608 - protein, 341 aa, unidentified
MMIIGCDFHPRFQQIAFVDQDTGEYGELRLNHPEEAERFYRALAGRQVRIGAEATGNFRWFRHLMDELGHEFLLGDATTIRAACPRRQKTDKRDARHILNMLVEDRFPAVWQPSVENDHLRQLLLHRCRLVRMRTRVKNQLDSMAKNEGLLSSRVWSPKRRSAIEALPLPGWYAHRRADLLGLLDELDKRIRPLDEAVREAAEDNQEACLLMTHPGVGPIVSLAYVLTIGDWRRFPRGKQVGSYLGLIPVEESSGSKRRLGQVSKQGSVLVRWLLVEAAVHAQRHDESWHRQYVRLSMNKHHGVAKVAIAHKLAVRLYWMLRSGDDYSKVMERGSHAGQSV

SEQ ID NO: 331609 - protein, 355 aa, unidentified
MCSKKTGDIEDLAVVGIDIGKDTFHMVGFDRSGQLVMRKQIKRLALNATFAQLPRCIVGMEACLSAHFVSRTLRSMGFEPRIIPAIYVKPFNKGQKNDYNDAEAIAEAALRPNLRTVSEKDQDQLDLQALHRVRARLVSRRTATINQIRAFLIEQGITVRSGLRALKNSFEAILEQRRDEISPRMRGILIGLYGDWLWLDKRIEDVSGEIEEISRTEENCANIMTIPGIGPMISTAMVAAVGQGEAFDRGRDFAAWVGLVPRQFSTGGRTILGRITKRGSRYLRMLFVQAAKVIMMRPHRWSDFSFGPWLTEAVARMPRNKAAIALANKLARTAWSLLRHGTRFDAPKDAAMEAI

SEQ ID NO: 331610 - protein, 306 aa, unidentified
METIVGIDVSKDRLDVAVLPQGEAFAVDNDDAGIGELTGRLKAIGADAIALEATGGFETQAVAGLSSAGLTVLVVNPAQVRAYANAIGRKAKTDPIDAAVIAAFVLATKPEIRPLRDAETQALSELVARRRQIVQMIVAEENRLRMVLARQAQKSIKRLLAALRRELDSLDADLDDHIRKSPIWRVRETLLISVPGVGPTTARTLMAELPELGSLDRRQIASLAGLAPWTRQSGKWKGKSFIGGGRGKVRAVLFMAASRHNPGLKAFRDRLVAAGKPKIVALVATMRKLLTILNAIIRDAKPWQSA

SEQ ID NO: 331611 - protein, 366 aa, unidentified
MKKLSTAAVKQTKNVPTQKLTIGLDLGDRSSWYCVLDESGNVVLEQRLSTTPKAMREGFGKMPRNRVALETGMHSPWVSRLLAELGHEVIVAHARKVRLIGESRKKDDRLDAQTLARLARIDPELLCPVKHRSRQAQADLSVIRARVLVRARTALVNTARGLAKSYGERLRGCNVRNMDPEKAEGLSPELQAALEPLLAALESLSEQIAEYNERIEQMAEKSYPQVALLKQIKGVGTLIALTFLLTLEDPHRFRRSRDVGGYLGLQPGRRNSGQSEPQMHISKEGDPYLRTLLVQGAQHILGPFGIDCDLRRWGLKLAERGGKSGKKRAIIAVARKLAVLLHHLWVSGEAYEPLHNHHPRTVAAAA

SEQ ID NO: 331612 - protein, 346 aa, unidentified
MLHVGLDLSRRKIDVCLISDQGELIDRFTATPDRDGLHGLARRVAVYGEPVRGVVESMNGARFVHDELTRHGWEVLVADAQKVKGLAPLACKTDKIDSGVLAELSFRDLVPAIWLPTVELRREREISRWRLHLVKHRSTLKNRVHSTLITFGHQRHMSDLFGVAGRKLLKELDMPEPWRSHVDASLVLIDDLEARITQIAKELRRSGADHRYIPILITAPGFGWITSFTVACEIGDISRFSSPVKLTGYTGLCPRVKQSGQMDQRGPLSKHGPKYLRWGLMEAAIAASSHPLFRERYQRTRRRLGRQRGPKVAQIDLARQLTEAIWYMLTRNQPFTPAGATFRLAA

SEQ ID NO: 331613 - protein, 349 aa, unidentified
MKIVGCDLHARQQSIAMVDTETGEFTEKTLCHEGNAVRAFYASLEGPVVVGIEATGAMQWFLELLDELGIEGRVGHPAKIRAQETRKQKHDRRDARLLLQLLSEDRFPEIWMPSTEQRDLRTLLRDRDQWVRMRTRVQHTLQAIALNHALRQGRALWSATGQTALEALPLPPYTRQRRDELLALYAQLQKRIQELNKEVEAQARQRPPARRLLTHPGVGPVTALATDVFPGDPSRFASGNQVASYIGMIPSERTSGKRQRLGKMSKQGNALLRYLWTEAAMSTVRKDPELQRFYRRKLIQKGMGKARIAAARKLGIRLWIMMRDQIDYQEFCRRGKLRQTGETHAGMPA

SEQ ID NO: 331614 - protein, 421 aa, unidentified
MTSMTAVDPTSNPSDPPRILTAGIDTHKNTHHVAIVDHLGQPVADREFTTTAHGYGQIAEFLRVHGHVDRIGVEGTGSYGAGIARGLTAAGFTVIEVIRPNRQARRLRGKSDPIDAHQAALAVLAGADTVPKTADGQVESLRILISERRSAAKAKSQTMNQIHALLVTAPEPVRSTHRTLSGVKLVNTLARSRPAGTGSGPDLVSRQTLKRLATRYLTLKTEIDMIEKDLDPLVRAVNPTMLSLRGVGVVVAATLLVAAGDNPERLRTRASFAALAGVAPMPASSGQRTRHRLSRGGNRQANAAIHRIVLLRRRHQEPRTMAYFQRRRAEGLTDRDITRCLKRHVANEIYGALLDPGTENPVGQALRAERRRIGIPISVLAATLDVPYQRLRRLEIGTRADPELEQRATLILAQISRPKAA

SEQ ID NO: 331615 - protein, 400 aa, unidentified
MDKDRIVAGLDVHKDTIYLCVVDNTEAVIFAKVYGTLTPDLELMCSEMVSHGVTEAAMESTSTYWVPVWNALCESMSLKLVNPYFIKQLPGRKSDVKDAQWIAECLLKNLIRGSFVPDKRVQDMRKYNRRIFDLNEDLTYNSNKQDAALQRCGFRLSNYVSRVNGKSYQKCVRAIITGITDPEELVKLIHGKTLRKYGRNIIKDAVTGDFHQADICLLKQYAELIEVIERQIEECRNALIAMCQEHFPKQFKRLQSIPGVKERAASAIIAETGADMKPFEKATNLVGWCGLKPRNDISNNKVKSNRTTHGNRFLRQILIEISWVASRTRNCFFSNFSYVQCTQRHKNKMKIQVAIARKLLVAVWHMLTKDEDFIDVYLKRLEKQAEWQNDIQALESLLVG

SEQ ID NO: 331616 - protein, 423 aa, unidentified
MEVMHERTAGLDVHKAMIMACVRLLAGGKIRRECRTFDTSTTGLKALLAWLTESGCTDVAMEATGIYWKPVWNILSDGDFELIVANAAHIKNVPGRKTDVNDAMWIADLVACGLIKASFIPEEDLQELRSYMRARKQLIREQTRHIQRIQKTLEEANIKLDSLITDVMGLSGRRMIEAIIAGETDPMRLAELADRRIKAPRDQLVEALRGRVTDYHRFMLQLHLEQFDALEAAVAKIDQVVDAAITRMDEEVEAGQASFRSLISLLCTIPGVSTLSATTVLAEIGRDMSRFPTAGHLVAWAGLCPGQNESAGKRKSSRLRKGAPWLKTMLVQCAWAARRKTDSYYKAQFNRLCGRRGPKKAICAVAASLLTAIYHMLKDGTQHQDLGADHFDSRSTDVKAKRLVTQLKKLGFQVALQPLAEAA

SEQ ID NO: 331617 - protein, 401 aa, unidentified
MTSVGIDVSKGKSTVCILRPYGEVVASPYEIQHIEQELRALVSNIQSIKGEVRIVMEATGAYHLPLLSSFKEAGLFVSVINPLAMKKYASTAIRKGKTDKLDSVRIANYGIDNWFKLVDYTLPDELYAQLRLLGRQYAHYITIRIESKLALTDLLDRTMPGIKTLLSGKRSEEPTKDKLSDFVEEYWHFDSITKKSETQFIRCYCTWAKKKGYHANESKAKAIYALACNGIPTLPSSAASTKMLTLEAVRVLKEVNKTLETILTQMQELAITLPEYDTVRAMNGVGNILAPRLIAEIGDVRRFHSGSALIAFAGIDSPPFQSGSFTGTRRKISKRGSSLLRKTGYEVMKCLKTVKPAQDNAVYLYMLKKESEGKPKKVAKIAALNKFLRIYYARVSEVYAG

SEQ ID NO: 331618 - protein, 337 aa, unidentified
MEYFAGLDVSMAETHVCVVTRNGAVIHQAKVPSTPADIAAELAQVPTCRRILFETGRMAPMLYHGLRQLGLPVVCVESRQAYQALKSLATHKTDRNDARGLAHLARTGFFKPVHVKSLPAHAVRSLIIARKKLVGQRVTLENQIRGLAVVFGVRLPRALSPAFIKQALGASEGIPGLSAAMRGLAAARAAVLAAVVAIDGDIRRMVRASDACRRLMSIPGVGQLTALAFTAAVDDPRRFRRSRDIGAYLGLVPRRYQSGEVDYSGSISKCGDRRVRTLLYEAANVMLTRYKAPLKLKDWAFAIAKRSTMRKARIALARRLAIIMHAMLRHGTEFKPA

SEQ ID NO: 331619 - protein, 353 aa, unidentified
MKCEKYMGMDVHQAMTVVVVLDADGKEILETMVPTEAAAIIRLVQSLSAPLRVTFEETTQAAWLYEVLRSFVAEVIVCDPRRNKLLGEGSKADKVDARKLADLLRTGLLRSVYHGHEATRKLKELVRAYETLSIDTQRTMARIKAIYRGRGIRTPGRGVYQPKQREQWLEMLTEAGIRQRAAWLYEQLDQLRPRRRTAKQTMLTESRSHRAVGLLKTIPQLGPIRAAFIIATVDTPHRFRTKRQFWSYVGLAVVTHMSSEYEMKAGRVVRRRKPVATRGLNPNCNHRLKQVFIAAATGGSRYEPYGPYLEGLKQNGMRAEMARLTLARKIAAVALIVWKKGEAFDPKKLNMTT

SEQ ID NO: 331620 - protein, 426 aa, unidentified
MNRIRNEKINQVNEDTLVIGIDIAKKNHYACAVDLRGRELARVWRVHQSKDGFIHFEKTVKDLMETHQKTNVLIGFEATGHYWMNLAAFLEISGLPFVLVNPMHVKQSKEMDDNLQTKNDAKDSRIIAKLLPNGYFSIPRKMTPVDHHIRQGSAVQERLRKDIAMVKNRIQRWLDLYFPEFNQVFKHYGQQALTVLKLTPLPGDIRGASVEELIKQQKEAGAKYAGKPKMVALIEKAHHSIGVTQSDQMARMEIQGLVSQLELLDLQLEEVTSHMIERAKDLDEFQFLVSIQGISENTISALLAETGSLRNYKHPRQIIKLAGLTLRDNSSGKHEGTKKISKRGRRRLRVLLYKAILPLIQNNTAFHDLYTYYHSREHNPLTKKEAMVVLCRKLLQVLHGLSKNQIMFDPHRMIADLSQGTQNKAA

SEQ ID NO: 331621 - protein, 370 aa, unidentified
MDDITYVGLDVHKATVCVAIAEGGRGGEVRQVGVFENRPDILCKLAARLDKGNRRLSFCYEAGPCGYGLQRLLTSRGHDCIVVAPSLIPMKSGDRVKTDRRDAMMLAKLHRAGELTAVWVPDAAHEAMRDLVRARATAGRVLAKARQHLQGFLLRHERIYRGPRAWTLAYRRWLTTVRLDHPAQQIVLQDYIHAVEDAEARRDRLTRQIEELLPSWSMAPVVEALQAMRGVGLVVAVTVAAEVGDFRRFANARQLMAYLGLVPSEHSSGASVRRGGITKAGNVLARRVLIEGAWTYRMPARVSRKLHDRNEKLSPAIRDIAWKGQIRLCSRYRRLAAAGKPKVVVTTAIAREMVGFIWAIARIAQPALEG

SEQ ID NO: 331622 - protein, 438 aa, unidentified
MSNKVIFNLDELFISVGIDVGADFSWMSIALPNQQFVGKPYKILHNSIDSLTTAVSKIKEAEELYSLESRIFLESTGIYHYPLFCYLRDKGFNCSVINPIITKNSTNINIRKVHNDRFDSKKAALVGLKPDLKVSLMPSDLALNCRNLCREYYDLMDNRSAYVNKLQGELRIAFPQYLGIFSKVTINTSLTLLETYTSPSAFLKADKQEIIDIIKSTARFGLTYAQNKYNAIIQAATDANQFGYIIDSNIKRIRLYISFIRKYDEEINSILESLHELVDANEDSDFVKQIHLIETFKGAGFLSAVSIMGEIGDFSAFSKPKQLFAYFGLDPSVKQSGKFEGTKVQMSKRGSAIARRVIHTLTLQSISISRNREAKNPVLREYYLKKCDSKPKLVAMGAVSHKVCNMIFAILRDNKPFKIIAPQEHIKQYNSAKCDIAA

SEQ ID NO: 331623 - protein, 342 aa, unidentified
MKFVGVDLHKQSITVCVMAKDDRQRKVLARRRFACCRSDLIRKFFEELGRFQVTVEATSNYEWFLLLVEDLADRCVLSHPKKLRVIAESKNKSDKVDAQVLAEFLLLDIMPEAWRPTPRVRQHRVLVRHRRWLDGRITSIKCKLRNKLAYYNADIAGLFTERGMHHLAGVAMSEADRFEVQQLQQELLLFTTQMEQTENQLREFARGGPLAEQEARAVLATIPQVGPVTVDAVLSELGDWRRFRSMKRVVAYAGLDPGHRESDRKVKRLSISKEGSRILRWAMIQAAWRLVNNSPRWKCIFENLKTNIGSRKKAIVGVARRLLCTMFAMLRDAQPYELVRAG

SEQ ID NO: 331624 - protein, 357 aa, unidentified
MQEEKRRFVGIDLGKREYTMAIIGKTGKMSIHHGKTSIQGRQGLYRILDKTDRIALEAGNLAFLMAREIREQVESEVRVLNPSKLPLIWNTPTKTDKEDAIKLAHLIEERQDKKLPIVPLPSEQEMERRKVLANYEREMRCRTKLINTLHALFVHQGYTTIVKRDLATEKRRLEVLELLQGQGREEAEWILKHLELYDIRIKELKEKINNEAKSDEDIKRLLKIAGIGPITAYAFVAYVGDGTRFNKGAQVSNYLGFVPRLDYSGTIKRQGHITKQGNSYLRGLLVQAAWSVVRSKHGGALRERFLYLTTSQGQSKKKTIVSIGRRLAELMYSVLKNKTEYEPRPWNGTQKQLMAIA

SEQ ID NO: 331625 - protein, 373 aa, unidentified
MGNRVAGSRRVGKELRLLAEEVAFVGVDVHKKTYQVSVWTEERGWVAQWTQPADCEALCRRLEPVRSQVAHVVYEAGPTGFALARTLRAHGFSADVIAASKMPVAAERSNKSDRRDSAQLAFLSGKGMLSAIYVLTPQEEADRQVMRGRWQVVDEVCRTERRIKSLLLQHGIAEPAGLRYWSRAAVRELRGLELLAELRFCLDLLLDDLDHGHAMLRAANQRVRELAVDDRHAAAVARMRTVPGVGVITAMTFATELPHPERFERPEAIGAITGLAPRVRRSGETTKGGPILKTGNAHLRRVLVQAAWQWVRRDPAAKDLFGHLVGETGCAQKAIVAVARHLAILLWHLVTTESTYTPGRWEAEAPEPAGTES

SEQ ID NO: 331626 - protein, 430 aa, unidentified
MGCIVPTAMYRERDDQCMPYEWFVGIDWGSQRHQICVLDRDRRLVGERAVDHDGASLAQLVAWLWTLSAGQPERVSVAIEVPRGAIVDGLVERGFHVFAINPKQLDRFRDRHSVAGAKDDRRDAFVLADALRTDQPSFRRLRLDAPPLLLLRELSRAEETLLEEFRRSANRLRDQLHRFYPQMLQLCSAADEPWLWDLLDLAPTPAQAALLSEEQVHRVLKTYRIRRVKAQEVLTCLQAPALPVAPGATEAAQTHCGFLLPCLRVLAEQLQACSQQVSALLHTLAQEPGEGEGPSDVAIVQSLPGVGRKITAWLFAEAAQPLAQRDLQVLRTHGGVAPVTRQSGKRRQVVMRRGCNPRLRHALYHMARVAMQRDAHFSQGYAALRAKGHRHGQALRTIGDRLLRILMAMLRERICYDASRIHREPVVQMG

SEQ ID NO: 331627 - protein, 361 aa, unidentified
MKKVSKQMQKMEVASANPEMTVGLDMGDRFSHYCLLNAEGDVVEEGRIQSTEGALRRHFEGEPRLRIALECGTHSPWVSRLLNSLGHQVIVANARKIPAITGSESKNDRNDAEKLARFAAFDPKLLSPLEHRSEERQVDLNLIHARSTLVRARTMIVNALRGLIKSGGGRLPACSTESLPSRAPAAIPASLSEVSTPLVKQITLLNAQIDEMDKLVEKLGAKYPEIKLLRTVPGVGPIVAAAYVLTLDRPDAASNRSAGAYLGLRPGQSQSGDSDPQRRISKTGDSCLRSLLVQSAQYILGRFGPDSELRRWGLKLAATGGKRGKKRAVVAVARKLAVILHSMWRSGQHFQPFPQAATVAV

SEQ ID NO: 331628 - protein, 341 aa, unidentified
MEEVITIGLDLAKSVFQAHGADRAGGVVFRKKLRRDQLLTFFASQPRCLVAMEACASAHYWAREIGALGHEIRLIPPAYVKPFVKRQKNDMADAEAICEAAQRPTMRFVTPKSAEAQGSAVVFRTRDLLIRQRTQLINALRGHLAEFGFVVRQGAAHTARLMDVVVDPSADLPAEARPVLAVIVETLRALQDQIAQLDAEIAARAKRDPVARRLMTIPGVGPVVATALVALAPTASTFKRGRDFAAWVGLTPRQHSSGGKERLGRTSKMGERSLRRLLILGASSAARVSGRQSAPANPWLESMLARKPRMLVTIALANKMARIVWALMAHGGTYRAPAVAV

SEQ ID NO: 331629 - protein, 479 aa, unidentified
MGKKQSGKNHITKGSKKSFLKRENPLKKIREDVAGIDLGSESHFVALPNPNHKGEVLIKEFGTFTTHLLECINWLKECKVTSVAMEATGVYWMHFYSMLEEKGIEVILANSRHVKNVKGRKTDVRDAEWLMQLHSYGLLEGAFIPSSEVAQLRTYLRLREQSVRMAGESIQRMQKALIAMNLRLDNVLNDISGKTGMAILKAILNGERDPKVLASLRDQRCRKSEDEIEESLKGHYREDHLFALKKAMADYEFHVKGARDCEQAAQMQLQKFATKASETATETEKGEDIKARKQRNCKHQRLHEYNFDVRKELFRITGVDLIALPGVAESTALTLISEIGLDMRKWPTAKHFCSWLKLSPNNQISGGKVVRRDTNKKPNRAALALRMAVSGLYKDANQTALGLFYRRKRSQKGAPKAITAAASKLARMLYDMLKTGRQFVEFGAEHYQAQQKERVLKNMKRTLRNWGYTIQKAKPALQK

SEQ ID NO: 331630 - protein, 363 aa, unidentified
MQYINDTESSSHEETRCQFNGGTGAIKLGIDVHQDFYVVVEQAGGSNPKPPQRFRKEAFLHWAAKLKSQATEVYAVYEACGFGFSLQRKLSALSINCYVVCPQKLDEQNRRVKTDGLDAKALCLKLDRFVQGNRNALAIVRVPSEEEEQARAIHRQREQLVKARKQLEAQGRSLMVNHGLEPVQNWWKPRTFTALPAPQWMKELLANSQPILVALQQKIAALTVQLQSAASPDQPCGLGKMTSVVIDREIGDWNRFSNRRQIASYTGLCPGEYSSGNTRLQSCVTKHGNPRLRAALVELAWRLVRFQPNYHPVRKWRQILAKGALATGAARKKAIVAVARQLAVDLWRIKTGRLRAEELGLIN

SEQ ID NO: 331631 - protein, 334 aa, unidentified
MWHVGIDLHRLSVVIAAVDDEGNSFGARRIDCQDRQAILATMRSLQPFRAVIEATGTYRWLYNLLTPLGTVLLAHPLRLRAMVQRRSKTDKLDSQLLANLLRLNQIPLAYIPPEQYQQLRDVTRHRARLSRQAAAAKTQLRSLLARHNLVAPYKCVCGVRGCRWLARQDFGAMDNLVRDELLLRLEHYRRQLAVMDARLEELRAYVPQVEALLDIHGVGLYTALLVIGELGEVERFRTARQVGSYAGLTPRVRQSGEHCYRGAITREGSPWLRWILVEAAIKATREDPALKNFYQRIRKRSGAKKARVAVARKLAEICWKRLIGWSGRPAISVA

SEQ ID NO: 331632 - protein, 317 aa, unidentified
MRREVFVGIDVSQDFLDVGVRPSGERFRVAYDDAGMEALVSRLEPLHPQRIVLEATGKLEAPLVACLQLAGMTPVVVNPRQVRDFAKATGELAKSDGIDAGVLAHFAEAIRPEVRPLPEAELQALAELVTRRRQVQDMRVAEQNRLKRTVSWDVRQRIERHLAFLAHELGDIDDDLGRQVKKTPAWQADVELYCTVPGIGRTLATSVVAQLPELGHLSGRKISKLVGIAPLADDSGKRHGKRRIWGGRSSVRRSLYLATLVAIRYNPPIRDVYQRLVAIGKPKKVAIVACMRKLIVILNAMKRDGTSWAPDLAAVRP

SEQ ID NO: 331633 - protein, 480 aa, unidentified
MAKEGLKRRCCGMDVHKNSVSVCILPAQGQKEEWKRRNFPTFTRDLKQLRNWLKKCGVTEIAMESTGQYWRPLWNLLEGEFEKLLLVNPQHIKGLDGRKTDRRDAQWIAELLEDKRLKGSWVPPREIRELRDLTRQRVHTQEDLTRVRNRIEQVCQSGNIKVSSVASDLFGKSGRCMLKALVEGKRDAGWMADYACGTLRNKKHELEAALEGTFTAEQRWLLGRELQQMEWLEQQVAAMEQETEQRVIPFSEPLRRLMTIPGVDRITAWTILAEVGPDAGAFEDARHLASWAGLCPGNRESGGKRMSGRTRKANCYVKRALCQAAWAASHTKNTYLSAFYRRLCVRKGAPKAVMALAHHLITIVYHVLARQEEYAELGGDYYDRRNKTKVVNRLVKRLAVLGYEVTLNPSRPLEFEEAVPADPPWMSSPALDGSAPTIASSKPKRGRPCKCAERGIICIHGRLPEAKSLINQPPTRVEFS

SEQ ID NO: 331634 - protein, 334 aa, unidentified
MVAGTQGSLDKEGARKMTKSITLTGGIDTSKSKLDVGIHGQKRCETFPNEKAGWGRLLAWLNNEGVRRVGIEATGGYERGVTRHLQEAGIDVVVLQPRQVKAFGLLHLRRAKSDRIDAFLIAACTHLLDAQNRMPPDPRFDALGDHLTFIEQIEEDMVRLKTRLEHIDEARLRRMVVDDIARLAKRRGDELKRLETRLRTHADLAGRLDLVLSIPGIGVRTALSIVVRLPELGTVSREQAAALAGLAPFVQQSGTWKGEAHISGGRGRLRRALYAAALPAEFRWNPELKAMYARLTQRGKSHTSASVACARKLLIFANTVVSRGTPWQVERAAA

SEQ ID NO: 331635 - protein, 370 aa, unidentified
MKKRSICEQSPKRSTKTREEKRSFTIGMDLGDKTSRYCVLDEQGEVIQEGSVATTKKGMLQVFGARKRCRIAMEVGTHSPWVSRLLSGLGHEVIVANARQVKLISQSSRKDDKLDARTLARLARIDPELLRPIRHRGEKAQHDLLAIRVRAALVEARTSLVNAARGFSKAAGERLPQCDADNLGTEKMEGLPEGLRERLKPLLEMVEALTEQIKESDGNIEQIARKDYPETELLRQVSGVGPLIALTFVLTVEDPARFAQSRDVGCYVGLRPKRSESGESQPQLRITKEGDRYLRKLLVQGAHYILGHRGPDTDLKRWGVKLSARGGKNAKKRAIVAVARKLGILLHRLWVCGEVYEPLRNYPAPAQVAA

SEQ ID NO: 331636 - protein, 389 aa, unidentified
MFFLGIDIGKYSHVASLIDDNKKVIFKAFSFSNSTEGANSLIKKLEPFCDSLDIAMEATGHYWINLYSFLLQKDFSVHLINPIQTDGWRNSTEIRKRKNDTIDSILIADLLRYGNFIDSSLSNEDYLSLKNLTRFRSYLISSTGDLKRKTIALLDQVFPEYQKCFSDVFGKTSKEILLSFTTPQDFENISSSKLSKTLKNITMKKFAKKKIEELSQKAKTTIGIKFCLDSFSLQIKMLIEQISFIENQVESVEEEISTIMAKLDSPIITIPGIGPVIGATILGELGDISRFSNASKIVAYAGLDSVISQSGNYEAKSMPISKRGSSYLRKVLFQAALIAEFCDPVFSDYYQKKIAQGKHHLVATNAVARKLCYTIFAVLTKNEAYKMQQ

SEQ ID NO: 331637 - protein, 348 aa, unidentified
MTIVGNNPDAVVGGVDTHADVHVAAAVNHVGGVLGVEAFATTHSGYRQLVSWLRSHGELTLVGVEGTGSYGVGLSRYLARAGIAVVEVDRPNRQTRHRKGKSDPVDALAAARAALSGTATGLPKTRDGNVEAIRVLGIARRSAVDTRIETLNQLRHVIFTATPEIRRKFSGLTAISLANAAAALRPRQGDDPVRYTTLVTARALGQRVQYLREETKRLNRLLRPLIRQTAPTLLEVYGVGFDTAAKLLVAAGDNPQRIRSEAAWAHLCGVAPIPASSGKTTRHRLNRGGNRQANSALFHIVITRMRHDQATRDYVARRLAEGKTMGEIARILKRYAAREVFKHLPRPT

SEQ ID NO: 331638 - protein, 402 aa, unidentified
MNAVGIDVSKGKSMVAIMRPFGEIVSAPFEIKHTASDIHSLVELINSVEGESRIVMEHTGRYYEVLAHQLSEANLFVSAINPKLIKDFDNDSLRKVKSDKADAVKIARYALDKWQNLKQYSVMDELRNQLKTMNRQFSFYMKHKTAMKNNLIGILDQTYPGVNTYFDSPARSDGSQKWVDFASTYWHVDCVRKMSLNAFIDHYQNWCKRKKYNFSQSKAEEIYGKAKELVPVLPKDNITKLIIKQAVNQLNIASATVESLRTLMNETASQLPEYPVVMAMKGVGTSLGPQLMAEIGDVSRFTHKGAITAFAGVDPGVNESGSYEQKNVPTSKRGSSNLRKTLFQVMDALIKTHPQDDPVYQFIDKKRAQGKPYYVYMTAGANKFLRIYYGRVKEYLSSLPES

SEQ ID NO: 331639 - protein, 342 aa, unidentified
MNKVIGLDLGDKRHVAVIFDADGTEHAADGMVNTMQQVKKYFEPHGGAVVVMEAGTHSGWISRLLEAMGFEVWVGNPRKLRAIWDSTDKSDARDARVLGLMFRLEPRLLHRVSHRGEQAQCDLALIKSRGILVETRTKLINHVRCVVKGMGARVGACSGESFHKKASEQVPVALKDALDVVIEQVKQLTAAIKELDQRIEKMCGEKYPETQRLTQVSGVGSLTALAFVLTIEDSKRFAKSRSVGPFLGLTPRRDQSGATDKQLPITKAGDIYLRQLLVGCAHYILGPFGRPCDLRACGERIAAQGGKNGKRRAVVAVARKLAVLLHRLWADGREYVPVRKAA

SEQ ID NO: 331640 - protein, 346 aa, unidentified
MLYAGLDLSRKRLDFHLLDADGATVDVGASPPDADGLQHLSERVALHGEPVRAAIESMNGARFVHDRLELHGWQVEIADAQKVKGLGPLACKTDRIDAWVLAELARRDLVPAIWLPDPQVRAERERARWRLHLVRHRSSLKQRVHAVLLTHGKPCPVSDLFGVRGRQLLAQLGLPEPWQGTIEASLRLIDELDHEIGECERELRRLGADHRYVPLLCTVPGISWVLAYTIAAELGDINRFLTPRKLAGYTGLCPRVYQSGDRDLRGPLAKQGPRYLRWALVEAATHACTHPAYRDRYQHTKTRIGKQRGAKVAQIDLARRLTEAIWHMLTREQPFAPKGATDPLAA

SEQ ID NO: 331641 - protein, 402 aa, unidentified
MNKFNPATTKVSTVSALENIQAQPSVLDKYAAYIGLDTHKDNIVVAIALPGRALAYIDSELANNEKNISKLIRRLSKQFAGQLLLFCYEAGPCGYAIQRQIMASGHDCEVIAPSKIPKKPGEKVKTDRIDARKLAQYLRSGDLTAIWIPDHEQEAMRDLTRARSDMKSQELKARQQLNAFVLRHGHSWPSNKTRWTRSHYNWLESLKFNHDWLQVVLQEYINAVKAASGRVKDITDQMERVLPQWSMAPVVDSLIALRGIDKLAAMVLLAELGDISRFDSPKQLMAYLGLVPSEHTSGSKRRQGSITRTGNSHARRMLVESAWSYRFPARQTMHLKRKAIKASDEAKTIAWRAQKRLCGRYTTLIQAGKNTKQTTVAIARELIGFIWDIVCHEMPKVKIDVQ

SEQ ID NO: 331642 - protein, 403 aa, unidentified
MLYAGIDIHKSVFQAVVARSGGGELSESRFEPSRAKLGEWAVRWQGELAAVAIEATTGWRWVARELVALGFEVHLVDPGSGERGQGRRRRPKTDRLDARWLALLLAKELLAECEAWLPPAEIQRLRDQTRLRKTLAGERTGWAQRLHALLTHEGWPCARGRLLTAEGRPWVDALELDPYVRAQVDVMLTVMAALHEQVELLEAELRRFARADRRCRALETIFGVGPSLACHLLAEIGDDRRFQRSRQLVRASGLDPAVIESADSKRRGRLAKQGSRHLRWALVEAAQHAHRHSSPRPRAVRKRRQALRPRPGTTDRRTQNRPPRLPRPHDRGSASSLSPNAARANHQGPNDRRQLATRSQLDRSLSALTVLGREFLSLSCRIVPRGAHLARRAVVEPAVRPVV

SEQ ID NO: 331643 - protein, 414 aa, unidentified
MEDILECCCGLDIHKESIVACLLKGPLGAELKPRSEVREFGTQLKDLVALRKWLEKHECHYVAMESTGIYWQPVYAVLETALSDEMHLLVVNARHMKNVPGKKTDMRDAEWIATLLRAGLLKGSFVPERDIRDLRQFTRYRKALIRDITSQKNRIEKLLQSNGFRLSSFLSDIFGSSGLAIMHQLVQVGSISSQSLDRCLKAQARQKSGEILSSLNGTLSVPQRTLLKMQLAHLAALQANLREVEAEIHDGFSQFQGPIELLDSIPGIDLTAAYAILAEIGKEMSAFPTAQHICSWAGLAPGSHKSANKQKRQRVTQGNNYLKTMLCEVAWVIASHKKLYLSGWYWRLKQHTDAKRAVVALARKLLVIIYTLLKTNQPYNEQKFMERKNASEQKRVKRMMNELTKLGYAVSLAA

SEQ ID NO: 331644 - protein, 456 aa, unidentified
MEVINPACAGLDVHKKIVVACALVPGSNGQWLQMIRTFSTMTSDLLALGDWLHSLGVQVIAMESTGEFWKPVYNLLEGHFRLLVVNARHIKNVPGRKTDVKDAEWIADLLRHGLLRGSFIPERPQRELRDLTRQRTNLVQDRAAVINRLHKVLEWANLKLTSVVSDVSGASARAMLEALVAGETSPAVLANLAQGRLRNKRELLEQALTGLVSPHHRFLIAEHLIQLDNLDEQIDRFDAQISAYLDRLSAPPSPADQDRVVPTAHSTSPTSDASATVPDTDTPAATLGTLTWNAALTLADSIPGIGLRLAQDILAETGIDMSRFPTAGHFASWAKLCPGHNESAGKRRSAAIGHGNRHLRAKLVQAAWAAVKVKDSYLAACYHRLASRRGVKRAIIAVAHRILIALYHILKRQEPFRDLGAAYYDERHRVQLLKRTERRFARLGLKLTVEPLAQAA

SEQ ID NO: 331645 - protein, 343 aa, unidentified
MQTITTIGLDIAKSVFQVHGVDAAGEVVIRRQLKRRSVLAFFQKLPPCLVGIEACASSHHWSRELQALGHTVRLMPPAYVKPYVKRQKNDAADAEAICEAVTRANMRFVPTKTLEQQSCLMLHRTRHLFIRQQSAVINSIRAHLAEFGIVAPVGRKGVTELLHVVADPSDKRVPEVGRTCLATLGDQLLGLKRQILEFDRMIMAWHRSNQTSKRLHYIPGVGPMLATALVASVADPGAFRSGRNFSAWIGLVPKQHSSGGKDRLGSISKQGDRNLRSLFVARALAVIRYAKIHGTRHRPWLTALLGRRPTKVAAIALANKIARMAWAMMAKGERYKQPAALAA

SEQ ID NO: 331646 - protein, 367 aa, unidentified
MPPARTNPVTSTSGQGVNAWPCWQTQSSSPVGVDTHKETHTAAVVAAATGAVIAQATVPATPAGYQQLLRLADRHDGRRVWAIESTGGYGAGLTRFLHAHAEQVVELDRPKRAARRHGAKSDPLDATRAAREALGREQLAQPRAAGQRAALSVRLAARRSAVQATGDTQRQLHALVVAAPDSLRGRLRGLTTARLVRTCGRLRQRTDGDPEIAATVASLRALARRIQLLDVEIADHTRAITALVRAWRPDLLSRCGVGPIVAATVLCAWSHPGRCRSDAAFAMLGGAAPIPASSGQTVRVRLNRSGDRQLNQALYTVALTRLRTDPATRAYAQRRRAQGKTNREIKRCLVRYVARQLYRLLEATPAL

SEQ ID NO: 331647 - protein, 344 aa, unidentified
MKINTIGLDLAKNIFQVHGVSEAGEVVVRRALRRRQVLSFFSKLDPCLVGMEACGTSHYWARELIALGHEVKLMPPIYVKPYVKRGKTDAGDAEAICEAVTRPTMRFVAVKSADQQSVVMLHRTRELLVRQRTQLVNTMRGQLAEFGLTLAKGIQHASQFTRRLLEGDAPDIPELAIMVVTTLAEQIRQVQARIFELEKELKLWFRQDQLAQGLASIPGIGPITATALASTVTDPHQFTSGRQFAAWLGLTPKANSSGGKERQGRISKMGDQHIRRLLVSGMTAQLQSVRRHPDEHPWVIAMLARKPAKLVVVAMANKAARIAWVVMTRGELYTKPQHSTQVST

SEQ ID NO: 331648 - protein, 418 aa, unidentified
MSYKVAGIDIHKRVLMVVVATAAEEVADAAGEALEFVCRRFGAGAGERQHVVSWLREQEVSEVVMESTAQYWKPVWLDLEPHFGKLHLAQAHSNRAPKGRKNDFADAKRLTRRLLAGELILSFVPDAEQRAWRTITRGKQQLVRDRVRLQNQLESLLEEGRVKLSSVISDLLGLSGRRIMQAMAEGETDPDRLAELGDDRLHCSKQQLADALTGSLEPVHRELLKLYLKRLQLLDQQIGKLDQMIAAALKPHQDAVVRVAGIPGFGVDSAQQLIAEIGVDAESFPSPGEFASWAGLCPGSNVSAEENHSSRSAKGNRFVRRILTQAAQAAVKKKGSHFQSLFRKFLPRQGYNGAIWAIAHRLGRLVWKILHDGVRYIEQGQETNPKAKKRRAQKLAQALRNLGYTVLLTPIAPEPERG

SEQ ID NO: 331649 - protein, 396 aa, unidentified
MLYLAIDQHRKQLTVNLRNEAGDVILKRQVSTEWARVREFLEEVRNRSVPEGGFVAIVEVCGFNDWFLKLLADYGCKDIVLIQPEKRSKNKTDRRDANALGELLWTNRQRLLAGKKVQNVRQIVPPSPRDAEDRQLTALRQRVGRLRTRAINRVQHLLLKHNLQQECPTKGLQTQAAKRWLAKLPLGRIDRMELDQMLAQWQLLDQQLKELEAEIVPRQAKSLTAPIIATIPGAGAYGSLALASRIGSIGRFPRARSLANYFGLTPGCRNSGDATRRLGSITKEGSAIARFILAQMVLHVLRRDARMKEWFVRIKRRRGAKIARVAAMRRLATIIWHMLKQQQPYRPGGKREKGGGPEDACLLPDRRAFLEALQERARGGKQKGCPGLTTEAAARS

SEQ ID NO: 331650 - protein, 351 aa, unidentified
MKTITIGMDIGDKNHVVCVLDAEGNTIAETTVENKRDAINALFCKYKEATVAIEASTHSPWISRQLVSLGCKVLVGNPRRLRVIWDSNDKTDKRDAKMLAQIARFDPNLLYPITHRGKQAQIDLEILQARDNLVRNRTSLVNHVRGSVKAQGERLSSCSAESFHNKAEEDMPDFLQETLAPVVGIIGQLTKQIKEYDRKIKQISKEQYPETELLRAIKGVGPVTALAFVLILEDPERFSKSRQVGNFVGLTPRRDQSGVIDKQLRITKAGNPYLRRLLVGAAQYILGSFGEDCDLRRFGLRLSARGGKNAKRRAVVAVARKLAVLLHRIWRHGEFYEPLHIKRDVKLAKAA

SEQ ID NO: 331651 - protein, 313 aa, unidentified
MIGHTIGIDISKSHLDAFRLEDRATARFDNSQHGLKALTKWLGTTPVARVVFEPTGPYHRAFEKALSGKVPLVKVNPLQARRFAQACGTRAKTDAVDARILARMGAALSLQPDAPISEKLCDLRDLQVARTALIKERTRLKNRSQAHVNTLLKRHTKARLTLVERQIAELDAEIAEHIAADQPTARKREILCSVPGLGSVAAALILTFLPEIGTLERKQAGSLAGLVPHSRESGQWKGKAFISGGRKPLRDALYMPALVAMRFNPDLKAKYTALRNAGKPAKVAIVAIMRKLLETANALVKADRLWVKNAPCA

SEQ ID NO: 331652 - protein, 371 aa, unidentified
MSHNSTDSVWVGMDVHQDSITAAVLFGNDTEPKIERLPGDLNAVRRMFRRLSKQGTPRSCYEASGAGYVLQRCLEKDGFHCEVIAPSLVPKKPGDRRKTDRLDAIHLARHYRAGNLVPVTVPSAEQEAVRQLVRSRLAVQSHVVRLKHRIVRVLATHGHRFTAGKSNWTQKHRVWLRKLHRELGGPLGTVLAYHLEHLEYLEAQKNSLEMEIDRYASSGPYRDRVEALCCFRGVKTLTAMTILTELGDIRRFKKATGLMAFAGLVPSERSSGNVQRRGSITKSGSQELRRILVEASWHYRKRAESDLILKRRRMGQPPEVVSIAIKAQHRLQKTYWKIASRKHPCTAVTAVARELCGFIWSALWALESQEG

SEQ ID NO: 331653 - protein, 342 aa, unidentified
MSIVILGIDLGKNSCSVAGLDASGRVVLRRRLRRQTIAGFARQWRGCVVAMEACCGAHHLGRQLVAQGHEVRLMSPEYVRLYVKAHKNDDRDAEAIAEAATRPTMRFVEIKSEAQLDLQSLHRARERLVSERTALINHLRALLLERGIVVPRGRRKLERALPGILADESSGLSARLRRLASDLREEWRALDERIAAFDAEFVSQARTDEAARRLATVPGIGSLTATALVAAVGNAKAFARGRDMAAWLGLVPRQMTTGGKPKLLGISKRGNRYLRKNLIHGARAVLPYLATRDTPLGKWVQGLLARAHKNTVVVALANKLARIAWAVLAHGRSFEAAHVTAV

SEQ ID NO: 331654 - protein, 351 aa, unidentified
MEEYIAFDSHKHYTWVEHEQVSTGRVRQYRLEHAPGAIRKALAGCPRGTAVALEATANWYWIVDEIEQAGLKPRLVHPRKAKMMMGLINKTDKLDAHGLNRLQRNGTLPTVWIPPGRLRELRELTRTRVVLVAQRTRWKNRLTATLAKYGVPASEYSDPYGKGARAELEERIERLPEQTRWAARQMLAQLDTLSEQILQFEGRLKELVEVTPPMQWLMTLPGVGVILAATVALEIGEIERFPSAEHLASYGGTTPRVHASGDRVRYGRTRPDVNRYLKWAFAEAANSVAVNHTRCPERHVSQLYLRLRLRKGHGKAIGAVARHLAEAAFHVLSRQEAYQDPTVRPGRTREV

SEQ ID NO: 331655 - protein, 458 aa, unidentified
MRRQKKTGKASGRGVLEQLNLHAAGIDVGAEEIYVCVPSDRAESPVRAFATYTASLRELADWLARCEIETVAMESTGIYWVPLYEVLEERGFEVYLVNARHLKNVPGRKTDVLDCQWLQQLHTYGLLQASFRPAEDICALWAMTRHRDNLIRYQAGHIQHMQKALQLMNLKLTQVVSDITGVTGMRIIRAIVAGERDAQRLASLRDRRCAKSEEEIAQALEGHYKAEHLFVLKQALAQYDFYQQQIQECDRELEAMYAAWPAAETDGDCQPPSPQTGKPRKNQPHFDLTTALFRLVGVDLTAIDGLDALTVQTIISEIGVDVSAWRTVKHFTSWLGLAPCTEKTGGKVIRSRTKKTQNRATTAFRLAAQSLHHSKSALGAFHRRIRARIGPAEAITATAHKLARIVYHMLKNRTPYVDPGEDHYQQQYRARAIRNLERKAALFGLQIVPAAVGPNVVS

SEQ ID NO: 331656 - protein, 385 aa, unidentified
MTSIIYVGMDVHTTNYTLCCYSMEADRFFAEVQVEPDAKNILKYLARIEKQQSRDCRIVCGYEAGCLGYSLYHHLHAHGIDCVILAPTTMMTKPGKRIKTDRRDARLISKCLAFHTYSPVYIPTEVDDAVKEYIRMRDDANSALAHVKQQIIAFCIRHGKIHDGKSYWTNKHLEWLSSLDLGNKVLSEVLQEYLIRYYQLREQVDMYDMRINELAQAEPYRQKVEKLGCFRGIAAHTALSFCVEVGDFRRFATAQQFASYLGLVPGECSSGDKQQYTGITKAGNSHLRKLLVETAQVFGRSATKSGKSVALKERQAKCDSLTVAYADKANARLKKKYFKIAMRSKVNIAKTAVAREMACFIWGMMTDNILECYPLSAVANSPKIC

SEQ ID NO: 331657 - protein, 417 aa, unidentified
MAEEIEWFVGIDWASQSHQVCLVDARGECLGERAVAHGGLGIEELCDWLIARTGATPEVIGVAIEMTQGPVVEALLERGFCVYGINPKQLDRFRDRFTVAGAKDDRRDAHVLGDSLRTDRHAFRRLSNDEPVIVKLREWSRMADDLQQERTRLASRMREQLWRYYPQMLELADDLAADWFLDLWNQAPTPAKAARLRQTTIERFVKAHRLRRWQAPEVLSILKQKPLSVAPGVVEAASDHIRTLTVRIRLVNQQLKAAHRKLDELCAQLIPSEENEPGQQCEQRDVVILQSMPGLGRIILAVLLAEVWQPLRRRDYHALRSLSGVVPVTRRSGKTSVVVRRYACNKRLANALYHWARLATQHDALSRRRYAALRQRGHSHGRALRTVADRLLSVACTLLEQQTVFDPTYKVHEAAGA

SEQ ID NO: 331658 - protein, 395 aa, unidentified
MFYCGIDIAKYKHEASVIDASGKALLDSISFSNSKDGCEKVLALFEKLGVTSASVVVGMEATGHYWLSVYEHFSSLGYDVKVINPIQSEAFRKMYIRQTKNDSKDSFIIAQIMRFGQYSSTTLSDENIIALRQFSRYRLALVDSCSDCKRRIITLLDQVFPEYAKLFSDTFGVASTELLLNCQTPEDMLVVSTEKLTELLKKSSHGRFGEAKAVEVKIAAKNSFGVSFAKDAFSFQIKQLMEQLVFIENQVKDLEAEISILLNEVSPVITTISGIGDTLGAIIVSEIGDIHRFDAPGKLVAFAGLDVKVNQSGEFSGTKNKISKRGSPYLRRAIWLAAGRAAFCDPVLSQYYKSLRARGKHHLTAVGAVARKMCNIIFVILKENRPYEPRPPQKL

SEQ ID NO: 331659 - protein, 379 aa, unidentified
MTLDKYFRQCVGIDISKDKFTACLYMYDMASDAGCCTGSIDFPNNRTGFNQMVKWSRKEAQKGFPLCYLMEPTGSYYEPLAYHLNKIGQTVYVVLPNKARKFCEYEGIKTKTDAMDARCLALMGCKNRKMRPWEPPLPIYRELRQLTRLRADLVKMQTQMLNHIEAIDHMESVAPEVRKSYEKLLDTIEKQLEKSEKDITAKLAQDKGLKARVERIATAKGIRALTVTCIVAETLGFHLISNRKQLTSFAGLDVKARQSGKDDPKHHITKKGNAHIRAALYMPALSAAHCNRQMEQAYGRICGKHPDAKMIGVTAIMRKMLLLVYSLWKSGEEYDETRDKTHTPKKKYPEPVNAPEDCLQADVEPIDGNKTDEEGNPPF

SEQ ID NO: 331660 - protein, 341 aa, unidentified
MDEYIGLDVSMKETAVSIRRAGERIWRGKCASDPSIVAELIRKRAPSVKRVVFETGPLSVWFYHSLRIEGLPAICIDARHAKAALDMATNKTDANDADGLAQLAEVGFFREVRVKGFDSMLTRTLVAARTRLVRITTELSNQIRGVMKTFGLLVPAGKGSTFEKNVRSLLADQDKLASIVLPMLEAWRGIRVRAAELGRQLVRDARQSRSCRILMSIPGIGAITATSFTTAIEEPDNFRKSRSVGAWIGLTTRRYQSGEVDYDGHISRRGDRPLRGLLYEAAAVILTRSSTHSTLRTWGLQLRERIGFKRAAVAVARKLAVIMHTMLKTGELFNPNAGAVA

SEQ ID NO: 331661 - protein, 408 aa, unidentified
METLHRRCAGLDVHQKEIVACRRIVSGRKVRSELGRFPTTTQGLLALSAWLAETRITHVAMEATGVYWKPVWHVLCHDFSLVLANASHIRNVPGRKSDANDATWIADLLAHGLIRASFVPPQPIQDLRDLIRTRRELTREIVRHTQRIQATLEEANIKLASVISDILGWSGRRILKAIVSGQNDPRRLAELGHPRLACTREELAAALEGRLRDHHRFLIGQHLKTIEQIEATIAEFDARLEAALAPFRGDAERLKDVPGVSDNVAQTVIAEIGVDMKAFPTADHLLSWAGMCPRLDESAGRKRSRRLRKGAPWLKPVLVQAALAASKVKNSSLRTRYLNLKPRLGHKKAIIAVAAAILRIIYHMLNDGTFYQDLGPDYRRPRNPERTARNLANRIRSLGFDVEIKKAA

SEQ ID NO: 331662 - protein, 387 aa, unidentified
MQKPHDNSKASPAAFMQDNTLIAVIELGLSNWLVAGLIPGVSREPLKKLEPNPEDLLKLLHGWRDEAIKAGRPITRIAVAYETGRDSFWLARWLRERGIDAHVIHATSVAVSREHRRAKTDRLDTAMLKRGFLGWLRGERGHCTVAIVPTMEEEDAKRPHREREGLVHEQTRVVNRMKSALIQFGVRNFNPKLRKARVKLETVRTPEGKSLPPNTIAALRRDMERLKIIKEQIKAIEQARLQQFEQKPEALANRMVYLLVRIYGLGWETADLLVHELLSRTLRDRKAVARYAGLTGSPDESGSKRREKGLSRSGNARVRKIMIQLAWRMVKFQPDSALVQWFKQRTENAKGSRKPMIVALARKLIIALWRYANDGVIPEGFRLHSAA

SEQ ID NO: 331663 - protein, 493 aa, unidentified
MGACGLESGDVVLAAIPIRKMTIGIAQTLLLVIEWRIAMPKRTTGDRPELKTVSVGAAAIDIGSKMHMAAVNPACTDVPVRSFGTFTQHLHDLADWFKACGVTSVAMESTGIYWIPVYEILEQRGFDVILVNARYAKNVPGRKTDVSDAAWLRQLHSYGLLRGSFRPDAEIATLRAYLRQRERLVEYAAAHIQHMQKALMEMNLQLHHVVSDITGATGMRIIRAVVAGERNPDVLATYRDVRCHSSPETIRAALVGNDRDEHIFALTQSLELYDIYQAKMLDCDRKLEVLIAALSNKGEKPVGKPSKPRIKTKQVNTPTFDVRTALYGVLGVDLTEIHGLGPSLALKLVGECGTDLRAWPSAKHFTSWLCLAPGNKISGGKVLSSRTRRSSSRAAALLRLAATTVGRSDTALGAFYRRLSSRAGKSKAVTATARKIAVLFYNTLRHGMSYRDPGADHYEQQYRSRVLANLQRRAKSLGFLLQAIPGDADPAVS

SEQ ID NO: 331664 - protein, 340 aa, unidentified
MQISTIGLDIAKNVFQVHGEDGEGKIVCQKKMSRRGVVEFFSKLPACMVALEACGTSHYWGRTLRALGHEVRLIPAGYVKPFVKRNKTDARDAAAICVAAQRDDMRPVAIKSEEQQAWRALERSRELLVKQRTQLMNSVRALLAEFGIIAAQGLKGFAELRARLASEEAVAPVTLIEALRQLVAQIDNLSPAIAALEAKIVAAAKKNADMRRLSAIPGIGYLTAHAVVAAIGDGRRFASARDFAAWAGMTPGEHSSAGKRRKKGVSRQGESRLRKLFALGAVTLMRNARSRPERATEWRRAILARRPMKVAVMAQAAKTARIAWAVLVSGKPYMQPAVTA

SEQ ID NO: 331665 - protein, 370 aa, unidentified
MGNRSMFIGLDVHKETIDVSIAEGDRHGEVRHYGVIASDLEPLDKVVRALRAPNRRLHFVYEAGPCGFGIHRHLTSRGEDCVVVSPSMIPKRSGDRVKTDRRDSQMLARLHRAGELHAIYIPEATDEAMRDLVRAREDAVVVGTQAKYRLKAFLLRQGRRYPGREGWTLPYRRWLTDLSFPNAAQHIALQEYRDAIDETETRIDRLTEQLRQLAPTWRWAPVVAALQALRGVSFVTAVALVAELGDLTRFGHPRELMAYLGLVPSEYSSGPSVRRGGITKAGNPHVRRLLAEAAWAYQGIPRIGRQHAYRQEALPKVVRDIAWKAQLRLTMRFRRLVARGKAKPKVATAIARELTGFIWAIAREVSPTPR

SEQ ID NO: 331666 - protein, 314 aa, unidentified
MSSPSCYLGVDVSKNTLVVAGSGRRWQFANTKDGHRKFIAQIKKLSGSGHVVCESTGSYHLSMCLALQEAGLAFTVANAARIHYFGLSEGIIAKNDPIDAGLIERFANTKQPLADPPLCREQLALSESVTHRQQLVEMIKVLRTHRQQVLHAPLVTEIDKSITALEKRLEALERKLRAQVDAHPLWKKKLALLVEVQGIGFITALSLLAKMPELGTLNRGQCAALGGLAPYDNDSGKHQGKRTIRGGRKEVRCALYMAALSAAQFNPILKTFYQRLLAQKKLAKVALTAVMRKLLIYLNTVLKNISTPPLTTAS

SEQ ID NO: 331667 - protein, 359 aa, unidentified
MQQATGSAVERTVGLDLGDRTSRYCILSQDGTLLEEGQVATTEAALRRHFSPMDRARVALEVGTHSPWISRLVADCGHEVIVANPRQLRLIYENQRKSDRTDAEYLARLARVDPKLLAPITHRGEQAQADLALLRSRDMLVRARADLVNHVRGAVKSVGCRIPKCSTPAFARRAKAHVPELLEGALRPVLETIRQLSEQIRQLDRWIEQVAQSSYPETEVLRQVPGVGGLTALCYVLTLEDPARFPTSRSVGAYVGLVPKRSSSGQRDPELGITRAGDEMLRRLLVQAAHYTLGPFGPDTDLRRFGEKLAARGGKNAKKRAIVAVARKLAVLLHSLWSTGEVYEPLRHHPQAAQEQEAA

SEQ ID NO: 331668 - protein, 356 aa, unidentified
MNKIIRVGVDLAKHVIQVHAVDAAGKVVTNRALKRDKFLLWCADLPAGCLIAMEACSGAHHWCRKLTERGFDARMIPASSVVPYRIQGRTGKNDANDAAAVCEAASRPHINFVPPKTLAQQGMLCVHRLREGFKEERTSCINRIRGLLAEFGVVLPQSPDVLRHHLSDVIEDASNDIASIARLVLQRAQDHWRELDAHIKWCDQRIADHQKTDAQVQRAAELMGVGSITASAVVATVGDFRQFKNGAQFAAWLGLTPKQNSSGGKSSLGSITKRGSIYLRTLLIQGAKAIALTRQYDNPIFLWVQKLRERAGWQKAVVALANKNARILWAVMTREKRYDAHHISSYPAPVSIMTPA

SEQ ID NO: 331669 - protein, 323 aa, unidentified
MNKDIKYFGLDISHLVFDVTDSDGKYYQFKNNGSGFKKFAKLLNSDSHCVMEATGYYHYQLAYHLLESGIKVSVENPLSVKRFIQMKLSKIKTDKSDSKLICEYAQKVELKLWQGNSKDEIECLQITRALSVYTKQSTMLKNKLHGEAVLGEPSKAVVRSLKRSLTQLTKEMKTLEDKLLVLVKQTHQDLLTRLKTIPGIGPKTSIMLVVLTGGFERFSSANELCSYAGLTPVIRQSGSSVKGRPRISKIGNQKLRNLLFMCSFNACKCNKACRDLYERLVAKGKSKKLALIAVCNKLLKQAFAIAKSGLIYDNDYRSTLVKN

SEQ ID NO: 331670 - protein, 389 aa, unidentified
MSNIADRVEAPTAIQTNLTAIFISLELSRSIWLITSLSPGCGEKMSKHSVSAGDIAALLARFSELKQKALARTVKSFPIVTIQEAGLDGFWLHRVLQSEGIESHVVDPASIATSRRRRRAKTDRIDGEALLRALLAYKRGEPRVCAMVKAPTPEEEDRRRLCRERKVLIAERVKHVNRIKGLLFSQGVSGYEPLRRNRRQRLDELTTGDDRPLPPYLKTQISRELDRLELLLDQIKAAEAERDALLAAQQAAAPAPAGRMLLDLKGIGPEFAASLWLEALFRHFDNRRQLASYAGLAPTPWQSGAVDREQGVSKAGNPRLRTTLIQLAWLWLRHQPQSALALWFKERVSRDGGRMKKSAIVALARKLLVALWKYVTAGVVIEGAVMKAA

SEQ ID NO: 331671 - protein, 343 aa, unidentified
MQAVTTIGLDIAKSIFQVHAVDAEGNVAVRRRLKRRYVVAFFQKLPRCLVGIEACASSHHWARELQALGHTVRLMPPAYVRPYVKRHKNDAADAEAICEAVTRANMRFVATKTPEQQSCLMLHRTRHLFIRQQTAVINAIRAHFAEFGIVAPVGRNGVEALLHIVADGSDNRIPEIARACLVALGAQLRTLKAQILEFDRLIMAWHRSNEASKRLDEIPGVGPALATALVASVGDPRAFRSGRHFSAWIGLVPKQNSSGGKEKLGNISKRGDRYLRSLFTAGALAVIRYAKLHGTKHRPWLTALLARRPTKVAAIALANKLARMAWAMMAKGARYKEPIALAA

SEQ ID NO: 331672 - protein, 398 aa, unidentified
MHVGWDWASRNHDVTVIGDAGVIQARFAIGHDEAGLEGVLGELASLADPADLPVAIERPDGIIVERLVVAGHPVVPVHPNAFHAARSRWGAGRAKSDPADSYMLADYLRTDGHRLRRLRPLDPITRELQALVRMRGDHVAARTAATNQLHALLEAHWPGANAIFSRLGSTIALAFLGDYPTPESAVRLGEARLAMFCRRHSYRGGRTPTELLQRLRTAAIAPVGLDPIVLTELVQAQTTLIESALGSIAQLDAAIGAQLLVHPKAELLQPLPRIGEINLARIIAEIGPLLDRCDNADQAAAACGVAPITRQSGKTRNVQFRFSSNARARVALTCFADNSRHSSAWAQQRYTSARRRGIRHPHAVRIVARAWLRVIWACWHNHTAYDPALHASEAHHAA

SEQ ID NO: 331673 - protein, 364 aa, unidentified
MKRKVYVGMDVHKETIQIAYLTSNSKEILKEQQIKHNEVQIKKFIKKLKTEWNEIYCCYEAGVTGYPLYRYLKSLGVNCILVAPGKIPRQNTDKIKTDKRDAIKLARLMRSGELESIHVPSEEDEAVRDYLRSRDSLRLDLGRNRQRLMKFLLRKDIKYSTTKYWTVSHYKWLNNLHFNNEILQETFNDYYSRVRVQEENLKSMDKKIQEIAESEPYREKVGILRCFRGVDYLTAMFSLCEVNDFKRFKTADSFMSFLGLVPGEYSSGSKRKQTGITKTGSPRLRRILTEAAWQHRFPGTGSKIITARRSGQPALVVALAEKASLRLHKKFRNLQLRGKTPQVMITAVSRELSGFLWAAMNLVA

SEQ ID NO: 331674 - protein, 447 aa, unidentified
MGFISILYRYEAVSALKELKKCPWGTEVKHTKDVKMHYYVGIDIAKGFHVACVVNQDDKVIKKSLKFNNDESGFEELLLLLNSIDEVSTFTIGMEATGIFFENLYLYLSEKGFNVILLNPYQTNRFREMDSMKKVKNDNIDALMIAALIKSGRYSKAYVSEDMYQSIKSLYRHKNNLLEEMKKHKRQISTLLAVVFPEMEQVIKDPFNVTGLALLEKYPTAKHYHHASVDRILKTFRGIKGNNFNEEKASKLLELAKHSVYQGNGVDERAYVIKSHIRVIKLLQEELKELEDEMLKLFNQQVSLDADEEQKVMDIIDNLRTIPGVSDKTIFALISECGNLSRFKNNSHLIGYLGLYPTLEQSGNKLTYGPIAKRGAKLAKKALYQAAIAAIRHNDELNKLFRDKVSQGRAKKEAVVIVARKLAHIILAIYKNNVAYNPQRVFQASAS

SEQ ID NO: 331675 - protein, 351 aa, unidentified
MPRTSTVHAVSAIGIDMGKNTLHMIGLDSRGAIVLREKVSRGRVTSRLANLPACLIGIEAGMATHYVARELTALGHDVKQVPPTYAKPFRQGHKNDFRDAHAVAEAVQRPTTRFVPAKTNEQLDLQALHRVRSRLVSERTAVINQIRGFLLERGIIVRQGLRFLRQVLPEILAKRTDVLSPRMVRIVADLASDWRQLDERIETVTDEIETLAKGDDSCRRVMTVPGISPIISSAMVAAIGSGAAFARGRDFSAWIGLVPKQMSTGDRTILGRISKRGNGYLRMLFMQAARVILLRPASWPKHSFGVWLARAAQRLHPNVLAAALANKLARIAWTVLAQERSYEARVTKAAA

SEQ ID NO: 331676 - protein, 371 aa, unidentified
MKSIIYIGMDVHKKTYSLCALLKETGEIIGETKIPADVSLIIKFIENAKKSVDSDDVQIKTGYEAGCLGYSLYWQLAEKGIECDILAPSTMHRSAKNKVVKNDRRDAKNIAANLANGTYKSVYVPTDEDVEIKEYIRMMHDFKIELKKVKQHINAFLLRFGHQYPGKSKWVPAHIKWFKELELSDMHREILDEYLSQLEILSEKIERFKHRLEELSQKETYNEKIGQLRCIKGIDTTAAMTMHAETSDFDRFPTANAFASYCGLTPGEDSSGESYHRPSITKQGNSMIRTTLIEAAQVLVRGTIGKKGKKVKSKQKNQDVKVIDYADKAVVRLQKKYHRMIFRGVKRNIAITAVARELACFVWGIETGHIS

SEQ ID NO: 331677 - protein, 377 aa, unidentified
MSRVRFLGLDVHADTIAVAVAEPDGEVRALGTIPNRLESVRKMVTKLGPIKHLKACYEAGPCGYALYWQLTALGVACEVVAPTLVPVKAGDRVKTDRRDAAKLARSYRAGDLTAVWVPDADHEALRDLVRAREDAREDERRARHRLSKFLLRHGKRPPETVRKSWTLKYMAWINEQVHFDLPALEATLLDYVHEVNHMAERIERLDKAIVEAILKAPPAMRAVVEALQALRGVAQITAVTVVAELGTLSRFDSPRKLMGYSGLVSSEHSSGNRIQRGSITKTGNAHLRRVIIESAWAYQYRPWIGGYLRKRQQGLDQDIKDVAWKAQGRLHARYKKLAAAGKKKPQIVTAVGRELLGFIWAIAVRTEAKFQAVQKAA

SEQ ID NO: 331678 - protein, 422 aa, unidentified
MLTATQENEEIIERVAALDIGKAELMCCVRVPDEDHPGRRLQEVQAYPALTRSVLRLADHLTRLGVTRVVMEATADYQKPVFYLLEAAGFETWLVNAKDVKHLPGRPKTDKLDAVWLCKVAERQMLRPSFVPPPPIRKLRDLTRYRADLVAARTAEKQRAEKLLEDACIKLSAVITDIFGVSGRDMLAALVAGERDPKVLAQLARRSMRAKITVLEEAFTGHFTDHHAFLLGTMLRRVDAISADIATLDARIAGQAAPLTAAAAQLDEIPGISLASAYVILAGIGTDMARFPAAGHLASWARLAPGISESAGKKKGKGSTGHGNAYLASILGNAAAGAATTDTFPGEKYRRIARRRGSKRAIAAVGRSILVIAWHLLSDPGARLRDPGPGYYATRIDPERRQQSHIRQLEAPGYTVTLQPAA

SEQ ID NO: 331679 - protein, 348 aa, unidentified
MWLLCDTGAVVRHGMYAGRRRGSDRFPLGRDGPWRSKVALVFSDDLNGYLGPVITVGPYDKTRWKRHMDNTIGIDVSKDTLDVHRLADGQYKQFRNGKSGHAQLIKWLGMQPDPLVIFEATGAYHRQLERALGTHFVPFVKVNPKQARRFAQASGKLAKTDRVDCEMLAKMGAALQLVPKPLTAENLYDLRELLSARRALIKDRTAAKARKATVVNALVKQLLAKRLRQIEGDIEKIDALMLDVAHQDHRMSERLDILFSIPGIGMVTALMILVDMPEIGALNNKQVASLAGLAPMSQSSGKWQGKARIQGGRPNLRNAIFMPALVAIRYNVDLKAKYEQLVAAGKEK

SEQ ID NO: 331680 - protein, 349 aa, unidentified
MGQIQNAIDGLYAQYPGALVVVDQVRNIGSLALSRARLAGMPRAYLPGLAAHGASRLFAGDAKTDERDAMVIAKTALGIPDALLPVADRPPEIEAARSLAAQRDFLTCENTRSKNRLRSILLESCPEFEAHADLSDPATLKLMAAVGGPWSISEASPQAVGALTRGCGRAKVAALVESVGSSSRPHPAAVACEDRAVRLLARRISENAAEIESLTSEISALLSADETYRCLLTVPGIGPRTASELVISIDIADFPSHDRLASYCGLAPRNRRSGTSISSVSASRQGNKRLKNLLVFSCNCLARSRNRWGDYYARCRERGMPHGKALKAVARKRLKVIYAIMRDKVPYSA

SEQ ID NO: 331681 - protein, 337 aa, unidentified
MKVTLIGIDLAKNVFQVCGVNQACKSVFNRALRRHQLMAFLAQYPDAIIAMEACSGSNYWGRSLKAQGYQVRLIPPQHVKPFVKGNKNDRNDAFAICEAAYRPNIQFVEPRTLEQVDMMLAHRIRERQVDARTTLINQIRGLLNEYGIVIAQGKESLKAALPDLIEDAENELTERARVHFTLLHQEWSAIDEAIKSSEKDIKQQAQASEGAKLLMQIKGIGEITATAVVSFAGNGSSYKNGRHFSANIGLVPKEHSSGGKQSLGGITKRGNRYLRKLLIQCAWSIIRHCKTAQDRLSVWVKTLIERRGSHKSAVALANKLARIVWAILFKKTEFRAV

SEQ ID NO: 331682 - protein, 412 aa, unidentified
MDVIVERPAALDVHKAQVTACTRVPGEHGERVQHLAEFKTTVRGLLALRDWLASHGVTQVAMEATGVYWQPVWHVLEDDFELLLVNARHVKQVPGRKTDVSDAEWLCRLAEAGLLRSSFVPPKPIRELRQLTRYRKAQISERQREANRLHKALEDSGIKLDCVATDILGKSGRAMLDALCSGTTDPAVLAEMAKGRMRTKLPELREALEGRFNELHALLIGSILAHLDFLDGQIEALSQAIEVKLAPFASAVELLRTVPGIEQRTAENVIAEIGVDMGQFPSDAHLASWAGQCPGNHESAGKRKSGKTRKGSKWLNEALKEAGMGAIRTNGSYLQALYRRKKSQLGHARALGAVKHSILCSIWHMLSTGELYNDLGADYHARRNPERQTKRLVSQLEALGHHVTLQAVQVAA

SEQ ID NO: 331683 - protein, 394 aa, unidentified
MRISVGIDVAKDTHWVVALRDTGEAVLDRAVTNDPAAIDALVRELETLAGECTIGLDVLGGIATLLAAMLLAAGQRVVHVPGLAVNRARQGTTGGETKSDPRDARVIADQVRSRRDLRPIALETDALAALQLLVGRRRELVTEQTRRLSRLHDLLGRVHPGLEHQLDLTSKGGLWFVTRYVTPAEIRAAGRARLVRHLQRAGGARQVEAVATAALEAAHQQQIALPGERVAAALCRELAREALATRARLAEIEAELGRVLAAHPDSTLIRSLPGMGGILTAEFLAEVGTRDRFASADALAAAAGLAPVLRQSGKVRFLRRPLGGDKRLKRVFYQAAFCSLHCPASRAFYARKRREGKRHHQALLALARRRVNVRWAMLRDRRPYELQEPRRGAA

SEQ ID NO: 331684 - protein, 414 aa, unidentified
MLKIVYRICCGMDVHKSFVVACIASTNEQGVTSYKSKRFSTFTGDLRRCAVWLAENNCKDVCMESTGKYWIPVYNILEPTCNIVLAHPKYVKAIRGKKTDKKDAKWIADIFKHDLVAGSFIPPADIRQLRDLVRYHWKLTNFNTGEKNRAQNCLTVSNIKLDDVFSDVFGKAASAITTRILENPMEKITDVSGFRTKGMKATNEQVLAAVDGEMCAEQAEKLRIIRSHMDNLELCKLNLESLILSTAEKYLPQLNLVMTAPGIQSFSAIGIISEIGVDMSVFPTSKHLCSWAGLTPQNNESAGKKKTTRISRAGAYIKPLLVQCALCAVRAKQFPEVRSRYLALKKRRGHKKAIIAIARMLLTAIYNMLKRNEPYNPELYRKGDRPPAHREVSVEEAIFILQRQGYLVTMPPTA

SEQ ID NO: 331685 - protein, 441 aa, unidentified
MTMVGGFDVHRQQITFDYVDDDGLVRWGQIRPATRKTLRCWLGEHCAGGDGEFALEGCTGWRYVVEELAAAGMVAHLGDPAETAARRGPKKRAKTDRADARLLRTLLVEGRFPESWIPPAHVVEIRTLGRLYCTLMAERRAWQQRIHAQLFHQGCPPIRALLSAAGREALAGAELSAAGRQYVDTALRRIDELGAEIDPLRTQLVTFTRHQAGCRALQAHYGIGWLCAAIIWAEIGDARRFASSDQLVRFGGLDVTVYSSTPNARRDICRVRAHPSCAGRRLRRPSARPAAVPRITATTTGWRPSMRATTARTRPWRWSASCCAAAITRCGSSAMPPWRCRTPDHRRWLPKMRCARALPIYQLMPAAGSSRSPVATPLLGGLPGKIERPHPFTSPHVGHPIHHHLAGPLSVDPDKAGRRHGRRHARRVSRITFYHGRQQMT

SEQ ID NO: 331686 - protein, 383 aa, unidentified
MDTAATRTYEYSVFDPVLYLAFELSDANWKLGFTTGTGRRPRQRNIKARDLDALQEEIHRTKKHFEMSEAARIVSCYEAGRDGFWLHRYLVEQGIENLVVDSSSIQVNRRARQAKTDRMDVEKLLSQLIRYRSGERDVWSVVHVPSKEEEDSRHLHRELETLKKDRTRHINRIKSFLVGQGIRMKVKKEFLEEIEGVRKWDGTPLPESLKARLQREYRRLQLVQEQIRELEQERVNAIRHSESESVKTVRSLLQLRGIGLNASWLFGMEFFSWRMFNNRKEVGSLSGLVPMPHQSGDSYRERGISKAGNRHIRAMAIEIAWGWLRYQPESELTKWYEKKFGQGSKRIRKIGIVALARKLIIALWRYLETGVVPEGAVLKTRLI

SEQ ID NO: 331687 - protein, 389 aa, unidentified
MKIYVGIDIAKLNHFAAAISSDGEIILEPFKFTNDADGFQLLVSKLESFDKNSIIIGLESTAHYGDNLVRYLVAEFYQVCVLNPIKTCQMRKNNIRKTKTDKVDTFVIAKTLMMQDDLRFVSFYDLDMMDLKALGRFRQKTIKQRTRLKIQLTTYVDQVFPEIQYFFKSGLHQHAVYALLKEAPSPKEIASMHMTHLANLLKVNSHGHFTKELAKELRVLAQKSVGANDSSISIQITQTIQQIELLDSQLEKIEAEMTDIMRFNDSVIMTIPGIGYINGGMILGEIGDIHRFSNPNKLLAFAGLDPSVYQSGNFQAKTTRMSKRGSRVLRYALVNAAWNVVRNNATFKAYYDAKRAEGRSHYNALGHCAGKLVRVIWKMLTDEVEFNLE

SEQ ID NO: 331688 - protein, 437 aa, unidentified
MNPQTEYRAFLALDWAEEKHAWALVGADSTKQKPLLGTVENSPEAIQKWVQELDRRCCGPIAVAVEQQRGPLVITLLEYPQLVIYPIHGASLANYRKSRSPSGAKSDPGDAAMLVQFLRERIADLKPVRCLDPETTQLLKLVKERRHWVDEKTALHLRLKDVLKAYFPQMLSWFDDLTTPMAAAWLKRWPTLWALKTARPATLRKFFNEHNCRSEELIEKRLAGIAAAVPATSNAAVLESHQLVSQCLLEVLVPVRANIARLDKAIERVAEKHPDFIVVDSFPGAGPALVPRILAVLGSVRDQIESAYQLQCYSGIAPVSESSGQQEWVHFRWVCSKFLRQTFHEWAGHTIGHCSWAREFYQSLRDKCKDHHAAVRALAFKWIRILYRCWQTHTPYDDSLYVAARARRRQSPRNPQTLPTHLWKKEAGFSKLAPLTS

SEQ ID NO: 331689 - protein, 312 aa, unidentified
MREHCYGGIDVSKDRLDVMVLPDSKSFSVDNNAAGYSELVKRLRDLPIAAIGIEPSGGYERAVIRTLLAAGLSVRRINPNKLRQFARARGVLAKNDRLDARLIAEYVTIMPTRLVQRDPAAEQLAEVVTMRRQLCDEHVAVENQTTHLEDAMLRRLNKRRLARLEADILLLDTRMAQIVASHANLTRRYELLTSMRGVGPTLAFTLIALLPELGQMSRKQIAALVGLAPYDFDSGRLKGHRCIYGGRLPVRNVLYMAALSACRYNPALKVFHSRLAATNKKPKVIIVAVMRKMITTLNAMLRDNVAWQPKSA

SEQ ID NO: 331690 - protein, 371 aa, unidentified
MSESSTIFVGLDQHKESITVSYVGADRSLEPICLGPIGPRTSDVDAMVRKLQSKGKKLVFAYEAGPCGYGLYRHLTRKGHTCLVVAPAKIPRKPGDRVKNDKRDATNLCRLLRSNDLKCVYVPQIADEAIRDLCRAREDAVSDLKSAKHRIKSFLLRHDIRFNGKADWKTPHLRWLGEVKCAAAAQQVVFQEYVRAMVQGFERVGRLEIELTQHVKSWRLSPVVEALQALRGVRFTVAVTAIAELGDLTRFEKPRQLMAFLGLHPSEHTSGERRRLGGITKTGNTHARRALVEGAWAYRFPARVSKQIQARQEKLPEAVRDIAWRAQVRLCKRFQKMIARGKNANIVVTAIARELAAFMWAIAKQVPVAAQ

SEQ ID NO: 331691 - protein, 344 aa, unidentified
MTKVTTVGIDLAKNTFVLYGLGLKGHCGWKRKVRRKQLLEQLVRLEPCTVALEACGSSHYWARQIRALGHQVELLPPQHVKGYLRGQKNDYNDAQAIAEASEHGRIRPVPIKNVEQQDDRMLHKLRQGVSKDRVRISNQLRGLLAEYGVIIPQGLAALRRELPRALEDADNDLTERSRQLLNRQYQHFMQLEDELAWYDEQVQTMAKQDETCRRLQAVPGIGEVVASLLKSWMGDGRQFRRGRDAAAALGLIPRQNSTGGKDVLLGISKRGDPYVRAQLVHGARAVVARVDGKVDRLSRWLQRLKAERGFNKATVALANKLVRIAWVVIARGEHYQPLEQRLAV

SEQ ID NO: 331692 - protein, 403 aa, unidentified
MNGSVISFDVSKGSCHYQAFIDFKKPIFKPKKLMWTLDSFENLQKDIELLKEESDGNSIEFILEATGIYSKPLEKWLKDGGYTFYVISPLLDAKYRQTQLHGNKTDALDCAHIAQVYYSARLTPKQNEEEVYVKLRSLNRYYEDQLDHLRKYKVTLRAYLDSVMPGFDSNFPNKDIYKELSIEILKKYPHPIKIHRATRNSMIKYLLKKTSHHEAFIERYVDRIKEWSYQTYSGFEPEDEEVHIISKLVIKIEQTNKEADETLEKIIELAKTTPHFDQIHSICGIGENLAARIIAEIGDMKRFKGKNQIVSYAGLDPMIRQSGNVDGNHLSISKKGNKRLRCLLYLAVSCNLRLKKEDTIYNYYQKKRQQVTPLCAKAARIACAHKLLILIYGICKTDAYYNY

SEQ ID NO: 331693 - protein, 338 aa, unidentified
MGILYVGIDLAKNVFAVHGVDDAGRPELVRPSVPRAKLHELIAALPPCTIGMEACSGAHHWAREFHAHGHTVKLMAPKFVAPYRLSGKRGKNDAADAVAICEAVQRPHMRFVPVKSAEQQGRLMVHRARQGFVESRTATLNRIRGLLSEVGIVLPLKAATVRSRAAAMLEDLPGWVNTVIGDLLSEVHRLDERIAQYDRHIALMARQDDRAGQLMRLCGVGQTTATALIAMIGNGHDFHNGRQLSAWLGLVPGQYSSGGKTRLGRITKSGDAYLRSLLVTGARAVLNAAKGKSDGISRWAVQLEERRGYWRAVVAIAAKNARMAWAVLSRGERFVMPA

SEQ ID NO: 331694 - protein, 320 aa, unidentified
MSQKTTAIMNQNITPVYAGLDIAKATLQLHLQSRSYDLSTTSAGHTQLIKRLAAIPGVQVICEATGGYERAVVAALHAAAIPVSVINPARVRQFARASGELAKTDPIDAAMLTAFGQAFTPEPTPPRTATEIKLAALVSRRAQLLELHVAERQRADTCTEPALCKLFTAWLAQMEKQIAKVEALIEELLAEQATLANQVQRLDEITGVGRITAVTVLASMPELGQLNRRQAAALAGLSPYNRDSGQWAGKRCISGGRAEVRRALYMAALSASRSNHLLKPFYDRLVAAGKPGKVALTAVMRKLIVLMNHLLKNPNFSLAH

SEQ ID NO: 331695 - protein, 359 aa, unidentified
MKNEILKQALGIDVSKDNLSMCLGIMNADLVKDFIPREDVSNDLTGFKVLLKWLKKVSKGNVLPIVVMEATGVYHEEIAIFFHKKGYQVSIMQSGRVKRYAQSLDQRSKTDALDSKMLSMLGCERKLSIWTPPSKLMQKLKALSRERSTIIKEKSADKNRQSALNSSAYSNNKELKRYRQRLELFNVQIKEIEQEMHKLTVEDENLLRKMSYIESIPGISFISAITVVAETAGFELINSGKQLSSYAGYDVVIKESGSYRGKTRISKKGNNHIRAVMHMPSMAAVRVNPTLKIFYERLKPKKVKPLIALVAVQRKLLILMYTLWKNEAYYDEKFEQKKQQENMFLAARDRKQLKVESSL

SEQ ID NO: 331696 - protein, 331 aa, unidentified
MTNNVYVGVDVSKNILDTLFRFPAGQTAEQRSFSNAKTGRKKLISRLSQMPGAHVVMEATASYHLGLMYDLNEADIPFMVVNPFCAKAYGRSKNLRSKSDTIDANTLAEFGSERPFIPTQMPSDNQLKIRQLASVIRLLTKHRTATKNSLRMIEQMPVISSDATKELKKIIALIDKAIARATEVMKQLVLACHAETLALINSVKGVGLKTTLILISYLGDLDSFQSAKQVAHFMGLGNVDNQSGQRTRPRRISKRGHPELRSLMFLCALSAARHNTSCRDLYQRLMAKGKPKKVALIAVANKLVRQIFAVVKNKTPFENNYLEKASISLAS

SEQ ID NO: 331697 - protein, 467 aa, unidentified
MPKDTKNKPFKSKKKKQAHRNGLPKHLQHINRMAAGIDIGSKSHWVAVPEGCDTQPVREFLSFTPDLLELATWLKKCGIETVAMESTGVYWIPLYDLLESLGFEVKLVDARHVKNVSGRKTDVLDCQWIQQLHTYGLLNGAFRPNPQIRALRAYSRQRGMLIQAAAEHIQHMQKALSQMNIQLHNVLSDITGITGMRIIRGIAEGERDPKILANYRDRRCKSSLEIIEKSLTGHYCEEHVFSLKQALALYDTYQNKIAECDEEIEKQLMTFSERKKIEEDELKDRATKRKGKGRSKNAPLFNLKAHLIRITGVDLTNIPGIESVTALKIISEIGFDLSRWKNSKQFASWLGLCPGNKVSGGKRLGGKSKRTANYAASALRMAASTLHGSDSGIGAFFRRLKFRLGAPKATTATAHKLGVIIFEMLTKGVEYKEAGQDYYEQQYRERMVKNLNFKAKKLGFNLVVAPC

SEQ ID NO: 331698 - protein, 340 aa, unidentified
MTEVSMIGIDLAKHSFQLHGATADGSVAFRRKVGREKVLEVVGSYPRCVVAMEACASAHYWGREIGALGHEVQLIAPAFVKPFVKRQKNDAADAEAICEAAQRPTMRFVAVKSEDQQARGMLFRTRDLLVGQRTQTINALRGHLAEFGVVAAQGPAKVIRLAEVLEDPGSGLLEEVRELGRLLVRQIAGFDERIAELEKTLRRAVLEDADARRLMTIPGVGPITAMAVQAFAPPMESFRRGRDFSAWLGLVPRQHTTGSKPQLGRISKMGQRDLRRLLITGAMSVVRHAGKRSERANPWLAGMLARKPKKLVAMALANKMARIIWALMMTKETYRSPATA

SEQ ID NO: 331699 - protein, 354 aa, unidentified
MSSMTVSTPTRQPMFAGIDTHKATHHVAVVDADGAVLADQEFPADADRSVLAWLSRWPIARVGVEQTGTYGAGVTRVLTGAGFAVIDVNTPDRTVRATAGKSDPIDAVMAAHAVRTRRARVIPKNRDGVIEAIRLLQTARHSAVKARAAALTQLQDLAVIVPSDVRRRVGTTGRSTAAAALAMRADRTRLHTPTQAAKLALRSVATRIRVLDAEIRDLDAALTEQVTATAPRLLALPQVGIHAAAQLLVTFGQAPDRISSDAKFARLIGVAPIPASSGKTNRMRLHTGGDRQANKVVHLIAIGRLRSHQPAIDYLTRRQREGLSKKDAIRAMKRLITRELYGALKADLTALDEL

SEQ ID NO: 331700 - protein, 341 aa, unidentified
MDISVLGIDLGKNSCSVVGLDVTGKVVVRRRMRRGTVITYAASLPACVMAMEACCGAHHMGRALARQGHAVRLMSPEYVRPYVKAQKNDDRDAEAIAEAATRPTMRFVELKTEEQLDMQTLHRIRDQLVGDRTSLMNQIRSLLLERGYIVPQGRAKLAARLGEMLDVDEPVLGPRIHRLVSDMRLRWIALDDRIADLDAEFTEAARSDERMRRLLSIPGIGALNATALVAAVGDARTFGRGRDLAAWLGLVPRQATTGGKPRLLGITKRGSRYLRKNLIQGARSSLPTMSKSNTRLGAWLRGLLSRAHPNTVVVALAAKMARIVWALLRHERTYEPVAQAA

SEQ ID NO: 331701 - protein, 404 aa, unidentified
MNNVAGVDVSKGTSMVSILRPFGEVVAKPFSVGHTGSELKELADYLKSLDGETRVVMEHTGRYYEPVARFLHEEGIFVSAVNPKLVKDYGNNTLRKVKTDKADARKIARYGLDNWVELRQHTPMDTIRIQLKTLNRQQGLYSKTKTMMKNNLIALLDQTYPGVNDLFDSPVREDGSQKWVDFAATFWHVDCVRNMSLAAFTERYRKWCKRHGYNFRQSRAVEIHAGAQDLIVILPKDALTKTMIWQAADALNAVSKSLEHLKAEMRALAAQLPEYPVVMAMYGVGDSLGPQLMAEIGDVTRFTHRNAITAFAGVDPGADQSGTHEAKSTRASKSGPPELRKALFLVMDCLLKTMPQDDPVYRFMDKKRAEGKPYLVYMTAGANKFLRIYYGRIKEYLASTENSD

SEQ ID NO: 331702 - protein, 404 aa, unidentified
MVRYHVGIDVSKHKHKACIRDLALDSYSGVFSIAVDRQGFDKFISTLEKLSQVRDDFLIGIEATGNYGLTLACFLLTHGYLVVEINPYRANQFRRAQGKKAKTDRIDARSLSTILSLENHKRLFLPDPILDNLKELTRFRADMVRDRTKLVNQLHETLYTIFPEIATIFSELDSPSCLSLLLAYPGPEYICHAGESKVFETLKAASRGKIGLPSARILVEAAKNTVGALHKQPATAIKVSILGERILSITTAIEKIEKEIADLFHQLPFRAKDFPVGDISSLATIISEVEDIHRFATVKQFLSHFGWCPRTFQSGSYKLERPRISHAGNRYVRRVIWMLSIVAMRAVPRYRAYFERRVAEGKSKMHILVAIGRKLLSVFYAILKRGIPYDPDWEVKRHSALARS

SEQ ID NO: 331703 - protein, 466 aa, unidentified
MERKGGKGALAEAAGRRQRKGRGKRAGKAGFELAHPDCAGIDVGSGSHFVAVPADRGNPSVREFGSFSDDLHRLADWLSACGVRTVVMESTGVYWIALYELLEGRGFAVYLVNARHVKNVSGRKSDVLDCQWIRDLMSFGLLRGAFRPSQEVCALRAVMRQRDMLLAGQARHVQHMQKALAQMNIQLANVISDVVGETGQRIVRAIVAGERDRSRLAALRGPRIHASQEEVGRALEGTWRAEHLFALKQALALFDTYAQMLMECDGELERMLERLARYDGDPGKPKRRGRQKNAPRFDVRVHLFRACGVDLTRIDGIDTTTALKVLSETGPDLSRFPTPTHFTSWLNLCPNTRITGGKRLKGRERNRCNRAGQALRQAAVGLSTSKSALGAYFRRMAGRLSKAVAVKAVAHKLARLVYAALTKGMVYVDRGMAAEEERYRVRAFKHLAKRAAALGYSLAPTLQAAK

SEQ ID NO: 331704 - protein, 409 aa, unidentified
MRYYLGVDWADQTHAVWVVDERGTKVARRTVPHTAEGLSEWGCELDEWRAQGTELWAAIERPEGRVVDFLLDHGVVVYAVNPKALDRARDRFRQSEAKSDPFDARVLADFLRTDHAHLRALRPSSEAAQELKLLTDDYQRQIRQQTRLVNQLTTTLKAYYPRGLEVAELTTALAREFLQAYPTPAALTALTERQWQRWARAHRLSEARTRELWAVLQGPQLPVPAHVVRAKARLMQSLVAQLTLVVEVVGAYREAIEDFFGRLPAAQWIRTLPIGDHGITAPTLWARLGDAPSRWESFRHLQAQAGTVPVTIRSGKQQVVRFRFACDKSLRYVIDHVAFLSLRWSAWARAYYDEQRARGHSYRQALRALSAKWLKIIFVMWERHVPYDEQYHLATMTRQQLRLRQKQIA

SEQ ID NO: 331705 - protein, 350 aa, unidentified
MKKICIGIDVSKETLDVTVIHIESYELMEKLGYSKFENRPSGFRSMTAWVRKVIKSRGQMDEALFCMETTGSYDLPLCHWLHKNGLNVWRESALQIHCSKGFQRGKSDKEDSEIIAQYAARHQNRYTAFVPDAEAIADLKELICYRDSLVERRKECKVRLANKKETLVNKNSKAWKCIERLSKAEIKRLDKVIGECDEEIRNLMKEDEEMEKNYQHLTSIVGIGLINGAALIAYTGNFKKITTPNKMSCYCGCFTFYEDSGTSVHRKSPYRNACCKMLKGYLRMAAKSAMLANTELRKYSERLREKGKPYAVILNNVANKLLHIMFSLVKHDYDYEYNHEVVRRMERGIA

SEQ ID NO: 331706 - protein, 370 aa, unidentified
MGWTLPLNGIFVPEWLCRNHYKREQERASMEKVSIIGLDLAKSTIQVHAASVNGSVLSRRKVSSKKLLAFLSGFDPCIVVMEACAGSHHWGREIAKLGHQVKLIAPIYVKPFVKRQKNDAADAEAICEAAMRPTMRFVAVKSEKKQAAATVFKVRDLLVRQKTQIINALRGLMAEFGITVPQGPAHVGILISHVEDDSSNLTEAARAPCLALVLTLRALIDKVRELDLEIGRRARHDDVAKRLMSIPGIGPVIATALEALAPPAETFTRGRDFSAWMGLTPRQHSSGGKPRLGKTSKMGQRDLRRLLIIGASAVVRWASRRGAVEGSWLSRMIGKKPPMLITVALANRMGRIAWALMTNGGRYEEKRLAA

SEQ ID NO: 331707 - protein, 337 aa, unidentified
MRLYAGIDLHSSNNYLGIIDEENKRIYKKKLSNDLREVLNALEPFKEEIEGVVVESTFNWYWLVDGLMEHGYPAHLANPAAIKQYEGLKHVDDKVDTLWLANLLRLGILPEGYIYPKEGRPVRDLLRKRLQLVRHRTSHILSTQNIITRNTGKKMGTGDVKKLDEEWVSDLLKEKHLLLSVNSSVGVIRYLTDKIKHIERVIKSEVKLRKEFKGLLTVPGVGDILALTIMLEVGDMGRFKEVGNYSSYCRCVRSIRISNEKKKGEGNRKNGNKYLSWAYVEAANFAVRFYPGINRYYQRKKAKTNGIVAIKAISNKLSRASYYIMRDRVVYDSRKLF

SEQ ID NO: 331708 - protein, 355 aa, unidentified
MTITKYIGMDVHKESISIAVMNSAGKFVMECVIETKGSMLLQFIDGLRGDVRITFEEGTWAAWLYDLLKPHVSEVVVCNPRKNALLKDGSKSDRIDARKLAELLRGNHLKPVYHGEQGLRTLKELARSYLTISKDVTRVMNRLKALYRSWGIACAGTKVYAPRHRSEWLGRISEAGVRRRAEHCYQQLDALRLLHQQVRRDLLLESKKHQAWRLLGLIPGIGPIRAALLLALIQTPHRFRTKRQLWTYSGLGLETHDSAQYRVVEGQLQRSKKPVTLRGLNQDHNHDLKDIFKGAATRVSSSSGPLHDFYEHLLAQGRKPTMAHLTLARKIAAITLIVWKKEVRFDASYLKSQAA

SEQ ID NO: 331709 - protein, 389 aa, unidentified
MNHIVALDRHGDKPLINRKVPQEEAEIRAALEEAGDFGLALVIVDQFGAFGRLVVGVAKSMDIPVAHMSPRRFRQVAETYGEDKFDEKDAFILADASRTTPRNIEFVGNRAESMAEIKVLSSRRDDIVEERTRCYNRLHDFIHQVSPPLEELFSKRKLHNDLEIRLIARYGGPIGFRQAGRARASTWAAELKYHCVDGPKKVEQVFDVLDRQTVMLPGAAVIEEQIRSIASRIIELLAEEKRLNLMIEQRAKMIPEVDLLQSIPGVGPVYAALIAVEIGDIGRFRDSNHLASYAGVAPRKEESGTSVHKRRKRKGGNRRLKNALMQSSQRSVQCDPLARAYYERKRAEGKKHLQALRALARHRVTVIFAMLNEGTFYEPPVEVNENGRG

SEQ ID NO: 331710 - protein, 422 aa, unidentified
MIDQEKFTWFAAIDWGTESHQACVLDAGGGIAGERAFSHDGAGLALLCDWILSIAGSATGVAVAVEVPHGPVVDSLMDRGMAVHAINPKQLDRLRDRFSVSGAKDDRRDAYVAADGLRTDRHLFRRLHVADPRLIELREWSRLAEELQQERVRLSNRLHNQLWRYYPQMLKLTDDVAADWLLDIWTLAPTPTKSKHLRKTSVERLLKRNRIRRIDAETVLHTLRQAAIKVADGVTEAATIHIRSLIARLRVVNRELRDATHKLDELCAGLEETPAAAAEHGGEQHDVKILKSMPGIGRINLAILLAEASGPLSLRDYQALRTLSGVAPVTKQSGKSRVVVRRYAAHGRLCNAVYHWARIATQHDPKSRSRYVALRQRGHSHARAIRGVADRLLALACTLLQRQTMFDPNFGTTEVPELNTVP

SEQ ID NO: 331711 - protein, 443 aa, unidentified
MSRKKHTHLRGERGQAFADKIRGIAMEQILCVSLDIHKYFHVVLIHNALGEIVTMTFEIDIFQAGFDRLCRAIDEAVARTKAQVVLVGMEPTGHYFENLARHLHQRPQPVTLINSFAVSRNREQQMMRREKDDEIDVAAVGDLLRRGEGTPFQPISGIYLEMQHLSRVRLSRVKMQTALKNQIIGHLDRIFPGLVIQGKVARERYEPLFAADFWSCQTLQHLIRVCPDPRQLATIAPEDLRTAFHAQRFALGAKTAAKIITYAQKVLLPDPEVVAIRCELLAHDLALLAQVERRIAQLEDRLHALLRQTPYWVWTKVRGLSMTQVASLAAAIGDPSHYTYAAQVFRRSGLVSGRNDSGTRRHKGKGKRVVKTGDVYLRRALMTAIMSLIRHQPVLQDYFNELHRTKHAGVARVATARRAIGILWAMQRDQHSRTLVLKRGAEM

SEQ ID NO: 331712 - protein, 442 aa, unidentified
MKQKKVLKKVVRGLPKNLQHINVHAAGIDIGSRSHFVAVPEGIDEMPVREFSSFTGDLEQMAAWLISCGVTTVAMESTGIYWIPAFEILERHGIEVKLVNARHVKNVPGRKSDVLDCQWLQQLHTYGLLRGAFRPDAQVCTLRAYVRQRAMMVRSAASYIQRMQKALSQMNLQLHNVVTDITGLTGMRIIKAILSGERKPEVLAAMRDRRCKNSVATIARSLQGSYRPEHLFSLRQAVEFYEFHQEKISACDLQILEHLKSFDSQNDKPPKNVEEALQLMSGVDLTSIDGIDTNTALKILAEIGTDMSRWKSAKHFASWLGLSPGTKVSGGKVLSSATKPVANKAAAALRIAAFTLLNSKSALGAYLRRQKARLGAPKAITATAHKLARLVYMMLKQGTAYVDAGQEYYEKRYRGRVVQNLKRKAQELGFELVAIQEAMTPA

SEQ ID NO: 331713 - protein, 407 aa, unidentified
MLFAGDDWAEDHHDIEVQDEQGQVLARARLPEGIAGITRLHALIGQFAGPDAEPGEVAAGIETDRGLWVTALRAAGYAVYAINPRQVARYRERHGTSGAKSDKADAHTMTGMVRIDARQLRPVAGDSAGAEAIKVAARAHQTLTWERTRQVQRLRHQLREYFPAALEAFEDLDAPDALELLARAPDPARAARLTRAQVAAALKRARRRGIAGKTDAILAALRTGQMRQPQPLAEAYAAAVRSLTVIISALNGEIATMERQVTACFRGHPDAAIYLSQPGTGEILGARQLGEFGDDPHRYASAKARKNYAATSPVTRQSGKKKIALARFIRNARLADAVHRQAQSALRASPGARAFYDEQRDRGLNHDAALRALSNRLVGILHGCLKTRTLYDKATAWSHRTATSRAA

SEQ ID NO: 331714 - protein, 466 aa, unidentified
MISVGIDVSKGKSTVAVVGEGKKILQKPFDVSHNKADLVELSKFLKKYEDVRVVMEHTGVYYQVVAETLSNAGISVSVVNPVLINEYGNNSLRKVKTDKKDSMKIARYALDNRNDLRDYNTVDILRDSLKSFVRQFSFEDKTLSAHKNRLYSLLERAFPNIDNFFDSPAKSNGHQKLIDFIIQFWHNDCVGSVSATKFTEKYQRFCKKNRYNFCEKTALEIHAISRNNLTTMPKNELTKMLVSEAAEQVLSISIRVEKLRSKMIELAKQLPEFNTVLSFYGVGETIAAKLIGEIGDVRRFESKRSLVAYAGVDPSKNDSGKKVSTSGSISRTGDALIRKTAYQVVEIHLLKSPTDEPLYQFLDQKRTEGKHYFVYMTAACNKFLRMYYGRVKEFMDTLNDESDMTTNVSVESECIIHCAFGEDTTAFTCRQDTEMLESNQSGLQGFACTNGAVGTSHCVKHASGEN

SEQ ID NO: 331715 - protein, 345 aa, unidentified
MYYAGIDYHKRYSFVSIQDEKGTIVLERQILHNNPLVFEEVFRQIAGEATVVYECGLNWTWLYEVLEKIATVKRIVLANAYKVRLIAEAQIKTDKLDARKLAMLLRLGVVPSCHIPNRETRKRKDVLRQRAYWVRRRTGLRNRVHRLIERQHGLAMPQVSDLFGKKGKEALRKAILPDPDAMLLTQNLDVLDQLDAVIKADEHRIQAESKPDRAMEILTSVPGLGLITASIISTETEDITRFLRCERYTAYAGLAPTTHSSGGKTYNGRMMQGCNKWLKWAFIEAAWVAVGCSAYFGGLYRQHRARGKTASVAITIVARRMCHIVYHLLTEKRFYEERISPRPLS

SEQ ID NO: 331716 - protein, 326 aa, unidentified
MMNMHPQGRVASEAARPNAGIDVSKEHLDVHLFDLGLRFDNDASGWDALIAKLKEEGVDLVVVEATGGYERGLVTALHRAQLNVARVNPRQAREFAKSMGVLAKTDRVDARCLRDFADVLSRHKDRHKYITLPADPQRELLAALMTRRRQLVDMRVAESNRLEGAAARAVRSIRSVIRTLDKQLQDIDNDIDQQLEQHFKQQKELLDSVKGVGPVTILTLTSALPELGRLGRRQISKLVGVAPLADDSGRRKGVRRTAGGRSEVRAVVYMATLTAIRHNLAIQTFYARLVAAGKPKKVAIVACMRKLLTILNAIVRDQAPWSASAA

SEQ ID NO: 331717 - protein, 326 aa, unidentified
MTLSHLTDNIFIGIDVGGAGLDVAWHRGDGAHYANRPDAIAALVERLRTGPAVTRIVLEPTGGYEKPLVKALRQAQLPVEIIHTTRFSAYRALVGVKAKSDTSDAKLLASYAAAPDEVRGRKAGHVELPEDAIREALSELASRRDQLKHMIHAETCRLGTVRMAELRQMLTAHLEALRTEDKQVHRMMLELVRQRIDLRRDQRLLKTIKGIGVKSALVLLASVPELGRIDNKAAAALIGVAPFVRKSGTMNAPARIHGGRAAVRSILYMAAVTASRHNPVLRPFYDRLIARGKPPKLALIAVLRRLVVFANAVLRSGQPWRGASAT

SEQ ID NO: 331718 - protein, 373 aa, unidentified
MPKYSTAFGMDVHLRSTTVCALDADTGEAVTRRFPGNPWGEIAGWMDGFPGPSLAAYESGYLGFAPQRELAGLGVECVVAAVSKIPRSAADSASKNDRNDAARMAKAILAHDISPVWVPSPEVEGIRDLAGAYDGATARLATAKQRLLAFLAKRGFVYGGTTPAGNPRKYWTYDFLRWLDKVRPEDDGGVRTLAALRNEVEAAAEARADLLSEYRAAVDASPIAAEVAALQSIKGCAFALAAAFSAEVGDFTRFRSGRQVTAYFGLAPSQRSSGDSVRLGGISGAGNALVRKLAVEGSWCYAAARHQPKLMPRDTGVPLEIRMHGRKGSERLLRRREEMLERGMPQAKANAATAAELVRWLWALGTMCREAGE

SEQ ID NO: 331719 - protein, 411 aa, unidentified
MTKEDFIYVGIDLHKETHTAVVIDCYNNKLGEITFANRPADFPKLVTKVKKCNTDSKNVVYGLENAYGYGRPLAVWLIDKGYFVKDVNTAISHRQAKHRGAMYRKSDSDDAEAIALATLNMLDKLPDACPNDAYWSLGQLVHRRDNIMKQRTRLVNQLHEQLCIAYPSYKQFFNDISRPTALYFWEHYPSRKYLKGKSVEELREELVPVSHNKCSTKTCEKILDAVASDKVKNNDFQDARDMVTLSIVRDLQHYDKQLAEVDKMLEKMYEMLHCTLTTIPGVNVITAVKILSEIGDIKRFANANKLAQFAGIAPLHLSSSGKGKDFATKQGNRRLQATIYFLAIQMVQVSSKGTPRNPVVRAYYEKRKAEGKTSQQALICISRRLISIIYGMLKNGTEYRMPVVENAGENM

SEQ ID NO: 331720 - protein, 322 aa, unidentified
MRYIGIDVSKATFVVAYSSDKGGGIRTFNNTTAGIRQFIGTLPKDGSIHCVMEATGNYSALLLYMLNVAGITVSMENPLKVKNFAKAMLSTVKTDKSDARLITLYGEKMNPRPFKVQGEAILRLRQKRTVIRQLTKQITAMSNLRGSLVCLPVPDKGATHTVDETIKFLEKRRDRLQSELTELVEVEFSRQLALLTTIKGIGITLATALIITTGGFTYFQNAKQVSRYLGICPTYEQSGTSVNIRGHINRNGDAYTRGLLYVAAWTASRFNTKCGETYTRLRQNGKPGKLAMIAVANKLVRQAFAVVTHDKEYVDGFVSNRP

SEQ ID NO: 331721 - protein, 366 aa, unidentified
MEKIVKQSVGIDCSKDELDVCFGQQNEQWQVHHKATTAFKNNKQGFIQLVRWSSKLADKSVPVNFVIEATGVYHESVTHHLFDAQKRICVVLPNRARHFAQTLTVRTVNDKESSKMLATLGLEKQLDAWQKPEPVFTFLKQLTREREQLKNEGTICKNQLHAESHSAFPMKSSIQRINKRIAMLEKQCTEIETEIEQIVAAHPMIAEKVEKISTIKGIGRLTVVTIVAEANGFNLIRNYKQLVSYAGYDVVTKDSGTSVRGKPHISGKGNKHIRRVLHFPALTNVKYDEHHKNFYTRIEAKSGIKMKGYTAVQRKLLVLIYTLWKKNEAYDPNYKNKKGEVQKNLEQPVGAALIELDLVRPACPEA

SEQ ID NO: 331722 - protein, 391 aa, unidentified
MSMYFVGIDISKYKHDCCIISAADQQIVSKFTVKNDKDGFEHLLTTLNSLSNPEDIKIGFESTAHYALNLELFLENAHHSFMEVNPVLIKEYKKSTTLRRTKTDSVDCESIARWLMTVEYKPHSKGFYHSYSLKSLTRLRDRLIRQRSFYLVKITNVLDHTFPEFKPFFNERLSKTAIYLLENYGSAEKMAHMNSASYAKLRCASRGKFSIQQFLRLKELAANTVGVNNSIFDIELNSLLTLYNSLCKEIKTLEAEITKLIEEVHPHYMSIPGIGPISAAVIYAEYGDISNFSNPGQMLAFAGIEPGINDSGTESHGGRMVKHGSSQLRYVLLNACLPLIRFDITFATYYAKKRAEGKKHRVAITHVAKKLIRVIYALERQDVDFNVQKLR

SEQ ID NO: 331723 - protein, 356 aa, unidentified
MNKISKLDFEGQQIYVGMDVHKKSWSISIFTDEFEHKTFTQPPEVVTLVNYLKRNFPGASYKSVYEAGYSGFWIHDRLQEHGVQCLVVNPADVPTKDKERTKKTDRVDCRKLARSLRSGEIEGIYVPCRPKVEDRSLIRTRHGMVKKQTRCKNQIKSILQFYGIQLPEELATSRWSKRFITWIEAIRMERASGNVALKVHLEELNTMRKLIAEITRSIRILANSEGYRQNVRLLKTVPGISTLTAMTLLTELYEISRFKTFDKLCSYVGLIPDTDCSGETDRKTGITKRRNAQLRGILIESSWVAVRKDPALLMTFTTLCKKMPKNNAIVRIARKLLNRIRYVLKNQQEYVSAVVQ

SEQ ID NO: 331724 - protein, 315 aa, unidentified
MAMPVATTQSIVGVDVAKDELVIYHVESDRLETISNTKTATKKWLKTVAKPVAIAIEATNIYHQEFAELAHADGCRIYMVGGYELSHYRKGVNVRAKTDALDARLLARYLTNEGDHLRPWTPPSPLYCRLISLFRRRAALVQARVSLKQSWENEPLLKTAFKNQISAMQRLETLLEKTILTQIEEAGLGAQLKRCMKVEGIGTLSGARLLASFQRGDFRNADAFIAFLGMDLRIADSGKKKGRRCLTKRGDPEARRLLHNAAMAASRTSVWKGFYEAMRGRGLSTTQALVALARKLARVVFALLKNQSEYSPKGV

SEQ ID NO: 331725 - protein, 342 aa, unidentified
MQATTIGLDIAKNVFQVHGIDAAEKVVVRKQLRRSQVPAFFKVLPPCLIGMEACATAHYWARELTKLGHTVRLMPARDVKAYVKRSKNDAADAEAICEAVRRPTMRFVQVKSAEQQSQLMLHRTRDLLMRQRTQVINALRAHLAELGITAAQGTAGLKELLKIIANDEDERLPLDARASLVVLAAELQAMQTLIGSIEKRIVAQHRKSEASRRLQTIPGIGVIGATAIAATVTDPKTFRSGRDFAAWIGPVPRQDSTGGKQKLGPISKQGDRYLRRILVVGAHAVLKLAKQKPEKYPWLTQLLARRPFKVVAVALANKMARVAWALLAQGGTYRRPALVAAQ

SEQ ID NO: 331726 - protein, 397 aa, unidentified
MDIHKKVVVATVQGEGICKETRSFDTFTRSLTQLRERLVSLGITHVAMESTGVYWKPIYNVFEGFIPHIWIVNARHIKNVPGHKTDKNDSEWICQLLMAGLLKPSFIPPKAQRELRDLTRYRRKLIQSVSANKNRIIRILEDGNIKLSSVLSDTSGATAVKLIDMLCDGKQITLSDIESVRHGRCQHTKEEMLEACTGCLYEHKVYMLGKIRECNASLKEYILDFDKRIKDVLSSYHDAIERMCEIPGIQNRVCEDLVAEIGLDMSNFPTSAHLCSWAGMCPENNESAGKKKSGRTNHGDKQVKETLVEAAWAASSAKGTFFMERFNRLAPRKGSKKALIAVGHSLLKCIHYVLSTGGRYKELGDNYVPNKKEQKRKEYLKKELQKLGYSVKLSKED

SEQ ID NO: 331727 - protein, 369 aa, unidentified
MTDLMLFVGLDVHKKTISVAVVEAAAGAVVRFYGTIANTPDSVRTLCRKLSKEGQQLHFCYEAGPCGYGVHRQLTRLGHRCDVVAPALIPRKVGDRVKTDRRDAMMLAQTLRAGQLTAVWVPDEAHEAMRDLVRLRTQAMRDLRKARQQLLSFLLRHGRNSPYGHWTKMHRRWLGELVFAHPAQHLALEEMLQRIERAEALCDRLKAAILELVPQWSLAPVVQAIQALRGVSLIVAAAIVAEVGCFSRFESPRALMAYLGLNPSEHSSGATIRRGAITKTGNTLARTCLVEAAWTYRFPPRVSQIIRDRLKELPEPIRAVAWKAQVRLSARYRKLTAAGKPGPKVVVAIARELVGFIWAIARMVEPKFA

SEQ ID NO: 331728 - protein, 346 aa, unidentified
MAWTWAIRSSRYCPLDEVGEVLQEQKLGTTPKAMRDVFGALPRCRIALETGMHSPWMSRVLSELGHEVIVAHARKVRLIGESRKKDDRMDAQTLARLARIDPQLLYPVKHRSAQAQADLTVIRARAGLVRARTALVNTARGLAKSYGERLRGCNVRNMNPEKAEGLSPELQAALQPLLAGIESLSKCIRECNERIEELALKSYPQVALLKQIKGVGTLIALTFMLTLEDPNRFRKSRDVGCYLGLQPGRRNSGQSEPQMHISKEGDPYLRTLLVQGAQHILGPFGVDCDLRRWGLKLAERGGRNGKKRAIIATARKLAVLLHHLWVSGEVYEPLHNSNRVALPAAA

SEQ ID NO: 331729 - protein, 436 aa, unidentified
MTLINFVAANQKYYAFNLLSVFIMVFWSVQYLLQHLLVQTQVSHQLLQPLILILQLPQTPQFRHARPGKFFLPVNGMDYFLPLRLTVRNVLTRRITMNIVFLGIDLAKNVFQLCGLNQAGKPVYTKRTGRKELLQTLANIPACLIGIEASTGAFYWQREFEKLGHKVKVISPQYVRPFVRGQKNDGNDAQAIAVALMQPTMQFVPPKSPEQQDIQALHRARQRIVNHRTATVCQIRGLLLDRGIPIGSAVSRARRAIPLILEDAENGLSSRMRRTIAELYDLFNDLGRRIHFFDKEIETVFRQSEACPRIAKVKGIGPKTATAVVAAIGKGTEFKNGRHFAAWLGLVPRQHSSGDRQVLMNMTKKGDKHLRTLFIYGARAVVRVATNNNDGHMNQWVNQLKERRGFNKTTVAVANKNARIIWSMLRNDTGYQVVCN

SEQ ID NO: 331730 - protein, 391 aa, unidentified
MIYVGIDVAKDKHDCFITNSYGEVLFKSFTIPNNRDGFETLFQKVQSVSDDLTKVKVGLEATGHYSYNLLGFLLDKGLTTFVINPLHTNLYRKSLSLRQTKTDKADARTIASMLMSDMNLKSYSNTSYHNEELKSLTRYRFDKVQERAKLKTSISRLVCILFPELEKLVPTLHMASVYALLSEFPSAHAIASVHLTRLTNLLSESSHGRYGKDTAVIFREAARNSIGSDMPAKSLELKHTIKLIQELTSEIDEIEAEIKSIMDEINSPILTIPGISYNMGAMIIAEIGDFSRFDSADKILAYAGMSPSTYQSGQLDNCYSHMEKRGSRYLRYALYNATKYVCHWDESFGTYLAKKRAEGKHYNVAISHAAKKLVRTIYAMEKSKQSYNLVA

SEQ ID NO: 331731 - protein, 347 aa, unidentified
MDVHKESISIAVMNASGKIVMECVIETKASMILQFIDGLRGDVQVTFEEGTSAAWLYDLLKPHVTKLVVCDPRKNKSMREGNQSDKIDARRLAELLRLDHLTPVYHGEHGLRTLKELVRSYLTITKDLARVKSRVKAIYRSWAIPCTGKQVYTRRHRAEWLGKINEPGVRRRAEFYYQQLDALRVLRQGVRRDLLAESKKQKVWKRLCGIPSIGPIRAAVLLGILQTPHRFRTKRPLWNYGGLAIEMHSSADHRRVDGQLQRSRKNVLVRGLNRNCNHDLKNLFKGAAAVASSKPGPFQEFYTALVAKGMRPEMARLTLARKIATIVLMVWKRGVCFDAQHLKPQTA

SEQ ID NO: 331732 - protein, 362 aa, unidentified
MFEDTMDATLFIGLDLGDRRSDLAIVDQDGVLVEESRVPTTPAALERKFSALPRSRIALEVGPHSRWASQLLEGLGHEVLVANARKVRAIYDNPRKGDRNDAQTLARLARLDPALLSPIRHRSAQAQADLAILRSRDALVRSRTLLINHVRGMVKSFGARLPSCSAESFASRATPALPEALRPASLPLLETIAGLTRQIRSYDRQIKDLCQTRYPKTQALSLISGVGALTALAYVLTLEDPRRFAKSRHVGPALGLVPRRDQSGGHDPQLRITKTGDAFLRRLLVGSAQYILGPFGPDCDLRRWGLALAERGGKNAKKRAVVAVARKLAILMHRLWKTDEVYDPLWASHPHGDHAARMARAA

SEQ ID NO: 331733 - protein, 348 aa, unidentified
MEHICRIGMDTSKHFFQLHGVNAAEEPVVRKKLLRKDMVAFFEKLAPTVVAIEACGGSHHWARLLSSFGHQVKLIAPQLVKPYVKRGKNDAADAEALCEAMSRPTMRFVPVKTVEQQAAVMLVGVRDRLIRNRTQLANSIRGYASEYGLTAAKGMAHLDPLIERIQADESLPVLARELFAAQAKEYQQLQAQIDEVDVKLKARHHADECGRRLAQIPGVGPIGAALLMMKTPAPEMFRSGRQFAAWIGLTPKDHSTGGKVRLGVITRAGDEALRSVLVVGATALLRFVANGKSKSALSPWLGQLLKRKPAKLVAVALANKLARIAWKLMVTGQSYVRKSTPTTVAGAA

SEQ ID NO: 331734 - protein, 345 aa, unidentified
MDKIIRIGMDTSKHVFQLHGVNAGEKPVLRKKMRRKEMIDFFTTCPPTLVAIEACGGSHHWARLLTSFGHEVKMIAPQLAKPYVKRNKNDAADAEGLCEALSRPTMRFVPVKTADEQAALMLISVRTRLIANRTQLANAIRGYANEFGVSAAKGLAHIPLLLERIQADGTVPELAQELFMSQAEEYAQLEMKIADVEAKVKAWQRNDERSIRLNTIPGIGPIGSALLIMKTPAPELFKSGRQFAAWIGLTPKDHSTGGKLRLGGITRAGDEALRAVLVAGATAVIHHARRSGKASRWLAELLRRKPPKLAAVALANKMARMAWKLMVSGETYSAQSGPALTGCAA

SEQ ID NO: 331735 - protein, 408 aa, unidentified
MKTLHKRCAGLDVHKVEVVACLRLISKRKVEREVRRFPTTTQGLLALAEWLESAGCTHVAMEATGVYWKPVWHILEGRFALILANAAHVKNVPGRKSDVNDATWLADLMAHGLIQSSFVPPPAIQELRDLTRTRKQLTREIVQHVQRIQAVLEEANIKLCSVITDIMGASGRRMLKALIAGETDAEKLAALGHERLGCTRAELVQVLTGCVREHHRFLLEQHLRTIEQLEDSIAAFDARIEAALLPFHDVVERLNEVPGLGATAVETVIAEIGIDMSQFPSAGHLLSWAGFVPRLDESAGKRRSTRIKKGAPWLKPVLLQSAWGAARKKNSYLQAQFLRLKARRGAKKAAIAVAASILTTVYHMLRDGTYYQDLGPEYFARRNPAKAAARLANRIRNLGYQVEIRAAA

SEQ ID NO: 331736 - protein, 432 aa, unidentified
MEIVHPRVAGLDVHKKQVTVAVLLPGASPGERTVVVKQFRTFWRSLQEMAGWLVELGVTDAAMESTGVYWWPVYHALAQTATIEVCVCNAAHMRNVPGRKTDVRDSQWIAELHMHGLLRPSFIPTQATAALRARTRYRKKLIEARTAEGQRLAKVLEDSGVKIDSVASKLLCVSGRQMIEALIAGERDPKVLAGLAKGVLRRKHEELAMACDGRFSDDHAQMCRLHLDAYDWLTGQIAELDKLVTAAAEPFATVIARLLTIPGIGVRTAQVIVAETGGDMSRFRTAGHLAAWAGLAPGNRESAGKRMRTGTRKGNTHLAAAMTEAAWATARTVTRPGARMRRLLHRFGKGNERKAAVAVAHTLLNIAWAVMAHDRDYLDAGADYYDQRARRNREHLAKRYEQALTRLGYQVTIEPVDQPPPTTPPPPIQAAA

SEQ ID NO: 331737 - protein, 273 aa, unidentified
MPEKSCKPMAAVIGIDIGKNSFHVVGLDERGAIVLRQKWSRSQLQGRPREHAALSDWHGGMCWAHPLSRQLQALGHDARLMPAKYVRPYSKGQKNDFRDAEAIAEAVQRPTMKYVATKTVEQLDLQALHRVRERLVSQRTGIINQIRAFLLERGIAVRQGLRFLRAELPGILAARSDLLTPRMAYLIEGLAGDWRLLDDRINRISEEIHALAHQDAGCDRLMSVPGIGPIISSAMVAAIGTGDAFSKGRDFAAWLGLVPRQISPTPGRKARAA

SEQ ID NO: 331738 - protein, 356 aa, unidentified
MSHSSEAITGFPSLTIGVDLGDRQSQLCVVDAAGTTVEERAIATTPQALQRYFAERGAVRVVLEVGTHSPWVSRQLAGYGHEVYVADPSAMYGARRRSRRNDRMDAAYLARLGRVDVQLLHAIQHRSEATQAHLAQLRARDQLVKSRTQLINHVRGAVKSVGQRLPSGGADAFATQAAAHLPLALTEALTPLLTLIATLTTQIHAYDHRLERLGATHYPVTQRLQQIPGVGPLTALAFVLLVEDPARFATSRQLGAYFGLVPKLDESSQSSPQLRITKRGDPMARRYLVSAAQYVLGPFGPPCDLRRFGEALMVRGGPNAKKRAVVAVARKLAVLLHALWRTGTDYQPMRHAASPA

SEQ ID NO: 331739 - protein, 341 aa, unidentified
MSKVSEAVGATVFAGIDVSAATLAAAVQREGQDGFRQKGFANSLFGHRQLIAGLLKGGDRVRVSLEATGTYSLDVALALDATEGIEVALLNPKTMNRFAQTLRRSKTDAADAAALAEYSRRMEFVPWQRPSRSGLELRTLSRHIATLTEDHTRWGNRLHAAEASRTTPRCVLHDLKRARAAIAKRILKLRKEAVAMVGRDAQLMRKFEQLKRIKGIGETSAVQLLGELAGLDPEMTVRQWVAHSGLDPVHQVSGSSVRKQTRISRHGNSHLRRALYIPALVGARHDPHMRAFYELLQTRHKTKLQALVAVARKLLHAIFGIFKTGTDYDGAKLFPHLIPTS

SEQ ID NO: 331740 - protein, 327 aa, unidentified
MSSYLGIDVSKDWLDVVLLREGLPVEKGHFDNNNQGFRQLQHFLKKRKVKELHICLEATGYYGAEAALFLHQAGYRVSVVNPARIKAYAESQLSRTKTDAGDAALIADFCRTQQPEAWIPPPPEQQELQVLVRHLENLKDMRQQELNRRQAGIPSETILKTLDEHIAFLDQQIADLLRLIHDHIERHPHLRHQLDLLTSIPGIGDLTAFKLLAEIVDVQSFDSARQLAAFAGLTPRERRSGSSVRGHTRLSKRGSPRLRSALYFPAIVAQRHNPILQAFAQRLLAAGKSKMQVVAAVMRKLLHLVFGILKSGQPFDPHFLEKRAVIT

SEQ ID NO: 331741 - protein, 405 aa, unidentified
MRFIGLDVHLDFCEVAICEAGRVRSGGRVPTSAQGLAILANSLAPDDHVALEATGNALAIARALEPSVARVVVATRTELRAITEAKVKTDRRDARTLARLLAAGLLGGCWLPDEQTRALRRRLARRAQLVRQRTRCKNEVHAVLMRTLKGRPPMSDAFGRGGRVWLAELELPDDERETVDGCLRQIDFLDAEIAILERGIAEHALGSEAVKRLMTVPGVSLMTATTFIAAVGDVRRFHEPRRLVSYLGLDPKVRQSGIGAARHGRISKQGASQVRQMLAEAAFVAVSTAGPMRAFYERVRARRGSQIAIVAVARKLAVLFWHLLTRKQDYAFQRPSLTRKKLRGLELRAGAERHPGRRDLPTKNAYSQRAERARERELSEHAEIAYRRLVTDWKATGSNKAAPMT

SEQ ID NO: 331742 - protein, 433 aa, unidentified
MKVMYERVAGIDVHKDMVKVAIRSPGEKPWTRKTEILEFRTFYGVLQEMARELRKRGVTHVVMEASGVYTEPVYYALAEQDFTQVAVINPAHAKALKGHKTDARDCARLAELFECGLLRGSYIPPAELKEVRDLTRYRMKTVQARTSEIQRLGKALESAGIKLGSVASSITGTASTAMIEALIDGERRGGVLADLAIGRMRAAGKLTDLSMALAGRFTEHHALLCRLHLDRIAVFDDAVDGLDKRITGKAARWQREAGLLTSVPGFGNVVAQAWLGEIGPAPHRHFATCDKLASWVTLCPGNNISARKRKHGRTGDAGTYIKPMLVQAAWAAIRVRGRLQARYNRLVRRFGGDKNPGAKKKAITAIAHTLLKIAYQVLKSGTPYQEPGADFYTRRESPEHKQAWLERQLQRLHPGCTITVTISPPEAALPPRG

SEQ ID NO: 331743 - protein, 365 aa, unidentified
MNECTHIGLDVHKDTIAVAVLRPHTTDVDERVIPNTPEAIRRLLTRHDPTATHLCYEAGPTGYDTQRLVSGLGFDCDVIAPSLIPRKSGSRVKTDRVDARNLARLHRAGELTNVRVPGAAEEAVRDLIRVREEVKCDRRIARQRIRSFLLRYGKRYPGPRDAWSTRFEVWARAVTFDEPLANEAFQNLIASYFIRDTQLAEMGRRIEQIAGTEPFAADVARLSALRGIGTLSAMTIMAETCDFSRFGDAGSYMGFTGLTPSEHSSGASRHQGSITKTGNRHIRRVLVESAWAYRHAPAVRGKLRERLEGMPPEVAAYSWAAQVRLNRTYRTISARKGAHTAVVATARELSGFVWGLMTDNLGPAR

SEQ ID NO: 331744 - protein, 402 aa, unidentified
MRVPHPSKPGRRMQEIRGYATTTATLLEMAIWLRQWGIERVAMESTSDYWKGVYYLLEAEGFDCWLVNAREVKNVPGRAKTDRADAVWLAKVAERGMCRPSLVHPPPIRRLRDLTRYRRALVSDRSREMQRVEKLLEDAQIKISSVLSDIHGVSGRAMMEALIAGQRDPRSLARLAKGLARKKTDRLEEALRGFFTDHHATILQMMLDNIDRIGAQIAALDARIAEAIGPFSRQGSRLADIPGVNTVAAAELIAEIGVDMTRFPSAAHLVSWAKFCPQIHQSAGKSRSKARGKGNPWLAGTVGRIVFSASHTDTFLGARYRRLARRRGKPKAIVAVGNSVLTVVYHLLSDADLDFCELGPAHYESRINKHRRARDLATQLQALTGQHIVIRDGKAIITDNAA

SEQ ID NO: 331745 - protein, 332 aa, unidentified
MQNKEKIYIGVDVSKKTLDFCLVRDAGTFSFKITNDVKSIKAFFKKQKLINEITELFIGVENTGFYNFHLYEFFDQNTFNIYIFNPLHLVKTIGMVRGKNDKIDAERIGVYVQRNIDILTPSAIPNSTFRKMKALFAKRRMFIEQVTAINVLNKEFAHCNSGKAIQANKSSEEKLLNQYAKVIKEIESELINLIQEDEVMSENYKRVTSVPGVGPILGIYLTIKTHGFTQLTNARKLACYAGVVPFTNQSGTSLNKRPKVSFMADKRMKSLLHLAALRVIQLEGEMKDYFIRKVSEGKNKMSVINAIRNKILARVCSCINNEKMYKKNLDLS

SEQ ID NO: 331746 - protein, 325 aa, unidentified
MSQKLTHASDEVTIGVDVSKDTLDVHLHPAGIARRFPNDHKGHAQLIAWVNLNHPTRIIFEATGRYHRALELALGKAGLPAVKINPLQVRRFAEATGKRVKTDPVDAATLARFGAVMRPKIPPAKDETIDVLAELLAARRGLIKDRTAASNRGKGLTLPMLKRHCQQHRQQIDSQIKAIDREWMSILAANPALRARLDILLSIPGIGPATAIALLVDMPELGTMDAKQAASLAGLAPVTRQSGTWKGKSFIQGGRASLRRAIYMPALVAIQHNPQLKEKYEALCRAGKVKKVAIAAIMRKIVIIANALIRDNRKWTPDLASAGAR

SEQ ID NO: 331747 - protein, 427 aa, unidentified
MKKADLLSTLFVGIDISSRSNVVALLDFESQKPLQSFAVGNNQPGAVELAKRLAAYLRSRKNLAHLVVALESTSFYGVHVANYLSSCEVLAPFHTAVYCLNPKAIRNYKKSFIDLGKNDYVDAFVIADFARANRITTKPWRGSQFLALQRLTRHRLHLAKALTREKAYMLSNIFLKFSEFSLLDAQEQPFSNSFGAAASSVLTDFLSTEEIIEMPTKDLIRYICEKGHNRFPDPEKTASLLQQAARNSYRLDKCLYEPLTVSIASSFTLLSTYETEIKAVNKAIEKTLKGIDPSAYQSLLSIPGIGPVMAAGILSEIGDIHAFNSQEALAKYAGLVWRENQSGNFQADDTPLSKAGNAYLRYYLIEATSHVKNQCGEFAAFYQKKYDEVKIHQHKRALALTARKFVRLIFGLLANHQLYSSSRVVQA

SEQ ID NO: 331748 - protein, 327 aa, unidentified
MAQKMDVVGIDVSKATLDAYALTSQQARQFANDPAGHQGLVAWLQELGVGVAVFEASGGYERAAAQSLRRAGLVAHVVDPKRVRHYAQAAGQLAKTDRIDARMIAAFGAAFLLGKPSGVAGGDDPARQDLAELVGTRQVLVDHRTSLQQQADAVTSAIAKKLLLATLKQFDRQIETSDRQIAAAIARHEPFAALARRLDTVPGLGPVSIAALIAWLPELGQLDRRQLAALVGVAPFADDSGKRTGQRYIQGGRMKLRNVLYMATVGAATRHNPVLHARYRRLLENGKKPKVALIACLRTLLTILNAMVAHQQDWNPTKLPATEPVAA

SEQ ID NO: 331749 - protein, 354 aa, unidentified
MALTETDIVGGVDTHKDSHTVAALSGTGQLLGTAQFPATPDGYQELLAWLRGFGRVTRMGVEGTGSYGAGLHAYLRRAGVEVREVIRPKRQVRRRHGKSDPVDAEAAARAVIAGDDLGTPKRQDGSIEALRVLRLTRRSALKARTQAANQLHAIIQTAPSPLREQLRSLRLPELVNRVRRFRCAAPTTPVAAARFALRGLAERWTSLDLELQHLDEQLAQLVRTVAAPLLAVRGVGVDTAGALLVAAGDNPERLSSEASFAALCGVSPVDASSGRQHRHRLNRGGNRDANRALWVIAIVRMASDPSTQSYVQRRTQEGLSKKEILRCLKRYIARQLYRLLVGPIAVPTGASHVA

SEQ ID NO: 331750 - protein, 465 aa, unidentified
MKSKPAKAKKQNKKISVDAVWEPVNLHAAGVDIGSREHWACAPRAAAPQNVRKFGTFTADLEAMAEWFKECGVTSIAMEATGVYWIPLFQILERRGFHVLLVNARQTKNVAGRKSDVQDCQWIQRLHTYGLLQGSFRPEDPYSVLRTYLRYRDELVVARGTQGQHMHKALLQMNVQLPQVLSDVTGVSGLAIIDAILKGERDPGKLAALVDRRVRAGQQTIQAALRGDYREEHLFVLGQAFELYHTYEARLAACDGQIVRALATLPARVEPKPQPLPARKPGRKPYLDKMAGVDLRPELHEIFGVDLTGIEGIGVLTGLVLLTEVGPNVSRFRSEKQFCSWLGLCPDNRISGGKVLSSRTRRVVNRAADALRLAASTLERSQSALGGYARRMKARLGAAEGITATAHKLARILYRLIKHGETYVRQGLEDYEQKFQAGKLRALQKTAHAMGFELIQKQTVPGGVS

SEQ ID NO: 331751 - protein, 480 aa, unidentified
MSLKRDASSEKNQTVRYTKRLEIVHPHCAGLDIHKEKIWVCTSPFHDGVAPEVSTFATDTGSLEKLAAYLRERKITTVALESTGVYWLPTFLMLRQKNLNPILVNPRDVKNIKGRPKSDRADCVWICRLHSYGFLRASFVPPDVVLDLRSFYYAHEKLTVDSASMLQRMNDELVKMNIRVDLILTDLSGASGIRLIEAILGGECSPERLYQLLDEQIMKKGKDVILPYLHGDYREGNLAILRTWYDLYLGIRKEISRINQKIYELLQSFPKKADAKDLPRVKKNYREDKLDFPYELRPIFFEIYGVDLTQLPGIGAGVLLALVCMVGTDLSPWPSAKHFVSWLGLAPINKESAGYRKSGSTQRINNLLSNAFKMAAMAAKRTTTDIGRTARHLAGRILPKKAKVATARKLAELVYNILQNGMELKVKTEEEYEQRRKQRDIQFFVKGLFKYIINGQLLPEVEKVYQEHCQGIKAASLTNA

SEQ ID NO: 331752 - protein, 367 aa, unidentified
MTVTIVDAARPATGGADTHLDLSIAPRLVTGGVDTHLDLNVAAALDPVGGLLGVAEFPATLAGHRRLLGWLAGFGPVTRAGVEGTGSYGAGLARFLRGAGVEVVEVDRPNRQARRRSGKSDPLDAIEAARAALSGRARGAAKSRDGNVEAIRALVVAKRSARSAKIQALNQIRHLSFTAPDELRQQLAGVSRQQLAARAAALRPATREGANPVIAATKTALRILGRRVLALDEEKARIDALLTALVTKTAPQLLAVFGVGVDTAAALLVTAGDNPGRLRSEAAWAHLCGTAPIPASSGKVTRYRLNRGGDRQANRALWGIVITRLGNDPRTRAYMARRLGEGRSKPEVIRILKRYVAREIYHRLPRP

SEQ ID NO: 331753 - protein, 347 aa, unidentified
MTKVTTVGLDLAKSVFQVHAADQDGRPVVRKKLRRGQVLGFFAGLSPCLIGLEACASAHYWARELQALGHEVRLIPPQYVKPFVKTNKNDASDAEAICEALIRPTMRFAAVKSVDQQSVLMLHRVRELLVRQRTMLSNALRGHCGEFGIVVAQGASKVAALIEVIEDPEDERLPTLAHAALGSLVDQLRMTQIQILGLEKKLMAWHRTNEASRRLEAIPGVGVITATALVATIGDVSQFHSGRQLAAWLGLVPRQHSSGGKERLGRISKRGDGYLRRLLVHGARADLRWSKHRKERRSLWQESLLARRPTNVVLVAMANKTARVVWAMLSRGEAFRPEARTEAQTAA

SEQ ID NO: 331754 - protein, 477 aa, unidentified
MATKNRTALAVVPFLQHESLYVGIDIGKKEHVAAFVSRTLLESHQRYEACPVLRFENNRLGFRALVTRIGEYVPLEQAFVLVEKTGHYHLALRDYLLEMDITVHEMAAMERKREMLKTDKRDAQRLANQLYNQLELHAQVADKKQVVRLALPSSGVARELRGLVGHRAELVREATQRKNKLTSICDQLFPEFTEVFKNPNRETALAIRAKYPTAHAIATAPLSELCALRTGSLPSRANLARLQDLAAQTIGVRDHLSQRALAFEQGMLIEELLLLGRNTGKVEAQIEEIVSISREGRILTSLPGVGSGTAATLIAAIGNVLNFPEASDLKSYLGWSPHRIQTGTTMDRVSLSPTGTRATRTLLYLAVWHAIQEDCAWARLYQRLVPKKCSYDERKRDYVGKDKVIGRVAGEMISTIYMLLKTDAELLATIPPDMQPPDPMLYDPAIHQAHVAGAYVPAKKRPGPARITRLPQRPEGS

SEQ ID NO: 331755 - protein, 416 aa, unidentified
MSTVMIGMDPHKRSATIEVMAADESVLGGGRYGTDAGGYAAMLADVRRWPERIWAIEGSRGVGRYLASRLVAAGEQVVDVPPKLSARTRVFTAGQGRKTDVTDAHAIALAATRMTGLRLVTGDAQLEVLRVLADRRRALGEDHIRMICQLHQLLADLIPGGAKKALSAAQARALLARVRPRDRAGQARRRVAAELIADLERIYQRKKAAGKELIAALKETGTTLMHLEGIGPSGAARLLVEVADITRFPDRGHFASWNGTAPIDASSGDHVRHRLSRAGNRQINRVLHIMAVVQLRHLTKGRAYYDRKVAAGKTPREAMRALKRRLSDVVFRQMMADARAARTGPGGHLGAATDSSAAGCDPNAGTSDKSLPGPATSDPTPPSHPILPVTPGALVHAGPQPPSSDLCLTAGRTGAH

SEQ ID NO: 331756 - protein, 378 aa, unidentified
MEDVITFVGLDVHKETIAVAVADGGGGAARSVGTVPNLPEPVAKLVRRLGSASGLRVCYEAGPCGYTLQRQFRRLGVDCVVVAPSLVPIRPGDRVKTDRRDAIKLAGLLRSGQLTPVWAPDEEHEALRDLVRAREDASQDLLRTRHRLSKFLLRLGVRPAAGVRPWTVKHRLWLEGAQLPHASQQIVFREYLLALDQQKERMSRLDAELAQAASTSVHAALIAALQALRGVGLVTAATLVAELGDLRRFRTPRELMAYAGLVPSEHSSGSSQWRGRITKTGNAHVRRVAVEAAWHYRHAPGVFGTLRKRQAGQSETVKAISWKAQSRLHRRYRRMVGRGKLKQQVIVAVARELLGFVWAIAGAAAGPIPAPVRAQQAA

SEQ ID NO: 331757 - protein, 376 aa, unidentified
MSKIRFIGLDVHADTISVAIAEPDNGEVRSLGVILNQPEQVRKLMRKLGPAEDLQACYEAGPTGYGLYWQLTELGVNCAVIAPTLTPTKPGDRVKTNRRDAEKLARCHRAGDLTPVWVPDAAHEALRDLVRAREDAREDQQRARQRLGKFLLRHGWQRPKDIKENWTQKHMAWIKSQVRFQQPASQAAFLDYVHEVEHAADRLQTLEKAIDDVIATAPAEIQEVVQALQALRGVGKIVAVTVVAEVGSLSRFDNPRQLMGYSGLVSSEYSSGNHIQRGAITKTGNAHLRRVIVEAAWAYQHKPWIGGWLAKRQQGLDQETKDIAWKAQWRLCTRYKKLAARGKNKPQIVTAIGRELLGFIWAIAVRAEARAVGRAA

SEQ ID NO: 331758 - protein, 405 aa, unidentified
MNAVGIDISKGKSMVSAMRPLGEVVFKPYEVIHTADELEKLAYSLKKLDGETRVIMECTGRYHEAVAGSLYEAGIFVSTVNPVLIHGYGNNSVRRAKTDRKDSIKIAKYGLDNWADLREYTPMEAVRQNLKTFGRQYNLYIKTKTALKNNLIALLDQTFPGANTLFDSPARPDGHQKWVDFVMEFWHCECVCGLSEKAFAERYRKWSKKNGYNFSLGKAADVYASSAGHFVTMPKDEHTKLLITGAATQLTAVSHMVETFRAEMLRLASTLPEYPVVMAMYGVGGTLGPQIMAEIGDVRRFERKQSLVAFAGVDPEPNQSGTHNPKSRPASKRGSPALRKSLYLVMSALLRKAPADDPVYQFIAKKRAEGKPYYVYMTAGATKFLRIYYGRVKEYLISLDDNNES

SEQ ID NO: 331759 - protein, 379 aa, unidentified
MDVLMTRCAGLDVHAETIVACVMIGEQDDELFIETETFPTLTKDLFRLLKWLENHGITHIAMESTGVYWKPVYNILEDYFDITLANAQRIKNVPGRKTDVSDAEWIAKLLRYGLIEKSFVPPEDIRNLRDLTRLRKKWIGHLTSEKNRILKVLECSNVKLNSVISDVFGVSGRKLLSKLIQNGYVDSIDVENSIHGRMKHKKQMITDSLFGTLNDHQVFLIKQSWQHIVYLESLISEIEERIDEILKNYKEEVELLLTIPGINKDSAAIIIAEIGVNMEQFPTSQHLASWAGVAPGNHESAGKRKSTKTTKGNPHIKTVLCEVAWAISKSRNRWLAAKYWSIAARRGKKKALVAISHRMLRIIYSMLINKEPYKEPLIN

SEQ ID NO: 331760 - protein, 370 aa, unidentified
MAKCSEVFVGIDTAKTRHAVAVAEAGRDGEVRYLGEIDSAPATVERVIKKLGSRYEKVHVCYEAGPTGYGLYRQVRALGHECTVVAPSLIPKKPGERVKTNRRDAVSLARLFRAGELTAVWVPDAVHEAVRDLVRARASAAADVRKKRQQLLSFLLRHGRVYSGGKHWTQAHARWLAKQAFAHPAQQIVFQDAIDAIEDCSGRLQRLDEQLQAIVPTWSMAPVVAAYQAMRGVSFEVAVTFVTEIGDVRRFDSPRQVMAFLGLVPAERSTGDNVRRAGLTLSGNQRARRALVEGAWTYRYPARVSARLQRRSEKLPKAIRDIAWKAQVRLCARFRRLAASGKKTPVIIAAIAREMAAFLWAIGQHVAPVS

SEQ ID NO: 331761 - protein, 316 aa, unidentified
MSESMSFVGIDVSKNVLDVHVLSTGEHWQVGNDQAGCASLVERLKPLGKTMLVVMEATNVFWRMAAAALAGAGLACAVVNPRQVRDFAKSMGILAKTDAIDAQVLAQFAQRVKPPVRALPDAQCQVAAELLARRAQLMGMRVAEKNRLGTANAKKVRKDIEATIAFLEKRLAALDEEIDRWLKSTPIDQSRADLLQSFTGIGQNAARSLLITLPELGRLSGKQIGALAGLAPFAKDSGGKRGQRHIAGGRAVVRAALYMPALSAITHNPVIRALYQRLVQAGKHHYVAITACMRKMLVILNAMLRSGKPWKASHHA

SEQ ID NO: 331762 - protein, 368 aa, unidentified
MIEYKLKAAPTAISKEENSQKEAKANRILIGVDVHLKSYQAAHKIDNGAVGVAQTFGSKEALLLYAQKQQELTKEVVVLYEAGPLGYKLYRDLKAGEIECLVCAPRSGEQKRKRRKNNSIDARTLTSDLFNYLHGNEHALQRVRVPSETQEQARVQSRQQDALVEERKRIGAIGNALLLSQGYGSWSNWWRPKAFERLSKEVAAWIVKHLGRWVGVLRELDQQIQQAKVELSQKWHGPRPKGMGAVSLVQLLAEVLDWNLYSSGRKIGCLAGMVPSEWSTGEGQRLGSITKVGLPAIRRIITEMVWRMILFQPEYKAVQKWREVLEGSNRGLKKKAVVAIGRQLMVDLWRLQTGRVTAQELNLVMVEA

SEQ ID NO: 331763 - protein, 369 aa, unidentified
MQNTIFVGLDVHKATISVAIAGEERGGEFRHWGTINNRADDVRRLAEKLGSGGRQLHFCYEAGPCGYGLYRQLTDLGHDCVVVAPSLIPVKTGDRVKTDRRDGIMLAKLHRAGELTAVWVPDAAHEAMRDLVRARATAVRVLGKARQHLQGFLLRHGRVHAGKKGWTVVYRRWLTTIRFEHPAQQIVLQDYIHAVADAEARVERLTKQIAELLPRWSLAPVVEAVQAMRGVAFVVAVTVVAEVGDFSRFDTPRQLMAYLGLTPSEHSSGASVRRGGITKAGSSLARRALVEGAWSYRMQARVSRKLHDRIEALPQAVRDIAWKGQLRMCQRYRRLMAAGKPKVVATTAIAREMVGFIWAIARTVTPAHA

SEQ ID NO: 331764 - protein, 472 aa, unidentified
MVLPPKKCQPLAEQKKKPLVVACETALKEQQVRAQLQRLNWDAAGIDIGATSHFVAVPADRDAQPVREFPAFTADLERLADWLEQGGMRTVAMESTGVYWIPLFELLESRGFEVLLVNAHHVKNVPGRKTDVLDCQWLQELHTFGLLSGAFRPEEPMCVLRAYLRQRANLVRYAGMHIQHMQKALNQMNLHLHHVVSDITGVTGMKIIRAILAGERDPQVLAQHRDRRCRQCVETIAKALHGSWREEHLFALRQAVELFDTYRQQIERCDEEIAQVLARLDSATDPEAPPPVRKPKVDRNTPRIDDLREQLFRLVGVDLTRIDGLNAQTVLKILSEIGTAMSRWPSVKQFCSWLGLSPGNRISGGKRIGKSKTTPSANRAAAALRIAAQALSNSQSALGGYLRRQKARLGAPKAITATAHPLATILYSMIANKTEHDPPEVNYYDVQYRKRVLANLKRRADQLGFDLIERPA

SEQ ID NO: 331765 - protein, 447 aa, unidentified
MPDASPSRRRRARLKVVNPRSAGIDIGSRFHVVAIPTELDDEPVRKFLSFTSDLKRMVEWLLTVNITTVAMESTGIYWVPLYEILVAHGIEVFLVNARHAKNVPGRKTDINDAQWLQQLHSYGLVRASFQPDPCIAKLRAYFRQRDVLVRYRSSHQQHMQKALMQMNLQLHHVVKDITGLTARRIIDAILSGERDPKKLAALRDRRCKESVETIAAALDGNYQEEHLFELKVAVEMFDVYSAKIQECELAGQSVLQELAGDDYVEPKRQASDSRIKGNGFSFNPQELIKSVAGHDLLALPGLGPATVITLISECGLDMTRWPSAKHFVSWLGLSPQNKISGGRVLSSRTRQGTTRAGSAFWMAAVPLSRTSTALGAFQRRLSARVGKSKALIATARKLAILYYKTIRYGMEFQEHGDLAYQQASRERQIHGLERRAKALGYQLVATG

SEQ ID NO: 331766 - protein, 387 aa, unidentified
MLGKEIKAKFLPRDYDIFAGLDVDKKHIDVTFTDHAHLMKSIKMPYDADHLLGYCRRHFPGQRIAFVYEAGGSGFGLHDRLSSAGLPCLVVAPSMVPTAPGQRVKTNRLDSQKLSVGLRGGELRSIYIPSAAYRGLRQLVQLRDTFVRQAIQSRLRIKALLLLEDIAFPESRSHWTVAAWSALRTLTCPAPVRFKLDRLISMTTFAQEQVRQTTREIHRFCKSDADLARTLELLCSAPGIGGITATHLLARVGDGTFIHNIRQLPAFFGLVPREDSTGDRVNKGPITRVGDRRLCAKLIQAAWAAIRQDPELREFYDRIYQRHPLPMAPRKAITAVAAKLCRRIACLLKNQTPYVPREASCGMKKEKTATPQGITRLAAETSARCAA

SEQ ID NO: 331767 - protein, 392 aa, unidentified
MSQQHCHFDASRSLTALEQDCTIIAVIEMSQSKWLVAALVPGVERHPLKKLDADEEGLLKLLHRWHSEADQVGRKIKRIVVAYEAGRDGFWLARWLRARDVEAYVIHPTSIAVSREHRRAKTDRLDTELLMRAFLGWLRGEKRHCSMVSIPTIEEEDARRPNRERQNLVTEQTRIVNQIKAIFTRFGIRTFRPTLRKAEEKLKSLRTAEGILLPDNTRAELCRHLARLRVVREQIRAVEQERLRKLAAVPAAENGPHAMVRLIARVLGVGIETADMLVNEVLSRRWRDRKAIARYAGLTGSPDESGKRRRERGLARAGNARVRCGMIQFAWRFLRFQKDSALAQWFTARTTDRRASTRKTMIVALARKLLIALWGLASTGEVPQGVILRPAS

SEQ ID NO: 331768 - protein, 413 aa, unidentified
MDLLHDRCAGLDVSKKDVKACVRSPGARANHRHSEVRTFATTTNALLELRDWLIEQRVTLVAIEATGDYWRPPFYLLEDDVNVILVNPAHAKGLPGRKSDVSDSMWLAQLGECGLLKASFVPPQPIRQLRDLTRYRTTLSREHTREASRLEKELEDAGIKLSSVASDILGVSGRAMLEALIAGERDPQVLAQMAKGRMRTKISPLTQALVGRFGQHHAFLCRMHLDRLDALDQDIAKLSTRIQEALEPFRDQLARLDTIPGVGPDVAEVIIAETGADMSRFPTAGHLASWAGVAPGLNQSGERNKPAHTRHGDHWLTGALGIAAMAANRTQDTTFLGARYRRLSRRIGKLKALVAIEHSILTATWHVLSENTDYHDLGGDYHAKRDPQRALRRITRDANRLGYTVRFDPIQAA

SEQ ID NO: 331769 - protein, 417 aa, unidentified
MNYCLSFDVGKNKSCYGFFRVKDVTLGIKDGMECIIKQTYFNHTAEEAEKIEDRIASYSKNEISVIMESTAVYHRPLQKYFEDRGYKVSVINPFLTGHDNSSLRKTKYDKGDVAKIAFVYFKGNCNIQFAETVLEKNRRILSRLSEEITDTLSKRKTELLMKLVETAPEYEKTFKKSGIYTNSVLSLIDKYPHSDLIREANEKAVAKAMHYAKKNYHVKDYAVWAEKLKRENSRWLPGTDRDSAELESIHYLIAKIQEETIESDEKIAELVSVCEGEKIYKVLLTFRGIGPDIAAHLTAELGNLARFQKPQSIIAYAGFDPSKEQSSQSLDVNGKITKRGNKHLRRWLFVAVQSMIMHAKEGDREFADYYASKRGDKRKGGQSHHHFYAMTACCNKLIRKIYFRYLDACKAETEKTK

SEQ ID NO: 331770 - protein, 357 aa, unidentified
MKTIGVDLHKTSLTATVLDATGTILERKDIPTKCRNQIAAYFASHGPEVQVAVESVGFYHWFWDTVKPRVRKLHLADPAGVRACAGRRTKTDRNDSLLLAELLRDHRLPMAYVPDEPIRALRELCRHRHRLARQLALARRHLRWIALKNNLPGPDTFTSDRAQKWLVSQDAKLSAVHRLSGRQFVDQITSLERQLADVELVLKESVAAHADVAPTLALIQSVPGIGFLTALTMVCECGEITRFDNVDELSSYAGLCPRVTQSGESAHHGHISKQGPPPLRWVLQQAAWVAIRTDPQARRIYARIAKRAGSKKAATALARKLLSYAWSVCRQGRPFVWPNTENQTSRAPAVPVWSYDL

SEQ ID NO: 331771 - protein, 334 aa, unidentified
MHYIGIDFHKESTHIVVLNEAGRLLERTRIPTRREELVRFFGNRPEPAKAALEATRNWYWAYDTIEPLVEELKLASPPKIRIIAESTVKTDHIDAKVIADLLRSNFLPTCYVPDAETRQKRELLRHRAFLVQIRTKVKNRIHIILDKLGIEHPFDNLFSKRGLEFLRGLELPWAYQKELADSLEMLEFLNGKEKEQNKVIEKLCRESEEAALLMTIPGIAYHNALLIMSEIGDVNRFATGTKFCGYCGLVPTVHISDKTVRYGQMTQVGNKWLRWVFIEAAHIGRRKSLRFSRLYERVKVKRGPQVAIGAVAREMAVVSFYILKYRKPFRDAKW

SEQ ID NO: 331772 - protein, 377 aa, unidentified
MSDAITLVKAADKLFIGMDLHKNTSTFAVKDKEGKLINSAKILTDKNDITRYINSLKRNGGNKELSLAVEPVSQWYYYADLIENLGVDVHLAHPMEVKAIAHAHIKTDKIDAGVLADLLRTNFLPEAYFAPAEVRGWKEQCRFRASIMNLRTQTKNKIHAILFKHSLRHNFSDLFGKGGRRWLASLELKEPFKTNLDKYLNLVDYLTGEIDYAEERITNTVINCPQAKLLISIPGISYCSALTIMGEVGDIERFISVKHLQSYAGLIPSTYNSGDKQIHGRITKRGSKWLRWIMIEAAYHQINCKRIPGFGSYYNTLKKRKGSKTAAVATARKLLAVVWRLLKDNRPYEVTDPRCWKSRPIASNLSSVSPVISMTAD

SEQ ID NO: 331773 - protein, 343 aa, unidentified
MEQYVGLDVSLKETHFCVVDGTGAVLARGREATHPELLAAALERHAPAARLVVLETGGQSSWLQRALSAAGLPAVIVDARRAKAALSCRMNKTDANDAEGLAQLAYTGWYREVAAKRPETRLTRALLLARQQLTGQRRDIENQVRALLRGFGLAVGSVSRAGFEARVWTLVVAEPLLEDAVGPLLAVRRALCAEVVDLEARIGAVARGSEVCRRLMTVPGVGPMTALSVITAIDDPHRFSRSASVGAYLGLTPKRRQSSAMDWSGRISKQGDALARHMLYEAANSLLSRVARWSAPKAWAARLVRRVGPKKARVALARKLAVILHRIWVDGTEFRWSKQAAAA

SEQ ID NO: 331774 - protein, 349 aa, unidentified
MTQAITETIGLDVGDRYSRYQVLGQADGEDAGGGRVPTTPSRLQQLFAAYPQARVVLEVGTHSRWISEIAEASCAEVLVANPRKLRFIYGNDRKSDQVDALALARVGRLDPNLLAPIRHRAESTQRDLATIRARAGLVQARTKLVNTLRGVIKSFGFRFPPMATERIGPQALEHVPGELRSQLGPLLVAIEALSGEIASYDAQIKELAASHPEAALLTQVHGVGALTALAFLLTIEDRDRFRSSRTVGAFFGLVPRRDQSGAVEKQLPISKAGDRMVRTLLVQCAHRILAKNGPDSDLRRAGERIASRGGATAKRRAVIAVARKLAVLMHALWRSGEVYRPLKNHVPTA

SEQ ID NO: 331775 - protein, 343 aa, unidentified
MLTKNVIAIDLAKNVLQACHISIHGELLSNKPLSRQKTKEFLAKAKPSIVAMEGCCGCHYWGQLAEKFGHEVRIINPKKVKGHLEGHKTDHNDALAIANAAIQIGIKYSRPKSLEQQSMHSLESSRRFLSRNVVSLGQHIRGTILGYGIANPRGEKGLKASIQTVLDGETSIPASVVSVLSMLWEQYKQLKAKLIAFEKEKNALTRQIEPCQRLMEIEGVGETTAAMLYTTLGDGKQFKNGRQASAFVGLTPKQHSSGGKVFMIGIDKCGGVKELRSLLYLGAMSYVGRLPEKPKTQKDAWLRSIIDRIGFKKACIALANKIVRTAWAMLRYETEYKPVLFTN

SEQ ID NO: 331776 - protein, 390 aa, unidentified
MKIICGVDVSKARLDACIEPGAIFASFDNDTAGIAALAAFCRQHQASLVVMEATGGYERRAFLLLWEAGMPCALTNPRSVRRYAESMGILEKTDRIDASVIARFAHAKNLQPTPAPTPAQQRLKALVARLRQVTDDLTVQKQRRASLADNAEMLASVDEVIALLKRQSRRLEGEIASMIDDDPLWAQLAEAWRSVKGVAGRTIARLMADLPEIGTYSNKAIAKLAGLAPIADDSGKRKGKRSIRGGRASSLQENTKWPSGSLWPTNCSSASTQKHAMRVPNTPMQLDSSDSRSPQPSPTEVGYIRLRQMKMANSGKPELDGRGSALPISGHRTNTPFNFVTTSAAPRIAQIPGGRPFVRTSARDAGAVVCGCLQRRTSVVHRRRARYRRG

SEQ ID NO: 331777 - protein, 387 aa, unidentified
MARKRTLSTLDTSIAYEAVGLDLAKEDTAIAAFGPDHEGPYLIDRMPYDKLYELLADMAPTLVAMEPCSGAHQIAEQIQELGHEVMMISGGHVQAWVKDHCNGQKTDLNDAFAILNLAYDRWLTPIRGKTREECRLLALQASYRQLKGQRTKTMVHVEATLHAWGFPIRTGSFNQKALHELIDANREAFGDEVVETLHLMINRVHDLDHDIATVLKLLTEATQRDPRASLLRSIPGFGVLTTSRWCAVVGDIARFDTPKQTMAFIGLVPNNRITGHHTETSSGREARGQGKMSKRGDKMLRSLCILGAGALCLMVRNDRLPDCPFVASIKERLASPRPWFKVLVYVAAKLVRIATALLKYGETFSFEKAGISKAVLKQWELEQAKAA

SEQ ID NO: 331778 - protein, 351 aa, unidentified
MSLAEDAELIIGVDTRMDTHTAAVCDARGRAVSQLQVPATTAGYVQLLAWVRAAAGDRQVIWAVEGTRHYGLGLARHLASHGQQVSETGCSRHIGRRRAGKSDPIDAVRAARELLARPWPAQMRADGDREALRLLMIDRDNAVQSAKTARTALAAVLVTAPAPLREQLRPLPRERRAKECAALTCPAGADRQTRVLHQALIRLGQRIAALAGEAAGLEAQITQIAGDMAPGLVAAEPGLGALSAAQILLSWSHAGRIHSEAAFGMLSGTAPVPVSSGRTDRHRPSRLGDRQLNRAIHVIAVTRMRCHPATIAYVQRRRAEGKTDKEIRRCIKRYLARHLYRTLSNGIPSNA

SEQ ID NO: 331779 - protein, 381 aa, unidentified
MTATRAYEYSAFEPVMYLAFELSNTHWRLGFTTGPGRRPRQRTINARDLVSLEDEIHRAKKRFDLPESSCVVSCYEAGRDGFWLHRYLVEHGIENLVVDSSSIQVNRRSRQAKTDRMDVEKLLWQLIRYRSGEQDVWSVVRVPSVKAEDKRHLHRELKTLKKDRTRHINRIKSFLVGQGIRMKVKKNFLEEIERVRKWDGSALPERLKPRLQREYQRLQLVQKHIKELERERVEALRHSEEESVETVRNLLRLNGIGLNASWLFGMEFFSWRKFNNRKEVGALSGLVPMPHQSGCSYREQGISKAGNRHIRAMAIEIAWGWLRYQPESELTKWYEKKFGHGSKRIRKIGIVALARKLMIELWRYLETGAIPEGAVLKTRLI

SEQ ID NO: 331780 - protein, 412 aa, unidentified
MQDILTCAMGLDVHRDIIVACLVKGAVDAEPEAETRTFSTLIPEMQKLRDWVIESECRNIAMESTGIYWQPIYEMLESCFDGEISILVVNARHMKNVPGRKTDMKDAQWIATLLRAGLLKGSFIPDKAFRELRHLTRYRKSVVHDITAQKNRIDKFLQSSGFRFTAFLSDTFGASGRNIIRHLIEHGSIDREALDKCLKTKTRNRIDEILVALNGSLSEHQRRFLNMVFRHLEDLEAHKHTVEDEITEEVLKHTDTLNLLCSIPGIDVTAAAAIIAEIGTDMSSFLDSQHICSWAGLSPGNNESAGKRKSVHINKGNPYLKSMLCEVAWIMASHRKLYLSGWYWKVKQRKGAKRATIALARKILSIIYTMLKTGTPYNEECFEQRRLRCERKRANRLVNELQKLGYVVVAPD

SEQ ID NO: 331781 - protein, 338 aa, unidentified
MKLYCGIDLHSNNHYVSIIDHDDNRLKEKRISNDLSKTLALLAPYKNDLQGIAIESTFNWYWLVDGLMDADYSVSLVNTCAVKQYEGLKHTDDQYDAFWLAHLMRLGILPTGYIYPKQQRSLRDLLRKRMQLVQCRTSHVISAQAQVWRSTGTRLRSQDIKKCSDDLLSEITDQNLFLSIQSNLNVIQLLNTEIDAIEKTILSQCKDLPEYKQLKTVFGIGDILSQTITLETGDIHRFHKVGNYTSYCRCVDSKKTSNGKKKGVGNKKSGNKYLAWAFMEAANFAIRFHEPANRFYQRKQSKRNVIVARKALAHKLARASYYVMRDNRPFKPERLFQL

SEQ ID NO: 331782 - protein, 373 aa, unidentified
MNTIYIGVDFHARQQTICYLTTETGELVTAELKHEPKTAVRTFYEQFNGQVIIGLEASGYSPWFERLLEELGHQVWLGDATEIRRRARWRQKNDRRDAELILDLMLHEEFPRLHRPSLQSREVMRMLRYRQKLIKMRTMSKNSLQSLALQSGIARRGHLFTRAGKAELNAAVMSPAMEWQRAHWWQLLEPLNQQVVETMTWLKAASQNDVSIARLRTHPGIGLLTSLCLVHTLQPVARFGNTRKVAAYAGFDPMERSSAERKHFLGISKAGSRVLRYLLVEAANTAVRKDEELKRFYQRLAQRRGRPKAKVAAARKLLIRAYIMMRDEIDYAEFRRRAVAARLARLRQGPPIPAALIGQPASTERQEPRPRGK

SEQ ID NO: 331783 - protein, 359 aa, unidentified
MDTTTVAVDLAKNVFELAVADQHWKIVERHRLTRGQFERWFANRSVGRVVMESCGSAHHWARWLSGRGLEVRLLPPRYVRPYVKRNKTDAADAAALLEALRCADIVPVRIKSLEQQALQSLHRIRSLWMATRTARINALRGFCREFGLTIPAGSRLGMAQIATVVADPGPAIPPLLRGTLPLLIEEIRLLEARIVQLEAQLTAAARQSPACTTLLSVPGVGLLTATALAAATGGTVAHFKSARHFSAWFGLTPREASSGTTRHLGRLSKRGDRYLRTLLIHGARSVLWAARAAQRAGRPLDALRQWALALQARRHHNTAACALANKLARICYATLRDQEPFNLGRLNRKINRHTYALPA

SEQ ID NO: 331784 - protein, 367 aa, unidentified
MRAYVGLDIHSKSSSYVVQDARGKEVGHGEVPTSPEGLAEMKGRLHLEAGTEVSLESGTMAFYVARQVRALELKPVVVDAHEVRLKAHRPKQKSDQRDARELCVGLRTGIYRSIVHVPSEEVLLLRETLSRRRHFVRIQTGEINAAKRVLRSGGYQRLGRKSLTTAGAWKRVVKEAAEVDGTRTFVDLHFQAWRAAGERVRDLEQNLETQVTGFEPAYSRLRSVPGVGNIVAATALAFLSEPERFGDAKHAASYAGLVPQMDQSGDVHRGGHITKGGPAELRAMLCEASHQAARRSNPLNPLLLRLSARLGSKKAITALTHRLCRVIYAILRDGTEFDPARLGLEKGPFQVTRTRMYRLRKVPPTKR

SEQ ID NO: 331785 - protein, 405 aa, unidentified
MNSEVVVRQQLWAGIDAGKSDHHCVVIDTDGQRLLSQRVANDETLLQELMTSVTALADGGEVTWAIDLNHGGAALLIMLLITAKQRLLYIPGRTVYHASGGYRGDGKTDAKDAAVIADQARMRRDLQPLRPGDEIAVDLRILTARRADLVADRTRAINRLRAQLLEYFPALERAFDYSNSKAALILLTGYQTPDGLRRAGTARLEAWLRKRKARNANAIATSAMAAAQAQRTTVPGQQVAAAMVARLAKEVMALDTEIGDTEAMIEDRFRRHRHAEIILSMPGFGVTLGAEFLAATGGDMAAFDSVDRLAGVSGLAPVPRDSGRIHGNLKRPRRYDRRLLRACYLSAQIATRTDPASRTYYDRKRSEGKTHTQAVIALARRRLNVLWAMLRDHAAYQPATTAAAA

SEQ ID NO: 331786 - protein, 410 aa, unidentified
MIKENYIYVGIDLHKETHTAVMIDCYNQKLGEITFPNRPAAFPKLVTKVKKCNTDGKEVVYGLENAYGYGRALAVWLIDKGYLVKDVNTAISHRQAKHRGAMYRKSDSDDAEAIALATLNMLDKLPDAYPNDAYWSLGQLVHRRDNIMKQRTRLVNQLHEQLCIAYPSYKQFFNDISRPTALYFWEHYPSRKYLKGKSVEDLRTELVPVSHNRCSTKNCEKILDAVASDKVKNNAYQDARDMVTLSIVSDLQHYDSQLAEVDKMLEQMYKMLGCTLTTIPGVNVITAVKILAEIGDIKRFSNANKLAQFAGIAPLHLSSSGKGKDVATKQGNRRLQATIYFLAIQMVQVSSKGTPRNSVVRAYYEKRKAEGKTSQQALICISRRLISIIYGMLKHGTEYRMPVVESAGEK

SEQ ID NO: 331787 - protein, 343 aa, unidentified
MQVTTIGLDLAKHWFQVHGVDASGAVAIRKKLRRSEVLGFFQSLPPCLVGMEACATAHYWARELTKLGHTVKIMPPAYVKAYVKRNKNDAADAEAICEAVGRPSMRFVPVKDAEQQSVLMLHRVRNLLVRQRTMLVNALRAHMAEFGIIAPQGLRHVELLTKQVAHEQERVPELARSILQLIVDQLRDTMARVREIETRLAQWHRQSKVSQSIATVPGVGIMGASAIAATVADPALFRSGREFAAWLGMTPRQNSSGGKERLGRTSKRGDKYIRSLLIAGAVAVLRHARNRPTRDGAWVRAMMERKPTKVAAVALANKTARIVWAVMMRGDGYRAKQVLGQPA

SEQ ID NO: 331788 - protein, 470 aa, unidentified
MKSNRNRRPHRKKPATGPSLLERMNPNAAGIDCGSDTHHVAVPADRDPTPVRAFQTFTADLHRLADWLTACGMTTVAMESTGVYWIPLYEILEGRGFDVVLVNARHVKNVPGRKTDVVDCQWIQELHSVGRLRGSFRPTAAIAALRAYLRHRETLVQSAATHVQRMQKALVQMNLQLPIVISDITGVTGLRILRDIIGGQTDPHALAQHRDYRCQASAAEITAALTGHYRPEHVFVLQQNLELFDTYQHQLAACDAAIEAHVLTLAAQAPTPASPVPAARTRKTPRNNEPRFEIRRPLHQLTGVDLTQIDAIGPYSALRLLSEIGTDMSRWPTEKHFTSWLTLAPRNKISGGRLLSSQTQPSANRAAAILRMAAMNLGRSDTALGAFYRRLAYRVGKAKAITATARKLAILVYRSLRDGLVYHDPGAAAYDTRHRTHVLRRLRQRAAHLGFVLVDRATGEPGEAIGGAVS

SEQ ID NO: 331789 - protein, 453 aa, unidentified
MARKAEKEKTKDGLKLKIVNPNAAGIDIAYGEMQVCVPEDRDGENNRCFGSFTCDYEEIASWLKACGITTVAMESTGSYWVGLFFFLEEKGFDVLLANAKDVKNVSGKKTDEADAEWIMLMHSYGLLKPSFHPDAAARSIRELARHRDNMLRSASNEVQHMQKSLVLMNIKVDTVISDILGKSGKAIIEAILNGNHDPKSLVQLVDPRCKASKETIEKSLEGTWDVVHLFELKQSYDLYKYIHTQIADCEAEMDRLLGEYTDGCGTDMQGYTATKKRVSKKNAISFDAEKHAFSMWGVNVMEIPGMGLGALAVLMGELGRGFTEKFTSAKSFCKWCNLVPNNKISGGKLLSSKVPKQKNRVGQMFRQCANSVKSVKTGLGIYFRRQKSKGGHLQAIVATANKIARIFYTMVVSKNHYDESKVGLDEKQLLERKIILAQKTLDRLNRKLSVTQG

SEQ ID NO: 331790 - protein, 433 aa, unidentified
MDSSPPYDLIVGLDRSDRKADLHLIQTATGQRRSQTIDTSPEALWEWLLQLRQQHPQARLALCLEQPAAHLIAFLEAYDWITLYPINPITLQKYREAFVTSRAKDDAKDALYLAELLLNHHDKLKAWAPEDSQTRAVQQLVFHRRAVVDERTGLTNRLKALLKQYFPQALLLCGEDLWRPLATRFLLKWTSLQVVQKTKPATLKQFYHLNGSRSAKLMERRLALIQKAVPVTDDKAILDSFALRVQLICRQLQDVVTTIKTFDLRIAQAFKEHEDHQIFSSLPGAGPVLAPRLLATLGSQRERYDKAANLQHYTGIAPVTKQSGGKCHIHRRYLCPKFHRQSFHEYAKESVLWSRWAAAYYLQQRTKGSPHHTAVRALAYKWQRIIFRCWQNRKPYEEKTYEAALRKANSPLLTLLDKVELGKSPYKNHVNKN

SEQ ID NO: 331791 - protein, 400 aa, unidentified
MRTVFGIDVSKASSEVAILVNGDRVHGYTMPNDIIGFSRLLEDLKTVSNPEIIFEATGVYSRRLQAFLEENSYDYTRLNPLEAKKQLDSLRVRKTDKIDAEKLASSQFVLNRKPTYVQEEVYRNLHDLSRFYQNLTEDIVRTKNRLHKVLQVAFPEIENLLSTPTGEQYWNLVSIFPTKHWVLELSEVELKEAIRNSTSKRISENRVGNLAEKLVGLAKQSYSAISKTSPMIEEVKYNAQELIRLTNRREQVLEQLVELAKPLPEYEILLSIPGIAETTATSVIGELGDIRRFKSANQINAFIGIDLKHYESGDFLAQEHITKRGNPYARKILYKCIHNIAAASHTNPCHIADFYEKRKRQSQITSTKPHTIASIHRLIRTMYYLIMHNKLYDYTLARSH

SEQ ID NO: 331792 - protein, 459 aa, unidentified
MEQALAQRNPSISLKSGKSRAALTITHPNAAGIDIGSGSHFVAVPPDRDDEPVREFSSFTVDLNALADWLKTCGVDTVAMESTGVYWIPVFELLESRGFTVMLINARHVKNVSGRKSDVLDCQWIQQLLTYGLLRGAFRPADQVCVLRSLWRQRGMLLRSQSRHVQHMQKALTQMNVQLANVIADVVGVTGQKILRAIVAGERDGHALAEMKDVRIRASVDEIARSLQGNWRAEHLFALRQALNGFDFIGTQLAECDHEIEQQLQRLQTHEGEPASGKRRGRARNAPKFDLRTQLFKMCGVDLTRIDGIDVTTALAVISETGVDMSRFPSAGHFASWLGLCPGTRITGGKVMSGKTKRCANHAAQALRLAAAALRASQSALGAYFRRMCSRMDKPKAVTATAHKLARLIYTMLTKGEEYTDQGQDYYEERYRERVLLQLSQRAQKLGMKLVATEQPQPV

SEQ ID NO: 331793 - protein, 359 aa, unidentified
MTYGSTEARKAAGLTVGLDVSDTYTSLCLVDEEGNVIEEGRVRTTTPALARRFSVMPPCRIVLEVGTHSPWMSRLLASLGHEVIVANPRRVRLIAESDRKRDRADAELLARLGRVDPGLLRPIQHRGPEAQHDLALLRARDTLVRARTNLINHVRGAVKAAGGRLPACSAASFHRKAEAHLPVALRAVLLPIVSLVAELTARIQDYDRQVERLAEGYPAERLLRQVCGVGPLTALAFLLVIEDPTRFQKSREVGPYLGLVPRQSQSGEREPQLSITKAGDPLLRRLLVQSAHYILGPFGPESELRRWGLCLAGSGSSRGKKRAVVAVARKLAVLLHRLWVTGEVYQPLLDEKGAPARAG

SEQ ID NO: 331794 - protein, 460 aa, unidentified
MEHVPVIGIDLAVTAASELAIASGATIEASRKVASTPRGLTEGIRQAARGRAVAIVVESTAMAWFVAAVAAVRSGVEYRLYRVSGRKSAALRAFYRSHTKTDHIDARVLARMPAVDDSLLTYSLPAPSELAMKRLVVARHKLTTETTKLQNRVRSLLAWAAPGVVKAAGGTVSTGLVRVLGRWSDLTALAKARVATIALQGDWGTERAEAVRTAAAEAVAFYEGHVDFPAVGLELELSLAQLGFLASQVDRLEERIAALHTQLYPKDRLLTIPGIGPVVAGVVRAVVGDLSRFANQASFRAYTGLVPRENSSGEVRQRGRISKAGPSVLRWALYLAGDAARHCDPALAELYRRLMVERGRTHTQAVCAVASHLAGRIYAVAREGRDYVWRDPEGNEITREEARAIAQGLRVDAETRTRLRARREGGPRTPYARQPEVPQDVTQPSGDKLIEAALELATKA

SEQ ID NO: 331795 - protein, 367 aa, unidentified
MDETITYVGLDVHKETISVALADGGKRGDVRAFGQIVNTPTALARMLAKLSQSGRTLKFCYEAGPCGYGIQRQLSAAGHHCVVVAPSLIPRKPGDRIKTDRRDADNLARLHRAGELSAVWIPDPAHEAMRDLVRARLAAVRSLRQARQQLSGFLLRHGCHYGRPAWTHMHRRWLAGLRFTQPAHHIVLEDHIATIEAATDRRDRLTKQIEIMLSDWSLAPVVQALQSLRGMALVTAATMIAELGDISRFTNPRQLMAYLGLVPSEHSSGATRRQGGITKAGNGTARRMLVEAAWSYRFPARVSREQLLRQEQLPKTIRDTAWKAQERLCGRYRKLTKAGKPATTVTTAIARELSGFVWAIACQVSPR

SEQ ID NO: 331796 - protein, 311 aa, unidentified
MEHSLFVGIDVAKERLDVHLRPTGETFSIGHDEAGLVALTERLVPCAPAIVVLEATGGYEVTVAAALASARLPIAVVNPRQIRDFARATGQLAKTDALDARVIALFAEAVRPVARPLPDAQAQVLGEFVARRRQLVDMLGAETNRRRLVRDPQLQRRIATHIRWLERALRDLETDLHDTIRSSPVWREAEDLLRSVPGIGPVTAFTLIADLPELGRLTRRKIAALVGVAPFNRDSGTLRGRRMVTGGRAPVRRVLYMATITAIRRNPPIAAFYQRLRAAGRPAKVALTAAMRKLLTILNAILRDHRSWQSA

SEQ ID NO: 331797 - protein, 458 aa, unidentified
MSRAGKPKRKRLGMQVVNPNAAGIDIGSEVHYVAVPPDRDPEPVRSFKCFTADLNRLADWLEECGIETLAMESTGVYWIPLYQILEARGFEVILVNARHVKNVPGRKSDVLDCQWLGQLHSYGLLRGSFRPEDRVCVLRSYIRQRDNLVKSAGSHIQRMQKALEQMNIQLHKAITDITGVTGMRIIEAILNGERDPFKLAQLRHYNARSSQETIAKSLEGDWREEHLFSLRQEFELYGIFRQKIAECDQKIELCLNTFESKVDPGQKSLPKYKHGNKKARRNPPNLDLRNPLYRMIGVDLVAIDGFDVVTVQTIISEVGLDMTPWPTEKHFASWLGLCPNNKVTGGRVKDTRSKKVVNRASCAFRMAAQAAGKSHSALGGYYRRMKIRLGPSQAITATAHKMARIFYRILKHGVDYVDPGLHDYEQKYQQRVLNNLKKRARLLGYELTQNHELRATVS

SEQ ID NO: 331798 - protein, 313 aa, unidentified
MKSQTYIGIDISKNFFDLHSLPDGQGHHFEYDRKGIQQCLKMLKSSKPKLIVMEATGGYEVQLVCRLQTAGFAVAAVNPRRVRDFAKATGQLATTDKIAARNIAQFAATLQPPAQDLVDENTRIIRALVARRHQLVRMHTAESNRMEHAMDKQIARSIKVVLKAIEDEVARVEQQIRQRIERMPELKQKAEQIDSVPGVGETTASMLVSELPELGRLNRRQIAALVGVAPINRDSGQFRGKRMTGGGRRDIRARLYMPTLAATRHNPVIRRFYLALIARGKTKMVAVVAAMRKLLTILNTMVATNQYWNPNIA

SEQ ID NO: 331799 - protein, 361 aa, unidentified
MKRVQSNKLDFSGQNIYVGIDVHLKSWSVAILSEYSALKRFSQSPEPEALHKYLVSNYPGANYFSVYEAGFCGFWIHEKLTGLGITNIVVHPADVPTMSKEKLRKTDAVDCNKLARELRSGSLEGIYVPKADVLEIRSLIRTRNMIVKDSTRTKNRIKSLLRFHGVDIPEEFTRSSIGRWSKRFLAWLHSIELSTEYGKKTLELHLEQFVRLRNMLLQETRAIREISRKAPFEKPMRLLASVPGIGVTTAATLMVELDDIVRFKNADHLASFIGLVPMCHSSGESNGTGDITVRRHFMLRCLLVEAAWIAIRKDPAMTVAYTEYRRRMNPQKSIIKIARRLVNRIYYVLKHEKEYIPCVVE

SEQ ID NO: 331800 - protein, 341 aa, unidentified
MMIIGCDFHPRFQQIAYVDSETGEFFERRLSHPEEAERFYRSLAGTQVRIGLEATGNFGWFRRLLDGLGHEFLLGDPSAIRAASPRRQKTDKRDARHILQMLLEERFPAVWQPSMENEELRQLLLHRCRLVRLRTRITNQLDSMGKNEGLLGSKSWSAERRRRIEGLPLSGWYMRRRTDLLDLLDELEKRIEPLEKAVVEAAAKNQQACLLMTHPGVGPIVSLVYVLTIGDWKRFPRSKELASYLGLIPAEDSSADKRRLGHISKQGNTLLRWLLVQAAMGAQRSDPSWHRQYLRLSLNKHHGVAKVAIAHKLAVRLYWMLRSGQNYKQVMERGSHVGQPV

SEQ ID NO: 331801 - protein, 356 aa, unidentified
MDYGAIDLHKKESQIRLVLMSGEIIDQRVATTRERFTQVFWGRPRMRILLEASTESEWVARHLEGLGHEVIVADPSYGAMYAHRSRRIKTDQRDTVALVTACQQGTYREVHRRSARQQAVQRQLHVRAALTETRTRAISLARAITRGEGLRIPAGQAETFSTRLAALELSASVKATLAPLRSVIDVVDDELAAADERFDAQVAADPAVKRLTTIPGIGPITASAFVAALDTASRFERAGHVTSYLGLVPREYSSGEIQHRGRVLRSAHPYVQSLLVQAAWRVWRSADPRTAPLQRWAQTLGRRRGRKIAIVALARRLARILFAMWRDEVEYQPQRTHRRPPPTAATREHDTRPAAV

SEQ ID NO: 331802 - protein, 344 aa, unidentified
MTNIQHKETAHETKPDLFAGIDVGAEELILVIRKNGKLFDPQKFANTPADRDRLVKKLVKLPGIMVCLEATGIYHFDLSLALHDAGVLLMVVNPKASHNFAKVLMKNSKTDAVDANTLAEYAARMDFVAWTRPSDETIALRSFARRINALTGQKAAAKNHLHALNATSETPKAVLKDAKLAITQLEKRIDRLTDEALVLIGKHSELTRILALLIGIKGVGETSAIALMGELLLLPPDLSHREWVKFAGLDPRAFDSGKSVHKKTRISKAGSRHIRAALYFPALSAKQHDKHVKAYFQHLMDNGKTPLQGVCAVMRKLLHAIHGMLKNNEPFDNTRFYAIPESNG

SEQ ID NO: 331803 - protein, 343 aa, unidentified
MVHSVGLDVSQKTTAVCVVDVSGNSLWRGVCATDPDRIEASVRRHAGHDAHVGVETGAMTPWLVHELRGRGLNVVCLDARHARAALKMQINKTDQNDAEGLAQIVRTGWYRSVHVKSLDAHRARALLGARSQLVGIATRLSNHIRGILKTFGVLPGRVRGLRFDRRIEALLIERPDLEPIVAPIFETWRHLREQIRVFDKAVQTIVRNCPTCRLLMSVPGIGPLSVLAYVSAVEKPERFRNARAVGAHFGLTPRKYPSGEIDRSGRISRCGDSLARTLMYEAAVVILTRVKRPSALKDWALAIARRSGAGKARVALARKLAVILHSIWRSGEPFRWSEPSVAA

SEQ ID NO: 331804 - protein, 392 aa, unidentified
MYIIGIDIGKNHHEASIVSPEGKQIGRSLRFATTHKGADSLMRFIFKNIGNSPCVFGMEATGHYWYPIYSFLKAKGYTIYVINPIQSDSLRKMYIRQTKNDSIDSFLIAEVIRFGQFGTTSMADENILAMRQLCRYRDSVISSRTEIKLRIGTIMEQIFPEYEKQFSSLWVSTSMGILEKYLTPENIENTPIDELFEIIKDKSHNRLTKAKAISIKEAAADTFGIKIAQDAFSFQLKQLIDRMNFLDKQIEALDIEIMKYYEQFDCYLHTIPGIGIIGAATILAEIGDISRFKNSSALVAFAGIDPTVRQSGEFNSTHNHMSKRGSPYLRHAIFLAATTCSFHNSPLNAYYKKKRDQGKHHLTATGAVARKLTTIIYAVLRDSKPYEPKKFC

SEQ ID NO: 331805 - protein, 385 aa, unidentified
MRGKSFIPKDYDVFTGLDVSKKSMSVTFTNHQGLIRSLNMPHKAEPLLHYVRKHFPDQKVAFVYEAGPTGYGLYDGLAAQAYPCLIAAPSMIPRAPGQRVKTNRLDSKALSENLRGGQLKSIHVPSPTYRQLRHLTQLRDVLVSELAGMKQRIKSLLLFEGIEFPPAPAGSQWSFLVKDKLRKLPCSGTVRFKLDQLLDSLEFNEKQVLKTITEIRRFCRQDPELSQCIEYLMTLPGIGWITASQLLARIGDWRELNNIRQLGGFLGLVPTEHSTGERVDRGSITRTGNERLRSKLIQASWSAIRQDGELREFFRSVCRKHPREVASRVAIVAVARKLSVRISVVLMKQRPYEVREKIHSAPLTQEETSPQGTTRRLAEPGEKNS

SEQ ID NO: 331806 - protein, 357 aa, unidentified
MKKTYRLQDYVVRGKEIFVGLEDSKRTWKVAVRSEKMVIHQVAMEAKYPVLIGYLRNKFPDCTIHLMYEASFKGFTLYDQLTADGIDCVVIPPHLVTEPKVNRIKTDKRDARRLALVLENHDFKESCYVPDKERREDRQVSRTLIALQKDIIRTRNRIHRFLEFHGIEVSFPDKWGREEFRALKKLELSEPLRVSLDIFLTQLEELWVHQVALRAALKKLCKKERYRKAFTIARSLPGIGWFTAIRFVLELGEDLTRFTSGKKIASFVGLTSSEYSTGERMQKGHITGMGPGFIRATLIENSWGAIRKDPVLLGKFTRVWHASGSRKKAIVAVARILIVRFRACVLSGIPYRIGIAA

SEQ ID NO: 331807 - protein, 349 aa, unidentified
MTVYVAVDFHAREQTVSWCDTADGEVHRTKLRHQHDDVRAFYQQFRGEVIVAFEASGYSAWFEQMLADLGHTVWLGNPAEIRRKAPRRQKNDRRDADLMLDLLLKGDFPRVHGFSEESRTVLRQLRYRHKLVKVRTIAKNSLHAIGINAGLPLKRRLLTEPGIAQLQALSLSPVLTQQRDEWLQLIGSMNERIAAVEAQLQQRAQNDAAIALLQTHPGIGLLTSLALRYTLLPTARFSTTRQVTAYVGLDCMEDQSAERRRMGSISKAGSKLLRFLLNEAGHTAARHDPELKKFYRRLLHRRDKPKAKVAVARKLLVRSFIMLRDQIDYAEFIRRGVAARVAREAHSLP

SEQ ID NO: 331808 - protein, 315 aa, unidentified
MTTIGFDVGKLELVGVRIGKDAKVRERYYIANQPKAIDNLLSILGNKYKHIRIGSEATAEYHRLLALSCIDKNIPFCLINPIVTKQFTRATVRKKKTDVSDALVIAKLIKQGEGRLVSKDDFMASKAILRTANKLSSMHQALSLIKRRFEDNYHNETTTIKIVDHCLSVVEDSIGQIRKQAQAEDEELLKLLCSLPGVGKITANALIAEIGNIERFKNSKSLIAYAGLDPRVRQSGKLLHHNTRLTKRGSPYLRKVLFTATSIGLRHDKELGDYYTKKRNEGRSYKEAVIATARKLTNRAYAVWKERRVYVKTQT

SEQ ID NO: 331809 - protein, 384 aa, unidentified
MRKDTRFVGLDVHAETIAVAVAEPGGEVRSLGVIPNRAESLRKLMKRLGPATGLRVCYEAGPTGYTVYWELTKLGIHCDVIAPTLVPVKAGDRVKTDRRDAEKLARCYRAGDLTPVWVPDPAHEALRDLVRAREAAKADQLRARHRLQKFLLRRGVRAPAGIRAWTERHLSWVRKEVRCAALAQQVVLSDYLAEVDHARERIRRLEQAIDEAVGAAPPAMREVIAALQALRGIAKVSAVTIVAEVGQLSRFARPGQLMGYSGTVSREDSSGDRVRRGPITKTGNAHLRRIIVEAAWAYRHRPAVTGALQVRQRGLDAEVREIAWKAQHRLHDRYRRLVGKGKNKQRVVTAIARELLGFIWAIGVHVEGQAQPTHTSVVKTRRVA

SEQ ID NO: 331810 - protein, 341 aa, unidentified
MSIVGAFDVHRRQLTFEYLDTGSGELERGRLVPADRQHLREWLARFAGQDDVHFALEGCTGWRYVAEELAAAGITPHLAEPADTAALRGKKRHAKTDKTDTRHLRVHLMAGDLPECWIPPGHVLEARVVVRLYKDLVDERGGWHQRIAATLFHQGVPVIGSMDTAEGRAAVEQVQLSPAGRQAVETGLRQIDRLTAELDPLRRQLGMLSRRQPGCRALRATQFGIGPVTAVAIWAELGDVRRFGNSDDVVRHTGLDITVYSSDTKRAAGHLSRQGPPLLRWALCEAAKCAARPAAPDHGYYTAVRDQRTAGLATLSVARKLARRCYHTLRELGEEALAPAA

SEQ ID NO: 331811 - protein, 346 aa, unidentified
MTHYVALDVSLRSVAICIVDNNGDIQLEKSVKAEIEDIVRLLRSFDGEIISVGLEAGVLTQYLTYGLQAAGYEVVCMEARQVRAALSAMRNKTDKNDARGIAQILRTGWYSRVHVKSLGSHHVRALLSSRRAVLSKCIDLENEVRGLLRIFGIKLPAHLGHVVFDSAVRESIEADPALAHALIPMLDARGVLYQSFVELDRRVKVMARRDALCQLLMTTPGVGPITALTYKAAVDDPRRFKSSRTVAAHFGLTPRRFQSGEVDRLGHISKAGDADVRRALYAAANSLMTRTVGFSTLKAWGMQLMKTKGRRVAIIAVARKLAVILHRMWVNGTEFQWGTEGANHMS

SEQ ID NO: 331812 - protein, 343 aa, unidentified
MDIKTVGLDIGKTWFHFVGCNRAGNPIARHKFNRGQLMRHMVKMSPCLIGMEACPGSQHLARAFQRYGHDVRLIAPKFVKPYLKSQKNDFNDAEAIAEAVTRPTMRFVNVKSNEQLDVQALHRLRDRLVAQRTATINQIRAFLIEYGIPIKEGRRILKRELPQILSEPDNGLSDRMRRVIHRMAEHWSSLEAAVDECTEDLELIARRDDLCRRLATVPGIGPLGATALVAAVGNAAAFKRGRELAAWLGLVPKQHSTGGKSRLLGVTKRGNPYVRRLLIHGARSLVRHLHRENHELGLWMTQLEQRAHKNVVVVAVANKLARIAWAVLARNEIYRSEAAAAAA

SEQ ID NO: 331813 - protein, 498 aa, unidentified
MQVTGEKPAVNAADFIPFRRLLTCAFDAAGRPPAINLNQRHCMAPQFKGNPPKRKSTPQLPVLHPHAAGIDLGAREIYVAVPPGSDPRPVRSFPTFTEDLHALRDWLQACGVTSVAMESTGVYWIPLFQILEAAGIEVCLVNARHCKNLPGRKTDVQDCQWLQYLHSVGLLRGSFRPADQVCAVRTILRHRDALVRGAGRCVSHLHKALTQMNVQLHHVISDLTGVTGQAILTAILMGERDPQKLAALKDHRIKASRAVIAKSLRGDWRAEHLFTLKQTHALWQQHQQLIAECDTQIEGMLQAFDAKVDVASAPLALAKSSHKQAQRNEPQFDARTECYRVLGVDLTCVPGFASPTVLVLLCELGPEFAAKFPTAKHFGSWLGLCPDNRITGGKIYSVKTRAVKSRVAEALRLAAQSLWQAKNYFGELYRRWKARLGSPKAITAMAHKLARILWHMIRYKETFNPEVFAKEEAKMKRKKLQRLVAMATTLNYRLVPNQ

SEQ ID NO: 331814 - protein, 442 aa, unidentified
MSKPNTSHDPEPQWAAFIAVDWGDKKHHWKLREVATGKEEAGVLENRPEELDRWAGELRDRFQEQPIALCLEQSRGAVVYQLSKYQWVTLYPVHTTVAARYREMFYPSGAKNDPLDAAALLDLLVNHRGKLRRLDPDTAETRELQILVEQRRAFVDSRTAWSNRLRTCLKEYFPQVLSWIEDIDSPLGCDFLEAWPSLAAVQRAHPGTLNKFFLSHNCRSQRRIQERINGIYQATPATRDAAILAAGPRIVSALVAAIRPLTKNIKELDQRILELVQAHPETDLFAKLPGAGPVLLPRLIVAFGTKRERYSCADDLESYSGIAPVEVKSGRLRWVHFRRACPKFLRQTFHEFAAHSTAKSAWAKAHYDLKRSEGKKHHAAVRSLAFKWIRVLYRCWRDRIPYDEQLYLTTLQKRNSPLLRFLATNAEWTTVAGFQKLSPKKA

SEQ ID NO: 331815 - protein, 345 aa, unidentified
MKITTIGIDLAKNIFQVHGVDERGKAVLRKQLKRKDVVKFFANLEPCLIGMEACGSAHYWARKLAEMGHTVRLMAPQFVKPYVKTNKSDRNDAEAICEAVGRPNMRFVPVKTAEMQAVLALHRARQGLVKARTAQANQIRGLLAEFGIVIPTGIGHIAKRLPEILEDAENGLPGMMRQLVRELGEQLKAVDKQVGEMERQIKLWHRDNEQSRKLEAIAGIGPITASAFVASVGDAKSFKNARQVPAWLGMVPRQEGSGGKTTLGRISKRGDVYLRTMLIHGARSVIAHFERKPDQADGWLKKLLARRNKNVAAVALAAKNARIAWALLAHERTYQSDYVAKRTAA

SEQ ID NO: 331816 - protein, 423 aa, unidentified
MKGEIFFMKIVRPICCGMDVHKNIIVATIGITNKKTRITEYIQETFSTLNPDLLNLKQWLINHKCFDACMESTGKYWIPIFNILEDEINIYLTHPKYVKAIKGKKTDKKDSKWICDLFKHDLIKFSFIPPKEIRALREISRYRYKLVRMRSSERNRYQNCMTVSNIGIGSVFSDPFGKSAQAIMKEVLESDIIEDEKILKCVHGLCKNKDKILDSIKHCNIETDQRFKMNESMTHMEELQVHIDNCEIEMMKRAAPMFDQFMHITQLPGISTLSAILIISEIGVDMKQFESDKQLTCWAGLAPANNESANKKKSVRISKAGQYLKPLLVQCALGAIKDKEGYFGIKYSRIKKRRGHKKAIIAIARMMLVSIYHMILTGETFNPSDYESFRNPKPPIKQQDLTEESAIEFLKKSGFDVSKLTKP

SEQ ID NO: 331817 - protein, 358 aa, unidentified
MYKFMKKFFIGVDVSKDTVDVSFFDDDRMKSPEYLAQYSNSPKGFREMVKDLRMCCHGVSSGQWLFCCETTGRYDHPLCHWLVDHGMVVWRESALQIKWSSGIQRGKNDRVDSLRIAEYAWRHQDKMQKFVKPSESLSNLKAAFTHRRRLVEKRTATRCQLKSMSSEKGLSASVARMIVRDLSREIERLSASITTMDESIQKIIRSDSELDRNYRHIISVKGVGPITAVALIVCSGNFKAITSAKKMACYCGVASFRSQSGTSVNRKASVSNLSNRQIKSLLSMAARSASRSNPVFAEYFNRTLSRGKPVALVYNNLRNKLITVVYKLIERDCDFDVDYMRMHSTGQRANEPAIREAV

SEQ ID NO: 331818 - protein, 338 aa, unidentified
MTIYAGLDVSDKMTHVCVVDSEGTCLWRGACATDPDVIAKTLGRHAVGLVRVVLETGPLSAFLYHGLIERGVAVTCICARHAKGVLSARINKSDPHDAEGLAHLARTGWFKAVRIKQDATHIDRAQLKIREQLIKSHRAMANQLRGLLKLFGLRMGKVTTPGKRKERLAALFAQKPELEPVMLPLIESLDALEGQIRRSGKLLAASAEADPVAARLMSVPGVGPITALTFKSSIEDPGRFERGEDAGAFAGLVPRRNQSGERDHRGRITKAGDALLRSALYEAANNLLVRVKRSCALQTWGKRIAETRGAKRARVAVARKLAVLLHRLWLSETEFRWA

SEQ ID NO: 331819 - protein, 417 aa, unidentified
MLKIVNRNCAGIDVHKKTIVVTIAKTNEHDITDYQTKSFNTFTENLIKCRDWLISNDTFDVCMESTGKYWIPVFNILEEKCKCIITHPKYVRAIPGKKTDKKDSIWIADMFKHGLVEPSFMPPADVRQLRDLMRYRNKLINIRSSEKNRFQNSLTMSNVQIANVVTDVFGKTSQSILKLMLSNPNLTLDDITPLMHGHLKSSPEEILKSINGNFDEAQSSKMNIVLKHFDSINECIDELEEQILQLAIQYSTEINLLLTVPGIKEISAIFIIAEIGTNMNTFIDDKHLCSWAGLTPRCNESAKKKKSVRISKAGIYIKPLLVQCALCAIKDKSCPYIKARYESLKRRRGHKKAIIAIARLLLTSIYHMLLTGELFDYQRFENLMDRNFKSHKNIQNTPEEMISYLTNLGYNITLQNT

SEQ ID NO: 331820 - protein, 351 aa, unidentified
MKKIVIGIDVSKEKLDASAIDVRNGQLGVVKLGYRQFENRPMGFRRMLVWARCLIKDVSLCEVLFCCETTGGYDRMLCDYMYANGADIWRESALQIKLKSGLRRGKDDKADSLIIAEYAMRHMDKAVIYQSPSSTIRELKALLLYRHKLTQEKTAKKVRMTQLKETAAKSKSMSFIIRDARKSINMLEKSIKECEKQIQEVFKSDESLQKNFTHLKSIKGVAIVNATAMIAYSNNFKNISTANKMATYYGVASFRKKSGTSIDKKDNVRQYSSSMLRAYLTQAAECTIEEHGIYHDYYMRKKAEGKPYGVILNNIKNKLIHLAFSLVENDMDYEENHEFIRLQKNKANENI

SEQ ID NO: 331821 - protein, 312 aa, unidentified
MICGVDVSSLSLSVRIGREGAAATFDNSVAGIGDLAGFCRAHQVQLVAMEATGGYEQQPFALLASEGLAVAILNPRSVRQFAEGMGVTEKTDAIDAGLIAWYAEVRKPVPSVLGTQRQRQLRAQVTRLRQLTEVRTAQRNQRRLVTDTEVLAAIDQLLAFLKGQMDQLAAAIAALIAADPLWKQLDQAFRTIKGVADRTVARLMAEMPEIGTLSNKTISKLAGLAPLARDSGKREGRRVVRGGRPSIREILFIVASVVGRHEPDFIAFQQRLRDAGKPPKVVRIALAHKLLVRLNAKARQVRQQFQTPPLPV

SEQ ID NO: 331822 - protein, 331 aa, unidentified
MYNYIGIDVSKQSLKISDETKEYDVPNEKGLKTLKKLFRKNYGKDWKETRLIYEPTGPYSNYLREFVFKHKIRIYEMNPKKSANFAKALGNRSKTDDIDAKMLYKFHVLLKEEDFRIPEIDKVAEQLGAYVSSYRIIQKTRTMLSNHLQSREYENGIDPKLKESIKKEMEKLKQIEEALEKEMEAFGRDNPEIKEDFENLLSIKGIGVISVTALLYLFRKYPDANRNEITALAGLDPVKRQSGSSINGGRKISKAGDSSLRKILYVSCLSSIRYNDRIRVFYEHLITNHKKPKVALIACMRKILLIAHQIYVKKSEYKPLYIDNKSLCSSY

SEQ ID NO: 331823 - protein, 354 aa, unidentified
MNNITFSNSYFYVGIDTHLKNWRVTIRNSGLELKTFSMNPSPEELYKYLTTHYPEGTYFIVYEAGFCGFWPQRKFNELGINCIVVNPADVPSSGKEKVIKTDSNDSRKLARELENGSLKAIYIPDINHEQLRSLMRLRFRLVQNQTRIKNRIKMLLYNYGIIIPKEHITNSRWSGYFIHWLKSVKLNSTAGQFTLDNLLLQLEQSRENLKQVLKQLREESKSENISSVISSLTSVPGIAFITAMSLYTEIIDINRFNSFDHLASFVGLVPSVYSSGETDYTRGISFRHNKFLRPLIVEAAWTAVKTDPALTFKYKELIKTMAKQKAIIRIAKKLLRRIRHVWINQDKYVKALVA

SEQ ID NO: 331824 - protein, 322 aa, unidentified
MAQGEVMVGVDVSQARLDVALWPGGESFSLSNDPTGVEQLLKRMLELRPQAVVIEASGGPEDLLVGELCAAGVPVAVVNPRQVREFARSLGQLAKTDRLDALVLAQFGHSAQNHGRLTLSQLPAVAEAELKALVRRRRQLIGMLVAETNRRQRASKVVKRSIVATVRALKRSLVELEQQVRETIKNSPAHQQKIAILQQVPGIGPQLARTLIAEVPELGQIGRRQIASLIGVAPHAHESGKFKGRRMIWGGRAGVRSTLYMAMLSATRHNPLVAPFYRRLLARGKSKKLAYIACARKLLVIINAMFRDRTPWSPGLDSQHSR

SEQ ID NO: 331825 - protein, 410 aa, unidentified
MDAVRECCAGLDVHQKSVVACILFGELESKPKKVIKSFGTTTKELFELQNWLLEHKCKDVAMESTGVYWKPVWNILESSCRLVLANARRIKGIPGKKTDMNDAHWIAQLHRCGLIQPSVVLPQHLRDVRNLTRYRVKLVQNVAAEKNRIHKMLEDANIKLSSFMTDLFGVSGRLLLEKLMNGEVLNEEELRALVKTKLKSKVPQLIDALHGNLRRHHRQMIRRHWDHILFLEVQIDQLEAEIDNELSEYKQEIEWLDSIPGVDKNSAVAIFAEMGPDVSQRFPTIEQFSSWSGVSPGNNESAGRKKSSKCLQGNKYLKRVITQAAWANVKSNNRIGEYFRRVRKRRGDLKACVATGHLLLKIVYAMMKERTEYKEIDVRSNTSREKKLEYYLKQLQAFGVTVQVVSTNVN

SEQ ID NO: 331826 - protein, 353 aa, unidentified
METAYDGRQVVGMDLHRRRSVLVRMTEDGQRLGVARITNSPAGLCRVIAQAGASPRVVLEGTYGWYWAADTLAAAGAEVHLAHPLGVKAFTYRRVKNDERDAADLADLLRMGRLPEAWIAPPGVRELRELTRYRHKLVGLRTSCRNQVHGVLGKLGVPVTCSDVFGVAGSVWLDELRLPQPYAGKVTSLRQLAGELTTEITMLSEVIADLLAGHRGCQVIQQLPGIGPALAAVIVAEIGEVRRFGSAAQLCSWAGLTPRHRESDTKITRGHVTKQGSRLLRWALIEAVQHVPAGSLPGTVKQRIIARRGKQAKNIAKVAAARRLLTLVYYGMRDGQVRCLSQNPAGSPPARAA

SEQ ID NO: 331827 - protein, 450 aa, unidentified
MMREVQEIEDEEHEQILERVCAIDVAKAPGKVCTRVPHPSRPGARRTRVWDVDATTNAILELGEHLAGEGIEKVTLESTSDYWRIWFYLLEASGLDVQLVNARDIKNAPGRPKTDKLDSVWQAKLTERGMLRPSFVPPAEIRRLRDYTRLRTGLTRERTRYWQRLEKLPGDSLIKVSTVASSLDTLSVRDMLEALIAGERDPKVLAGLARGRMKAKHAALIEALTGRFDDHHAELARMLLDQVDALNAQIGKLTTRIGGLIAAIPSAQGVDADGTTGPTAGTSPGAPVLPAVARLDEVTGIGPDGAQAIIAEIGLDMSRFPAAGHLVSWAKLSPRTIQSGTSSRSGRTGKGNPYLKGILGEAAAAAARTGTFPGERCRRIVKRRGKLKALVAVARSILVIIWNLLASPAARHHDLGSGYHASRTDTGKKVRNHIRQLEALGYTVALTQAA

SEQ ID NO: 331828 - protein, 409 aa, unidentified
MDVVISRCAGLDVHQATVVATVRVPDETGGRQVVTETFGTMTADLLTLRDWLRAYGVTHVALESTGVYWKPVYYVLEDMCALLLINMQELKRVPGRKTDVKDSEWLAQLLECGLLKASFVPPPPIRELRDLTRYRVQQVRDHSQEVNRLCKVLEDAGLKLTTVVSDVMGTSGRAMLQALIDGTTDPAVLAELARGKLRKKLPELRRALVGRFRPHHAFLIEQIFAKIDFLDEVLERLMAEIDRRLVPFEPMLTKLDTIPGVDRIGAISIVSETGGDMTRFPTAGHLCSWGAMCPGQNESAGKRRSGKTRKGNRYLRATLIQAGLGAMRTNRSALQARYHRVARHRGHKKAVVAVGHQILEIAYYVMRDGVTYDELGADYFDRRHADRAVRRHVRQLEALGYHVTVAKAA

SEQ ID NO: 331829 - protein, 410 aa, unidentified
MMNAVGIDVAKRKSTITIRRPGDEIVLPPCDVHHNQPEINELIDYIKNLEGETKVCMEHTGRYYEPMAHWLSSAGIFVSAVNPILIKDFKDDDSFRAPKTDKADAAKIARYTLDRWTKLKQYGHMDEVRNQLKTMNRQFGFYMDQKTAMKNNLIALLDETYPGANNFFDSRAREDGRQKWVDFVYTYWHVDCVRGKSLEAFAEHYQKWCKRKGYNFSVRKVKEIYEKSSGLIAMFPKDDNTKMLVRQAVDVLNSTSATVERLRREMDNLASTLPEYPVVLAMDGVGPTLGPQLIAEIGDVTRFTKRGALTAFAGVDPGGNQSGDHERKSNRTSKKGSPHLRKTLFVIMDGILQRSPSDNPVYVFMDKKRSQGKPYYVYMTAGANKFLRIYYGRVKEYLEHLEDLEKSKES

SEQ ID NO: 331830 - protein, 378 aa, unidentified
MALQTAAHDGPVLFLALELSNSAWLLAAHLPGANKSKLHRIEAGDTAALLATITALRARVAGKFGTGVDVACCFEAGRDGFWLHRLLMANGIASHVLEPTSILVNRRARRAKTDRLDAQGLLRVLMAHCRGDRQACSMVRVPTPEEEDAKRLHREREHLIQERVRVENRIEALLATQGIRGRPSLRSWERNMAALRTGDGRELPTQLRAELDRLRRRLVLTLEMIQEVEAERAAALAAEPQDDTCRTIAALCRIRGIGETSATVLAREVLYRPFANRKQLASYVGLAPMPYRSGGMDRDRRISRSGNPRARTAIIQLAWLWLRYQPSSALAGWFRGRVGALAGRTRRIAIVAMARKLLIALWKYARTGLLPEGVEIGA

SEQ ID NO: 331831 - protein, 319 aa, unidentified
MEQIRERVAALDVHRDSVAACARVPGPRGGVRLDKARFATTTAGVAELAAWLAERGVTTVGMEATGVYWKCVYYALECLFEEVWLYNAHHVKNVPGRKTDMSDAEWLADVVAHGMVRPSFVPPPPIRELRELTRYRKTQVDVRAAEIQRLEKLLQDAGIKLTSVASKVLTQSGRAMVEALVAGERDPGRLAGLAKGKLRAKLPQLAEAMAGRFGPHHALVARRILDHIDFLDHAIDALTAQVVARTRVFAEQVELLAEVPGLDQTAIQVILAETGGDMARFPSPAHLASWAGCAPATTSRPASAVTWRPRPATAGCGVS

SEQ ID NO: 331832 - protein, 318 aa, unidentified
MTKNATTVRVLGCDVAKDTVFIFDTSTGVTKEVNNTAKALSAVLQRLESQAFVVCEATGGHEMALLSAAGVAGLPAHRGDPRKISAFLRSLRSHGKTDPIDAAGLARYGLERHDQLTLWQPTTKTQDHLQRLVRLRSDLVNDRADYKRRLKAPGEGPDKRHIAATIKNFNQRIEAIEADIHKLLKTDDHLANVVKHIEAIKGCGETTAIMLAGTMPELGQLTRRQAASLAGLAPHPYKSGKMDAYRHVRGGRREVKTALFMAALTARRHNPQLRDFANRLAGEGKKPIVVVTAVARKLITIINAKLRDALYDPVQQLS

SEQ ID NO: 331833 - protein, 349 aa, unidentified
MAVSIVGIDLAKNVFRLHGCDAQGRAVLRKQLMRGQLLAFLARLPRCVVAMEACASAHYWARELERFGHQVRLINPRFVKPFVKANKNDASDAEAICEAASRPAMRFVAVKTAEQQELQAVHRVRQQLVKSHTALINQVRGLLAEHGIVMAQGRAQLRRTLARILEDADNRLSGVMRELVSEIGERLKYMEDRLRQYELQIERRCRLDPRCRRLTEVEGVGPLTATALVAAVGNAAEFKHGRELAAAYLGLVPRHRASGGRTIMQGISKRGDRYLRSLLIHGARAALWTIERRGNQRSAWATRLKLRRGTNVAAVALAHKNARLLWALLRSGECYRAAPLFPRPAEAAG

SEQ ID NO: 331834 - protein, 336 aa, unidentified
MTHYCGIDLHSNNHVVVVIDEEDKRVFDKRINNDLSLTLKALSPYQESLQGIAVESTFNWYWLVDGLQEHGYDLRLVNTAAVKQYDGLKFSGDHHDAFHLAYLMRLGILPTGYIYPKEQRAIRDLLRRRLALVRTASTQLISVQSQIWRSTGTRFSSAELRKPDFVPPQLDNYTLQAVHAGLAVYQTVQREIDALELSAHQAVKLTDAFKILQTVTGIGKILGLTIMLETGTIERFAGPGNFASYCRCVDSTRTSNGKKKGEGNAKAGNKYLSWAFSEAAHFAVRFEPLAQRFYERKKARTNGIIAIRAVARKLARATWMMLKHQVFYDAKRMFPG

SEQ ID NO: 331835 - protein, 370 aa, unidentified
MKIIEELDPINFLYVGVDVHKDQHTAVAANCFGQALFEKEIDNSGEQFVDLAEKIRELAESKNLKPVFGLEDASAYGQRLATHLYGENFLVKVVSPVLVDRERRKLTHPEKSDSQDALGVARALIQRIGTLPDFSISKTNEMAKDLKDLATDREFLVKEQTRIKNQLHRLLHKAYNSEYRLKFKNPFSKKALDYWSKHPVPVEFSCNSILKSQIKRKVRRLKDIKKEIIEMADEMKMILDKMDQKLETLNGCGLVLASSVLGEIRNIERFHSPSALAKYGGLCPKEKSSGKRMRHTKTKSGNRKLNKAVHRIALSQIGRQGNKYSKEYFQKKIAEGKNKSQAICCLKRKIINIIFMMLKHKTAYDYAAKC

SEQ ID NO: 331836 - protein, 343 aa, unidentified
MNVMIGVDPHKGSHTATMLDRDERELKRIRVHASAGQVAELVAWADGVKARTWAVESAQGMGYLLAQQLVAAGETVLDVPATLASRVRVLGSGRSTKTDPNDARAVAVAALRAPSLPVVHTADHTVVCRLVVRRHGDLARWRNKLCCRLHALVAELVAGGIAKEVVVNQARSLLENITPDTPAGWERHRQAHELTAEIAELDHLLHETRARVATAVTASGTTLTEIFGIGPVIAAMLIGYSGDPTRFTTPGRYAAYTGTAPVEFSSGGRVVHRLSRRGNRRLNHAIHMAAVTQIRHRHSPGRGYYERKLEQGHTPREALRVLKRRLSDVIWRHLTADARAAGQ

SEQ ID NO: 331837 - protein, 391 aa, unidentified
MSVSNLVDAMVLSGCRINSSLTKMINYKLKAAPTAVSKEGNSQKGPKANRILIGVDVHLKSYQAAHKIDNGAVGVAQTFGSKEALLLYAQKQQELAKEVVVLYEAGPLGYKLYRDLKASDIECLVCAPRSGEQKRKRRKNNSIDARTLTSDLFNYLHGNEHALQRVRVPSEAQEQARVQSRQQDALVEERKRIGAIGNSLLLSQGYGSWSNWWRPKAFERLSKEVAGWIVKHLQRWVGVLRELDQQIQQAKVELSQKWHGPRPKGMGALSLVQLLAEVLDWNLYSTRRKIGCLAGMVPSEWSTGEGQRLGSITKVGLPALRRIITEMVWRMILFQPEYKAVQKWREVLEGSNRGLKKKAVVAIGRQLMVDIWRLQTGRITAQELGLIMIEG

SEQ ID NO: 331838 - protein, 420 aa, unidentified
MAGVVDIVYPICCGMDVHKNFLVACIAITDERSHTTHQVRRFSTFAGDLRRLADWLLENHCCDVCMESTGKYWVPVFNVLEKTCNVCLTHPKYVKAIKGKKTDKRDAKWISELFKCDLVRSSFIPPPDIRQLRDLCRYYMKLTYMCTSEKNRAQNCLTVCNFKLDAVFSDVFGLSASRIIEKLIEHGNSDFDFASLIDGRCKSTAEEVEAALEGELNFAQTEKLKFIRQHMDSLSNLKGALESLILQLASKYQPQIELLLTVPGIREPLTAIRILAEIGADMSVFETSKQLCSWAGLTPQNNESAGKKKTTRIGRAGVYLKPLLVQIALAVSKSDKHVELKSKYQILKKRRGGKKATIAIARKLLTAIWHILSKNEVYNAELYHKADKPPVNRELTPEQAFSLLRRQGYIIKDGDLTPPT

SEQ ID NO: 331839 - protein, 421 aa, unidentified
MLGVGIDWAEAFHLVALGHPDEGVIQVLRVEHTPTAVDRLIAQIAAMEPDPAEVRVVLETRHGLLVERLLDAGYTVLPVNPDLVARRRGPARKKDDAEDARIACLLALDRHTALRPLIPHGELAAELRAIARDDERAARDQRRLLNRLRQDLLSTYPAALAIAGDDLGAPTVLKLLERWPTRDLLVAASRQELVAFARANRHGWPERLADKIGTALAGDHFTPRDYLLRAKADTIRLAATQLLAITTQRKAWERRMGELLLGAPGHGQTGQPQEDQPGQALPGQVYRSFPGLGDRLAARVAGEIGDHPQQFGSPNALACYAGKAPVTRRSGRSELIVATRLACNRYLVDAVQQWAFCSLRCSSWAREFYDAQRTRGKTHHAALRALGNRWLEILWHCLIRGQLYDEATHTANRNRALGKAA

SEQ ID NO: 331840 - protein, 348 aa, unidentified
MRFYTGRHRYYCGIDLHARTMYLCILDHESGDVLLHRNLRCDPELFLEAVAPYRDGLVVATECIFCWYWLADLCVREGIAFVLGHALYMKAIHGGKAKNDKIDSHKIAVLLRGGAFPPDYVYPRRMRATRDLLRRRLFFVRKRGELFTHVRNTFHQYNLPAPSGQLLYKKNRVGLALAFAHEPSVRASIEADLALADPYDDVIRRIERVVQAEADVHDPDAFELLRTVPGIGKILGLTLLYEIQEIGRFPSVQDFSSYCRLVKSVHTSAGKRTGSGGAKIGNVHLKWAFSEAAVLFLKDNPRAQAHLKRLRKKHGHGKGLAILAARIGRSVYFMLKNREVFDMNRFFA

SEQ ID NO: 331841 - protein, 421 aa, unidentified
MSQSEFAAYVAIDWADKKHYWQLATSAAAPREQGQLLHTPEAIDVWASGLHDRFPEGLVAVCLEQSRGALAYQLSKYAHLVLFPIHPATLASFRQALSPAGAKDDPGDTSLLLDLLLHHRQHFRRLDPDTVETRQLRLFVELRRRLVDERTRQSNRLTAWLKMYFPQALDWIDNIDSPLGCDFLERWPTLQQLQRAQPDTVERFFREHNSRSQARIEERVKAIRQAVPAVHDAALLQAGAAASASLVLLLKALNTSIAAADRDIAEQLPKHPEADLFANLPGAGPVLLPRLIVAFGTRRDRFQSASELAAYSGIAPVTKQSGRSKSVHFRFACPQFLRQTFHEFAAHSVTKSAWAREFYRQHRDRGGRHHTVVRALAFKWIRVLFRCWKDRVPYDEERYLKVLQQRHAPPQAGSQSTTSEE

SEQ ID NO: 331842 - protein, 320 aa, unidentified
MNSEQFVGIDVSKSHLDVAVYPSGEQHRWGNDDSGIEELIKFVKSVPAALIVLESTGGYESLAASMLSASALPVAVVNPRQVRSFAKATGKLAKTDQIDAHSIAHFASAVRPEQRQLKDEHMQVLTALNTRRRQIVSMLVAEKNRLHTAPKANQKNIGQHIKWLEKNLDQIDTDIKKQIRNSPIWRENDDILRSYKGIGPVSSTTLLSDVPELGKLDGKKIAALAGLAPFNCDSGQYRGRRRIWGGRSHVRKTLYMATISAKRFNPQIKAFYDRLTDAGKPHKVAMTACMRKMLITLNAMLKNKTYWSHDHKTLDFQHGC

SEQ ID NO: 331843 - protein, 434 aa, unidentified
MVKRRAYRSTAVKKVVLEKVLEFAPAGDVHVGMDIGKDEIFAVVRWADKTFERPWKAENPTEVFPLVAVLRRLAKDRGVTIAMESTGTYGDALRQALGDAGLCVHRVSGKAASDYAEIFDGVPSKHDGKDAAVVADLAALGKSWPWPIEPETDKDAGMAYWVDWLDAQQSIQTLWIGRLEGLLARHWPELTSLLDLTSATLLKMLAHYGGPTKVKADGKAAGQLACWGGPRLRQQKILAVLESAETTVGVRQNTQDIHRMRQYATMALAAFRETQKAKRQLKSLAEDNAVIQRQAKAVGVTTACVLWVTLGDPRNYHCGEAYRKAMGLNLKVRGSGKQKGKLKITKRGPSIARRWLYFAAMRLSQKPDIRRWYEAKKARDQDRGIGALIGIARKVALALYSVGVHDEPFDPWRLFPGRSLVQKARPSRNPAATV

SEQ ID NO: 331844 - protein, 338 aa, unidentified
MTIVMGLDQHRAQITAEWLDTGTGEVARRRIAPADRAGVRRFAAAFEGRELEVALEATTGWRFVVEELQAIGAEVHLAEPAETAARRGTKKRAKSDRADARHLRELLMVGRLPESWIPPEHLLELRARVRLRHTLVDQRREWQQRIQATLYHHGVPPRAWLLGAEARAWLATLELAPAAREQITIALALIDAHEAQLAPLDAELRAYAKRQPGCRALMRHYGIGPLTSVTILAELGDARRFHSSREAVRYSGLDITVHQSDARRAPGRLSRQGPPALRWALFEAAQCARRPGSPDHDYYLETAARLGGNRACLAVARKLLKRSYHTLRELGEEALQPA

SEQ ID NO: 331845 - protein, 353 aa, unidentified
MRRPKDRWIAGLDLHSNNVMIGVMNQEGKRVAHRKLDCDLQAVDQFLKPFKGRLQSMAVESTFNWYWLVDGLRARGYPIDLANPAQIEQYTGLKHADDKDDAFHLAELQRLNILPKAHVYDPELRPVRDLLRRRTNLVHQRTALLVSFKSLYARTTGQRLDLGQVKQLEPQEAPRLYEHPANQLIAQVQAEHIQGLGQSIGRLEKAVLACAAQIPLYGRLLTLPGVGRILGMTMTMEVGDIGRFKSDGDFASYCRLVDAQRLSNGKPKAENNAKCGNKYLAWAFVEAAHFARRHDERCRRWYDRKAARTSKIIATKALACKLAKAAWHLMARQCDYDAQRMFPELAAPKRRAS

SEQ ID NO: 331846 - protein, 384 aa, unidentified
MTLDRPDAPAGTEYATIYVAFELSKATWRIGVLLPGSQKMSRFMIDGGDTATLATRLASMRTKAERCGKPVRIVSCYEAGLDAHWLHRWLTDQGVVSYVVDPASIEVNRRGRRAKTDNIDLEKLMRVLLAYLRGEPRVCSMLHVPSVEDEDRKRRSRERERLMQERTAHTNRIKALLVGQGIRDVQPLKPGFIASLEQMHTGDGRMLPPLLKQEIVREHERLMLAQKQIAVLEAESKAELRAAAPGSVAARIMHLIDLKSIGVISGEKLVNEAFYRSFDNRRQVGSYFGLTGTPYDSGTIRREQGISKAGNRRARTLAIELAWLWLRHQPDSELSRWFRQRVGDLKGRIRRITIVAVARKLMIALWRYLTTGVVPTGAALRPSF

SEQ ID NO: 331847 - protein, 528 aa, unidentified
MASKKPRSNRSKKSRSKGDEFLQKPRGVVHPRVQAAGGPQFFGIISVDCAKARSKWMLADFYGNVLIPPTEVAHNRVELELAVRQAREALGKHGLKDCLVAIERTGRYHHPIKNAFRAGGFETRLVHPYTSKQFRQPADPDDKTDDNDLAAIHLAAVNGFALLEAAPTEEWRELQLVIRQRRDLVRKCSSLCCQVREHLDAAFPGYAACFDKLWESNVAFRLVRRFESPQAFREQGVSGLCKYLRDEKVRFQKRTVDVVYEWAQNAAAPDLAAARHRLIALALEDDRARKNQDIRALERDIAYRLSKTPYVLLMSFPGINVVSAGDFAGEMGPIENYANPKAITGRAGIFPSRYQSDRVDRPNGPLVRRANRALRAVIMGIADNLILCNVYFRNKAALWKMAGKDPRNSHTKVACRFCRIGFHMVAGRHVFHHPSIRERSYILDKLLAFHIEHQTPLDEALRDLYHAADQIPKKDRADEAAKLDETFRATRTRGKTGPQPLSELIALVLLRLGVGKVESKPSGEKDPT

SEQ ID NO: 331848 - protein, 333 aa, unidentified
MEETGECGDQELNHSDGQAEKFYRDLKERGISVRVGMESTGYSRWFERLLAELGFEVWMGDPAEIKAKRVKKQKFDREDARLILRLMRENNFPQVWVPGPENRDLRQLLWHRHRLVQMRTRIMNQLHALAMNEGYRWKKKLFSEQGRAQLEKLTLAPWASRRRQELLELLDRMNPTIEELTAAVEREARKRPEAMRLMTHPGVGPLTALAYVLIIGTPTRFQRGKQIGTYVGMIPCEESSARKQRLGHISKQGNSLLRFLLVEAAQAAARIHPDWRRRYIHLAMRRHKSIAKVAMGRRLAVRLYWMWRNGCEYSQSLEFGSYAGQLGTGDGVK

SEQ ID NO: 331849 - protein, 366 aa, unidentified
MRKISTVAIERIQIFKEKQITIGLDLGDRTSHYCALNEAGEVIVESKLATTPRGVEEVFSRIPRSRIALETGTHSPWLSRQLAQLGHEVIVAHARNVRLIGESSRKDDQLDARTLARLARIDPGLLGPVRHRSAKAQIHLTVIRARAVLVSSRTALVNAARGLAKSYGQRLRKCGTEQMNRESTNGISEELRDVLDPLLGEIESLNERIAEYDRRIEHIAKEVYPQVAALKQIKGVGPLIALTFVLTLDDPNRFRRSRDVGCFVGLRPGRRNSGMSEPQLHISKEGDRYLRTLLVQGAQYILGPFGQDSDLRRWGLKLAERGGKNAKKRAVVAVARKLAVLLHKLWVSGEVYEPLRNNHRAVAAVA

SEQ ID NO: 331850 - protein, 375 aa, unidentified
MEGAPMLDTTTFIGLDVHARSIKAVSLDVMTGEVRAATFGYDAGAVAEWVRSVDPRARCVYESGVTGFDLQKRLSGLGVDCVVGAVSKMIKPSADRRRKNDRNDAEFLARMLSVGNVVEVWVPDDECEAARDLTRALEDARDDLSRSKQRLSKFLLRHGLVFDERTPTGRRKGNWTRAHWSWIESIRFAERADNDVLAYYVDAVRRAAEEKARLEGLVEAEARKPRWRKRVDSLRCLKGVDTASAADLVFEAGEFSRFRNARSFAAWVGLTPSEHSSGESDRRGAITKAGNKHLRKTLVEAAWHYLTCSGRPKGLAKGQAPDRGARRHAAKGVRRLVERREALLARGVHGNKANVATARELACWVWAVGLMAEEA

SEQ ID NO: 331851 - protein, 411 aa, unidentified
MVKENFIYVGIDLHKETHTAVMIDCYNQKLGEITFPNRPADFPKLVTKVKKCNTDAKEVVYGLENAYGYGRALAVWLIDKGYFVKDVNTAISHRQAKHRGAMYRKSDSDDAEAIALATLNMLDKLPDACPNDAYWSLGQLVHRRDNIMKQRTRLVNQLHEQLCIAYPSYKQFFNDISRPTALYFWEHYPSRKYLKGKSVEDLRTELVPVSHNRCSTKNCEKILDAVASDKVKNNAYQDARDMVTLSIVSDLQHYDSQLAEVDKMLEQMYKMLGCTLTTIPDVNVITAVKILAEIGDIKRFSNANKLAQFAGIAPLHLSSSGKGKDVATKQGNRRLQATIYFLAIQMVQVSSKGTPRNSVVRAYYEKRKAEGKTSQQALICISRRLISIIYGMLKNGTEYHMPVVENAGENR

SEQ ID NO: 331852 - protein, 417 aa, unidentified
MKISSNARPILRYVALDIHKEYIMVGGMNREQEWVIQPRRVEMERFGTWAEGNLREGDAVVLEATTNVWDIYDVVSPLVSRTVVAHAAAVRQIAEARVKTDKQDVERLLRLLIADIVPEVWVPPVYVRELRGLISYRWRLVKMSTMVQNRLHSLLHRHNIRPPEGGLDTEKNRAWWEQQEFSPIEALQVSQELAMLYQIEKHKEEVEQELGRLSNTEPWNSQSAYLMQLPGVGIVITMTALAAIGDISRFESPKKLVGYSGLGAGVHDSGKEHRDKKITKCGRKELRWAMVEAAWRAVRNNPYWKKQFEVLKRRKHPNQAIVMIARKLLVTIWYVLSGREPYRHASEEDLAYKMLVWSWSMGEQARQGMTRQQFAKYGLLRLGIGQNLTRIVRGGYPRRLAPAEEVLAIRPELRPPE

SEQ ID NO: 331853 - protein, 430 aa, unidentified
MSVGRSGGHEPLFAAFVGIDWADQKHVWSLQTADSQKRESGELEHAPEAVEVWVAQLCQRFAQGPIAVALEQSRGALVFMLSKYERLHLFPVPSTMAGNMREALYPSGAKDDPRDADLLLDLLLKHRDKLRRLSPDTEATRRVQNLVEERRKLVDEKTEQINRLTSHLKIYFPQMLDWFDRLDREAACALLERWPTLQELQKVPPVKLRTFFCKHHCRDQEVIERRIVGIRQAVPAIRDRAVIEAKSAVVQVIAQLIRILVQGIGGLDRKIEEETAAHPDFFIFDSLPGAGPALAPRLLSAFGSQRARYGSAREVQAYSGIAPVIERSGKKKWVHFRWAVPKFLRQSFHEWAGRSIAQSQWARAYYEQQRQRGKGHHAAVRALAFKWIRVAFRCWKNRVAYDESMYMATLARRASLQSGSTVALSPAKTL

SEQ ID NO: 331854 - protein, 412 aa, unidentified
MEVLYRSCCGIDVHKQFLVACLLVVDEAGCQHKELRRFSTMTGDLLTCVDWLKAAQCRAIAMESTGVYWKSPWNLMEGHFEIVMIVNAEHMKRVPGRKTDKKDAEWIAELLQLGLLKPSFIPPRPQRELRDLTRLRTTMTAERTRLVNRLHKTLEDTNLKLSSVLTDIRGQTGQHILGAVVRGEDDPIVLANMALRRAARKRDALVLALRGRVNDHHRLLFRELLEMIQHHDQAISRLDKEIEERLRPTAPLIQRLDAIPGCSRRVIEVLFAEVGWELSAFPDAAHLASWVGICPGNNESGGKRFSGRIRKGNRWVKAILVQAAQAAARTKNTYLSAQYHQIAARRGNKRAAVAVGHSILVIYYHMLTTGEPYQEKGANYFSELDRHHAERRATKQLERLGYQVTLIPAQIA

SEQ ID NO: 331855 - protein, 429 aa, unidentified
MQQTYLSVGIDVGADFSEMSIALPNFDILAKPFKIFHNRLDSLSSAVNRIKKAEELHSLKARIFLESTGIYHFPLFCYLREAGFNVFVINPLVTHSSRNFNIRKVHNDSFDSKKAALLGLNPNIKVSLMPVDLVLNLRNLTREYFRISDIRSAYVNKLLAQLRMVFPQYLGIFSKVTGVTSLMILSEYCDPKKLLCADKDSLIASISKASRKGLVAAEKKYDMLICAAKDAAVFGHAVDSNFFLIRQIIEFIKIYDHQLELTLTEMNSVISQHTDEPFIKQISLLQSYKGAGFLSAVTLMCEIGDFSAFQRPKQLYAYFGLDPEVKQSGKFKGTDVNISKRGSALARRILYMLALQGVGTSTNGSAKNPVLRDYYLKKCESKPKKVALGAVMHKVCNTIFAILRDNKPYVLRTPQEHQLHYSSSKIMAA

SEQ ID NO: 331856 - protein, 332 aa, unidentified
MNYKAFIGIDVSKLTFDVFIYGKSVKQQFTNSEKGFLSFVKWLKKSLSDHELTQILVCFEHTGLYSLNLALFLQQQSVPFSLVPALDIKCSLGTIRGKSDTLDAERIAEYAYLKREKLTPTVLPSKTILQLQPLLTLRNKLVSDRAGYMVSSKEQKAVLTIKEHQELFGVYKSLIKVLDEKIKTIEAAINNLLQSDPDIKRTFQLITGVKGIGPLTASYLIVYTHNFTRFSSWRKFACYSGIAPFPHTSGTSIKGKTRVSHLANKQIKSLLFLCANNAVKNDQELKAYYQKRIQEGKSKMSTLNIIKNKLISRVFAVANRQTEFVNTMKFAA

SEQ ID NO: 331857 - protein, 339 aa, unidentified
MGIDLAKAVFAVHGVDEAGKATLVKPKVARDQLVPLIAQLPPCLIGMEACSGAHHWARVFAEHGHTVKLMAPKLVSPYRMSGKRGKNDAADAAAICEAVTRPSMRFVPVKDEHQQATLCLHRTRQGFIEERTSTYNRLRGLLSEFGVVLPQSPERLRKEIGPCLDSLPGWARRCMSELLEHTSHIEDRLVELDRAINQIAREDDRSRRLLQLRGVGSTTASALVASIGDGHDFRNGRQVAAWLGLTPSQYSSGGKQRLGSITKAGDAYLRSLLVLGARSVMANLGNKQDPLSRWIRNLMERRGYWRAAVAIAAKNARMAWAVLHYGDTFKTEQAEPTGA

SEQ ID NO: 331858 - protein, 311 aa, unidentified
MTDDTIGVDISKATLDIHRLSDGKIMSFSNCPAGFKALSKFCAKTAVTRVVYEATGAYHGGLERALGAHLPLVKVNPLQARRFAQAQGVRAKTDAVDAKMLADMGHVFALEPDEPAAEIQHDLKELRSFRSGLIKDRTGIMSRMKTQTLPITCRQSKARLAQVDKQIAEINAEIDRLIHSSDTLAHSMKILRSIPGIGAVCAATILIEMPEIGSMDRKQVASLTGLAPMTRQSGQWRGKSFIQGGRKVVRDALYMPALVAMRHNPDLRAKYQAMINAGKPPKVALTALMRKLIELANALIKANRNWVKKAA

SEQ ID NO: 331859 - protein, 362 aa, unidentified
MLIIGCDYHPSGQQVFGIDTESGEVFADRWIAHTGNELEEFYSGLPAGAVVGVECSGNMLWFERRLAHYGHRLRLGDAGKIRAKETRKQKHDRRDAELIARLLREDNFPDLKWVPTLAERDQRQLLMHRHKLVRMRAQVKNQLQHIALNQGQQKKRQLWTKAGRELLEHLQLEPWTARRRDDLLRWLDLLNRDCESLEREVEQAAEARAEARLLMTHPGVGPVISLAFVLTIGSIERFQRSRELVSYLGLNPSEDSSGERRRLGGISKQGSSFMRLLLIQGAQTAVRGDEDLRRQYRRLASKKHRAVAKVMVARKLSVRMFWMLKTHKTHAELVRTRGSSSHPGVGKTDCLNERPASPRIQP

SEQ ID NO: 331860 - protein, 345 aa, unidentified
MDTIGLDLHKRESQLCILAPDGAVTEQRIVTSRERFTAVLGNRAPARILLEASTESEWVARHLESLGHTVIVADPNYAPMYATRRRRVKTDKRDARTLAEALRLGAYRVAHRVSSERRHVRAELAVREALVRTRTRYIALAKALVRRDGLRVSASESHLVAKRIAALELSDALAAELLPLFTILAPINEQIAAADRRITALSASDPIVALLMTAPSIGSVTASAIVATVDDVTRFGSAHQFEAFIGLVPGERSSGEKRRIGRITKTGNARVRYLLVEAGWRILRAQDEDTAALRAWASRIAARRGKRIAVVALARRLAGIVYAMWRDNRPFDARCLRMPRTEAAA

SEQ ID NO: 331861 - protein, 458 aa, unidentified
MSRNKSSDKVRATMAMVHPNAAAIDVGATMHMAAVNADRTAEAVRSFGTFTTDLHRLVDWFAECGVDTVVMESTSVYWIPIFELLDARGFAVFLVNARDAKHVPGRKTDVSDAQWLQRLHSFGLLRASFRPKGQIAELRAYLRQRERLLEYGASHIQHMQKALTEMNVQLHHVVTDITGATGLRIIRAILGGERNPAVLARMRDRRCHATVETIEKALAGNYRAEHLFALEQALALYDTYQQKASACDARIEAVLKELSARRGHEVGPLPSPRQNRSRQQNSLLFDVRTALFALLGKDLTQINGLGPYLALKLIAECGDDLSAWPSAKHFTSWLCLAPSNKISGGKVLSSRTRRSRSRAAALLRLAAVTVGRTDTALGAFYRRLSARIGKAKAVTATARKIAVLFYNAVRHGMDYVDPGASSYEIRYRARVIDNLHRRAKAFGFMLQPMAPTPGMAVS

SEQ ID NO: 331862 - protein, 387 aa, unidentified
MSKKIVAPSYVAAMERAEADPSAARFWVGLDIGFKSTAVCVLDCDGAIVHQVSMKSNATEMGRYLRKNFKSHVTLIGMETGSLSPHLATELRAQGFQVAVLDARQVHRVLSVKRNKTDTNDARGIAEITRTGRAYLTEVYVKSNLCFEIRAYLTMRDRLVKQRRETEAMIRGLVRVYGGRIEGGTETAASYRSRAIDQMCLIADTEGVDLRPRVLPLLDLCEGFYVEANRIERELELVAASNPVCKRFMEIPGVGTITAVSFYSAIEDPTRFRHVDDVAAYLGLTPRVYQSSESLTHGGISKMGNQLTRTHLVGAATVMLANTRSFSTLKDWGLKLSKRIGFNKAKVALARKLAIIMFSLWRDGTHFMAKAADVPAHRALMQSRLSA

SEQ ID NO: 331863 - protein, 331 aa, unidentified
MPPLRPVHWRPVVGSHPQERGPEVIVIGIDPHKQTHTAAAVERATGELVGERTVSARERGQGELVFWARSLSSERVWALEDCRHVSGSLERFLLARGERVVRVPPKLMAGARRGQRRRGKSDAIDALAVARAFLREPELPAASLAGFEREIRLLADHREDLVGERTRIGNRLRWHLHDLDCELEVPPGALDRYRWLDRLQAWLGGREAAGAQVEIASELVEDCRELTRRIAELERRLQAMLADEAEELLELVGCGTLTAAKLVGEVAGVERFSGDAKLAKHTGTAPLEASSGERQRHRLNRSGNRQLNCALHRIAVTQARMHPPARDYLER

SEQ ID NO: 331864 - protein, 341 aa, unidentified
MSNSNTYIGVDLHKKTCFVTIMDKAGKIKKQTEILTAADKVTEFFSHWQGAKVAVESTMNWMPFYENLEKLGCHVVLSNPLQTKAIAAARIKNDKVDSRVLADLLRTNYLPLAYVQAQPIRDLKELVRERYFYVCERTKIKNKIHSILFKTNSQYSLSGLYTLEGMRWLRQLKLRDLYRQELDRCLATLEHLSEQIDKISKIIESTAKLDYDCRLLLTIPGISYYSALMIKSEIGNIARFSNADKLCSYAGLIPSTYQSADKVRYGRITKRGSKWLRKTLIDAITVNARSDNRLSYHYRKLKRHKGTGKARVATARKLCTVIYAMLADKQPFREFTPVKKR

SEQ ID NO: 331865 - protein, 366 aa, unidentified
MARYVGLDAHSKRCVYVIQDEHGQVRGEGSVSTDEVGLHRLRDRYQLAAGTRVALESGTMAFYVARQLARLGLDPLVVDAHEVRSKALRPNQKSDRRDALELCEGLRRGSYRSVVHVPPESVERLRETLGRRRHFVRLKTMQVNAVKRLLRAAGMPTLARRLATEKAWGQLLAVVAVDPTLRTFCLAHRAVWQCAHQQVAMLEDSLREQAVPLQADVDRLQTVPGVGPIVALTVLATFSDVRRFPSAKHAASYAGLVASTYDSGERVQHGRITRRGSAELRSMLCEAAHHAGRPRSPFNPYFIRLCVRRGYKMAVVAVAHRLCRILYAMLRDGTDFDLNRLGVELGRFEHTIVRHYRRTPHAAVTA

SEQ ID NO: 331866 - protein, 348 aa, unidentified
MSSTILAIDLGKFNSVLCWYDPDARAETFRAAPTTPDDLTRELTRRPVARVVFEACSQAGWVHDLCGHLGVPAVVAATTGAAWQWKHVKRKTDRDDARKLARLAAVGEVEGVPVPPRAVRQWKSLIGLRKRLVSERVRTQNRIRGLLVSEGLTAPAGAKAWSALGLAGIAALARPLAACGPDELWRGELDLLLGRLRALGDQTREVEARLDELAAGDGRVALLTTVPGVGVRTAEVIAAHLPDARRFRSAGEVSAYAGLVPRQYQSGETDRRGRITRRGPRLLRAALVECAWCSLRYNAWARATWRRLQANGCSKKKAVVALARKLLVRCWAILRTGRPWRAPEPAAA

SEQ ID NO: 331867 - protein, 403 aa, unidentified
MKHVIAFDISMGKSYMVIYNAQKQCVFESEIKHSKPEFKKLQEKIHELTDKTGELPKIVFEATGIYSRQLERFMQDNQYTYCLLNPLEAKLQCDSLRIHKTDRSDAHRLALTHFTATRRVFTGTDNLFYQLKSLSRLYSELDSELSIIRGRMHKVIQLTFPELERMFTSKSDLFLNFVQLFPHPDCILGLSKTIIKNRIRANTNKKISNITAEKKAIQILEIAKTSYPAVSQNDVLCDQLKLYARRYQELLHQKECCINKMVYIAEQRAEYNIILSLPGIGPNTAVRLMAEIGDITRFNNNKQLNAFAGIDIRRFQSGKTFFKDKINKRGNKHLRKLLFLIIQNMIKQRRYGQNHIVEYYDKLKTQPYNKCHKVASIACVNKFLKLLFHLITHDIHYDYRLTA

SEQ ID NO: 331868 - protein, 461 aa, unidentified
MRKARRSRRKPGKKIVDVTAGLDILRPHAAGIDVGNAEHYVAVPPGRSEPSVQTFGSFTADLHRMAQWLQACRIETVVMQATGVYWMGLYQVLESYGFQVYVVNAKYTKTLPGRKTDVLECQWLQKLHTYGLLNNSFLPPEEIRVLRTYLRQREDLVAAAGTCIQQMQKVLTEMNVQLANVLSDLSGMTGMAIVQAILEGERDPQRLAALADPRVQASRKEIAQSLEGHWRDDLLFVLQQVRDLYFTYLESITACDRRIEAHLQTLEAKADLAAQPLPPMPRWPRRKHIPQTNLREELYRVTGVDLTRIDGIHVQTAQVVISEVGVDMTRWPDEHHFASWLGLCPNNRITGGRVIQRGTKKVVNRAATALRLAAQSLHHSKSYLGAKYRRFRARLDGPVAITAMAHLLARLIYRLLRYGTQYHDKGVEHYERKYRESQMKWLTKQAAQLNMQLVPAPGVAR

SEQ ID NO: 331869 - protein, 366 aa, unidentified
MLQEAELSGLADSENDLGGSSETMYYIGLDVHKKTISYCVKDAAGCVHREGKIGSTRRELDAWIRTLPQPRMIAMEATIFTGWIYDHLLPYAEKVKVAHPLMLRAIAAAKKKNDRIDASKIADCLRCDFLPECHMASTAIRDRRRTLRYRSLVIKQMVQMKNRVSGLLMETGVSYNKQRLHKLGYFEELMTTNEDVHDSIRPLLRLSRDLISRSQRLDYALVSSLERDPLLKERLRRLRTVPGVGPITALTWALEIGDFTRFTSNKQAISYCGLCGDENSSADKVMRMPISKQRNKHIQRVLIEAAKLATRESPELAMIRARELERGNPNRATLAVARKMVIYMLAVERRQQDWVPAEQFSRTAAA

SEQ ID NO: 331870 - protein, 322 aa, unidentified
MAKSITVCAGIDTGKLKLDVALDGSPERLQVENTAEGYEALLEWLRHHRVKRVGIEASGGYEQAVVAALRARRFVVVVFQPAQVRAYAKFRLQRAKNDKIDAALIAACTAAAQKIHPAPDPRLLPFAEQLTMIDQISEDSARLKNRLESCRNPHIRQHWKQEIARLAKCEKAELKALAAAIREHRDLADRLDLLCSIDGIGLKTAVAILVRMPEIGRITREQAAALAGLAPYDDDSGEQVGIRHIEGGRERLRRALYTAALPASFRWNPQLIALYGRLMAAGKEHKRALIACARKLLVFANTVVARGLPWQTQPPKPAASAP

SEQ ID NO: 331871 - protein, 262 aa, unidentified
MFQVHGVDASGRVIVVKALRHKDALAFFAQMPECLVGMEACGSAHHWARELIKLGHDARMMPPAYVKPYVRRQKNDAAAAAQICEAVTKPSMRFVGVRTLENQAALIHHKLREMLVAQRTQLINALRGHLAEIGVITAQGLKTARDLAGVIKAEGDKTIPACVRAALAPLVRQLHALDQKIARSDQTIAAMARDDEMARRLMTIPGLGPVTASAMAASVQDVSVFSGAREFAAYLGLMPRQNSSGGKERLGRVSKMGNRYRG

SEQ ID NO: 331872 - protein, 356 aa, unidentified
MLYLGIDQHDKHLTISLRNQRGEVVLRRQVSTRWVKVREFFEQIQTLCDEHGAAGFAAVVEICGFNDWLVQMLRQYGCLRVVLVQPEKRSKRKTDRRDAQQLSELLWLNREQVAAGERIRGVREVRFATPGEQHDRQLTALRRRLTAERTKIINRLKHLLRKHNLGQECPTKTFQTKACRGWLLKLQLPAIDRLEMNQLLAQWELLEKQLKQVNTEVQRRVAQVLGTLTGQAGFSALALAARIGPLENFPRPRSLANYWGLTPSCQNSGEITDRLGSITKAGSPLARWVLGQLVLHVLRRDGWMRNWYKAIKRRRGAKIARVAVMRRLATIIWHMVKYNEPYVPGGPPRLKMRDAA

SEQ ID NO: 331873 - protein, 338 aa, unidentified
MSLYCGIDLHANNNYIGILDENDRRVHNKKLRNNLEAVLRELEPFKKELKSVVVESTFNWYWLVDGLMEHGYNVQLANPSAMSQYTGLKYTDDVSDSFWLAHMDRLGILPTGYVYPREQRSIRDLLRRRFLFVKQRTAHILSLKSMIARESGYDIDANDLKKLQVCDLESMFGNKYLCMIAESNLSVIHHLGRIIDMMEKEVRSQCRLRDSFKLLLTVPGIGDILAMMIMLEVGDIRRFPGVGNFCSYSRCVQSIKISNNKKKGKNNRKNGNKYLSWAFIEAANYAIRYSPEARRFYQRKMARTNKIVARKALANKLARASYYIMRDGVKFDKEKLFS

SEQ ID NO: 331874 - protein, 312 aa, unidentified
MAMLSFCGIDVSKDCLDVVVLPEGWFFSVSNDTAGWAELVARLRPLTVSAIGLEPSGGYERGIIRALLAAGLSVRRINPNKLRQFARARGVLAKNDRLDARLIAEYVAIMPTRVVQRDAAVEKLAEIVTMRRQLCDEHVAAENQAAHLEDAMLRRLSKRRQTRLEADIRLLDKRLAEMVAANVALAQRYELLTSMPGVGPVLAFTLIALLPELGKMSRKQIAALVGLAPYDFDSGKLKGHRSIYGGRMPVRNVLYMAALSASRYSPALKTFHKRLAAADKKSKVIIVAVMRKMITTLNAMLRDNAAWQPRSV

SEQ ID NO: 331875 - protein, 360 aa, unidentified
MSDVSKEHPLMTAGLDIGDKYSHLCLIDSQSGEVMEEGRLSTTPEALRRRFVFERPMRIAIEAGTHSPWASRVLEECGHEVLVANARKLRLIYANKRKTDQVDAENLARLARLDPKLLYPLRHRSEDSQAHMAIIRSREALVSCRTQLVNHVRGAVKSFGARLPKCPARSFHKRASEHIPEALRPALEPILEQIASLTERIRDYERRLEAISKEHYPETDLLRQVEGIGPLTALTFVLTVEDPYRFERSRCVGAYLGLVPARDQSGDRDPQKRISKEGDEMLRRLLVSSAHYILGPFGSDSDLRRHGQKIASRGAKNSKKRAAVAVARKLSVLLHRLWVTAEVYEPLRNTHRSGGRKEAA

SEQ ID NO: 331876 - protein, 475 aa, unidentified
MKKSIFKNIGNDIKKLLSQYKPDEILYVSIDVAKYNHSFMVANFFGEVIIPKSDFPYDKNGIDSLRKKVDLALQQTNAKKVFFGLESTGHYHENLTAALLKLGYDIAVINPTDSKNERDNIHAKTDNIDLAAIARVIMTNKGKRSYIPNTIYYNLRRASRTHRQLTGQETSIKNVITMLVDKTFNGLWNPENNIFSEKWSKGSLLFVENYPTPQQAMRLGVKRLTDFFRKHNTKLTVETAQKIIQLARIAPAREIEMMESDMKALRNNLQVLKALSFAIIEQRKQMVKYLVCTPGIYLLSIPGIGIIYASDFTGEVGDIHRFDYAGQVISLAGTAPKKHQSGQLDKDNLSTSRKGRNLLRMTVNQIALSLDNHCPEYHSYYFTKLSQYQDTPGKAKTATANRFIKLAFSIMRKETLYCPRAYKSLFSQKEHQDYYQTIWNKMKETLAPYLCDDIPPDNYLVKIQNQLEETYGINP

SEQ ID NO: 331877 - protein, 344 aa, unidentified
MNIASIGIDLGKSTFHLVALGERSKVLVRKKFSRTQLLAHTANLPPSLIGLETCSGAHFLGSALRQQGHEVRLIPAQFVKPYRKSNKNDFLDAEAIAEAVTKQNMRFVPIKTQEQLDVQALHRVRDRLVQRRTALINEIRGFLLERGITFPAQPTHLRKNLPSVVEDAEQNLTPRLRWLLGRLWQEWKQTEIEIETVTDEIERISNQDERCQRLRQIPGFGPLVSTAMVAAIGNGAAFRRGRDFAAWIGVVPRQYSTGGKQKLFGISKRGNIYLRRMLIHGARAVLFRIKYDTAGLGQWVRRLSQRAPRNKVVVAIANKLARIAWAVLSSGKDYRHQPLQPAAA

SEQ ID NO: 331878 - protein, 430 aa, unidentified
MSYRIAGIDVHKKMLAVVVSDVEIESEYQFERRMFGSSPDQLRSLAEWLLEREVEEAVMESTAQYWKPVWEALERYWKPLRQKREGASRRSGALHLAQAQSNRGRRGRKRDFPDAERLVKRLVARELTLSFVPDAEQRLWRTVTRRKYQLRRDHVRLQNQVESLLEEAHIKLSSLVSDLLGASARRMLKALAEGETNPAALAALADWKLRATPEQLCDALGACTDLKPVYRRLLKMALEQLQFLEQQMDQLDQELAGLLHPHQDAVQRLAEVPGLGVDSAQQIIAEVGPTAATFPSDKCLSSWVGACPGDDESAGVNYSHRSPKGNRHMRRVLNQTANAAARTKGSIFDIVYRRSVPRLRHNQAIGTIAHRQCRLIWLILHQGVRYEERGPAVTKQSKQKRTARMIRQLLSLGYRIDPPNPQQPSQAQQQ

SEQ ID NO: 331879 - protein, 425 aa, unidentified
MKISQIAEKIKLNQVMDISVDVHKDLLNFFFEVRGKEYSDECGNRTTVITKRLEAYHQIAAEHGMKTLRIICEPTGQYHNKLFRTARKMGFFTCFVNAESVAKFRVIETNDTGKTDTKDPRVIRTLGQLDKVIRHRMVSEEYLILRKLNKIYDEVDGTIVSLRCRLDRLLVELFCDYSFKKDFLYTASGLGLIEAYGCNPYRIIKGSYMGFCARMRKAAPRIQRQTLRRLWEDAQSSVLNEQPEAYIETLEMHLRQLINDWLEQIRRKEEMVQKMVEVLNRLRGKDPKIPPSTPGVINDKNMARLLGETGPLGDFANGRMLMRYGGLNIRMRQSGKYQGQNKITKRGRPLLRKVLQHIVLPLVREGCLYGQYYYRKKEIERMPGNKAMTCVARHFLKKFYGWYNSGEAFNQQRFFSCESQYREAA

SEQ ID NO: 331880 - protein, 428 aa, unidentified
MKYNTQNAKIASINEKTLIVGIDIGSETHFARAFDWRNYEYTRKPFEFSNNEAGFQTFKAWIEELQKKNGKSVVIPGMEPTGHYWFALGKFLQDNGMKPVHVNPHHVKKSKELDDNNPNKNDRKDPKTIAGLVNEGRFSYPYIPTGIYAEIRSLSNLRFQAQEELTRAKNRIARWFSIYFPEYKDVYRDLKAVSGRMVLQVAPLPEDIRKLGVEGVNRIWRDAKLRGAGMKRAKTLVSAAEHSVGSKEAPEAARMELRNLLNDMDVYVSRVAELLGMIGEKLKEIPYIDKLMAIKGVGMITISGFIAEVGDIKRFDDPKQLQKLAGYAIVKNQSGKHKGESRISCRGRKRLRYVLYEAALSLVGRNPEFKAIHEYYRTRRENPLKKMQSVVAVACKVIRIFYVILTKGVDYDPAKMLGDIRRPQIQAA

SEQ ID NO: 331881 - protein, 418 aa, unidentified
MSGEENTRAIRRYVGLDIHKHYCVIAGVDREGRVLLPPVRVEHADLEAWLKKKLLSNDQVVIESTTNAWHVHDLLEPLVERVVVANPIKVKQIATARVKTDIRDTLILARLLAASLVPDVWVPPMHVRQMRQLLSQRRQLVETHTQILNRMHSVAHRHHLKHERGKRFNEKTIGWQKDACLSGMEQFQLSLEMENKVYIEKQIERISQAVRKLCHQKPWVESMTYLMQLPGFGVITAMTVLAAIGEIERFETPKHLASYSGLTPGLEQSGTKNRGKGITKEGRRELRWALVEAAQMAVKSDPLLKLKFQALQKRIHRNQAIVAIARHLLEVVWYVLTRRQPYRHFSHERIAYKYLTWAWRMDEAARDGLTRQQFARYYLMRLGIGHDLTRIALDPQHPRKLASETELLALRPELQHLE

SEQ ID NO: 331882 - protein, 361 aa, unidentified
MGLTPVVILVALPQLSTLGELKGPFLTKRARRQSKARERIHLMAQNVIAFSELGFSRALGCDVGKNEIVVFDSASKRITHIANQADALAEFAASLDAGSFVVCEATGGYELALLAALLDAGVPAHRADARKVKAFIRSFGTLGKTDVIDARALARYALERGRDLPVWRARDETRLELQAFVLARRDLVADRLAYQNRRDAPGAGPLRPHYDSLLGEFEAQIKALDAKIRALTESCEPIAAAVKALTEIPGLGLKTAAALIGLLPELGTTSNKRIASLAGLAPHPIQSGTADRYRFVRGGRPEVKHSLFMAALSARKHNPTLRDFYERLVANGKKPIVAIVAIMRKLVIYANATLKALAVAN

SEQ ID NO: 331883 - protein, 397 aa, unidentified
MYIVGIDIAKRKHEAAVIDGEGTVIIKPFSFTNNCSGYNRLLAMLAKAKLPLDEVSFAMEATGHYWLALFTRLQKEGFRVQVINPVQTNSIRSFYIRQAKTDPRDALLIAEVIRFGHFSESTLHPENIYELRELCRGRHAIVSMQADVKRKVVALLDQVFPEYETAFTNMFSDTSMAILQTCPTPKELSEMPLEELCHLIEVSSHKRFRMAKAQELQALARGSFGFAMAGDVFSTMIRLYAKHLDFLKQQVREMDRKIAEIMDTLDTPITTITGIGPTLGAYILSEIGDISRFSSAAKLAAYAGIDPTMRQSGEYNGVRNRMSKRGSPYLRHAIWLAASSAVLHDPALKLYFQKKRDEGKPYMASVGHACRKMVSIIYAVMRGNKAYTPCIPNEISA

SEQ ID NO: 331884 - protein, 402 aa, unidentified
MSSVFVGIDIGKKKHQSALMGEKGETLARTLSFTNSLAGFQSLLKQLDPWSKEDILIGLEATGHYWLDLYTRLVDTGYSVVVINPLQTDGIRNMYVRKTKNDRCDAVIIADVLRFGRFRKSSVPEEDIAQMKALSRLRTGMVQSMSNVKRQIVAILDRLFPEFEACFNDIFSRSSMAVLDEFADPEELARCPLEELADLLFEKSNGRLGAAKAEHLKETASRSFGTGYAKRSMKFELKLLLEQVRFTQEQILEIEVKLKELMKDHQLITTIPGISDILGSAILGEIGDISRFENPKQLVAFAGLDPSVHQSGNFNATSMHLSKRGSPHLRRALYIAAHVARIHDPVLKEHYEKLINRGKHHRQAQNAVAAKLARIVFSVLYSREPYDIEKLRSKPKLEEMSA

SEQ ID NO: 331885 - protein, 406 aa, unidentified
MNSVGIDVSKNWSMVTILRLYGEVVSEPFIVNHTPSELSELAASLRKLKGETKVIMECTGSYYKPIANALSEEGLFVSTVHALVIHNYGNNSIRTGKTDKASSLKIANYGLSYWLELQKYVPEEDIRNMLKMVCRQYSKYMKIRTSLKNNFIHLLDQTFPGGLNELFTSGVRASDGHEKWIDFALKFWHHECISRLSLKDFSERYQKWCKKNNYNYSYNKAKEIHSFARNCYSVIKKDESTRILIESAAKQLISTSESVNTYAREMTRLAKLLPEYPVVESLYGVGDILGPQLIAEIGDVRRFEKKGSLVCYAGLDVPPNQSGKFNAISGRVSKKGSPFLRATLFKVINSYIVNSPADEPVYQFINRKRSEGKHYYNYMVSASGKFLRIYYARVSEFLRNLDNLAI

SEQ ID NO: 331886 - protein, 408 aa, unidentified
MKRYYMGVDWGDRLHQVYVGDQEGKKVREMKVQESPQGLAEIGRWLDEKRAEGFELWAAIEKPQGRIVDFLLDHGVEVYPVNPKAVDRVRDRYRMSGSKSDAFDAYVLAEFLRTDQAHLRALRPSSEKAQELKMLSRDQRRVVRHKTRFLNQLTTTLKEYYARPLEVFEDLETEIALDFLKQYPTPAHLSALTRKQFNRFATKQHHLSKQRCEELWEKLNKPQLAVPEHVVRAKAQLVEVLIEQLRASIKAVKIYNHRVESFFASSPAAQFAKTLPGGKSGTLVAAVWAELGDAQGRWESSRHLQAEAGAVPVTKASGKSRVVHFRFACNKHLRYTMYWFSFVSLNHSEWAKLYYRGQRDNGHSHHQALRALGAKWLKIIFVMWRDHKPYDENYHLANIARQKMRQAA

SEQ ID NO: 331887 - protein, 391 aa, unidentified
MSMYFVGIDISKYKHDCCILSAAEQTVVTKFTIKNDKSGFEQLITTLHALSNPEDIKIGFESTAHYALNLELFLENAHHSFMEINPFLIKEYKKSTSLRRTKTDSVDCESIARWLMTVEYKPHPKGFYHAYSLKSLTRLRNRLVRQRSFYLVKITNVLDHTFPEFKPFFHELLSKTALYLLENYGSAEKMARMNSASYEKLRSLSRGKFSPQQFLHLKELASNTVGINNSIFDVELNSLLTLYKSLVKQIGTLETEINKLIEGVHPHYMSIPGIGPISAAVIYSEYGDLSNFSTPAQMLAFAGIEPGINQSGTESHGGKMVKHGSSQLRYTLINCCLPLIRFDMTFATYYAKKRADGKPHRVAINHVAKKLVRVIYALERQGTHFNAQELR

SEQ ID NO: 331888 - protein, 454 aa, unidentified
MVMVMEYGMTQQDKVKKRGPRLEVTNPNAAGIDIGSASHYVAVPADRDDRPVREFKSFTVDIHKLADWLESCGVDTVAMESTGVYWIPVYEILERRGFTVLLVNARHVKNVAGRKSDVLDCQWLQQLHSYGLLRGAFRPDDQICMLRSLNRQRAMLLRMQARHIQHMQKALVQMNVQLANVISDVVGETGQKILRAIVAGERNPYVLAGMRNVRIKASEEEIVQSLRGNWRDEHVFALKQALELFDEYANKVADCDDLMEQQMVRLHKHDGVPSKARKQSGRNKPKFDLRTRLYQMCGVDLTRIDGIDVGTAMTVLAEVGVDMSKFPTVKHFAAWLGLCPGTKISGGKVLGSKTQKCANKTAQALRQAASCLKNSQSALGAYYRRMCAKMDKPKAITAAAHKLARLIYTMITRGEEYADQGQAYYEERYRQRVEINLRRKAESLGLRLVPMESA

SEQ ID NO: 331889 - protein, 315 aa, unidentified
MNHYAGIDVSLEYANICVRDGNGEIVREGKVLSEPAALIGWFGGLGLSLTRIGLEAGPLSQWLYAAMQQAGLAVELLETRHVRNAFKIMPVKTDRKDARGIAELMRMGWFRPVHCKSMEAQETRALKVGKTTPVRFEARIRELVEGHPSLVEIAHALLVVRGGLRREFNGFERRLRALARCDTRARLLMSTPGVGAIVALTFASAIDDPARFKSSKIVGAHFGLTPSKYQSGETDRSGRISKIGDSSVRTVLYEAAHVILSKPLKGATALKSWGMRLAKRAGTSKAKVALARKLAVILHRMLADGTPFAAQPARA

SEQ ID NO: 331890 - protein, 320 aa, unidentified
MQTQAIVLNIGADVAKDEIVVACSEGSFPVRKLANKRTALLAFLKSIPAGSRIGMESTGIYHELFASLAHKLGFIVYVLNPKDVRHYAKGVGMRGKTDRVDAELLARMVAKEHVELHAWVPPTPDQREIDRLIKRRAKLSALRQALGMSLKGLDGFKTDLQTLRQRFDQVIARIDQRIKELIEANPDRKEHDMHLRTITGFGPVVSAAMVNSLERMPLKNADAFVAFTGLDPRPDDSGQHQGKRRLSKRGPSELRRLLYLAALSAIKTKIWRPLYEHYRGKGLSSTAALVILARRIARTAWSMYTYKTEFDPGRLMKRLT

SEQ ID NO: 331891 - protein, 423 aa, unidentified
MKSLRRQNFTAYVGLDWADSKHDICLLEAGSEQREFACVAHQVECIDEWAKSLQQRFGGPIAVALELAKGPIVYALQKYDFLVLFPINPLTLAKYREAFRPSRAKDDPSDAELALDLLVRHPERFAPLQPQSVGMRTLISLTERRRELINDKTRVTNRLTNTLKQYYPQALEWFDQHDTVMFCDFLSRWPTPLQAKRAHRASIKAFHHAHNAHRPKLIAERLAAIKAAVPLTQDPGVVVPCRLHAMVLVEQLRLALQAIEQFDRHIAELAPTLPDYRLFEGLPGAGPHLAPRLLVAFGEDRERFQRAEELQKYSGIAPVTERSGKKNWVHWRWQCPTFLRQTFVEWAGQTINKSFWAGAYYNQQRAKGSTYQAAVRALAFKWIRILYRCWKSRIPYDETKYLKALKKRRSSLLNNLVPDPLNA

SEQ ID NO: 331892 - protein, 425 aa, unidentified
MSKDSTKTTKEWKYIVQQDKFIYVGIDLHKQHHTAVFIDCWNQKLGEIKFDNKPSAFPLLEKEVKKHTKKGLSVVYGLEDVGGFGRALAVYLTENKCWVKEVNPKLSTARRKSHITVQKSDSWDAECVARVLKDELLQLPDARPIDLYWAISQLVTRRKGVVKVLSGCIKNLHQQLGYHYPSYKKFFSEIDGKTALSFWEAYPSPRYLKDMEAETLAEFLRSHSNNGLSHKKAAQILSLIEADGDTYRDFQDKRDFIVQSLVRSIRFNQQELAQIEEEIGGLMKQLGFQLETMTGIDVVTAAELVAEIGDIHRFVTPDKLARFAGIAPIICGSGNKVRNYKSKQGNRELHDIIKNLAIRQIAVTRNKKEPRNPYFHAYYGQKLTAGKTKQQAIVCIMRKLVNVVHYLMRTKAAYIIPEVSIKQAG

SEQ ID NO: 331893 - protein, 344 aa, unidentified
MDHFAGLDVSVKETSICIVDDTGRIVREVKVASEPEALLKVLGNPAYRFKRIGLEAGPLSQWLFSALAEAELPVVCVETRHMQAVLKAQINKTDRNDARGIAQMMRVGLYRPVHVKTLRSQKLRMLLTHRKLLQSKAIAIENDLRGTLRNFGLKVGMVGKVRFEARIQELVENIPDMAVLVESLLIVRRALREQIVILHRRLLAIVRDDEVCRRLMTTPGVGPVVALTYRATVDVPARFRKSKAVGAVFGLTCARYQSGEIDWSGRISRCGDEMMRVMLYEAAQSMMRSKKWSWLKAWAMQIARRRGMKKAIVALARRLAVIMHRIWVDGTEFRWTREQAAAAA

SEQ ID NO: 331894 - protein, 435 aa, unidentified
MKKFLPCCAGIDIGKQEMTATILTGSPDVEPLQQTQTFGTTVQELNRCLEWLRANQCFTVVVESTGSYWIPVWNVLSEQLAVIVANPEHVKARRGEKTDPEDSRRLAERLRVGDVRGSFIPSQEIVELRDLTRRRKRLLSNANGERNRIQKLLEHANIKIGNVVSDVFGATGQNILHALLEHPDRPVAELAELAKGKLRKKREALREALEGHRLNDHLRWMIQHSLDHLVFLEQQIAELTERTLEKLKRFQREYELLQTIPGIGAETAAVIIAETGANMAQFPSARHLTSWAGVCPGNNRSAGKQKSSSIKRANKWLLAALVQSAWATVRERGSIFRKRFYRQMMHRGKKRAVIAAARALLAVVWQVLQKGVPYAEPSNELFQQREHSKKVRHHLRKLKELGVDITPLELPPLPDLPKPQPAFTRPLGALGIHAR

SEQ ID NO: 331895 - protein, 393 aa, unidentified
MYLVGIDIGKLKHSFCLLEKETGEILVEPVFFENNRDGFNALLSSFKHLPQKDILIGMEDTGHYNLALLKFLLDRNYQVALINPVATNLTRKMQGGISKNDKLDTLTICDVLSSNQRVKSYRISKYSSFDLYEQKQLTREHHNLKEEENQLSNRLQKCIDVVFPEFNSLFKSKYGIVYMNILKEFGSADAIAHTDIRTLRKCFDTGRGKHISLTAQELKEAARNSIGFPSSSEATQIKHLVARIELIKEQIAEIDKKIEEFSIQNNSPILSIPGISHFSGTSILAELGDIHNYSKPSQIIKFAGVAPLTYESSQFTAQHTAITKKGCKYLRKTLYQIITPVIQYNPVFRKFYLLKIAQGKGHRCAQGHCVRKLMRVIYHLLSTGTQFDPALLR

SEQ ID NO: 331896 - protein, 309 aa, unidentified
MEVHVGIDVSQERLDVHLLPSGEALAFARDGSGIEALAERLSSLAPALVVMEATGGFETVVAAGLAAAGLPLVVVNPRQIRAFAQALGLKAKTDALDAQVIARFAEAVRPAPRPLADEAARALGEMVARRRQLVEMMVAERNRRRMLARPKLIRGVERVLAMLQKELSALERDLDETIRGTPAWREAEGLLTSVPGVGDTTARTLIAELPELGRLDRRKIAALAGLAPFNRDSGRFQGQRRIGGGRAPVRAALYMAALVAMRWNPILKPVAERLRAAGKRPKLIVVAIARKLLVILNAIIRERKPWQTA

SEQ ID NO: 331897 - protein, 273 aa, unidentified
MNGEGKVVMESIIETKASTILQCIQGIHGDLHVTLEEGTWAAWLYDLLKPHVTELVVCDPRKNALMKEGNKSDKIDASKLADLLRGGYLRSVYHGENGLRTLKELARSYLTISKDLTRVMNRVKALYRSWGILCGGQQVYAPRHRTEWLNKIGEAGVRRRAEFFYQQLDALRELRQAVRKDLLAESRKQSATKLLRQVPSIGPIRAALLIALIQTPHRFRTKRQLWTYSGLAIETHDSAQYRYVGGRLQRSKKPQQLRGLKDPATLCCTSITL

SEQ ID NO: 331898 - protein, 430 aa, unidentified
MKSNTQNAKIEAITEKTLVLGIDVGSETHYARAFDYRGIEYSKKPFKFSNTEAGFVTFKEWILDLKERHEKDKVVLGMEPTGHYWFNLGKFLQDNEMKPVLVNPHHVKKSKELDDNNPTKNDRKDPKVIAGLVREGRYMIPYLPDGVYADLRTASNIRFQLQAELTRIQNRISRWFNIYFPEYKTVYGKPDAKSGILILKAAPLPEDILTLGINGVNQIWRDAKLRAVGKARAKTLIEAAEHSVGSKEGAVAARMEIRMLLEDYESRSIRLQEVMTLIEGLVKQIPMAEKLLEIKGVGIRTVSGFLAEVGDISRFNNPKELQKLAGLALVENSSGKHKGETTISRRGRKRLRYLLFEVAMSLVAKNPEFRELHNYYTTRRLNPLKKMQSLMAIAAKLIRVFYVMLTKGVNYDPKKMVNDIKRPAVYLQTA

SEQ ID NO: 331899 - protein, 332 aa, unidentified
MSCQSYCIGIDASKAYLDTCGVPGRGAWRLPNTAEGHTALATVLGALRAGGDEVLVMMEASGGCERELHHALARADVPVAVVNPKWARDFARSTGQLAKTDRVDARMLQAFGEATRPRPTPVPEPLRAELIEMLDYRDQILAEIVARGHQLKHLRGDFMRRRAETALEALRTEADTLAWMIEAKLNDDPGLRQRAALLRSFPGVGPLSAAMLVVHMPELGSLTGRQAASLAGLAPFARDSGTLRGVRTIFGGRAKVRRALFHVGRVGLRHNATLKAFYDSLKGRGKPGKVALVACMRKALVILNALLRTGRPWVAEYAADGPPAEAASATAS

SEQ ID NO: 331900 - protein, 392 aa, unidentified
MYIVGIDIGKNHHEASIVSPEGKQIGRSLRFATTHKGADSLMSFIFKNIGNSPCVFGMEATGHYWYPIYSFIKAKGYTIYVINPIQSDSLRKMYIRQTKNDSIDSFLIAEVIRFGQFGTTSMADENILAMRQLCRYRDSVISSRTEIKLRIGTIMEQIFPEYEKQFSSLWLSTSMGILEKYLTPENIENAPIDELFEIIKDKSHNKLTMKKAISIREAAADTFGIKIAQDAFSFQLKQLIDRMNFLDKQIEALDCQILEYYEKFDCYLHTIPGIGMIAAATILAEIGDINRFKSSSALVAFAGIDPTVRQSGEFSSTHNHMSKRGSPYLRHAIFLAATTCSFHNSPLNAYYKKKREQGKHHLTATGAVARKLTTVIYAVLRDGKPYEPKSFC

SEQ ID NO: 331901 - protein, 323 aa, unidentified
MTLYHNFIGIDIGKFEFVSHVFGRKETQTYANNPEGFSLFLEAHADLMQTAFCVLETTGGYELDLWYTLIDRKIVIHRADTRKVKNFIRSYGNAAKTDRLDAQALAKYGRERFSELEPFKPQSQHAIQLFKILQRRIDLKKILVAEKNRNQQDSIPLIEKGREKLITVLTEELETLNAEILKVIQGDPLLKAKHQILQKIPGIGEKIGYELLILLPELGTLNRRQIASLAGLAPLSNESGKFKGYRRMGHGRQGIKSTMFLAAMAARNSKTHLKEFYEKLITKGKAKLVALAALMRKIRVIANAKIRDFMLDSSSKQKLQDAI

SEQ ID NO: 331902 - protein, 356 aa, unidentified
MKKLTAIAIDLAKNVFQVAGENARCEIILSERLKSRQAMHKFIQTLEPPLTVAIETGPGAQAWAREIAARGIEVRILPAQHTAAHRSGNKNDANDALSILRALHDVSVHPVPIKTQDQLAMQALHRARRGWRRRMTAITNQVRGVLLEQGVVIARGDAALVRKIDRTLEDATVPIPDRLRALVADLMGEWRGLGERMAAIDGELAVLSRTDPIAKHLCQTRGIGPIISTAMACKSLNPDRFANSRQFAAYFGITPSQHSSGATVRLGRMSRRGDTYLRSNLIEGAHSVIRQIRRDATDPYSRRIQRWVQRCGPKGAAVRLANHNLRVVWLLLKHPDMVFSNNPGHRSADVREAAMH

SEQ ID NO: 331903 - protein, 416 aa, unidentified
MNAVGIDVSSRKSTVAVLRPLGEVVCLPFDVTHDIAGLASLVEKLKALDGETRVVMEHTGRYYEAVEKALHEAGLFVCAVNPLLIKEYGANSLRRVKTDKADAVKIARYALDNWADLRDFTPMDAIRYDLKTLNRQFQLASKQRTASANNLIALLEQSFPGIRKCFDSPVRSDGTQKWVDFAHSFWHVDCVRKQPFPAFCERYRKWCKRHAYLFKLSNAEEVYALAKRAVVLTLKSKVVKVLVQEAANQLSSISRSVEVYRAEMDRLAAMLPEYPVVMAMYGVGKSYGPQLMAEIGDVRRFERKQALVAFAGIDPMPNQSGDKNVRSNKSSKRGSPYLRKTLFNVIRTYLQCAPQDEPVFQFLNRKRGEGKPFYVYMLAAANKFLRRYYAKLRDFFASLDTLQPVAPIPTILKATL

SEQ ID NO: 331904 - protein, 315 aa, unidentified
MLIHYIDIAKRNFVIAVSSLSKTKTETNNPKGIAHTIEYLKKHKVALVVTESTGGLEIPAAKAIRRAGIAVIIANPRQTHQFAQSQPLTKTDAKDAKMPAFFAQMTAQKEDSQTMPYQPPTEAEEVLEALVNRRNQSADMRTAEKNRLHQVHETQVGSVKQLIAHFDRLIDELDKQIDDHTHTHFDGKAQVAEQIKGIGSITTATLMAMLPELGRLSHKRIASLAGIAPHPRESGETKFKSRCFGGKSAVRKALYMATVAATRFEPLIRDFYQRLPSEGKPYKVAVTACMRKLLTISNARMRDYFAENDTAENGI

SEQ ID NO: 331905 - protein, 475 aa, unidentified
MAARKNDNAKVSGAAGQHGGDGAEVTEDRVEVVTYAAAIDVAKGFGMVCTRVPGSRADRKRQKVWRVDASYGAVVALMDHLRSEGIQRLVLESTSDYWRIWYYLAEAAGLQVWLVNARDVKHLPGRGKSDREDSVWLCKLNERGMLRRSFVPPEGIRDLRSLTRTRSRLAQDQARHQSRVEKILEDALLKISVVISDLFGTSGRRFPGALVAGQRSPKALAALGDYRLKASTAELEAALTGRFREVHAFEIATHLRLTGAINAEIARLDARIEQQLASIPGVAPACGDCGLIGGGHSPGCASDGTPVLGLVERLDEVTGVGVRNAQVTIAELGTGMSVFPTPGHAAAWARLTSRTLQSGTTTKNGRTGKGNPYLRGALGQSVMAAAKTDTRLGEQYRRIARRRGKQKAIVAVSRVICEISAILIAGPGARFTDPGADYYSRVNPARQTRSKIRDLERLNPGMKVTLTPVETAATA

SEQ ID NO: 331906 - protein, 386 aa, unidentified
MKRNDLSRSLVAFDQASTLVAVVELSLGSWLVAGLVPSLSRQPLKKLRSDPEALLALLLRWRDQATKAGGRIKRIVLAFEAGRDGFWLARWLRARGIETYVIHPSSIPVSREHRRAKTDRLDAGLLMRAVLGWLRGEPKHCSMAAIPTIAEEDARRPNRERETLVREQTRAINRIKSTLIRFGIRTFKAKLGQASKRLEELRGLEGEPLPPNTMAELRRDLARLQVIRGQIREIERARLERLKRAPRQGTHPMMRMLARILGIGIETADMLVHEVLTRKLRDQRGVARYGGLTGSPDESGSKRREKGLARAGNARVRRGMIQLAWRWLMFQNKSVLTKWYRARTAGGKPGLRKAMIVALARKLLIALWRYVTIGEVPAGAALRPAT

SEQ ID NO: 331907 - protein, 373 aa, unidentified
MPRYSTAFGMDVHLRSTTVCALDAETGEAVTRRFRGNPWGEVAEWMSGFPGPSLAAYESGYLGFAPQRELSGLGVDCVVAAVSKVPRSAADLSSKNDRNDAARMAKAILSHDVTPVWVPSPEIEGLRDLAAAHDAATARLAAAKQRLLAFLARRGYVYGGTTPAGNPRKYWTYGFLRWLDGIHPADDGGIRALAALRNEVEAADETRGALLAEYRAAVAAGPLSAEVEALQSIKGCGFALAAAFASEVGDFSRFRSGRQVTAYFGLAPKQRSSADSVRLGGISGAGNALVRKLAVEGSWCYAQAGHQPKLMPKGSGVPLEIRMHGRKGSERLLRRREEMIARGMPQAKANAATAAELVRWLWALGAMCREGAE

SEQ ID NO: 331908 - protein, 344 aa, unidentified
MGAVGRGLHCGVDLHGNNGYYGVVNESGERLMSKRLPNSLQTVLSELEPYRERLHHGVVVESTFNWYWLVDGLNKHGYDARLANPAGMEQYKGLKNTDDESDAFFLTEMSRLGILPEGYIYPKQDRPVRDLLRRRLLLVHQKTAHTLSFQNLVARETGQMISANTVQRLWPEQVKGYFEDERLVLMGRTNIEVMRFLTKEIQQIEKAVLGEVKLRPEYEKLLTVPGIGRILALTIMLETGSLFRFRQVGNYTSYCRCVKSLRLSDGKAKGQNNRKSGNRYLEWAYVEAANFMRRYCPEAKRWYQRKASRSNRVIATKALASKICKACYFIMRDQTEFDVKMIFG

SEQ ID NO: 331909 - protein, 394 aa, unidentified
MPELFVGIDVAKDTSSVQGIDSEGKGRFSLTFAMDAEGFMQLWKAIAAHSKDLSEVIAAVESTACYHINLYSFLTAKGIQTVVINPLLISNFSKLSLRKTKTDKKDAMSIAQFLLVHRDTISQMTLSQDLQDFRDIARERESLCNMITAHKVEVKRLLQSTFPELERIANLSTRVMQEFIAEFPSARLVKMAKPKAAQKMLQRKGVQTRLTYTAEDLIRAAKQSVATISPAKELILQGKVRTLQHLQERHDELTRILTEYCRSSLLEDLDIITSIDGINKGTAPTFLAEIGCIGNYASAKKLIAFAGIDPTVYQSGKFEGSSRISKRGNRHLRRILWLMTKNVIHHNAMFRKYFMKKRKEGQPFKKAIFATAHKLIRVIFAMLSQRTMFKEACA

SEQ ID NO: 331910 - protein, 343 aa, unidentified
MQIRTIGVDLAKNVFQVHGVDSAGKVVITRQLRRKQVIEFFSKIPPCLVGMEACGTAHHWAREVSKLGHTVRLMPPSYVKGYVKRSKNDAADAAAICEAVTRPSMRFVAVKSTDQQASLMLHRTRDLLIRQRTQLINALRAHLAEFGLVAETGREGVAQLAALITDESDREALPFAMKQALQAIVDQLAALELQVGTLDRAIHAHHRANDMSSRLETVPGIGVIGATAIASTVTDPSNFKSGRDFAAWIGLVPRQHSTGGKERLGGISKQGDRYLRRLLVVGATAVVRHARQHPQKHPWVMRLLAKKPAKLVAVAVANKMARIAWAIMAKGGYYRAPELAAAA

SEQ ID NO: 331911 - protein, 497 aa, unidentified
MVTGPIDLYTGGEGATTPMRKLIPIHDRDLSIPDKEYQMKKRKSKRTKGTEEARPFEGLSKVHQNAAGVDIGATEIVACVSDGDEVQLVKTFGNYTVDLQAICEWFRKHEIKTVAMESTGVYWIPLFEELERQGFECLLISSRSLRKVAGQKTDVEDAQWIQTLHSYGLLKGSFRPQADLVALRTLLRHRAQLLEHRSPHIQHMQKALLQMNIQLSQAVTDVTGMTGQKIIRAIVAGIREPEQLATLRDPGCKHSAEEIAKALTGTWREEHLYILKQSLELYDFYTEKVEACDAEISRRYAMIRPDWGSRELPVVPAKKRHAHSKNAPKAAREIRKHLYRLNGVDLSLVDGMGVSLAQTVTMEVGSNVGEKFPTEKHFCSWLGLAPKHDISGGKVLNNKTLKTKNRAGQAFRMAANSVKKADCPFGVLYRRLRSRLGPAQATVATAHAIARVVYKMLRYKVEYDPLSVNEYQKRYEEQQVKYMRKRAAKFGYQLVPA

SEQ ID NO: 331912 - protein, 375 aa, unidentified
MKKNSTAKQARKKGGKETAKGVQELITIGVDVGDKTSRYCVLNGTGEVKAEGSVPTNKDGMMKMFGALRRCRIAMEVGPHSPWMSRLLSGLGHEVIVANARQVKLISTSSRKNDRLDAQLLARLARMDPELLRPIQHRTEEAQVHLLQIRARAGLMEARTSLVSAARGLVKALGERLPKCDPDQLGAEQLKLLPPRLQEALRPLLQEVEALTEKIREYDQRIEQIAQNEYPETQLLKQIKGVGTLIALTFVLTVGDAGRFESSRDVGCYLGLRPRQSDSGESQPQLRITKEGDTYLRTILVQGAHYIPSARGPDTDLKRWGLKLAERGGKNAKKRAVVAVSRKLSVLLHRLWVTGEVYEPLRNSNARATEKKTAA

SEQ ID NO: 331913 - protein, 424 aa, unidentified
MDLLIERCAGIDIGKAEVVACVRTPGPGGRGRRKETRTFPSFAGDPEAMADWFSAEGVTEVAMEATGSYWKPVWYVLEDRGFDQKLVNAQHLRILPGRKSDVLDAEWIAELLEHGLLRGGFVPPATIRELRDLTRYRKRLTQARTAELQRIEKTLEDAGIKLDVVASDILGVSGRLMLKALVAGERDPERLAGLAKGVLRNKIPQLRQALRGRFRDHHALLVGMALEHAEYLDAAIARLDDQIDALFASSTSEAGVPFVEARDRLATIPGVATRAAQTIIAEIGVDMARFPTAGHLASWAGLAPGNNITGGKRRSGKTTPGDRWLGEILNQCAWAAAPSRDTYLSAQFWRLARRIGKKKAAVAVSHSILVTCWHLLTERADYHDLGGDYFTRRNNPDRRRDHHIQGLHNLGYRVTLDKITDTAA

SEQ ID NO: 331914 - protein, 342 aa, unidentified
MQVTTIGLDIAKNVFQVHGIDAAEKVVVRKQLRRRQVLEFFKALPPCLVGMEACATAHYWARELTKLGHQVRLMPAKDVKAYVKRNKNDAADAEAICEAARRPTVRFVQIKSTEQQGRLMLHRARDLLMRQRTQVINAMRAHLAELGIVAAQGRDGIKELLKIIASEEDARLPVDAHASLVVLAAGLQAVQTMIGSIEKRIMVQHRSNEASQRLETIPGIGVIGATAIAATVPDPKVFGSGRDFAAWIGLVPREDSTGGKQKLGPISKRGDRYLRRILVVGACAVLRYARHKPEKYPWLTQLLARKPFKVVAVALANKMARIAWALLAKGGTYRVPALAAAA

SEQ ID NO: 331915 - protein, 320 aa, unidentified
MNSEIFIGIDVSQSYLDVNVVPDEQTVQFTNDETGVAQLVKFVKSITPALIVLESTGGLETLAVSILSAKQYPVVVVNPRQVRDFAKASGKLAKTDKIDAAVIAEFARALRPEVRLLKDEQTQLLSALNARRRQIVDMLVAEKNRLHRAPMPNRKNITAHIRWLEKNLADINKDIRKNIRKTPVWREKDDILQSFKGVGPATSASLLSDLPELGRLESKKIAALVGVAPFNCDSGHYRGRRRVWGGRSQVRRILYMATLSAVRSNPAIKSFYDRLRQSGKSHKVALIACMRKTLVILNAMVKNQTFWQKPINFVDAEHSC

SEQ ID NO: 331916 - protein, 315 aa, unidentified
MSQIVAHVGIDVCKAWLDVFVRPLAERRRFANSAAGIGELASWLRGLDVAIARIGLEATGGYEQDAARALSAAGFPVCVLDPMRVRRFAQAGAVKAKNDAIDARVIAAFVATFEAGLVAFDAERDRLGELCQARSTLLETRTRFSNTAAHLRDSLTRRIVARRIRSIDADIASLEKAIAALLHGIERLGTVERLLRSVGGVGAVTAATLIAFLPELGKISNKRIAALVGVAPFDHDSGAWRGQRHIAGGRATVRCVLYMAALAGIRHNTWLSAFYRRLVARGKPAKLALTACMRKLVCLLNDIVARGYGWQPARA

SEQ ID NO: 331917 - protein, 386 aa, unidentified
MNHLSTFSVPDRTGICGDCATLFVSLELSRSTWVATSLALGSRKMSKHTLVGGDARKLLDLLARLKSRAEQRMAAPVKIVAIQEVGLDGFWIHRLLEANGVESHVVDPASIAVPRRHRRAKTDAIDGETLLRTLMAWQRGEPRVCAMTVPPSPSEEDCRRVSRERATLLRERIRHTNRIRGLLFGQGITNYNPLHKNRRTGLEELRTGDGRALPAHLKAEILREIDRLELVLRQISEVEAERDEMLRPAQASSPAALLMRLKGIGAEFAGVLYLEGLFRHFENRRQLAAYAGLAPSPWKSGSVDHEQGISKAGNPRLRTTMIELAWMWVRYQPASALSCWFRQRVGSERGRIRRITIVALARKLLVALSRYINHGEIPAGALMKAG

SEQ ID NO: 331918 - protein, 310 aa, unidentified
MKRQKEVIEFEQVVERGCGMDVHKETVVATVAGIGIKEETRTFSTFTNSLRELNEWLKSLGVTVVAMESTGIYWKPVFNVLEADFEIMLVNARHVKNVPGHKTDTKDSRWITKLLLSGLLKGSFIPPVEIRELRDLFRYKRKLTGQASAERNRLQKILEDANIKLSSVVSDTFGVSATRIIDALLAGEEKVEELVKLCHGRLKPKEEALKEALVGKLTLHHKFMLRTIRKSMANIEGIIAEVETQIDEQTKAYEVEIGLLQSIPGVGKDSAIGIIAEIGVDMKVFPNEQHLASWAGMSPGNNESATTPRL

SEQ ID NO: 331919 - protein, 411 aa, unidentified
MLFGGIDIAKRSHEVCVINESGDCVLQMPVANNTKGFDKLMKAIERLTEPADIIFCIEATGHYWLPLFCHLTDMGYQVQVVNPIQSDALRNLYIRKSKTDKKDSFILADLVRLGRASGNWMPSEISLKLQTLSRMRFEFVTQVGGLKQRVLGILDRIFPEYASCFSDVFIRTSRELLKLYPDPSELAEVDLRELSSFLSKHSRGRLGLERAEKIRSLASGTFGINLAMDAFTLELRMLLDQIEFISDQIDVLEEAISQVMNELKSTNEKAVLPPDCQHVLETIPGIKTVLAAAIIGEIGDINRFPNARTLVAYAGLDATVKSSGQFEGTRNRISKRGSPVLRNSLWLAAVSARRHIPEMKDYYETKLAQGKHVNVATGAVARKLVHIIYTLWKEQRPYEPNHQWSPPGHNQ

SEQ ID NO: 331920 - protein, 397 aa, unidentified
MIAVGIDISKAKSTVAVIDSDGTVLASPFTMAHTQPEMEAFVSYLKGLGEPTTILMEYTGHYHYPVLKKLQDEGFPVCIVNPYQMKKYGDVEIHKAKTDKKDALRIAAYALEKSYKLVPYSSMEQKYEDLKFLSRQYNQRISYVAKLKVQLIALLDQTMPGITRILPLNSRNPEKCALLLFIKRFKSFDEIHRIGKARFLASYDVLAKKASERSASSKGLSIYELAVDSITTRGEDPYIWLSQNQCVDLLSATQNAADEIISQMRNIAETIPEYKVLRAMHGVGDRLGPIILAEIGDVHRFHSGKALNSYAGNDAPPYQSGQFESRNRHISKRGSSALRKACYEVMQALKLIKPQDDPVYLFMLKKEQEGKPFNVAKMAGVNKFLRIYYARAMELYK

SEQ ID NO: 331921 - protein, 350 aa, unidentified
MRRYIGLDVHAASTTFGVISESGKRLGSHVVETNGQALVEQLKTIPGEKHVCLEEGTQSAWVYEILSPHAEEVVVAMVTESRGQKSDQKDAFGLAEQLRTGAIKRRVFKEVGAFGTLRELGRAHTMVVQDSTRVQNRIKALYQSRGIAVTGKDIYAKKIREEWLPKLPEAARGAVTTLYAQYDAVQEIRWQAEKELLQEARRHPISRVLETCPGLGRIRVAQMLPIVVSPGRFRTKRQFWSYCGLGIVMRSSSDWEKKNGEWVRTNVQKTRGLSLMHNHTLKNIFKGAATTVVSQLPNSPLHQDYKRMLEAGTKPNLAKVTLARKIAAITLSMWKSKEKYDPTKHRKQDS

SEQ ID NO: 331922 - protein, 410 aa, unidentified
MPNLPPSSVTRFFGVDLHKHFLFLAAVNSLQEIVQKPIRIPLEDWLVWAKKNLLPTDVLAVESTTNSWDFFDGISGLVARVEIANAGKLPWIGLSRVKTDKHDAIKLAKLCAAGLIPQVWVPPFHIREARSLLAHRRRLVGIQTMTRNRLHSLLHRHMLELPDGQPFSPKNLPWWNSLPISPTEKILLRHSLEILDHLKPQITQLDAEIARLSDSPEWQDPMTFALQIPGVGVTVGLTVLSAIGDISRFDAPKKLVGYSGLGASVHASGQTFRQGRITKSGRRELRTALVEAAWSAVNSDPYWKEEFARLSRRLDTGKAIVAVARRLLVILWHVLSKRQSYRHCSDIQLATRMMRWSWTIRRHHPKAVASRIFIRRRLMTLGAGKELAGFRYNNKPRGLASEEEVAGLAP

SEQ ID NO: 331923 - protein, 405 aa, unidentified
MEVYIGIDWSENKHDIIFMNQAGAGIVQYTIPHKTEGFVRMDATRRDLGLARDECLIGLETAHNLVIDFLWARDYSHIYVIPPSVVKSNRGRQGQSGARTDESDAWLLADIVRTDRARLQPWFPDSLLTRQIRAKVNLIHHLTRHNVRLCNRLRAVLLRYYPAAAQVFSSLQTQIALHFVSTYPTPQAAADLSWAEFQAFAQQHGYRRPKRLPACFARLQADHPAASPETVLIYQDEAVQLAELLLAGIRAKKEAKRALRSLFQQHPDHTILTSLPGAGELLAPALLAKFGDDRQRFPAPDGLQALAGTCPVTEKSGKRKRVKFRRACDRQFRHFAQQWAIASLSESVWANAYWNTVRPRCDSDSHAYRCLANRWLAVAWKLWQSRTLYDEAYHLRQRAKHSRPH

SEQ ID NO: 331924 - protein, 351 aa, unidentified
MPHKSTVHAVTAIGIDMGKNTLHMVGLDLRGAIVLREKVSRGRVASRLANLQPCLIGIEAGMATHYVARELAALGHDVKQVPPTYAKPFRQGHKNDFRDAHAVAEAVQRPTTRFVPAKTNEQLDLQALHRVRSRLVSERTAVINQIRGFLLERGIIVRQGLRFLRQQLPDILAKRTDVLSTRMVRIVADLAGDWRQLDERIETVTNEIETLAKSDDNCRRVMTVPGIGPIISSAMVAAIGSGAAFARGRDYSAWLGLVPKQMSTGDRTILGRISKRGNGYLRTLFMQAARVILLRPANWPKHGFGAWLIRAAQRLHPNVLAAALANKLARIAWTVLAQERSYEARVTKAAA

SEQ ID NO: 331925 - protein, 421 aa, unidentified
MDFEVKHLICAGLDVHKKTIVAAVCMTDPVTLEAAYKVKSFSTNNSQIAAMRDWLLSYNCHDVYMESTGKYWIPVFNILETHMHVVLTHPKYVKAIKGKKTDKRDAKWIANLFRFDIVKASFIPPADIRALRELSYMRSAEKNRFQNSMTISRIRIDCVLTDPFGKTASSIMDYLLSDVPFDETECAKLIHGRVKASNEEIFDSIRGFEILSEQRFKMSHAKQHMELLSSYMDDIETELFRLSRSYDEVIKRISGIVGFTERSALFVISEIGADMGVFESAKHLCSWAGLTPANNESANKKKSTRCSKAGQYLKPLLIQCALAAVKSKKNPYYAIKYKRLAKRRGRKKAVIAIARMMLTSIYHMILNNEEWKPDDYEAIIHPSKPVKVALTLDNVIQFLGEQGADPETLKLLQQQCAVTPG

SEQ ID NO: 331926 - protein, 343 aa, unidentified
MSEAYEGRQIVGMDLHRRRSVLVRMTEAGEHLETVRISNDPRYLAQVMARAGEAPEVVLEATYGWYWAADTLAELGATVHLAHPLGVKMFSYRRVKNDERDAADLADLLRMGRLPEAWIAPPATRELRGWVRHRAKLVGVRTGLKCQIHAVLAAAGVQVRMSDLFGLSGQQLLSSVRLAPESRARVDSLMRAITAVEFEIDMFARLVAGRLRADPGYTAIQAIPGVGPILAAVFVAEIGDITRFDRPQQLASWAGLTPKHHESDTTVHRGRITKQGSRLVRWAAVEAVQRVPAHTRLGQRRDQVAARRGHNIGVVAAARDLTGLVFYGLRDHRIRSLPSRPAA

SEQ ID NO: 331927 - protein, 493 aa, unidentified
MSNFKTRPPHVRTPPRPSPTPIATDLRRAARHAEKTRRHAEECAKLVSMPVQHAHAAGIDAGDISHWACVESTPDDSDAAREFPAHTAGLRQLVDWLRQCGVTTVALEATGVYAHVLFLTLLEAGFVVVMTAPQFARQIKGRPKTDKRDCQWIQRLHKHGLLPAVFQPDEATQTLRDYVRQRANLVRLSGQHIQRMQKALQLMNLKLTRVLGDVTGVTGLKIIRAILAGQRDPQQLAKLRDRRCRHSVADIAQALDGRYRPEHVMELRCGYTLWQKYQEVIGELDEAIDAHLRTMRRQTALPPLPPKPRLRGRKPHDPRFDVRGALYLATGVDLTAIEGIDEVHALTLVSELGSDFTKWPTVKHFTCWLGLCPNWHKTGGKVKSSQTRRGKNRAAHALRLAAWALMRSKSYLGAYLRRQRSRLGAPKAIMALAHKLARIVYHLVRYGLAYVKQTEAAYAAQVRERLERQLRRRALELGFELKKIEPPVIPTRT

SEQ ID NO: 331928 - protein, 386 aa, unidentified
MRKRTRYLGLDVHAQTVTVAVAESGRKGEVRCLGVIPNTSSAVRRLVSKLGGAEGLRACYEAGPCGYALLWELERIGVACEVVAPTLIPVKAGDRVKTDRRDAEKLARSYRSGDLTPVFVPDQEHEALRDLVRAREAAKKDQLRARHRLSKLLLRRGLRAPAEVKVTWGSRYMEWVHHLRVEQPALQLTLVDYIAEVDHVAERLVRLEAAITDAVAKSSPRLREVIEALQSLRGVALITATTATLEVGAFSRFESPRQLMAYAGIVPSEHSTGGPGRARRFGITKTGNAHLRRVLVEAAWVYRHRPSVSPRLKRQRLKQPEAVAETAWKAQHRLNHRYVKLVARGKPHQVAVTAVARELLGFMWAIAAPIEARANGVLDTKVHKAA

SEQ ID NO: 331929 - protein, 411 aa, unidentified
MVNQNVLIATVDGGKDKHYGYYRCPDGTECKAFEFWNSGRGFYEFWERISSAAKTHCLEEIVVGFESTGPYLEPLAQFLRSKKGVRLVQVNPMHTNRLKELPGNSPLKTDRKDPKVIADIIELGHALTVVIPEGPAAELRRLTQGRERTITSRTRLFNQLQCLLASFFPEFMQVMKDVTTASAQHLLKNYPTPQDIVNLGEPALAALLRKISRGKLKPDRARALFEASSASVGIRDGRDSMLQEVRLIVDTIASYDRFIEGLEVDMVRYLGQIPYSHVILSLRGIGPVTAAGLIGEVGDFTKFGTISEVLKLAGLDLYEVSSGKHKGKLRISKRGRSHMRKLLYLAALSAVRKGGVMHEWYQGALGRGMIKTKALVAVSRKLLMIIFALVRDHSVYIENYAKQKQILQEAA

SEQ ID NO: 331930 - protein, 339 aa, unidentified
MGILYVGIDLAKNVFAVHGVDEHGKAVLVRPSVARAKLHELIATLPACTIGMEACSGAHHWARLFLQHGHTVRLMAPKFVAPYRLSGKQGKNDAADAMAICEAVQRPNMRFVPVKSQDEQARLCVHRVRQGLVEQRTATINRIRGLLSEFGIVLPQRATTVRREATVHLEDLPGWANTAIGDSLSDVHRLDERIAEYDHHVRQMARDDQRSRALMQLSGIGNTTASALVSTIGNAHDFKNGRQLAAWLGLVPGQYSSGGKTRLGSITKAGDRYLRTLLVLGARAVLAAARTKVDRLSRWALALEERRGYWKAVVAIAAKNARMAWAVLAKGENFKLLEA

SEQ ID NO: 331931 - protein, 374 aa, unidentified
MKKNTIEGSKRSRAKSSQSDGPLVVGIDLGDRSSRFCMLLGETGEVVREGSFPTTKSGCNRLFGNLRHSRLALEVGTHSPWVSRQLKALGHEVIVANPRRTRLIAASSNKNDRLDAATLARLARVDPKLLFPVRHRGEAAQADLMVIRARAALVEGRTRLINTARGLAKSFGERLKKCDARYVNEQMAEGLPAGLKTALEPLLKQAGELSARIRSYDENIQKIAAERYPEVRVLTAVGGVGTLMALTFILTLEDRERFQRSRDVGAFLGMRPRRRQSSRSDPELGISKEGDVYLRKLLVQGAHVILGRCAPDSDLRRFGQKLAARGGKGAKKKARVAVARKLAVLLHHLWTTGEVYEPLRNSQARMQPGIAAAA

SEQ ID NO: 331932 - protein, 338 aa, unidentified
MIHVGVDLHQRFCYMTAVEARGKVIQAGAVTNEKAALRKYFRQFRGQGVQAAVEACGFWPAFREVVEPEVERLVLVHPQRVKAIASAKLKNDRVDAETLAQLLRCDLLPESWKADRETQGRRQQVRLRTTLVRQRTRLKNQVHAVLHQQGLRSPATDLFGKRGRLWLGAVKLPLQARESVETCLRMIDHYTEEIQKQNLQLGEKAKTDERVQWLTSIPGIGEVSAMMLLAEIGRVERFGSKEALCSYAGLVPRVRESAGKAARGAITRQGSSALRWIMVEAAQVATRSSSSAKRYYERLLRKKHKHVARVALARKLLIAVYALLHDGVAFDEEKFAAR

SEQ ID NO: 331933 - protein, 307 aa, unidentified
MFIGIDVSKDRLDVHVRPSGEVFVVSRDDEGLDELVTRLRTLAPRLIVVEATGGFETVVASAIGGAGLPIAIVNPRQIRAFATACGRLAKTDRLDAQVIAHFAEGVQPEARAIPDESARALGELVTRRRQIIGMMVAERNRRRQLTQPRLLKTVARVLATLQEQLSAVASEIDTAIRGTPAWREKEELLTTAPAIGPKIARTLIADLPELGTLTRRKIAALAGTAPFSRDSGRWRGQRSIAGGRGSVRAALYMAVLVSIRRKLPLAATYHRLRAAGKPAKVAIVAAMRKLLVILNAMLRDQTQWRNA

SEQ ID NO: 331934 - protein, 357 aa, unidentified
MQSSITMSKESKKRSSDLAARLLKYSVGIDMGKAEFAACVSSINFEQRFRVIASRKFANTEKGFDLFFSWVKQKTRTEERVVFCMESTGVYYENLAYFLADAGCCVSVILPNKSKNYLKSLGLKSKNDKIDAQGLAQMGAEQNLGPWRKPKQLFIELRSLTRQRQNLQESRTALSNQLEAFQSAKYVSPKVVESLKSLIASIDNEVTKLEKEIKTLTAQDEEIHQKMKAICDIKGVSLISLATIVAETLGFAQFTNQRQLTKYAGYDIVENQSGKHVGRTRISKKGNSRIRRMLHMPALTAIAHGEKPLVALWNRVYERTKIKMKAYVAVQRKLLVLIYTLWTKGGKYNPEHLVMQS

SEQ ID NO: 331935 - protein, 338 aa, unidentified
MALYAGIDLHSNNSMVVVQDDEDNVVGRRRLPNDLGTVSAWLEPYRKDLAGVVVESTYNWYWLVDGLMDEGYQVHLANTVAIQQYDGLKYRDDASDARWLAKLLRLGELPEGYIYPRTERAVRDLLRKRSQLVRQGTMNLLSIQNLFARSLGERISANRGKQLTPEAVDACFEDSNVALAVKSALNVLDCIQEQIVTLEKAVHDQVRLRKGYRRLLTVPGIGKVLALTIMLETGDIGRFPGVGNYVSYSRLVGSSHLTNGKRKGSGNTKNGNAFLCWAFIEAANFAIRHNEMIRRYYQRKQARTKRIVALKAVAHKLARACYHMIREDVGFDLKRAFE

SEQ ID NO: 331936 - protein, 355 aa, unidentified
MDSVKYIGMDVHKEAISIAVLNCSGKLVMECVIETKAITIVQFFQGLRGSLHVTLEEGTWAAWLYDLLKPRVSEIVVCNPRRNALLKEGNKSDRIDARKLAELLYLNKVKPVYHGENGIRALKELSRSYLTISGDLVRVMTRLKAVYRSWAIPCAGKQVYALRYRAQWLGKITETGVRRRAEFYYQQLDALRSLRQQVRRELLAESGKHQASKLLCQIPSIGPIRAAQLIAILQTPHRFRTKRQLWAYGGLGIETHSSADHRYVDGQLQPSKKQVSLRGLNRNHNHDLKNILKGAAIIAATKPGPFQEFYADLVAKGIRPEMARLTLARKIAAITLIVWKKGVCFDAQHLKPQTA

SEQ ID NO: 331937 - protein, 411 aa, unidentified
MDVVYARWAGLDVHKATVVAWVRSPGLRAETRPAETQTFATTLRGLAALAAWRTAHAVTHVAMESTGVYWRPVFAVLEGPGQVQLVNARHVKMLPGRKTDVRDGEWRAQLLECGLVRGSFIPPAAVRDLRDLTRRRKTLIRERGPHVNRIAKTRELANIKLGSVVTDIMGKTGRAILQALSIGRADPEYLAAGAQGRLRKKPAALREAVEGRLTPHYAFLLPQHLALIDTLDAHMATLDTRSEAAMVPFAEPAAVMQTMPGVATRAAEAILAETGVDMSPFPTAAHFASWARLCPGNHESAGKRRSTRTGKGATWLRATLQEAAWAAVHTKKSYYRALYYRLKARGGPKKAIVAVQHAMLVALWHMLKRRVSHQDLGADYFAQRNTERTLRHHVRRLEQLGYHVLLAKEAA

SEQ ID NO: 331938 - protein, 342 aa, unidentified
MGEVSTIGLDIAKSIFQIHGVDADGVVMIRKRIRRAKLLEFFAALPACLVGIEACPTAHYWSRRLQILGHTVKLMPPSYVKAYLKRNKNDANDAAAICEAVTRPSMRFVATKSEEQQCGLMLHRSRQLLVCQRTMLSNAIRGHMAELGIICAKGRNGTAELLRIIADEHDDRIPAVARLSLDVLARQYTVVRAEIVAIEKRIHAWHRSCEESRRLEEIPGVGPIVATALVAEVGDWKEFTSGRSLAAWIGLVPRQHSSGGKQRLGRISKQGNRHLRWLLVAGAMAVIRYARQHGTKRLWLARLMERRPIKVAAVALANKIARMAWAMMVRGERFKEPKLLPA

SEQ ID NO: 331939 - protein, 439 aa, unidentified
MLKINPLSTLYVGIDVSSKSNYVCALDFYKNKYINSSFANNQPGAEELALKILECLKEHPDITTIVAALESTSVYSIHIANYLSSCEELMRFNPYVFVLNPKCTANYKKSYIGLGKSDPIDAFVIADYARAGNIESEPWRGSQFLALKRLTRHRLHLVECMTREKTYLVSNLYLKFSELQMLEGDDQPFCDIYGATSSSVLMEYFSPEEILDSSEEDLIAFLAKKSRNRIKDISKTADLLKKAARDSYRLDKALYEPLNVSIASSFNCIETFKREIKVIDNAIEKEIKGLNPNAFIILQSIDGIGPVFAGGIIAEIGDITAFHSSDALAKYAGLTWKSNQSGDFDGEDTPMIKAGNRYLRYYLGEAANSMRKHNVEYGTYYRKKYNEVPKHQHKRALALTSRKFVWFMDCWPETNCTPAYRWIHQLKILTSRTYVLLES

SEQ ID NO: 331940 - protein, 431 aa, unidentified
MEIIHNNSAGIDIGSRNIYISPGYSEVKVFGTFTSDFRAAASYLIEKGIQTIAMEATGSYWVILYDILVEHGFEVWLVDGRQTRQVPGRKTDVKDCQWIQQLHSYGLLNRCFVAQGELKEVRGYQRLREDHLRSAAMHINHMQKAMIEMNIRLPEVLDQIQGASGIAIIHSILEGERDPHRLLSLCHGSILKKKSAEILAALEGFYTERGLFTLRQAYQAYQFYQMQIRECDAALNDILCKINQDKDHRETGPRKPVRHHKPQIDELGRHMLDLFGGRDATVLPGITDYSWLQIYSETGTELERWPSEKHFTSWLGLSPGQNHSGKANKRPKKKGHPNAGQIFRLLAQSLLKSKKISFGAFGRRLRGRKGPMIAIKAVARKIAVQYWRLMVKGQEFVDQGVANYEMVMIRQKEKYLKKLAQELNLKVIEPD

SEQ ID NO: 331941 - protein, 342 aa, unidentified
MKNTTIAIDLAKSVFEVGVSDRPGHVAASHRLSRAEIREFIAKQPAATVVMEACSSAHYWGRTFQSFGHDVKLLPPLCVRPYVQRSKTDRADVKGMLEAWRNTEIRPVPVKSESQQQLTALHRVRAAWMATRTMRINAARGLLREFGFVFPLGAAALAGRVKELIEDADSGLSMPLRQLLYELVLEIGESERRVCLVEEELKAIAAQTPVVERLLTIPGIGLLTATALIGFIGDVSRFPSGRHFAAYLGLTPSEHSSGLRRRLGRISKQGDVYLRTLLIHGARAVLVSAQRQSNPVGLHLWGLELQRRIGNNKAAVAVANKMARIVWAVWRSGKPFQSPHNA

SEQ ID NO: 331942 - protein, 371 aa, unidentified
MVSKKIVYVGIDVDDTAFHGAGIVHETGELFEFKCKPDHGVLRKKLKDLFKDQYAIRLCYEACYIGYSLCRFLRKSGIHCDVIAPSLIPVKTGARVKTDRLDASKLAEYYAKDLLTPIHIPDETDEEVRDLLRSRNFLVKQRKMLKTHISSACRRYDIWFQEETGKKTNWTDQHISWLKTRAKSLGRPVCQIDVEMLLAQFTSLSESIEKLETEILRIGESERYKKSKDALNTFRGIDTLSAMTIITELGDIRRFAHPRQLTSYVGLDVAEYSSGGKERKKGITRTGNKHIRTILTESCQMASRPPILSKRIKQSRAGQPQAVIDIADRCMNRLHKKATRMLYAGKHRNKIKTACAREMLGFIWETMKLAA

SEQ ID NO: 331943 - protein, 352 aa, unidentified
MEYFVGMDVSMASISICEIDAKGTVIREGKVSSTPEAVATWLEESGRGFARIGLEAGPLAPWLYAGLSSRGLPVICIETRQMKAFASASPVKTDRRDARLISQAMRTGLYRATHVKTARSQELRMVLTHRETLVHQVRQLSNTVRGTLKAFGLKVGMARGRLFAARVRELTADNPHLSAAAEPLLLARQALLEQLDKLDRQVHAAARDDSVCRRLMTVPGVGPVTALAFRTGLDVPERFQKSVMVGAHFGLVPRRYASGEQDRSGPISKCGDAMVRWLLFEAVNALLTRTRRWSWLKHWGLAVAKRRGMKRAKVAVARRLAVIMHRMWIIATDFPVPQGGDRHLNTTKTETA

SEQ ID NO: 331944 - protein, 344 aa, unidentified
MEITTIGLDIAKRVFHVHGVDATGRAVLRRRLGRAEVLDFFRALRPCLVGIEACGTAHHWAREIRALGHEVRLIPAAYVKPYVKRGKTDAADAEAICEAVTRPTMRFVPMKTADQQAVLMLHRTRDLLVRQRTALVNALRGHLAEFGIVAPQGISRVAELLAVLLGEDEATLPPLARQALRGLAAELEALGKRVEEIEAAIVAWHKENEASRRLAAVPGIGPITASAIVATVGDVSNFASARHFAAWIGLVPKQNSTGGKPRQGGISKAGDHYLRRLLVLGATAVIRHTRIKAREGWLAELIERRPMMVAAVAQANKTARIVWALLARGESYRPQRGSPQHVGA

SEQ ID NO: 331945 - protein, 413 aa, unidentified
MKPIPTHFAAHIGLDWADRKHDFCLQSSDSSDFEYGLFEHTPEAIEAWALSLQARFRNKPVAIFLELKAGPVVYALLKYNFIVLFPIPPKALAKYREAFTQSGAKDDPTDAYLQLDYMTRHPSALKPLVPDNQETRILQRLVEDRRTLVGEKVRLSNRITAALKSYYPQALQWFDDIDTQIFCDFIKQWPTLKQAKRAHNSTLVKFFKAHRCVRPAVIEKRISALRAAMPLTEDEGVIIPFERLVQALIAQLNQALSSIHDYDLEIARRFRHHGEYEIFESLPGAGPVFGPRLLAAFGSNRERFASADEVNRLYGIAPVLERSGKRAWIHWRYSCPRFVRQTFVEWANQTIRYPFWAKEFYDKKRALGKSHQATLRALTFKWIRIIFSCWKNRRPYDESAYLFALKKRQAVIK

SEQ ID NO: 331946 - protein, 413 aa, unidentified
MLKIVYPICCGMDVHKNFVVACIATTDDKGVTAYKKKRFSTFTSDLRRCASWLAENNCKDVCMESTGKYWIPIYNTLESTCQIVLAHPKYVKSIRGKKTDEKDAKWIADIFKHGLVSGSFIPPADIRQLRDLMRYRRKLTHYTVGEKNRAQNCLTVSNIKLDDVFSDVFGKTASAITDRLLESNEPFDVAPYLDGRIKTPVKKIQAAVDGEMCVEQAEKLRIIRSHMNSLDLCKANLESLILSTAQKFLPQLELVMTVPGIQAYSAIGIISEVGVDMSVFPTSKHLCSWAGLTPQNNESAGKKKTTRISRAGAYIKPLLVQCALTVCKSNKHPEIKNRYLALKKRRGHKKAIIAIARMLLTAIYNILKKNEPYDPELYLRCNNTPPEHRAVSVEEAIFILQRQGYLVTPSAPE

SEQ ID NO: 331947 - protein, 345 aa, unidentified
MNITTVGIDLAKSVFQVHGVDTRGKAVLRRQLRREQVAAFFVNLPPCLIGMEACASAHHWGRMLERFGHTVRLMAPQFVKPYVKTNKNDAADAEAICEAASRPSMRFVPIKSVEQQAVLSVHRVRQGFVKARTAQANQIRGLLGEFGLVIPQGIRHIAQRVPALLEDASNELPLEFRQLIDRLTCHLKELDQQVRELERQIVAWHRSSELSRKLEKIPGIGPLAATALVASIADARSFNNGRQVSAWLGLVPRQNSSGGKSTLLGISKRGDVYLRTLLIHGARSAILAARRQGECKNVWLANLLNRRHANIAAVALANKNVRTVWALLAHGRAFKADYVPARATA

SEQ ID NO: 331948 - protein, 346 aa, unidentified
MKIIGCDFHPSFQQIAVFETETGEITEHKLVNGTGEAERFYRSLPVGSLIGIEACGNSHWFIDLLGRLGHQVRVGDAAKIRASYVRKQKTDRRDAAHILTLLLENRFPKLWTPSRQERDQRQLLIHRHKLVQIRTRVKNSLQHLALNQGVQKKQKLWSKPGQKILLQLPLEGWTAVRRQDCRQLLAQLDEQIARLDKAAEQTAQAHPQASLLLQQKGVGPITALAFALTIGDVSRFEHSNQVASYLGLIPSENTSSNKRRLGSITKQGNSFVRMLLVEAAQSVTRFDPQFHKHYVHLCRNKPKAVAKVAAARKLAVRLYWVLRTDQNSQKAVLIESSPRVPLVGAS

SEQ ID NO: 331949 - protein, 465 aa, unidentified
MAACPLLFFLLGHKLPLTKLEKRKVMQKVTVFETVYEQAAGIDIGAAKIFVSVDGIEVVSFDTFTSGYYQCAEYLQSKGVMHVAMEATGVYWVALYAMLESCGLKVCLVNPKETKQVKGRKTDVKDCQWIQKLFSSGILRQSFIPETNYLEVRQLVRERLDVIEMGSVYVNKMQKCLELMNIKLTEVISQIHGTSGIKMIKAIIAGNRDKEYLLSLCDKRIISNKGESVVKALEGNYNDTFLFMLEQNLHMWEIHQQQLSVIDNRISQLLQKMCTVKEPVAVTSKPKPVRHHAPKIAGLHGMLIQLYGVNASSISGINDYTLLRLLGETGPDMSRFATAKHFASWCGLSPKHHQSGKMNKRVKGPQCNQAGQLFKVIAQSLLNSKHIAIGAFIRKLKARKDSAIAIKAGARKLALAYYTALTKGTDYVEQGIKQYEDQIRQREKASLYKLAKKYNMQITEKQVAA

SEQ ID NO: 331950 - protein, 387 aa, unidentified
MTTAATHTEPGNTTEATLFMACELREKTWTLGFTTGPGHKPRERGMAARNQARVLQEIAQATKRFGLPEEAPVVSCYEAGREGFWLHRFLQAHGITNHVVDSSAIAVSRRQRRAKSDGLDVRKLLSMLIRFHSGEREVWRVVHVPSVEAEDQRHLHRDVETLKQERGSTTTRIKGLLSSQGIRVTSLTNLPEQLETLRLWDGAPIPPGLRRRVLRVYAQHTFLSEQIAAVEAERRAQLQDASDASIAKVRQLMLLKGIGINGSWLVVRAFFGWRAFTNRREVGGLAGFTPTPYQSGESARDLGISTSGNRHVRWMTTELAWSWLRYQPESALSVWFRERYGSGGKRLRRIGIVAVARTLLLALWRFLTTGAFPEGAVLKEAEAMLRG

SEQ ID NO: 331951 - protein, 255 aa, unidentified
MSQPNLQCMGIDVAKLSLDIATTDTIEPFTVGNDEDGFAVITDKLKHTKINLILMEATGGLEAAIACKLQSEGYDVVVINPRQARDFARSMGYLAKTDKLDAAMLAQLALVIDRHPDRSRYIRHLPDEARAVLAAMIVRRRQLNHMLVAERNRLYPSHPQSRKSIDNIIDALQNELDRINEQMKQHMTAFFQEQARLIGSVKGVGDITVASLIAELPEQGKLNRREISALTGVAPLNRDSGKMRGKRTTFGGRAG

SEQ ID NO: 331952 - protein, 275 aa, unidentified
MGHDTRIAVDVAKAVFEVAISDRPGHVAGRERLKRSEFLPFMAQQPVATVVMEACGSSHHWGRKLEALGHRVVLLPPHHVRPYVRGNKTDRTDAKGILEASRNEDIHPVPIKSVAQQVVTSLHRLRSGWVKERTARINALRGLLREQGFFIPVGVRQVVPAVWMLIEDADSELPGPLRGILAEACDEIREIEARIKKVERQLQAMAEQLPVVAQLFTIPGIGILTATALVAFLGDIHRFPSGRHLASYLGLTPREFSSGLKRRLGRRSDRCGDSR

SEQ ID NO: 331953 - protein, 470 aa, unidentified
MVAVMIGIDPHKASHTAVAIDPAEAPLGQVRVRACAAQTERLLEWAQAWPQRTWAVEGAGGVGHLLAQQLAAAGERVLDVPPTLAARVRLLATGNINKNDPNDARSVAVAALRSAGVREVRRDDHAAVLKVWSKRYRDLGRARTQVACRLHQVLCELVPGGVPGEITAAQAERILASITPAEAVQAARWELAAELTEDLRGIDARIRQARTKLAAAVRAAGTSLTRLFGVGPVIAAAVIGDVGQVARFPDRDHFAAYNGTAPIEVSSGGRKIWRLSRRGHRRLNHAIHMAAVTQIRHRHSQGHAYYQKKLAEGKTGKEALRALKRQVSDAIYACLQADARRAAAHVKGPGGQPGNGSDSSAAGSHPGHRLFGQATPGPRHHTTTAASDPAPGPASARGRAGHSSIAATLPLAKPQVQVQRPQRSEDERPGGAARQRPYSAARKAWGQGSQAKPQRPEAASRAREKDRRNP

SEQ ID NO: 331954 - protein, 444 aa, unidentified
MAGSGMILIREVADAPVIMGISKPAGLKSPCGEVKIVNPLFVGIDVSSRSNVAYLMKPDGSKHSSFSVQNNLGGAKMLSERIVSALSSMRLSDVVIGLEATSIYGNNLVYALREDGSLSRFQRKIHVLNPKQVKKFKEAYPDLPKNDFVDAFVIADHLRFGRIAKEVYMDDYRYQALRTLTRARFDVIQNLTREKQRFANYLFLKCSGIAQEKDIQNTSATTIALMEHFETVDDLANTDLDELTDFIAQAGRGRFVDPDATARAVRAAAKGSYRLPKTVNDTVNQAMSVSIASMRALKEQVTVLDKAIEQQFEIIPNTLTSIPGIGKVYSAGIIAEIGDIHRFDSQASVAKFAGLVWTQHQSGEFEAEHSRMIKSGNRYLRYYLLEAANSVRRCDSEFRRYYDLKFKEVNKYQHKRALALTARKLVRLVFRLLKDNRLYIPSEG

SEQ ID NO: 331955 - protein, 306 aa, unidentified
MGNQTFIPRDYDVFAGLDVDKRSIAVTFTDHQGLVKSLRMPYNVEHLVNHVRKHFPNQKVAFAYEAGPTGYGLYDGLVAQDFRCLIASPSMIPKAPGQRVKTNRLDSVGLSENLRGGQLKGIHVPSPLYRELRHLTQLRDTFVSEMVGMKQRIKSLLLMEGMEFPPAPAGSQWSFMVKNKLRKLPCSGTVRFKLDQWLDSLEFNEKQVLKTTREIRRFCHNDPELSQCIEYTMSVSGIGWIVASQLLARIGDWRELRNIRQLGGFLGLVPTEHSTGERTDRGSITHTGDERLRSKMIHPSFLVGDP

SEQ ID NO: 331956 - protein, 340 aa, unidentified
MSEITTIGLDLAKHVFQVHGIDAQGTTVLRKRLRRGQVLAFFSRIPRCVVGLEACATAHYWGRELGALGHEVRLMPAQYVKAYIKRNKHDAADAEAICEAVQRPTMRFVPVKTAEQQATALLHRGREQLVRQRTMLVNALRAHLAEFGIVAAQGLRNVGELIAIVRDDGDTRLPDVARQVLQVLANQIEQIETAVAALERQLLAWHKTNPVSQRLASIPGIGPIIATAIATTVADPKAFRSGREFAAWLGLVPRQNSTGGKTRLGGITKRGNRYLRRLLINGASANLLRSKATKADPWVIGLRRRRPPLVVAVALANKTARIAWAVMLREKDYQPRAVAA

SEQ ID NO: 331957 - protein, 345 aa, unidentified
MEIRTIGIDLGKTVFHLVGVNARGEVVVRKKCSRTQLLRFTSNLRACLVGMEACGGSHFLGRALREQGHDVRLMPAQYVKPYVKTNKNDYIDAEAIAEAVTRPTMRFVPIKSDDQLDLQSLHRVRERWVVRRTAVINQIRGMLLERGITMRKGRKHLEASLPGILENPDNKLSGALRVLLHELRQEMQYLDQQVEECDKLIVRIAGELEPCRRLVAIPGVGPVLATATIAAIGNGAAFKKGRGFAAWLGVVPGEHSTGGKQQLTGTSRRGNKYLRKLFVLGAHTVLLQRTKQSSGLSTWLASLSARKRKQVTTVALANKMARMVWAVLCKGEAYRPPLVPQIDAA

SEQ ID NO: 331958 - protein, 322 aa, unidentified
MNPVSTPSVFVGIDVSKARLDVCIVAETQACFSVDNSAAGVAELVSRLRLIAVTRIVIESTGRYSRLVAAELCAASMPVCVVNPRQARDFAKSLGRLAKTDAIDARSLAEFARVAGLRVSEKQPENQAILDDRITRRRQVVQMLVMEHNRTEGVTDKLTIGHIKKVIRLLEQQREDLDREIAKLIDADDDWRKRRDALVSVPGIGQSTASILVTDLPELGKLNREQIAALVGVAPINRDSGTLRGKRGIFGGRPHVRATLYMATLSAMRFNPTIKAFADRLREAGKAFKVIAIACIRKLLTILNVMLRDNQPWRDPCLAKNA

SEQ ID NO: 331959 - protein, 407 aa, unidentified
MTKNHILGLDIAQNSAVAQLERGDGAKCWHGTLTSDQAGWQQLEQLMTTHGASWAQLLVIVEATGVYHFAWAQRLEKAGAEVYVLNPLLAARLESAANALRGHKTDHVDVAKLCETARHYYAELARFRHHSRPAQQGLRQLDHARAQLRRSLTNLKKSVRSHLELVFPALLAADLQPDTARATAILAAAPTAGAWGALPATQRQQLARDKCAALDQACAQTLADETLAQACVPALRALLQAQQTLANQLHACEQDITPRLPPERVALIASIPGFGERTSAVLATYLPESFADWGTHKQIVARLQALFGCDPRLRCSGKWEGKVKISKRGIALARTALFQAAFCSIGHDEENTAYYHRLRDVQKKTHKAAVVDLMRKQLRRVVAVLGQNHPFVCRSPQPSNPAPARSA

SEQ ID NO: 331960 - protein, 385 aa, unidentified
MPDVSSKASAKTTRTFVAFDVHKNAITAAALPDEGGKPELVQLEHSEKAIRRFVDRLGGAKGLAVCYEAGPCGYELYRLLAAIGVACDIVAPSLTPVRPGDRVKTDGRDAKKLVRLYRAGELRFVRPPTPEQEGLRDLVRCRDDLRRARTAARHRVGKQLLRYGRVYREGKKAWTLRHQAWLRRQRLDDPLAQAALEQMLLHLGAIDAQIAAVDRHLDQVATTEPWSDPVRWLCCFRGISTLTALGLLAEIGDFRRFANARELMSFLGLTVSEYSSGERRQRGSTTKTGNRHARRLLVEAAWHYQHPPRLSARIRAHEGLVPPQALARAWQAQIRLHHRHRHLTQSGKLPTVATVAVARELCGFIWAAMTQQPLQEQPKEVTRAA

SEQ ID NO: 331961 - protein, 461 aa, unidentified
MKRKRITTGRKKFTSGRAVKIARKDAALSRINEHAAGIDIGAQSHFVAVSPASSATPVREFGVFTRDLYAIADWLKECGVRSVAMESTGVYWVPLYEVLEERGFEVKLVDARKVKNVSGRKNDVLDCQWLQELESYGLLAGAFRPADEIVILRGYMRQRQMLVKTAAIHIQHMQKALQQMNLRLDNVVADITGQTGMRILKALLAGERDVNKLADMRDPNCKATHEVIAKSLIGNYRQEHLFSLKQAVELFEFYQQKIRECEQEIEAYLKTLPHKRDDEPPPVEGRAKRSRVSFNVRDEAYKLVGVDLFRIKGLNAETVLRLLSEVGVDLGPFPTEKHFSSWLSLSPNNKVSGGRVLSSKTKASSNRAATAFRQAAISTQASDSDLGAYYRRMKARLGGPKAVTATAHKLARLYYRLVKHGEEYVEAGARVYEEKHRERVIRSLQKRARGLGFQLVATASM

SEQ ID NO: 331962 - protein, 312 aa, unidentified
MSFVGIDVSKNVLDVHVLSTGEHWQVGNDQAGCASLVERLKPLGKTMLVVMEATNVFWRMAAAALAGAGLACAVVNPRQVRDFAKSMGILAKTDAIDAQVLAQFAQRVKPPVRALPDAQCQVAAELLARRAQLMGMRVAEKNRLGTANARKVRKDIEATIAFLEKRLAALDEEIDRWLKSTPIDQSRADLLQSFTGIGQNAARSLLITLPELGRLSGKQIGALAGLAPFAKDSGGKRGQRHIAGGRAVVRAALYMPALSAITHNPVIRALYQRLIQAGKHHYVAITACMRKMLVILNAMLRSGKPWKASHHA

SEQ ID NO: 331963 - protein, 400 aa, unidentified
MLSIGIDVSKGKSTVCGMKPGGEIVYAPFEVQHTREGMLELVSLLRSSCEEVRAVLESTGSYHCPVVAALLENGIFVSVVNSLRMKRFCSQSIRKVKTDRIDAMQIALYGLAYWQELQPTKLPEDTYRELQLLARQYYQMTSLLIKAKVDFNAICDQVLPGMQELMSDHAGRHKLSDFVLQYCHTTHILEMGETRFRKDYCKWAEKKGYRNCERMAALIFATAQNGIPVLPNAPSTQIVITEAIRVLHTVEASRDAILTQMQALAKTLPEYSLVREMPCIGDTLAPRLIAEIGDVRRFHSKRALIAYAGIDAPPYQSGKFCANNRHISKRGNRYLRKTGYEVMQSYVMHKPANDPIFTFIEKKRGEGKSGKLAMVAGLNKFLRVYYGKATELYRSLPAIE

SEQ ID NO: 331964 - protein, 383 aa, unidentified
MKKTQETLRIKDSIKEAVLYIAFELSNSKWKLAFSDGSKIRYKTITAGNLDQLQVEIDLAKRKFQMIEDVRVLSCYEAGRDGFWIHRYLESQGIENLVVDSASLEVNRRKRRAKTDRIDVRKLLRMLLRYWGGEKQVWSVVRVPSETDEDARHLHRGLEDLNKERTMHRNRIKGFLVLHGIKVSNPSHKRFLEQLEKLRTWDGRQVPPDLKSTIIREYERLQMVEEQIRALEREKTERLKNPDTDSLQKVVKLASLYGIGSVSSWTFVMEFFGWRQFQNRKEVGALAGLTPTPYDSGKSLREQGISKAGNQRIRALAVEIAWAWLRFQPQSNLSQWYMKRYANGGKRMRRIGIVAVARKLLIDLWRYLEYDKIPEGARLKSAT

SEQ ID NO: 331965 - protein, 433 aa, unidentified
MPTTHPYDLVIGLDRSDRKADLHLIDTRTGNAQKQTVATSPEALHAWLAQLRLDHPQERVAICLEQPAANLIVFLETYSWITLYPINPISLQKFRETFVTSRAKDDGKDAQYLAELLLSHHDKLKPWQPDDSQTRQLQQLVLHRRAVVDERTGLTNRLTALLKQYFPQALELSGEDLWRPLATAFLLKWPTLQSLKKVRKESLKQFYYLQGSRSQMLIEQRLERIDKAVPLTGEIALLQSYTLRVQLLCKELQLLLKTLQQFDQQIAKVFQQHTGRPIFEALPGAGPVLAPRLLASMGSERERFARPENLQSFSGVAPVTKQSGGKCQVHRRYCCPKFLRQSFHEYAKESILHSRWAAAYYGQQRNKGCGHHTAVRALAYKWQRIIWKCWQTRTIYKEQIYEAALKKNRSPLVGLLDQIELGKSPVKSRAKKS

SEQ ID NO: 331966 - protein, 372 aa, unidentified
MPQRSRVFVGLDTSKLKISVALAEEGRQGEVRFLGEIDNTPEAVRRLVGKLASRYSEVLFCYEAGPTGYGLQRQIAALGHECDVIAPSLIPKRPGERVKTNRRDALTLARLHRAGELTAIWVPDPGHEAVRELVRARDAAMADLRAKRQHLQSFLLRHGRLFPGRKPWTRAHARWLSELAFEHPAQYLVLREYRQGIEDAQARLERLTQQIADVVTTWSMAPVVEAYQALRGVALLTAVTFVAEIGDVRRFESPRQLMAYLGLVPCESSTGERVRRGSITKAGNTRVRRVLIEGAWTYRFPARMSRLLQERQANLPQIVRTIAWKAQVRLCARYRRLMAAGKRQTVVTTAIAREMAAFLWAIGHAIEPRSAA

SEQ ID NO: 331967 - protein, 340 aa, unidentified
MSLYCGIDLHGDNGYYAIIDQNKQRLFKQRLPNDLAVILAKLAPFRADLTGIAVESTFNWYWLVDGLMAQQYPITLANPAAMEQYAGLKDTNDETDAFFIADQLRLGLLKPGYIYPKEERPVRDILRRRMLFVQQRTVQILSFQSLYARETGGEIGGEKIKALSSAEVRELFEDEHLRLMGTANIKTVEFLGERIQELEKAALKQCCLKPEYENLLTVPGIGKVLGLTIMLETGDIRRFAEVGNYTSYCRCVKARRQSNLRAKGENNSKNGNKYLAWAYVEAANFMIRHCPEAQKWYQRKLARSGGKRVLAIKALASKISKACYFIMRDQVAFDQRRIFG

SEQ ID NO: 331968 - protein, 312 aa, unidentified
MPEQNTRHYVGLDVGKYKLEYSLDQTHGGQAPYNAAAIAVWIEQLQQLTHPVVVCESTGGYERRVVAALLAAGIEVCLVMPGRVRAFAYAEGLLAKTDPIDADLLRRFGQKMNPRVYSLASAATTELRELLDYRRLVVAQLAELESRKEVAGATLRSLLAEHQATLEQALLKVQTRLEAHLTATPELSQKERRLRQIKGVGPVLAATMLAYVPELGQISDRQLSALLGVAPYAKDSSQSSRPRHVRGGRHIVRRVLYMSAVCAARWNPILKTFYQRLRAAGKPPMVAVVAVMRKLACLMNRLIADPNFLLAA

SEQ ID NO: 331969 - protein, 469 aa, unidentified
MAYNLLNHIQGKNGSRWAQFIKETGSENLLLVAIDAAKYTHKAILTTFYGDILIKPFEFDASQTGLELVNSQIHSVKEEFGLTEVVVGIETTGHYYEDLVRKCMQAGHRVRVVNAATTDQERKALMNWSKTDNIDLMAIIQSLINGRGTSSELSSGSIGALQKLTRARRELVDERTSTQNLIRMHMDHVFREFQGKSVWENGKRKHVQPFSKLFGKAPCFIMKHYPHPSDILGLGEEGLRKLSIQENLKLRDSTIKCLIDFAEDSISQPKREVKADIYLLAQKLDRMELIDEQIKELEKKIEDLFLETPGAIILAVPGIGLVTGAEFFAEMGDLSDFDHAGQLIKLAGTNPIVKQSGGHRPSYYGISKQGRRTFRNIVYQVGKSLSVNNPEMRERYLALKDKGKHTRQAYVAIGNRMIRLAFSMIRHQSLYRTNHENYALVNVLSNKLRSTNVKRFYEKFVPINSSKSA

SEQ ID NO: 331970 - protein, 357 aa, unidentified
MESTTVGIDLAKQLFSICVVDGKGRVIQRKDLNRTALAEWLVHLPAGTPVAMEACSSAHHWARVCRQHGLAPKLMAAQFVKPFRKSGAVKNDRNDAEAIATAARQGNMRFVSVKSEDQQARLSWHRAREGYKKDALAAMNRIRGLLAEFGIAINKSGVVLRRTLAQLDAYTLPATLVELIRPQQRHWEAIEQGLAACDTHIKVQVEQDERCVRIRALTGVGPITADAVVATLGNAADFRNGRQCAAWMGLTPSPFGSGGNVVLGRISCRGDTYLRTLLIQGARSSLQRAKVTPTDKMTAEQIGIVQLAARLPFGKVIVAIANKHARQIWAMLARGEAYDPEAWLKHPMVQRKGACTA

SEQ ID NO: 331971 - protein, 344 aa, unidentified
MHIASIGIDLGKTVFHLVALGERNKVLLRRKFSRSQLLAYTANLPSSLIGMEACAGSHFLGAALRDQGHQVRIIPGQFVKPYRKSNKNDFIDAEAIAEAVTKENMRFVAIKTQDQLDLQAMHRVRDRLVQHRTALINEIRGFLLDRGIIFPAKPIRLRENLPSVIEDAEQNLTPRLRWFLQQMWQEWRQLDAGIEEISDQLDAISQQDGLCRQLRQVPGFGPLVATATVAAIGNGAAFRRGRDFAAWLGIVPRQHSTGGRQQLFGITKRGNKYLRRMLIHGARAVLLRVKYDTGGFGQWVKRLEERAPRNKVIVAIANKLARIAWAVLSSGKQYQHQPLQMNAA

SEQ ID NO: 331972 - protein, 338 aa, unidentified
MNQCFVGIDVSKKQIHVCVLGEKPHPYPNCLTGFRKMMKSLREKKPHGEETFFLIGMEATGVYHLKLATFLKDEPDVAVYVLNPAQVKSFFKASFHRTKTDSIDACGIASCTEFLVKRDKVRAFETPDNEVERLRQLCRRREEILSMVQMEKNRIEALKEVPSHSGEVESSLLEHLEYLEQRLKDIEEKIKGHIRNSPGLKEQVDLLKSIPGISDTAAAGLISEIRCAERFDNVKELVAFAGLAPAERTSGTSVKGRTCICKTGSSRLRKHLYMPALVGIRYNPLLKEFYERLTNRNKPKKAALIACMRKLLHIIYGVLKNRTAFDPLWAKNRFAMAC

SEQ ID NO: 331973 - protein, 398 aa, unidentified
MTESSDYESVQVFIGVDVGKDTHHAVAINRSGKRLFDKALPNDENKLRSLISDLKQHGQILLVVDQPATIGALPVAVARSEGVLVGYLPGLAMRRIADLHAGEAKTDARDATIIAEAARTLPHALRTLKLADEQIAELSMLCGFDDDLAAQTTQASNRIRGLLTQIHPALERVLGPRLDHPAVLDLLQRYPSPEKLASLGEKKLAAQLCKLAPRLGKRLAADIAQALAEQTVVVPGTNAAAVVLPRLALQLITLRKQRDEVALEVEQRVLAHPLYPVLTSMPGVGVRTAARLLTEVACRAFASAAHLAAYAGLAPVTRRSGSSIRGEHPSRRGNKALKRALFLSAFAALRDPLSRAYYTRKMSQGKRHNQALIALARRRCDVLFAMMRDGTFYTPQAS

SEQ ID NO: 331974 - protein, 349 aa, unidentified
MDRTTYGLDIAKSVMQLHWVDVDTGEIGRKKLARAKLAEHFAQLRPVLVVMEACGSAHHWARVLGDLGHEVELLPARQVRPFVGSNKDDAADARAIWLAARQADIRRVPIKDCKQQAVLALHRTRQHWVSVRTATVNALRGLLYEFGVVLRGGRQAGLKAVAEQRAAIDAQLPEAMRRLVNGQLRSLAQVNERVDELERELAALQRQMDKAVQLRMVPGIGVLGATALAATLGDGAAWRSGREFSASIGLVPAHTGTGGRARMGRISKRGDPYLRTLLIHGARAVIENSKQKPQWLEQMLARRPTNVVIVALANKMARTAWALVAHGREYQRTGQLPSAESGAASAAAL

SEQ ID NO: 331975 - protein, 340 aa, unidentified
MPNPAVIGLDIAKNVFQVHGADAEGRCVLRRRLRRAEVITFFARLPKALVGIEACPSGHHWARELRSLGHDVRLIPPQYVRPFVKTNKNDAADAEGICEAVVRPNMRFVPIKSVAQQAAMMLHRTRALLLRQRTQLINAVRGHLAEFGLVARRGARNIRELAELVRDTGSDKLPDAARAMLVLLLEQIREVQLRVQKTEHALEAWAKQSDACRRLLAIPGVGIMSATALVLAMDDPKRFRSGRHFAAWLGLVPRQSSSGERQVLGGISKRGDGYVRTLLIHGARSLTRWRRESWRWLAGLLMRRPTNIAAVAIANKTARTAWAILAYGHQFQPTRRAEAA

SEQ ID NO: 331976 - protein, 320 aa, unidentified
MQTPSVVLNIGSDVAKDEIVVACSEGSFPVRKVANQRTALLAFLKGLPAGSRIGVESTGSYHELFAEAAHKLGFLVFLLNPKDTRHYAKAVGLRGKTDRVDAELIARMIAHEHTKLHAWIPPTPQQREMDRLIKRRATLVALREAVEMSLHELDGFAVDLKALRTRFNQLIARLDLRVKALVEADPERKQNFARLCTISGVGPVIGTALVNTLERVPLKSADAFVAFTGLDPRADDSGRHRGKRRLSKRGPAELRRLLYMAAMSAINTKTWRPLYEHYRAKGLSSTATLVILARRIARTAWSIYTHKTEFDPGRLVKPLT

SEQ ID NO: 331977 - protein, 402 aa, unidentified
MNAVGIDVSKGKSMVAIMRPFGEIVSAPFEIKHTASDINSLVELINSVEGESRIVMEHTGRYYEVLAHQLSEANLFVSAINPKLIKDFDNDSLRKVKSDKADAVKIARYALDKWQNLKQYNVMDELRNQLKTMNRQFGFYMKHKTAMKNNLIGILDQTYPGVNTYFDSPARSDGSQKWVDFASTYWHVDCVRKMSLNAFIVHYQNWCKRKKYNFSQSKAEEIYGKAKELVPVLPKDDITKLIIKQAVNQLNSASTTVESLRTLMNETASKLPEYPIVMAMKGVGASLDPQLMAEIGDVSRFTHKGAITAFAGVDPGVNESGSYEQKSVPTSKRGSSDLRKTLFQVMDVLIKTHPQDDPVYQFLDKKRAQGKPYYVYMTAGANKFLRIYYGRVKEYLSSLPES

SEQ ID NO: 331978 - protein, 369 aa, unidentified
MKTKTTPSVVPTSPATVTPGGFTLGLDLGDRSHHVCAMDATGQIVREGSLLNTRPALAKLMAEFPRATIAMEAGTHSPWISRYLTELGATVLVANPRKLHAISRSERKCDRRDAQMLARLARVDPALLHPIQHGSAQAQHDLLGLKLRDALVRTRVNLINAIRFTLKSLGHSVRNSSSESFHKTVLADVPADCLPVIQPLLTVLAQVTEQIKGMERDLVQRSRKDYPATQRLQQIAGVGPLTALCFVLKIGDPQRFSRGRDVGAYLGLCPRRDQSGGTDKQLRISKCGDGLLRRLLVSAAHYILGPFGPPCALREQGQRLAGTGSAREKKRAIIAVARKLAVLLLSLWRHGTDYEPRVTASPVLVMTPA

SEQ ID NO: 331979 - protein, 412 aa, unidentified
MRVVHERCCGLDIHKKFVVACLLATESDGTVHKEVRTYSAMTNDLLALADWLRGEDCGPVVMESTGSYWRPVFNLLEEQCEVLVVNAYHVKAVPGRKTDVKDAEWLADLLRHGLLRASFIPAPAQRQLRDLTRYRIHLVDERARLINRLQTVLEDANSKLASVVSDVRGLSAREILQRLLEGETDAQALAELARGKLRAKRDALAQAVVGRLQEHHVFLLREQLAHLDYLDAAIARLDAELAARLAAEQEALALVQTIPGVARRTAEVLVAEIGTDLTRFPSAEHLASWAGMCPGNAESGGRRLSGRTRRGNAWVRRTLAEVANVVSRMKGTYLAAQYRRIAARRGKGRAVLAVGHSVLVAFYHMLTRHQAYRELGADYFDDRQRDQVQRRLVHRQERLGYAVTLEALTTSS

SEQ ID NO: 331980 - protein, 422 aa, unidentified
MRKRTYRATNVKQANWKKIAGLAAAEPVVLGVDVGKDDFFAVLMKTDRSVIDTIKWVHPQQTVELVEHLLESVDRQTLQVVMEPSGTYGDALRGYLGELGLAVYRVSPKRVHDAAEVYDGVPSLHDAKSAYLIGRLHLDGASDPWEMLSVSRRDHHALIAELDLYQGQHQANLNRLEAHLSRHWPEVIRILDLTTVSLHTLIGEYGDPSQVSEHRQQAGQLLRRTGRAFLSAEKIEQVLASSETSLGLPCTPGERHWLQVLGQELLRTHRAIKAIEHRISQVVAEDRVLSRMASVVGETTSLVLETTQGTPLDYPNPHSYLKGLGLNLKERSSGKHAGQLKLTKRGPGKPRKYLYLASLRWSHQDPVIAAWYQKKVKRDGGLKSKAMIAVMRKLALSLWHVARGETFDSGKLFNTRALGIAA

SEQ ID NO: 331981 - protein, 367 aa, unidentified
MFTERTSIGMDVHARSVRAAALDTVTGEVIEATVGPAVPLVVDWVRQLVEAGHGPVAVTYEAGPTGYGLARALASAGIRCEVAAPSKLIRPSGDKVKTDKRDALLLARLLRMEEIISVRVPTLTEEAARDLVRARADVRGDLMSARHRLGKLLLRHGHVYNGGEAWTGKHDAWLRQLRFDLAGTAAAFDLYYARTTDLVTARKRLDGQIAVLAADSEFTPVTRRLACLRGISTLTAFSLAVELGDWHRFTGSTIAAYLGLVPSEHSSGQSKNRGAITKAGNPHARRLLIEAAWHHKAQYKPGKTMQDRWALAPAAAAERGDAGNRRLHRRWQALTEHKKKHTVANTAIARELAGWCWSLAVMETTTT

SEQ ID NO: 331982 - protein, 308 aa, unidentified
MGKNQFDVHLHHQARGQSFSNSPEGFTAFLSILPAPQTCHIAMEATGKYFFNLAQFLFNHQIKVSVVNPASIKYYAQSQLKRTKTDLQDAKLIAHYCQSQQPKLWQPPSQVIVELQEWQQFQALLIKQKTQLTNQMQTTECERLKQLQLEQIVQLEQEINEVSEQIKTLISQDEKRNEQTSLLTSIKGVGEKTAIQVLTLIKDIDGFDNAKQLASFAGVVPQIKQSGSSVNSSSLSKIGHSELRKCLYMPALAAIKFNPVIQTFAQNLQSRGITGKKKVVAVMRKLLHIMFAVLKHGKPFDPCYKIST

SEQ ID NO: 331983 - protein, 323 aa, unidentified
MDVLYPRCAGLDIHKDTVVACVRVVGNGAAKSEVRTFDTTTPGLLALSAWLAESGCTHVAMEATGIYWKPVWHILSDGEITLILANAAHVKNVPGRKTDVADAVWLADLLAHGLIRASFVPETPMQEMRALLRTRKQLVREQASHVQRIQKTLEDANLKLASVLTQIMGVSGRAILQALIDGEDDPDKLLTLVQRGVKAPPERLRAALQGRVSERHRFLLRLHLRHVDALDTAITEIDAEVNRDLDPFRQAVRQLRTIPGVSDLTAQVIVSEIGTDMSRFPTAGHLISWAGLCPRNDESAGKRRSTRLRKGAPRLKTTLVQCA

SEQ ID NO: 331984 - protein, 362 aa, unidentified
MLAVGNNVINEGRDLMRFYNTPHQFYCGIDLHARSMYVCIVSHDGELLVHRNMKAAPEPFLKAIAPYRDGLVVAVECIFTWYWLADLCAQEHIPFVLGHALYMKAIHGGKAKNDKIDSQKIATLLRGGMMPKAYVYPAEMRATRDLLRRRTHLMRKRAELLAHVQNTNSQYNLPEIDKKIAYKANREGVAERFDDPAVQKTIAVDLELITYYDQMLSDLELFILKTAKQHDAQTLYLLQTVPGIGKILSLVLLYEIHQIDRFPRVQDFASYCRLVKCAKESAGKRLGTSGNKIGNAHLTWAFSEAATLFLRGNEAGQKYLARLEKKHDKGKALSILAHKLARTVYFMLKRKTAFDLEQFLRT

SEQ ID NO: 331985 - protein, 351 aa, unidentified
MNILAMDLGKSNTVFCLYDSESGRHRFGKARTTPQQVHNLLVERSPDRVVFEICSAAGWVYDIAASLGIEVQVANTNHQAWRWKNIKNKNDRNDALKLAQLSAMNQLSLVHIPRRSVRQKRSLIQYRQSLVGRRTRIKNSIRAILDREGLPVMPQGKSGWSKAAVERLRKLAMPMERCDAGNLWRGQLQVEIEMLESVEGCIRGVEGKLDELGRDDAQVRRLRTVSGVGPRLAEAVVAFLDEPGRFRSGKQVGSYVGLTPRQYQSGQMDHQGKISGQGNKILRSLLVEVSWLGLRHNRWMNETYHRILRGSASRKKIAITAVARKLLVRCWAMLRDEREWMDEVKSKELAA

SEQ ID NO: 331986 - protein, 388 aa, unidentified
MIYVGIDIAKLNHFASAISSDGEELIKPFKFTNDNDGFQLLISKLDPLDKDSLIIGLESMAHYGDNLVRYLVAKNYKVCVLNPIKTSTMRKNNIHKTKTDKVDTYIICKTLMMQESLRFVTFYDLDLMDLKALGRFRQKTIKQRTRLKIQLTSYMDEIFPELQYFFKSGLHQKSVYALLKEAPTPEAIASMHMTHLAHLLKVNSHGRFDKEMAQQLRVLAQKSVGASDSSLSIQITHTIQQIELLDSQLERVEAEMTEIMKFNDSVIMTIPGIGYINGGMILGEIGDIHRFSSPNKLLAYAGLDPSVYQSGNFQAKKTRMSKRGSKVLRYTFVNAAHNVVKNNATFKAYYDAKMTEGWTHYNALGHCAGKLVRIIWKMMTDNLEFNLD

SEQ ID NO: 331987 - protein, 442 aa, unidentified
MSDSKDCATSEPQWAAWAGLDWGDEKHYWKLRDADSQQCQEGELSNQPEAIQAWAMELYAQFGGRPTAVCLEQSRGAVVYQLSKYPHLVLYPVHPNTAALFRGAFYSSGAKSDQDDSALLLDLLVHHRERLRRLDPDTAETRQLQMLSEQRRMFVDEKTRYSNRLTNWLKNYFPQVLDWIDDIDSPLGCALLERWPTLEQLQRAHPGTLRKFFLEHNCRSKERIQRRMKEIYQATPAVEDAALLQAGPAIVKGLVAVIRALRSDIEDLEGRIQELVSVHPETPLFEGLPGVGPVLLPRIIVAFGTKRERYSSADQLEAYSGIAPVTEQSGKMKWVHFRWACPHFLRQTFHEFAGHSIAKSVWARAYYEMQIGKGKGHHAAVRALAFKWIRVLFRCWQAHQPYDEKIYLQSLQKHHSTLSQMLGTRIEWKEVAGFQKLCEENS

SEQ ID NO: 331988 - protein, 345 aa, unidentified
MKITTVGIDLAKSVFQVHGVSERGKAVLRKQLKRSEVLTFFANLPPCLIGMEACGSAHHWARKLIELGHEVRLMAPQFVKPYVKTNKNDRNDAEAICEAVARPNMRFVPVKTPEQQAALALHRARAGMMKARNAQANQIRGLLGEFGIVLPQGIGQLRRRLPEIAEDSNNGLPELMHTLLRRLLAQLQQLDQQVSELEREIVLWHRQNDDSRRLERIGGIGPLTASAYVASLGNARGFNNGRQVAAWLGIVPRQDSTGGKPKLLGISKHGDVYLRTLLIHGARSVLRHLEHRPDQADSWLKRLMLRRGKNVAAVALANKNARIAWALLAHQREFDPDYVSTAPSR

SEQ ID NO: 331989 - protein, 336 aa, unidentified
MSRLAKVESFFKNVNLTSDDEVFVGIDVHKKSYHVALFLNDTPAIDFRMNAKPKQLNEKLQSIACSIKDIVYETGPTGYGLARHLRKSKLPANVVATSKIPRPSAVDDKTDRLDSRKLAEYSAKGLLRAVTIPTPKQEADRQLYRMRHRQSRQFSKVKNQIKSFLLMHSINEPDGLANWTIASVGDLHDMRLLDTLRLSLDELLSDYDYFRERVRQLNKILADNLDKGLLGRRIALLKTHPGVGPVVACQFATELFHYRDFSSTRQLYKYLGLSPLTNQSGERSSTGSINKAANGRLRSNLLQASWSWVRTDVEAKKCFYTVLVMLIRMHNANLGR

SEQ ID NO: 331990 - protein, 313 aa, unidentified
MEATCVIGIDVSKDTLAIAVHPSGEAWTCATDPAALEALIARVMMLRPTLVVCEATGGYEMPLAAACAAAGVPLAIVNPRQVRAFAQALGQLAKTDAIDATVLALFAARVAPPARPVPDAATQALAALVARRRQLLDMLGAEQRRLAQAATAVIRRDIATHVRWLERRLRDIDDDLQQAVQASPVWRVRDDLLQSVPGVGPTTARTLLAELPELGRLSRRAIAALVGVAPVARESGRWRGRRMIAHGRASVRAGLYMAALVASQRNPPLRIYYARLLAAGKPKKVALVAVMRKLITILNAILRHQQPWHSTTA

SEQ ID NO: 331991 - protein, 391 aa, unidentified
MFLLGIDIAKLNHVASCIDSSTNEVVFSNFKFKNDFKGFSALLNKIKSFDAKNLIIGLESTSHYGENLINFLFIHDFKVALINPLQTSHLRKANIRDAKNDNLDSLNIAKSLIFTKLNFVSKKNIECFSLKKLTRFRSNLIKQRSKAKIQLTSLLDLLFPELQYLFKSKIHSKAIYSLLKKYPSAEEIAALKDDEISNLLYASSKGHFKKEKSIELKSLAKTTVGIKDTSISLHLIQLIELIELYTKQIKDIEIKITDIVNNLDTTLLSVPGISVIACAIILGETNNFENFSSSKKLLAFAGLDPKIRQSGNFNASSCRMSKKGSPYLRYALIFTAWNIVRHSEKFNKYYSLKRSQGKSHYNALGHVAHKLVRILFTLIKKNISYQEKKLE

SEQ ID NO: 331992 - protein, 369 aa, unidentified
MTFFIGVDLHKTQFTVHVRTEEKVESLDQIKQYPTTTAGYAEFLSRIETYKATGAAVKIGVESTGNTRFFKNQVEKAGAEVTVINTLKFKVINESTKKTDKHDASTISEFLSKDMLPASYLCGKETENIRRLLKSRERLVRSTVGQKNEIHALLVSLGLSDELRSLQSKKGRQKILDTLESNNDYVLEAQSVKLMFEIIERIEESVKIIEKQISELTKDDEMVNRLMTIRGCGKITAWTVRAYTEDISRFATAKKYAAFCGLVPWVQDSNETIHHGKITKRGPQELRTCFVQLVLGIRRCKDTSEWRMMQRYEYMKKNKGSGKSIVAAARKMAEIVWAMLNDKQDFDSAKMIGKYKPMILAGEALTAMN

SEQ ID NO: 331993 - protein, 352 aa, unidentified
MVTVGIDPHKHVHVAVAVDAAGRPIGKPLTFKNSALQVTALLTWIRAIAGGSPVTWAIEDGRGFARRLADGLLLSGQEVVWVPARLAAAHRRLHAATGSKSDPADAAAAAHAAMAMPELDRHRIDERARELRVLVDYRDDVVKRRTMAINQLKAQAHLWLDDTPGDLTRAKALSPLTALADGAPLGRHVRQVLTGMAEEIAGMNRRVRDLDAAIRDLVTPLAPNLLAITGISYISAAVLIAEIGDITRFSSSAKLARYTGCAPIPVYSSDKERHRLHRGGNRRLNSVTYTAAIVQKRWLPKAQDLLARNEPAKGPRGARRILQRHLIDVIYRAMTADRETWQHDITRHPLTA

SEQ ID NO: 331994 - protein, 349 aa, unidentified
MSHKSAPPTVSTIGIDLGKNSFHLVGLDQRGAIVWQLKCSRAQLERRLANIPSCLIGMEACSGAHYIARQLAALGHDVRLMPAQYVKPFLKGHKNDYRDAEAIAEAVQRPTMHFVAIKTPEQMDLLALHRVRSRLVSQRTGVINQIRGFLIERGITVRQGVVPLRKALPDILSLNTGALSPRMVNLIAELVQDWRRLHERIAAVSAEIEALAEQDAACQRVMTVPGVGPIISSAVVAAIGNGAGFTQGRDFGAWLGLVPKQESTGDRTILGKISKRGNKYLRTLFVQAAHVVLARRPNAAMRSLWPWIEQASRRLHRNMLAIALANKLARIAWAVLARGRSYQPRIVAI

SEQ ID NO: 331995 - protein, 456 aa, unidentified
MANKKMSLEVVNPYAAGIDVGSRSHWVSVGQNSEDVKEYGVYSEDYQELCEWLKKHKVTTIAMESTGTYWQNLFSSLVAYGFEVILVNGRQTKNIKGKKTDILDCQWIQKLHTLGLLSSSFLPDSTTDIIRTYSRHRQNIIKQSASTVMKMQKYFRLMNMRLDVVVKDIVGLTGTKIISDFVNGEKSGKKLAENRHYNCRKSEGEIAKALQYNGREDYYFALQQEWHTYLHLQKQIDAVDIQIKKHLTEVIDNDDNKKQHIASKKPYKRKNKNTIRDVDMNQMSYQYFEGIDLMAIEGINDATIMAIISEIGLEGIKKFETAKQFTSWLRLAPNNKISGGKVLSNYMPKGSNRLKISLRQAANSIGNLKEGHLSGFFRRINYKRGRATAVSATARKLAVIIWNMLAKGVPYQPPTEYLFLDQKRKMKLVSRIKKNISKFDLSPEDVGFNNELIINA

SEQ ID NO: 331996 - protein, 417 aa, unidentified
MKAWTELTHFAVLDWADDHHDLVVVDAQGKVALELTFAHNAEGWQQAQQALATWPGLPVAIETSAGPAVDQLLQRGFVVYPVMPKAAARYRERKRPTGSKDDRHDAWSLADALRTDGHGWSALSPLDPLTGELRALCRDEITLIEQRTALVNQLQAALKEYYPAALEAFEDWTAPYTWAFVLAFPTPKALAAAGKRKWEKFLHTHKLWRPQTSSQRMEIFARATAFSGGEAITAAKSLLAQSLARLLQTLEQQLANYRARIQALFDQHPDHDLFGSLPGAGAKLAPRLLAELAGADWSQLSQVQARAGTAPVTYESGKIKRVKIRRACTHPLRATLHLWADLSRHYSAWAAAFYRAHRDKGQSHACALRCLAHRWLEIIGAMSRTHSTYNPEHHLRQIQKHGSYVLKLISSPDPKPL

SEQ ID NO: 331997 - protein, 607 aa, unidentified
MSTIASLDRIGVGIDTARYGHRVSFLRPDRKPAAKPLTVMENRAGYQALQDRLNQLHEQYPIANFHVRIDAAGQYAVNLELFLRSLKLPMTISVGEPKRNKDYQKAHFPKRTTDDTESQAMARFAVVELPDATPASSPPMFVLREVAGRLQSKVKQTTQAINRLHNLLARVFPELATLTEDMSVGWVLKLLDKYPTAERIAQAQIASLEKIPYLSVEQAHAVHQAAKQSVASLRGELAEALVRDHVNQLRLCQKAEQHLHQLLLEAFADLPASPHLQVLTITGIGEATAAALVAKIVDINRFATPNHLVSYFGVFPEESSSGVDKRGRPLPPGTLIMSPKGNDLVRFYLWNAARNAIQHNPAIRALYRRLRAKGKRGDVAFGHCMRKLLHLVYAVWKTDRPFDKEHFPWEGSSDTQPSATTPPSADAGTTPSADEKAVGHKRDLPAEEVVTTADSTLEPASPAVKPASQSAAPRPKVDFACVREHVTMEQVLQHLGYFASLRGRGQQRRGPCPVHSQPTAPERTFSVHLGKNAFQCFHAECAVKGNVLDLWAAIHRLPLYEAALDLAETFQVPRNREEEPVRGTSSPRTATAKTSAPAAATATDGAK

SEQ ID NO: 331998 - protein, 338 aa, unidentified
MQTDQTGQTYALFVGVDIAAQTAMVATQRPGEKASRSFTIEQTPEGYTSLLRQLQATGFVPSQVLVVMEATGSYWISLATRLVHEGFAVSVINPAQAHHFAKALLKRAKTDAIDAQTLAQLAMILQPEPWTPPPQIYYALQQRLAQRDDLLNLRQQVRNQLHALVQHPEVIAEVRARMESLLATFESQLTEVESEITAALSQDSAWAAAATRLQSIKGVGWVTAAWTLVTTLNLTSCDTVDALTAYAGLAPMPRQSGSSVWHRPSIGHTGNGRLRTAFYMATLSAARHNPVIKAFYTRLRAVGKPEKVARCAAARKLLHIAWAVVKKDQQFDPHYARG

SEQ ID NO: 331999 - protein, 397 aa, unidentified
MSGSFSVFLGLDVGKDTHHAVGLDPEGNRLHDGPLPNTEPKLKALFDKLAQHGPLLVVVDQPATIGALPVAVARAAGHQVAYLPGLAMRRIADLYPGRAKTDARDAFVIADAARSLPHTLRPVDVGDEALAELEVLVGFDDDLAGEATRISNRIRGLLTGIHPALEHAIGPKVSHPAVLEILSRCGGPAGIAKAGRRQLTAIAKVHAPRMGERLVEAIMAALAEQTVTVPGTAAADTVLPRLADSLKAVLLQRKQVAEQVEGILDAHPLAGVLTSMPGIGVRTAARILLEVGDASNFASSAHLAAYAGIAPVTRSSGTSIKGEHPARTGNRQLKRAFFLAAFAALADPTSRAYYDRKRTEGKKHNAALICLARRRCDVLYAMLRNGTHYRQPAPAAA

SEQ ID NO: 332000 - protein, 385 aa, unidentified
MRSEATREGETIVGGQVLYMALELSERTWKVLFASPAGRRRERSVAARDVAALVGEIAAAKRRLGLPAQARVVSCYEAGRDGFWLDRALRAHGIDNLVVDSSSIEVARRARRAKTDRVDLVKLMGLLLRWVRGEAKVWSVVRVPSTEAEDIRQLSRSIERLKGEHGRHVTRIKALLATQGLKLARIGGAGWGKRVGELRCWDGSALGAWLQRDLVLEGERLAVVADQLAALKAERDRLVAEGREAAAVKARELARLGAIASESSFVFATELFGWRTFANRRQLAGSVGLTGTPYSSGESAREQGISKAGNKRMRTMLVEIAWCWLRYQPTSALSRWWQERFANTGGRARRIAIVALARKLLVALWRYLEHGIVPQGARLKTRAAA

SEQ ID NO: 332001 - protein, 460 aa, unidentified
MNRNKSKSRAERTMPMVHPNAAAIDIGATMHMAAVRADRAPEPVRSFGTFTADLHRLVDWFTECGVETVVMESTSVYWIPIFELLDARGFAVFLVNARDAKHVPGRKTDVSDAQWLQRLHSFGLLRASFRPKGQIAELRAYVRQRERLLEYAASHIQHMQKALTEMNLQLHHVVADITGVTGLGIIRAILAGERDPEALAGLRHYSCHSSAETITKALTGSYRAEHLFALDQALALYDAYREKASACDVRIEAVLKELSTHRGCDHGSAPPVSRRRNRTDQANALAFDVRAALFVLLGKDITTIDGLGPYLSLKLIAECGDDLTSWPSAKHFTSWLGLAPSNKISGGKVLSSRTRRSGGRAAALLRLAAVTVGRTDTALGAFYRRLSSRIGKAKAVTATARKIAVLFYNAVRHGMAYVDPGASSYETRYRTRVVNNLHRRAKAFGFVLQPLEPKVGAAVS

SEQ ID NO: 332002 - protein, 372 aa, unidentified
MHFVKTNKTRYCGIDLHSKSMMLCIVNREGKILFRKRLANNFALVHQHLLPYLPDLAVAVESTFNWYWLVDACREHGIEIHLGHATYMKSVYGGKNKSDRLDCIQIANLLRSGMLPFAHAYPQQHRGIRDLLRRRLYYSQTLSSFQAHGRVMYYQNGIIDIESGTLKRKKGRSALIARLPDNGPRSSVRYDIETIEHLQDVLRRLERELVTYTRRAEPNRSVEILKSLPGVGDILGHTMYYETGDLLRFKKRQRFSSYTRLVRPQRESNGKFTGHGNARIGDPYLKWAFMEILNTAPKVSPVFKTLIEQLSARHGRLKARAILAHKLCIAVYYMLKRQEPFDESRFEAMIKKDQHPLTNNSRSKEKEYMPSM

SEQ ID NO: 332003 - protein, 312 aa, unidentified
MITQPEVFIGIDVSKKTLDVCSYPDKQKAQFSNDAAGHQQLVEAMRKVQPTLIVMEATGGLEFEATALLVTSALPVAVINPRNARDFAKAVGLLAKTDQVDAWALARFASAVRPEQREIKSEALRGLEEVLTRRRQLVDMVTAENNRKGQASANMAKEIEEHISWLKQRIKSADLDLGKAVKASPAWKAKADVLTSVPGIGSVATFTLLAELPELGTLNRREICALVGVCPFNRDSGTLRGKRSIWGGRTSVRAVLYMAALVATRHNPVIKQFYQKLLDAGKLKKVALVACMRKLLVILNSMVRNNTPWASN

SEQ ID NO: 332004 - protein, 417 aa, unidentified
MDVLYPRCAGLDVHKDTVVARLRCVSQPRADEVRSFSTTTSALLELNEWLGSHGVTHVAMEATGVYWKPVWHLLEEHFELVLANAQHIRNVPGRKTDVNDATWIADLLAHGLIRSSFVPPAPIQELRDLTRTRKQLVREICQHSLRIQKTLEDANVKLGSVLSNVLGSSGRAILQALIAGQTDPEQLADLAQGTARKKRTELVAALHGRIKLHHRRLLKVHLELIAALEQALREIDADVGKTLAPIHSSARLLTSLPGVSDLTAQVMVAEIGVDMARFPSAAHLISWAGLCPRNDESAGKRRSTRVRKGAPWLKTALVTAAWAAVRVKDSYLQAQFHRLRSRRGAKKAILAVAASMLTAAYHMLKNGLQYRDLGADHFTRRVAPRRSSDSCADSTIWAATCNSSLKLHEPEIMTASY

SEQ ID NO: 332005 - protein, 370 aa, unidentified
MQTVRSFVGMDVHKETISISVAEDGRNGPVRFLGVIPNQPDDIAKMAKRLAKHGELDFCYEAGGCGYNIYRQLTALGHSCTVAATSLIPRKPGERIKTDRRDSQKLAILHRSGDLTRVWVPDATHEALRDLVRARVDASMHLMRARQQLLAFLLRHGRSYPTGKHWTQRHRSWLAGQTFLLEVHRIVFQDYVETVWTAQERRDVLIERIATMTASWSLGPLVEALRGLRGLDLLSSATFIATTGDLSRFESPRMLMGYLGLVPSEHSSGGTIRRGGITKTGNREARRMLIEAAWSYRYPARIAKEKAEILVRLPKNIRDIAWKAQTRLCARYRTMIARGKKPTVVVAALARELAGFIWAIGQEMRSSMTS

SEQ ID NO: 332006 - protein, 345 aa, unidentified
MTTMNYIGLDVHKKTISYCVKDVSGRIQQEGKIGSTRRELDCWMKTLPQPWTVAMEATIFSGWIYDHLLPHATQIKVAHPLMLRAIAAAKKKNDQIDASKLADCLRCDFLPECHMMPRAIRDRRRTLRYRHLLVRQMVQMKNRVSGLLMETGVEYNKQRLHKVSYFRELLSANGEVPPSIRPLLKLSRETIERCQKTEYALVSSLQRDPVLADRIKRLRTVPGVGPITALTWALEIGDVSRFGSIKKAISYCGLCGDERSSADKAMRMPLSKQRNKHIQRALVEAAKLAPRQNHEMAVIYDQERQKGNSNRATLAVARKMVAYLLAVDRQQRDFVPAEERRTTAA

SEQ ID NO: 332007 - protein, 341 aa, unidentified
MAQYIGLDVSLKDTFISVRQDGRRIWRGKCASDPKLLSQVIRKRAPEAVRIVFETGPLSIWYYHELTAAGLPAICIDARHAKKGLDMARNKTDANDADGLAHLAEAAFYKEVRVKGYDSMLVRTLVAARTQILKMQLQLANQVRGLMKTFGLIVPKSSGRVFEGHIRELLATNPGLERIILPLLAVWRELRSKAVELSKQLADVARRSEQCQLLTSIPGVGVVTACSFVAAVEDPDNFARSRSVGAWLGLTTKRYQSGEVDYDGRISRRGDAYLRGLLYEAATVILTRAHADSELRSWGLRLREKIGFKRAAIAVARKLSVIMHTMLKSGELFVRSPVAAA

SEQ ID NO: 332008 - protein, 424 aa, unidentified
MPDHAPIDAAPVLLPDLPPGGVTAGVDWATADHVVAVVDARGTVIDRFAVDATAAGLRELVRRLRRNHITEVAIERSDGLVVDALLGAGLTVVVIAPNQVNNLRGRYGSARNKDDRFDAFVLADTLRTDRARLRPLIPDTPATVLLRSTVRARKDLLTHRVGLANQLRAHLQTFHPGPVGLFADLDGITSLRFLAAFPGQDDTDWLTPSRLTTWLRRANYTGRKDPAILHAHLAAAARGATGPAGAAAAEVTRAFVAALTAIVVQIKALDKRITAQLAEHADAHIFRSLPRAQALRAARLIAEIGDCRGRFPTPEALASLAGVTPSTRQSGKVRTTSFRWSADKQLRDAVCDFAADSRHANPWAAHVYRQAVGRGHRHPHAVRILARAWLLVIWRCWQDHQPYQPDQHRALQTVLRERSPATAA

SEQ ID NO: 332009 - protein, 349 aa, unidentified
MMAQGLTYSGCIVYVGIDGHKDTYAVTCVCDKKIVKTATVQANPPGLASSLPRWFPDATLSAVYEAGFCAFVLYRALSQAGIATIVVNPASVAVAANDKVKTDRRDSKKLAIDLADGRLRGIYVPTEAEELARLLPRTRAQIVEPRATITRQIKAKLHQFGLIAPASRRLMSNRYLREIAAWPLPAELSVRLTFLAEQWRFATRQLIEMRRLLRAQAQVQGPIDTVYRSVPGIGEVVARTLATELGDMTRFANERALFSYTGLTPSEHSSGASVRRGPISRQGSSRIRQLLVETAWRALPRDAVLQESFDRIAATRGKKRASVAIARRLTGRIRACFRQGTTSAVGTYA

SEQ ID NO: 332010 - protein, 349 aa, unidentified
MSMVGGLDLHRRQITYDVLDVETGEIWRGRLWQPDRQRFRRWLGTEVAARSRGESVALAVEGCTGWRYVVEEISAAGYEPFLAEPADTQAARGKKRRAKTDRTDAQLLRELLVADELPESWIPPAEVLEWRERVRLYKSLVDQRTLWCQRIHAVLYHHGVAVPEGAIRTEKTRALITSDKVQVSAAGRERIAAGYKMIDAADREAMPLRAELQRFGARQPACRALVDAQYGIGGLIAVVLWSELGDCRRFCRSEQVVRHSGLDVTVDASDRRRAGGHLSRQGPETLRWALYEAAKNSSHGRSPDHSYYAKVKDRHDGKIAAISVARQLARRSYHVLRAVDPELVYAIPA

SEQ ID NO: 332011 - protein, 366 aa, unidentified
MKQVTTYVGIDAHKKDLFIAMLVGTAAVPVSWTVANEPNAVRRLVRKLEREAPGAVQVCYEAGPCGYALQRRMTTPRVSCQVIAPALVPRKPGERVKTNRRDARKLVELLRAGLLTEVRPPTPEEEAVRDLCRARDDARTDLQRCRHRLGKLLLRRGLHYSGRNWTRAHRQWMDSLIWTHAAERVVVEDYLLAIDQVETRLSELDVRLTAIAQTDPYREPVAWLRCFRGIDTLTAILILAELHDFRRFQAPRALMAYLGLVPGEDSTGEKHRRGRITRTGNSVVRRLLVETAWHYQHRPAVGVGLARRRKGQPGRVIAIADKAQQRLCRRFRKLATEHKPAPKIVVAIARELAGFLWAALQPAAAH

SEQ ID NO: 332012 - protein, 428 aa, unidentified
MLGVGIDWAEEFHLVALGRPGEGVFDVARVEHTPAAVAALVARIAAHEPDPAEVRVVIETRHGLLVEALVDAGYTVVPVNPDLVARRRGPARKKDDAEDARIACLLALDRFTELRALIPHGELAGELRAIARDDVRAARDERRLLNRLRADLAATFPAALVFAGDDLGSPVILKLLQRWPTAGELAAAGREEIEALARSAKHGWPDRLAQRVADALAGDHFRAKDYLVRAKADTIRLACAQLLLLREQRRAWERRMGELLLGDRRRGRAKQPGDDRGPAVPGGEIYLSFAGLGDRLAARIAAEIGDAIGQFDTPNALQCYAGKAPVTRRSGKSELVVATRLACNRYLADAVQQWAFTSPRTSGWAREFYDTQRGRGKKHHAALRALGNRWLEILWHCLTKGVPYDESVHVANRNRALGRVNQPTKLAA

SEQ ID NO: 332013 - protein, 411 aa, unidentified
MENIFPCCAGLDVHKESVEACVRRIEPNGRWHQQTRHWGTMTRDLLAMADWMAAQGVTQVAMESTGVFWKPIYNILESRFTMLLVNARHLKQVPGRKSDVRDCQWIAQLLQYGLLKGSFIPPRSQRELRDLTRHRTQLVEEKTRTANRIHKVLQDTNIKLSSVATDVLGVSGRAMLEALITGEEDPVKLAHLAQRKLRSKIPELEKALEGHLTEHHRFLLQLLWKQLAQQEELIAELDRKIEEQTRPFAAEIDRLDAVPGVDRRVAEVVLAEVGADMKPFSAHENLAWWAGMCPGNEESAGKRRRRRITPGNPWLKPTLAQAAWAASHTKNSYLASQYRRLAGHRGRKRALIAVGHSILVIFYHMLKTGTSYTDLGGDFFDRLQPERLTRYYVKRLERLGHKVTLESRAAA

SEQ ID NO: 332014 - protein, 424 aa, unidentified
MNFKMQNKQNQLIERITPQHLVVGVDIAQHVHVARAVNFRGIVVGKPLSFENNEEGFTRLLNWIQELKQMKNLDTTIVGMEPTGHYWINLSKWLVKQNMDVVTVNPHHVKRNKENRDNTQSKSDKKDALVIADMVKNGYYAFVRSTSESFEKLRVLMANRDVIVKRLVSSINQINRWVDVVFPELRQVFKDVSCKGAIATLRLFPTPAELCSLQPQDIVTGWKSCMKRHSGHKKARSLLALAKRSIGTKQALDAYKLHLEQLLEEYDLASSQLERVTQEVTNVLEQIPFVNQILAIKGISEISLAGILGEAGDLSGFAHGNALLRHAGLHLAEASSGKWKGQIVLSKRGRSRLRRYLFLATMSLVMNNPEFKSLHSNNVKVKKIKKMKSIMKLCGKLARVLVGIARNGSAYKPEMIFPLEQLAA

SEQ ID NO: 332015 - protein, 384 aa, unidentified
MKKNISRSVEMKAPAVEIKASVKNAPGRTISHPVDYQAVVGLDVGDRQTHYCVLDLDGELTVEGAVATREASLRVQFEGKARMRIALEAGVHSPWISRLLVELGHDVIVGNPRNVRMISQNDSKNDPADARLLARLAHVGPELLSPIQQRSEKTQVDLALVRARDVAIQSRTKIVNAVRGIVKSTGHRLPKSSTLTFARKAKDSCPEALRPALLPLLRVIEELTREIELYEKLVAKKADTEYPETKAIRTIHGVGPLTALTLVLLLNNDRSRFRKSRDVGCYIGLRPKQRDSGLRAPQLGITKAGDSLLRRLATQCAQYILGPFGKDSALRRWGMSLALRGGKNAKKRAVIAVARKLVILMHRIWITQEIYEPLRGVTVQSKAA

SEQ ID NO: 332016 - protein, 352 aa, unidentified
MKHFIGCDVHTRNQFVAWIDEETGEIKKRRLEHESQEVKEFYAQFPQGTVVGIEATFPAYWFERLMGELGHELWVGDAARIRASEVRYQKTDSRDAELLLDLLRTGRFPRIWVPSLQERDQRQLLVHRMKQVRARTQVKNQLHALAISQGVCRGSKLWSAKGRKELESLALLPWAARRRKELLESLDRLDEQIRELDRAVEEAGRNRPEVALLRTHPGVGMVVGLAFVLTVGPVERFANSRKLVSYWGLNPRENSSGGRQRLGSISKQGNTMMRWLLVEAAQTAARLDSQLRRIYQRLKKQKTSAVAKVAVARRLAVRLFWMLRTRNNYTQLVHMSGSPGSAVVPPRAEPTV

SEQ ID NO: 332017 - protein, 426 aa, unidentified
MKYTQNERIMQITEKTLIIGIDVGSEKHYARAFNFRGVEYGKLLIFHNDEEGFAMLEDWIRKLAEQNGFKDVTVGMEPTGHYWFNLGEYIKGKGMRIVLVNPHHVKKSKELDDNNPSKTDRKDPKTIAMLVKDGRYMEPYIPEGIYKELRILMDSRWRIMKELFAIRNRISRWISIYYPEFTKVFVDWEGKAAMLILKECPTPAKIIEKGVEGIIAIWKEHKIRAVGRKRAVMLLETASRSIGTKEGMISAENELQMLLEDYESKVRQNDRTMVLIESLAKEIPGFEKILEIKGVGLVTAAGFIAEIGDVSRFSHPKQIQKLAGLSLKENSSGKHKGKTTICKRGRKRLRYYLTFGIMPLLSKNEEFKALHAYYTSRKENPLKKMQSLVALSNKLIRIFYVILTKNVTYDPQKMIRDIRRPEAKAA

SEQ ID NO: 332018 - protein, 389 aa, unidentified
MFYLGIDIGKNTHVASLVDDKKKVIFKAFSFSNSIDGAESLILKLEAFKNELEVAMEATGHYWLSLYSYLVEKNFTVRVINPIQTDGWRQGIEIRKRKTDVIDSILIADLLRYGDFVETSLSNEDYLSLRNLSRFRSYLISSIGDLKRKTIALLDQVFPEYASSFSNIFGKTSKEILSNFSTPSDFEDINSDDLNTFLESVSKKNYASKKIDELSKKASSSFGINFCLDSFSLQIKMLIEQISFIQNQVSDVENEIELLLEKLNSPITTIPGIGSVNAATILGEIGDIKRFSNPSKLVAYAGLDASISQSGEYEATYNHMSKRGSPYLRRALFQSALRAEFCDPVFSDYYQKKISEGKHHLVATNAVARKLCHTIFAVLTKDEPYQVQN

SEQ ID NO: 332019 - protein, 351 aa, unidentified
MRYAQVNSRYYCGIDLHSRTMYVCVMDKSGKILFQRNMQNDFKIFKESVKSFLPDMAVGVESSCYYYWLSDACHAEGIPFYLGHALYMKAINGGKVKNDRVDSRKIADLLRANLFPLAYPYPKEMRATRDLLRRRHYYVRRRASTYSHLQTLFIQHGKLDINLKQVKDKENRGSLVKRFGNEDLQLMISAGLDYIEALDGIIADLEFQIRKQARNHDHNAYQLLMTTPGVGDILGLVILYETHDVNRFASVQCYSSYAGVVKCERSSAGKFLNTKNHKIRNPYLKWAFGEIILKAQVSSPPIGKLYEQLQSKYGLGRAKSIIAHRFAVANYFMLKNKQPFDEKRFVQSSKY

SEQ ID NO: 332020 - protein, 338 aa, unidentified
MKLYCGMDLHSNNVVARVINKDGKTFYKKKLPCELDVILNALKPHKKSIEGIAIESTFNWYWLVDGLQEQGYKIHLVNTAAVKQYEGLKHTDDDSDAFWLAHLLSHGILPTGYIYPKEQRAVRDLARKRSQLVQNRTTQILSLQTLHIRNTGRSLSCDAVKKLTIEDIESQFTDTNIILAMSSNLVIYEALKQQVRVLENAIVNQIKLDSRYQHLMSIDGIGKILALTIMLETGDISRFDSVGNYASYCRLVGSVKLSNGKKKGKGNAKNGNKYLSWAYVEAANFCIRYNEHAKRYYQKKSAKTKRVVALKALAHKLARASYYVMRDNVEFDSRKLFC

SEQ ID NO: 332021 - protein, 411 aa, unidentified
MLLLVGDDWAEEHHDVEVQDEHGRVLGKAKLPEGIVGIDRLHALIGQHVGDEDDDQVQVVVGIETDRGPWVQALLAAGYRVYPINPLQVARYRERHSVSGAKSDPADAHTLADMVRTDRHQLRPAAGDSAIAEAVKVITRAHKTLIWERQRHTLRLRSALLEFFPAAVAAFADLTAPDTLQLLAKAPDPASAARLSISQISAALRQARRRDVPAKAAVIQAALRTRHLGQPSVVAGAYAATVRAQAAILTVLNTQIATMEDQVGAHFGQHPDSELYLSQPGLGVVLAARVLAEFGDDKTRYADARARKNYAGTSPITRQSGKRKFVQARYVHNDRLIDALARQAFAALRGSPGARAYYDQLRGRGTAHQAALRQLGNRLVGILHGCLKSGTPYDEDTAWAHHQQQDQQAAA

SEQ ID NO: 332022 - protein, 410 aa, unidentified
MQVLHERCCGLDIHKRLIVACAITPGPDGRPQRALRSFGTMTADILQLGDWLAERGVSDVVMESTGNYWRPIWNLLEGQVRLVLANARAIKQVPGRKTDVKDAEWLADLLRHGLVRGSFVPDRPQRELRELIRYRTSLIHERSAEINRLQKTLEGANFQLGAVVSDVTGASARAILQALLAGEEAPAALADLAKGALRHKLPELQQALEGRVGPHQRFLLPIQLAHLDGLEALIEQVSAEIEARLEPLAEEVERLDAIPGVGRATAEALLAEVGPDWTRFPSSGQLAAWAGLTPGQDESAGKRRSGRTRKGNRTLRSILVEAANAAARKRNSYLAAQFRRIAARRGKKKAAVAVAHSILVVAYHLLTRGTEYEDLGANYFDERDRSRVERRLTHRLEQLGYRVILEPKAA

SEQ ID NO: 332023 - protein, 392 aa, unidentified
MVISVGVDVSKDKHDCFILSSEGEVLADVFTIPNNLDGFLFLLQRIRDCTHAQGKIKVGLEATGHYSYNLLGFLLDNGLPTYVLNPLRTNIYRKSLSLRKTKTDRVDARTIASMLLSDAGLKPYTNTAYHNEELKSLTRYRFDKVKERAKLKSSIARLVCILFPELEKLVPSLHIASVYALLEEFPGAKQIAAAHLTRLKTLLETASKGHYKRDMALEIRDAARNSIGSWMPAKSLELQHTIRIIRELDDEIAEIEKQIQAIMDELNSPITTIPGIGFRMAAMIFAEVGDFTRFDSPDKLLAYAGMSPSTYQSGQLKNCYPHMEKRGSRYLRYALYNATKYVCHWDPTFAAYLAKKRAEGKHYNVALSHAAKKLVRLIFAMEKSRQPYCLVA

SEQ ID NO: 332024 - protein, 424 aa, unidentified
MKVTYQTCCGVDVHKSFLVATIVKTTGGIEPSYQKKRFSTFNNSILEFKQWLLDNDCHDVCMESTGKYWVPVFNLLEDEINVVIANPKWVKAVKGNKDDTKDSKWIGDLFRLGLVRGSYIPCKKVRILREYTRYRYKLVSCRSSEKNRYQNALTVCNVALDSVVSDIFGKSSTSIIDYLLEQSGTSINHEEIASKLLRSLKSKEDAVIESVEGYQMTDAQKYRMRLVRAHMDYITAEINDVDKMIENMISSNPDFENAVQFLCTIPGVKRDSAITIISEIGTDMSQFSSSKRLCCWAGLTPGSNESAGKKKSVRITRAGVYLKPALVQCAHAAVKSDKSPYYKKKYDSLVKRRGKKRAIIAIARMILTAIYQMLSTGEQWNPSDLYKIDMPVALVEKQKAKAIRQAKKLLQREGMLPPDESLAS

SEQ ID NO: 332025 - protein, 331 aa, unidentified
MKNYELAVGIDVSKKTLDVFIHNYNKHRVFDNCRSGYDSLLKWVSKFSKIEKSVLYCFEHTGNYSLKLAIFMQTNGLNYVQENPIVIKRSSGLVRTKTDRVDAQMIARYAWLHREELVCSSIRDEALLELGRLLSLRDQLVRNRTGLMGTLEELSGLLSSPSTDVSCKSLKHTIAYLSKQILKLEKQIDELVKREDRMSKNYKLLTSLKGVGRILACQLIYHTCNFERFSDWRQFSSYCGTAPFQYSSGTSVYRRSKGHPMSDRKMKTLLNMASISAIQHDGELRSYYQRKVEEGKPKMLALNNVRNKLISRAFAVIKRGTPYVDLCKYAA

SEQ ID NO: 332026 - protein, 445 aa, unidentified
MNKKKFHKKERIKLPKHLDHINQHAAGIDIGSRSHFVAVHEGADDEPVREFSTFTGDLERLAEWLQTCGITTVAMESTGIYWIPVFEILESHGLEVRLVNARHVKNVPGRKSDVLDCQWLQQLHTYGLLRGAFRPVEQVCTLRAYVRQRVTLVRSAASYIQRMQKALAQMNLQLHNVVTDITGVTGMRIIKAILDGERNPNILASMRDRRCKNSETTIARSLKGSYRPEHLFSLRQAVEFYEFYQAKIADCDRQILEQLKSFDTQASPNGTPPNSVGEALQHMSGVDLTSIDGIDTNTALKILSEIGTDMSRWQTAKHFASWLGLSPGTKVSGGKVLSSATKPVANKAASAFRMAAFTLFNSKSALGAYLRRMRSRLGAPKAITATAHKLARLVYAMLKYGTAYVDAGQAYYEERYRSRVVQNLKRKAQELGFELVTIQGTATTT

SEQ ID NO: 332027 - protein, 354 aa, unidentified
MKTIKQCVGIDIAKDSFTACIASISVESELIYSEIRTFKNEKSGFNQLSRWVRKQREKNTPLVFLMEATGVYYEQLAHHLSSIKQTVHVVLPNTSKHFFASLNIKTKTDEVDAKILSRFGVERKHKNWEPPRKSILHLRNLTRYYVQLQEQKTALGNIKHSKESSHDIQNLILRSNRTLIRQIDKQIDQIKAQIEQLINKDAELKRKVDFILTIKGVGLITVATIIAETLGFEHVKNVKQLVSYAGYDVVQRESGTSIKGKTRISKKGNRYIRNSLYFPAMVACRYNETLKANYIRIIQKKPSKMIGQVAIQRKLLILIYTLWKNQTVYQTDYKKVVPPKSVTKQDRSPEGELL

SEQ ID NO: 332028 - protein, 371 aa, unidentified
MQTSTCVFVGLDTSKLKISVALAEEGRHGEVRFLGDIDSSPDSVRRLIEKLSRKCAKLSFCYEAGPTGYGLHRQITDLGHECTVIAPSLIPKKAGERVKTNRRDALTLARLHRAGLAAIWVPDSGHEAVRDLVRAREAAMEDLREKRQHLQAFLLRHGRIYPGLRPWTKVYARWLANLIFPHQTQYLVLHENRQAIEEAETRLKRLDQHIAQTIPSWSMAPVIAAYQALRGVAFITAVTFVAEIGDIRRFETPRQLMGYLGLVPSERSTGDTVRRGSITKAGNARARRVLIEGAWTYRSPPRVSRPLQVRQEGLSKAVRDIAWKAQLRLCTRYRRLVAGGKRQTLVTTAIAREMAAFLWAIGREVQPADQP

SEQ ID NO: 332029 - protein, 394 aa, unidentified
MKIFVGLDVAKDLHWACAIDQDAKPVFSRSVANDPAGIADMIGQIETLRADEVTVALDLLGGIATLVCAMVAEAGFRLVHTPGLSVNRARQGMRGGENKSDPRDAATIAELARTRPGLRTVDAEREIDVDIRLLIGRRRELVQDQTRRLARLRDLLSSLFPALERRVDVNTKTGLAFLSLYAAPHELRSAKAASVAKKVIRTGPHLRGVLQLAEDVIALAKAQPLDVPGAAMRARLVRDMAAEALAARDARERIDREIGDMLANHPDAALIQSLPGMGVVLTAELIANIGDIRRFRSADALAAAAGLTPVLRQSGKSYAIRRANSGDKALKRVFYQSAFVALATPESRAFYDRKRAEGKRHNQAVIALARRRINVVWAMLTTRQPFAENFKAAA

SEQ ID NO: 332030 - protein, 346 aa, unidentified
MLYAGLDLSRKRLDFHLVDYEGATVEVGAAPPDADGLRGLTQRLERHGEPIRAAIESMNGARFVHDRLELHGWQVEIADAQKVKGVAPLACKTDRIDASVLAELARRDLVPAFWLPDPRVRAERERARWRLHLVRNRSSLKQRVHAVLLTHGKPCPVSGLFGLRGRQLLMRLGLPDPWQGTIEASLRLIDELDREISDCECELRRLGADHPYVPLLCSVPGISWVLAYTIAAEIGDISRFPTSRKLAGYSGLCPRVYQSGERDLRGPLSKQGPRYLRRALVEAATHACTHPIYRDRYQQTKARIGRQRGAKVAQVDLARRLAEAIWHMLSRGERFAPKGATDPLAA

SEQ ID NO: 332031 - protein, 448 aa, unidentified
MRTRKPARAKKMKLPKHLQHINPHAAGIDVGSRSHFVAVPEGSCEQPVREFTSFTDDLHRMADWLLACGVSTVAMESTGIYWIPVFEILESRGLEVRLVNARHVKNVPGRKSDVLDCQWLQRLHSYGLLEGAFRPTEQVCTLRAYVRQRMNLVRYAATHIQHMQKALSQMNLQLANVVADITGVTGMRIIKAVLAGERNPLVLARLRDRRCKSSESTIARSLHGNFRPEHLFSLKQAVDLYEFYQGQIAECDRQILDQLASFDGADASGNGPPESVDEALQRMAGVDLTQIDGIDTNSALKIIAEIGTDMNRWRSAKHFASWLGLCPGTKISGGKVLNAKSKPVANRAAATLRMAAFALFNSKSALGAYLRRQRARLGAPKAITATAHKLARLVYSMLKHGTAYVDEGQKHYEEGYRTRVVQNLKRKAKELGFALVEAVEKQPKLKTT

SEQ ID NO: 332032 - protein, 366 aa, unidentified
MEEVITYVGIDAHKRELHVAMLIGAAATPVTWTVENEPKAIERLHRKLERDAPGPVRVCYEAGPCGYALQRQLTKGRVSCVVIAPALMPRKPGDRVKTDKRDARKLAELFRAGLLTEVRPPTPAEEAVRDLARARDDARDDVQRARHRLGKLLLRRGLQFSGRKNWTQAHRRWIKTIQWEHAAERAVVDDYLLAIDQVESRLVDLDVQLTETAQTEPYREPVGWLRCFRGIDTLTAMLILAELHDFRRFPSARALMAYLGLVPSEDSSGERHRRGRITKTGNTLVRRVLIEASWHYQHRPGVGPGLAGRRKGQPARVIAIADKAQQRLCRRFRRLTAKDKLSTKVVVAVARELAGFIWAALQSPAA

SEQ ID NO: 332033 - protein, 388 aa, unidentified
MRSIGIDVHRDFCEIAIAEGGFVRSAGRVATRPEALNLLGQSLVDTDEVAIEATSNAVAIARILEPHVRRVVLVNPKAVRENTRRAKTDRIDAKMLAQLVAVGFLDAVWTPDDATQTRRRLITRRCALVRARTRAKNQIHAILGRNLLERPPMSDLFGRKGREWLAEQVVALPIDERLSVEAGVRQVDFLSGEIDQLDQILGADAVSDQDALRLMTLPGVSMVTAIALLAAIGDIKRFPTPRKLVAYLGLDPRVRQSGSEPAKHGRISKQGAGEIRGLLVEAAWHAARTPGPLHGFHQRVALRRGSKIATVATARKLVVIVWHLLSHGQEYAFMRPALYREKLRRLELLLGAPRHQGKSVTGRQHLKPDQRQAEREISAQHERAYLSG

SEQ ID NO: 332034 - protein, 306 aa, unidentified
MVNVGVDVGKASLDIVIHEKGLYWRENNTEHGIQRVLKRLSHYRVERLVMEATGRYEFELAHAAYGKGLPVCIAKPLSVRRYAGAVEQLAKTDKIDAAIIAEYAAVVQPRVTPQKSKNLIAIKNLVVRRRQLINLRTQEMNRLKVMGKTFEVSCRRMIRALDSEVERMEKRLANHVAQQAEWTERHTLLNSAPGVGNTLIYTLLADLPELGTLNNKEISALVGVAPINRDSGKQRGKRRVQGGRAAIRTVLYMATLSAIQCNPVIKAFYRKLLAQGKHKKVAITACMRKFITILNTMVKNNTEWAY

SEQ ID NO: 332035 - protein, 348 aa, unidentified
MKELMAGIDLHSNNIMVGIVDGDGKRLAHQKLPCELKRILEFLAPFKKRLQRLAVESTYNWYWLVDGLQGAGYPVVLANPAKITQYSGLKHADDKSDAFFLAELLRLEILPTGYVYDAQRRPVRDLLRRRMSLVHQRTALMLSFKSLFTRTTGEQMSLSRLKTLAVAQAQALYEHPANQLIAGLQIHHIEELDASIGRLEKAVLNVARELPYYPQLKTLPGVGIILGLTITMEIGEIQRFAGPGSFASYCRTVAAQCTSNGKPKGENNGKCGNKYLSWAFVEAANFAKRYDEPCRKWYERKAAKTSQVVATKALACKLAKAAWHLVAEQTDYEPGRMFPQLAGAAMSK

SEQ ID NO: 332036 - protein, 462 aa, unidentified
MGHARARKIPAQLVEDEEYQLRHERVAGIDIAKAKADVCTRMPPQRGGGRRASRVEDVPARAREILALAVRLAADGVELVVMESTSDYWRMWYYLLEGAGLSVQLVNPAHARQLAGRPKTDRLDAQWLARLAEMGLLRPSFVPPPEIRALRDLTRTRLQLVRDRAREWQRLEKLLEGALVKLSSVVHSLAKVQSARAILEAIAGGERDPGTLAALAHPNVKGGRASVAEALEGMALGGHHPMLIRVHLDHITLLDRSIDAVEDEIEAALDAIPAAWGTDAGGETGPGAGRGPDPAILPAAERLAEIPGISPALARAIIAETGLDMTRFQTADHLVSWAGLAPVARQSGPRSRKPKKGQGDAYLRGYCTQAANGAASTDTFLGERLRRLSRRLDGNRARCAVARSILVIVWHLLASPDDRFADLGPGWHQRKADTDRRTRSLLNQLRALHPDAEITITPATAA

SEQ ID NO: 332037 - protein, 418 aa, unidentified
MKNDDYAALVALDWGDKTHAFARQIAGAEDMERGSMEATPEALHAWLEQLRESCGGRPVALAVEAGRNALLHALLEHPWLTVYPVHPATSARFRKAFTPSGAKDDGPDAVVILIRLRLHRAQLEPLVLDTPATRELAALVAARRRLVDQRTRTANQLGSVLKSYFPQALTLAGDDLTKPLARAFLRRFPELAVLQKARPATLSAFYREHHGRSAERIAERLDLAARARPLIQDRAVIAPALLEVALLVDLLEVYAGHMVLLEARIAEVFAAHPRAELFATLPGAGPALAPRLLVAFGDLSARYPSAASLQKYAGVAPVREKSGRQTWIHWRWAAPKFLRQSFVEWAGQTVPRCAWAQAYYHQQEQAGKAHHAILRALAFKWIRILWRCWHDQKPYDEQHYLAALHRHGSPLATALQIT

SEQ ID NO: 332038 - protein, 391 aa, unidentified
MDREGKEVLSACRVEHMDLENWLGKHLLPTDRVVIESTTNAWHVYDLLEPLVAKVLVANPNKVKQIACARVKTDKKDTFILVRLLAANLVPTVWVPPKHVRELRQLISHRRRMAGMHTQVVNRMHSVAHRHHLNHRKGKDFQEKNTLWQRDESLSRLEKIQLELDMQTREHLEKQVVRMTRELARMSHEEPWASEMLYLMQVPGCGVVTGMTILAAIGDISRFETPKALASYSGLVPGVEQSGVKLRGKGITKEGRKELRWVMVEVAWRAVKADPHWEKYFETLQKRMHKNQAIVAIARHLLTMVWYVLTRHKPYSHYSPERIAYKYLTWAWALDKEQRQGMTNPQFARYYLMRLGIGKDMERVALNPKFPYKLASVEEVLELRPELRPPE

SEQ ID NO: 332039 - protein, 413 aa, unidentified
MDVIHERCGGIDISKADVKVTIRVPGSGKRRRSETRTFSSVTSGLLAMRDWLLAEQITVVGMEATGVYWKPVFYLLEHEMECWLLNARHMKAVPGRKTDVKDAEWIARLVEHGLVRASFVPPEPIRQLRDLTRYRTEVIRERTREAQRLEKLLEDAGIKLSVAVANILGVSGRAMLEALIAGERDPQVLADLAKGIMRRKTDTLIEALTGHFTAHHAFLAWAMLDRIDACTAMEKRLDARIDAHIAPFRRRIELLVTIPGVSTRAAEVILAEIGDDIARFPTAADLASWAGVCPGNNESGGRRGPGKTRHGDPWLKAALGQAAISASRTKDTYLAARYRRLIARRGKKRALVALEHSILVSVWHMFTRDTAYADLGGQYFLERTGRARQTRRLVSQLNQLGYQVTLQQAEGAA

SEQ ID NO: 332040 - protein, 422 aa, unidentified
MLEPTSDDERIVERIAALDIGKAELVCCLRVPDPKAPGKRLQEVSTYSMMTRSLLVLCDRLRQAGVTRVIMEATGEYWKSPYYLLEAAGLDPWLVNAKDVKHLPGRPKSDRIDSVWLCKVGERGMLRPSFVPPPPIRVLRDLTRYRSDLVGVRTAEKQRVEKLLEDAQIKLSVVASDIFGVSGRDMMAALIGGERDPKVLAQLARARMRAKISELEEAFHGRFTDHHAFLLAKMLARIDALNADIAEVEDRVEKQIAPFADAVARLDAIPGINPTTAQVIIAEVGVDMTRFPTAAHLASWAKFSPIISESAGKKKGKNATGKGNRYLARALGEAAVSAGKTDTFLGERYRRLARRRGKQKAIVAVGRSILVIVWHLLSDPPVDFVDLGPNFYDTRGGTQRAVRNHVHRLQELGYQVTLSPAA

SEQ ID NO: 332041 - protein, 360 aa, unidentified
MKDSIREINEIPELTMGLDLGDKFSYYCIIDKSGQNVEEGRVKTQRRAMERFFKSQPKMRVVLETGTHSRWVQAIAKEQGHQEIVANPRQVRLISQNRKKSDRKDGELLGRLGRVDPELLYPIQHRGEAAQADLAVVKARDELVRARTRLVNHIRGSVKAFGERLPSCSTEAFPHRVQLHIPGCLKMALEPLLEMIQQLTAQIRQYDRQIQQLCQQKYADTENLQQVRGVGPITDLAFVLTLEDAHRFGRSRQVGAYLGLTPRQDQSGNRDPQLRITKAGDRFVRKLLVGSAQYILGPFGSDCDLRRYGERIASRGGKSAKKRAVVAVARKLSVLLHHLWITGEKYEPLYNSKEYLEGVA

SEQ ID NO: 332042 - protein, 392 aa, unidentified
MQVVADRAEAPPAIQTDLRAIFVSLELSRSRWLITSLSPGGGEKMSKHSVQASDIAGLLKRFAQLKEKARTRTGRDFPIIVIQEAGLDGFWIHRVLQSEGIESHVVDAASILTSRRRRRVKTDRIDGETLVRTLMAFKRGEPRVCSMARAPTPQEEDRRRVCRERRTLVGERVQHVNRIKGLLFAQGVFGYEPLRKGRRDRLEDLRTGDGRPLPVHLKAQIIRELDRLEVLLEQLMTVEAERDALLKPASDEAASPPAMLARLKGIGRETAAVLWSEGLFRQFDNRRQVAAYAGLAPTPWQSGSIDHEQGVSKAGNPRLRTTMVELAWLWLQNQPTSALSLWFHERVRRLGGRMRKTTIVALARKLLIALWRYTTAGVVIEGAVMKAATATI

SEQ ID NO: 332043 - protein, 312 aa, unidentified
MTEIICGVDVSSQALDARIGRDGAEVQVAATPEGVATLAVFCREHRATLVVMEATGGYEKLVHALLWSHGIPAAIVNPRSVRRFAEAMGFLEKTDRIDAGVIAWYGAVKGIVAQAPASEAQERLKALVTRLRQLTELRIMQANQRRLVADPEVNGLFSDMMALIARQSRELETKIAALIGRDPTWCKLDECFREIKGVADRTVARIMAEMPEIGTLSNKAVGKLAGLAPLAKDSGKHQGKRVTRGGRANLRNILFVVVENVRRYNPTFVALNERLIKAGKPKKVIRVALARKLLVQLNAKARDARKELALAP

SEQ ID NO: 332044 - protein, 461 aa, unidentified
MNRERSKKKQKRAGQGGAVPSLNCIEPNAAGIDVGATEIFVAVPQDRDLSPVRSFETFTQDLHRLKEWLQQCRITTVAMESTGVYWIPLFQILEEAGLEVCLVNAQHVKHVPGRKSDVIDCQWLQYLHSVGLLRASFRPEDRVCVIRSLLRHRDSLVQMAAAHVQHMQKALTQMNVQIHHVLSDITGQSGLAILDAMVAGERNPLVLAQLRHSRVQASEEEVVKSLVGDYRREHLFTLRQSLEAYRYYQRLITGCDAEIEQQLQNFDGHLPPDAPALPPERYPHPQRKNEFRFDMRSELYRIFGVDLTAIPSINALTGYTLLAEVGTDWSKFRNLQAFASWACFCPQNNKSGGKVLSAKTRRSANRVNRALRLAAQTLERSTSYLGIFYRKMCARLGRPAGITATAHKLARIIFHMVTTRRAYDETIFAAEEQRQRKHLESSLRRKAAKLGYQLIPLPQTA

SEQ ID NO: 332045 - protein, 351 aa, unidentified
MTCKKDVAVVRTIGIDTGKNTLHMIGLNEKGAIVLREKVSRDRIAARLVNIPPCLIGIEAGMATHYMSRDLLALGHEVKQVPPAYAKPFRQGHKNDFRDAHAVAEAVQRPSTRCVPIKTDDQLDLQALHRVRSRLIGDRTAVINQVRGFLLEHGIAVRQGPRSLRQQLPQILATRTDVLSPRMLRIIEDIVDDWRYLDDRIERVTDEIEGLARTDVNCGQLISVPGIGPIIASATVAAVGNGTAFAKGRDFAAWLGLVPKQMSTGDRTILGRITKRGNRYLRMLFVQGARAILLRPKSWAKYSFGPWLMAAARRLHRNILTIALANKLARIALTVLVQGRSYESRIVPAAA

SEQ ID NO: 332046 - protein, 461 aa, unidentified
MSRKKPTGKQKGSAQKRVDWKALEIVHPDAAGIDVGGSEHWVAISPDRDPEPVRRFGCFTADLREISRWLIEKGVRSVAMQSTGVYWMPVFEVLERQGLEVYLVNAQHTKNVPGRKSDIQECQWLLKLHAFGLLNNSFQPTDEIRIARTLWRQRSNLVAEASSVIQRMQKVLTEMNVQLSNVLSDLSGLSGMKIIGAILEGERDPWKLATFVEPEVQATAEDIAKSLEGNWREELLFVLRQHVEFYRIYQQKITDCDLRLRKHLESLGSKVDLKTQPIGHRPKGKKKSKNAPGFDLRTELYRITGIDWTQINGIDVLTAQTVIAEAGADLSAFPTEKQFASWLGLSPTNEQSGPRILNRRTRKVVNRATVAFRNAALTLLRSQSYLGAQYRRLRTRLGAPKAITAMARKLACLFYKLIKHGQPYVDKGTEYYEAKYREQQIRSLAKRAQKLGLQLVIPKTA

SEQ ID NO: 332047 - protein, 387 aa, unidentified
MPQVDDLSRSLVAFDQDATLIVVVEMSEASWLVAGMAPGVDRQPLKKLGPDPDALLRLVERWRDEAVKAGKMIERIALAFEAGRDGFWLARWLQARGIEVHVIHSTSVAVSREHRRAKTDRLDTAMLMRVFLGWLRGERGHCGMVAIPTLEDEDARRPSRERESLVGERTRIINRMKAILAWLGVRGFNPKLRKAPQRLDDLRTPEDLPLPPNTVHELRRDMARLAMVCEQIKALEQARLANLEQAPGTGPHAMVRLIANVIGVGIETADMLVQEVLSRNLRDRRAVARFAGLTGAPNESGSRRRERGLAKSGNARVRRGLIQLAWRFLRFQKDSALAQWYRMRTEGPAAARRTKMIVALARKLLIAFWRMVMVGEIPAGFALRQPG

SEQ ID NO: 332048 - protein, 372 aa, unidentified
MNYNTVYVGMDVHKESFSLCAYTIEAEKASHYQRTEADYKKVLNYLEFLRTIYGDDANFICGYEAGCLGYTLYHQLTANNVKCIILAPTTMLEQRSKKRIKTDKRDAEIIAKCLAQHNYSPVHIPTAKDEETKEFLRMRDDHKLALKKIKQQILAFCLRHNYRYDGNSHWTAAHLKWLKALTPEALYKEILDEYLLTYQTLSDKLERLDKRIEELSAQDEYKEAVKKLRCFIGVKTHTALSVLVEVGDFKRFASAQHFASYLGLVPGEDSSGDDQNRLGITKAGNRHVRLLLTEASQCYARGQVGFKSKELKSRQSGNTPAVIAYADKANERLRRRYYKMVLNKYKKHNVAKTAIARELACFMWGMMTDNIA

SEQ ID NO: 332049 - protein, 274 aa, unidentified
MDETTTIGFDVAKQIFQVHGISGDGKVTIKRQLRRSEVLRFFGKLTPCRVGLEACGGSHFWAREIRGLGHDVRLIPPAYVKPYVKRGKTDAIDAEAICERLPPDSRMALKMLADQIDALTERAEALERQIVSEVRADDTMRRLSTIPGIGPITAATIQALVPDPGAFVSGRHFAAWVGLTPKTNSSGGKERLGRISKMGNPALRSLLVVGATAVVAHVRRGATISPWLTALLARRPAKVAAIALANKMARIAWALLTKGGIFARKGTTNEHAMA

SEQ ID NO: 332050 - protein, 356 aa, unidentified
MSREVKYIGLDVHKEAIVIAVLNTKGHQVMESIVETKASSILQFIHGLQGELHVTWEEGTWAAWLYDLLQPQVQHRVVCNPRRNALLKEGSKSDKVDAGKLADLLRSGMLRPVYHGENGLRTLRELGRSYQTISKDLTRVMNRLKAVYRGWGIACAGTQVYAVRCREEWLSKIPHAGVRRRAELLYQQLDGLQALRRELRPEFLAESRKHKAAKLLRQIPCIGPIRAARLIGLMQTPHRFRSKRQLWTYSGLGIETHDSAQYCFVRGQVQRSKKPQQVRGLNRNHNHEMKEIFKSAATRASCGTGPFHDFYTGLLAKGMKPEMARLTLARKIAAITLTLWKKEERFDVEQLKTQAA

SEQ ID NO: 332051 - protein, 400 aa, unidentified
MSGLKGSFDCFVGIDVSKDKFDACGITGEEVKLFQISAGMDRKGFEKLKGHLASVSVSSVLIGMESTASYHVNLFSYLVSEGYKVILINPLLISNYVKMQLRKTKTDKKDAVVIAQFLLANGDTLIQRITPSLISDLRDLSRQRESLVDEMTSLKIEIKQLLNITFPELEHMVGIFTKSILNLLQQYPSAFALRDADLDQLSQMLIADSYGHKREAFAAALIKAAHSSIGINSTAKEIILKQKIALLLHLEDALQEITGMLIEMARKLMEEDINIMTSIKGIGDKTATNFLVEMGGDINQFERSGKIIAMAGLDPAVYQSGKHEGKGRITKRGNRHLRRIIWLMTTKVIQYTDIFNAYYQKRRKEGLPYKMAVLATAHKLIRVIYAMLTQRTTFYPQMNS

SEQ ID NO: 332052 - protein, 366 aa, unidentified
MRVYIGVDFHARQQTVSYLTTEDGEIHQIILDHQKDDISGFYSQFEGEVVVGMEVSGCIEWFEEMLLRMGHEVWVGDAAEIRRRARRRQKNDKRDSMLILDLMVKGEFPRVHRQTTESRQVLKQLRYRHRLVKIRTIAKNNVQSLALSGGLLAKRQYIRKWREELRRLEREPMLGEQAKQLVKVIEDVTVEIKRVEQWLGKQAEADHRVMLLQTHPGIGLLTSLVLVHTLWPVERFRNGRKVTAYLGMDPVEDSSADRIRIGSISKQGSRLARYLVIEAASTAAKFDKELKCFYRRLMNRQGKPKAKVAVGRKLLVRCFIMLRDQIDYDEFLRRGVEVRSSRKATGPGMPEPVIGRPTSLKIERAN

SEQ ID NO: 332053 - protein, 349 aa, unidentified
MKIIGCDFHPSYQQIAVLDSVTGEMVEKALSHERKEEVRAFYAGLEGPVRVGIEASGQSQWFERMLAELGHEVWIGDAAKIRASCERKQKTDRRDAELLLRLLAEDRFPRIWVPTAAERDDRQLLLHRHKLVRLRTQVKNQLQAQALNQGVQRKRKLWSEAGRKQLESLPLLPWASRRRAELLQLLDQLEASISELDRAVAEQASARPAARRLMTHPGVGPVTALAFALTMGPAERFQRGKQVASYLGLIPSEHSSGGRQQRLGHISKQGNPFLRGLLVEAAQSAVRYEPEMRRAYQRLAQRKCRALAKVAMARKLAVRLYWMLRLQVNYAQLIQGSHAGQPGTFCGRG

SEQ ID NO: 332054 - protein, 335 aa, unidentified
MKKIHVGIDISKEKCNLCYRDGLEIVREEECSNDVKALKKAFKAALKALGASLEEVLVCAEYTGRYIYPLTVACQELDIFLWMDDPTRIKNSMGLTRGKNDAIDAARIAEYAYRYSDKAVRYCIPDAALVSMKNLLSDREFLLIDRKRYQSQLTDQKKYMAPGDFKHKNSRWRKVIKSIDEQIAAIDAEIDALIAADPVLARQKELLVSIDGIGPRIAINMIAITGGFTRFQTARQFCSFAGLTPYKYDSGTSVRSKAKISKRANQTMKALLHMSAVNVATRMKSGEYKDYYERKFKEGKHVMCIMNVLRAKLVHRMFSVIKRNAEYTKEYNPAC

SEQ ID NO: 332055 - protein, 339 aa, unidentified
MIACGFDVHRAQITFDLVDHETGELRRGRVVPATRAQLRVWLSGVDTSRLVVAVEGTTGWRFVAEEVEAAGARAVLAEPGETRALRGPKRRAKTDRADARWLRELLERGELLLSWIPPQHLLELRCRVRLRQTLADERRGWLQRVHAQLFHHGIPVAGELAKPAAREWLQTAELSPAGRTAVETALATVDFLDTQLATLDDELHRYARAHPATRALVRLYGVGDLTAVAIYAAVGDARRFSSARKVIRLAGLDVTVHESDRKRQPGRISRQGPPMLRWAAYEAGLAACRSSSPDHADYLALRARLGHKTACLTVSRRVLRRAYHALVAVGDATLEPAPS

SEQ ID NO: 332056 - protein, 389 aa, unidentified
MQFYTKQHKSYCGIDLHARSMYVCVLNQDGDIVMHRNMKASPDTFLRTVAPYRDDLVVAVECVCTWYWLADLCAQEGIPFVLGHALYMKAIHGGKAKNDTIDAHKIAVLLRGGMLPQAYVYPAEMRATRDLLRRRMYLSRKRAELLAHIQNTNSQYNLPEIGKKLAYKANRDGVAERFPDPAVQKSMEVDLALIGYYDHLLSDMELHIVKAAKQHDVQTLYLLQTVPGIGKILSLVLLYEIHDIQRFPRVQDFVSYCRLVKCAKESAGKRYGTSGSKIGNADLTWAFAEAAVLLLRDNPAGQQYLARLEKKYGTGKALTVLAQKLGRAVYDMLRRNTGFDRDNLLHGEGSGAGEPAASLGHYGTSRVTVLCNKTSTASTNAHEHIGALS

SEQ ID NO: 332057 - protein, 320 aa, unidentified
MKPSRDAIKTLSRVLGVDVAKASVVLFDPISGRAWTAANQLPSLIEALAPFADYELMVCEATGGHERGALEAARRVGLAAHRADAAKVKSYIRSLGGAAKTDAIDARWLSRYGQERGGGLARWEARQAGRDALAALVRLRHDFVAQRTAAKNRRSAPGDELCAAFLDRQIRFLDSEIGALDQAIARQIDADPSLAQANQRLRRRKGFGEVAASTLLALLPELGQVNRRQAACLAGLAPHPRDSGQTFGRRTIARAGRDGLRPVLFMAALSAVRHDPALKAFYQRLVGAGKPKRLALTAVARKLVVLANALLKPAPDLAPA

SEQ ID NO: 332058 - protein, 390 aa, unidentified
MFIVAVDVAKDKHDCFISNSDGEVFFDVFTIPNSQDGFDDLFCKIRSVADSLQNVKVGLEATGHYHLNLLGYLLDKGLHTCLINPLQTSLFRKSLSFRKTKTDTVDARAIARLLMSDRTLQPYSLTSYHNEDLKSLTRYRADKVRERAKLKSSLARLVVILFPELEKHVPKLHMATVYDLLHEFPGASYIASAHLTRLTHLFADSSRGRYGKDDAIRIREAARHSIAADFPAKSLELRHTINHIRFLDNEISEIESQIFAILDENPPKMLTIPGMGPRMAAVIAGEVGDFNRFPSPDKLLAYAGLSPTIYQSGQLTSSKARMEKRGSRYLRFALFNATKYVCFWDPTFRAYLDKKRAEGKHYNVAISHAAKKLVRVIYHLETTGENYISR

SEQ ID NO: 332059 - protein, 335 aa, unidentified
MKNDKGTIAGIDVSKKTFDIAVGANASGASTTKACFANNMKGYEDLGNWMEDQGIAFEDVLFCLENTGIYHRALAAHLISKKALVWVETPVQIKWSMGIQRGKSDTVDAARIRTYALRNQEEVIAYEQRDETVQRIADHMALRERLQQCIKTLSVPIKELRSAGLDEAADTCKKASQKSIDTMKEELEELDKEIRVLIKKDPELWEKYQHATSVRCVGFVAAAYLIVYTNGFSRFESAKRLASYAGIAPFEHSSGTSIRGRTRVHPMANKTLKTVLHMCAVSSVKHNPEMVKYFQRKVAEGKNKMSVLNAVRNKVVHRVFSCVKNQRTYQMEYTA

SEQ ID NO: 332060 - protein, 386 aa, unidentified
MTKRKESHVDIPVLDVLEQINIHAAGLDIGSEEIYVCVPADRDEPSIRVFPTFTADLHALADWLAACQIETVAMESTGVYWIPIYEILESRGFEVYLVNARHVKNVPGRKTDILDCQWIQQLHTYGLLRASFRPSEEICSLRALARHRDNLIRYRSTHIQHMQKALQLMNVKLTQVVSDITGVTGLSIIRAIVAGERDPHHLASLRRSGCAKTKEEIAKALQGNYKPEHVFVLKQALAQYDFYLDQIRECDAELEARYAAMPPAPPDDQVSPPPKPVRTKRRKNQAHFDLATALYQVVGVDLTAIDGIDALTAHAIITEIGTDVNAWPTVKHFTSWLGLAPHNDKSGGQILRSRTKKTKNKASLAFRLAAQSLSRSQSAVGAFYRR

SEQ ID NO: 332061 - protein, 321 aa, unidentified
MAIPVQPLLIGVDVSKATLAICLGPDQPVQSLDNDRKSITRWLATLPAGPACIAAEATNTFHLDLVDLAHHAGHAVYLVDGYRLSRYRDSIGTRAKTDASDAQLLQRYLAHERDSLRPWIPPPKGYRTLQQLLQRRATLVRARVALQQSLADLPGLKQAAATLFRQLKRIDQKIQQGLIDTLAQLDWDTDFKRCQGIEGVGPLTAAALTMSFHRGAFRSSDAFVAFLGLDVRVRDSGQLRGRRRLTKKGNPELRRLLFLAAMQAARSRSWKDFYQRHLDRGFSRIQALVVLARKLARVAFALLKNQSEYQPRYLKETCMET

SEQ ID NO: 332062 - protein, 356 aa, unidentified
MVTGLKHQKEKRSMDHFAGLDVSVKETSVCIVDDTGKIVREMKVASEPEALLAVLKNPTYHFKRIGLEAGPLSQWLYSALAEAGLPVICVETRHMRAVLKAQINKTDRNDARGIAQMMRVGLYRPVHVKTLRSQKLRMLLTHRKLLQSKAIALENDLRGTLRNFGLKVGIAGKIKFEARIKELLENLPDLADLVEPLLVVRRVLREQLGILQRRLLAIVRDDEVCRRLMTTPGVGPVVALTYRATVDVPARFRKSKSVGAVFGLTCAKYQSGEIDQSGRISRCGDEMMRVMLYEAAQSMLLRSTRWSWLKAWAMQIARRRGMKKAIVALARRLAVIMHRIWVDRTEFRWTREVAAV

SEQ ID NO: 332063 - protein, 340 aa, unidentified
MEKASMIGLDIAKNVFEVHGRSAAGEVVVRRSLKRGQVEKFFAKLPAAVIGMEACGSAHHWARVLGKLGHEVRLMPPAYVKPYVKRNKSDAIDAAACWEAVGRPDMRFVQIKTVEQQAALSLHRSRDLLVSQRTQLANALRALLSEFGIVAGKGRAGLARLVDELRTGTLELPADAVVAATALADQRAALDAAADALEHRITAQAKADKKAGMLQTAPGVGPLSAHATLATLPDPALFKSGRDFAAWLGLTPRLNGTGGKTRTGAITKQGNSPLRRLLVLGATAWLRQVKARPEKASPWLRGMIARRPSKVVAVAQAARTARILWAMLSHNQPYRAPAIG

SEQ ID NO: 332064 - protein, 358 aa, unidentified
MQTQRKELNFEGQNIYVGLDVHLKGWNTSVFTDKLHHKTFNGPPKPEALKEYLSSNFPNGNYFSAYEAGFCGLWAHYRLEELGIHNIVINPADVPTTQKEQMHKSDPVDSKKIGRSLRANELTGIYIPRVETLEDRSLIRVRSTIVKDMTRIKQRIKSMLYFYGTEFPKEFENGNGHWSKRFIIWLKSIEFQYSTGTDSIQIWIKQAEQQRLILLEATRKIKELSKSEHYAKNIELLRSIPGIGLITGMTLLVEIEDIHRFENSDKLAGFIGLIPTCHSSGENESRGEMTPRRHKSIRKNLIESSWIAARRDPALSLSFSKLCFRMESTKAITRIARKLVNRIFFVLSNQKEYEYKIV

SEQ ID NO: 332065 - protein, 419 aa, unidentified
MSFKILKFNCCGLDVHKTWIYACIGITDSNNRTEYKQARFSSFTKGLNELCDWLAKYNCKDVCMESTGKYWIPVFNILEQHNLWVTLSHPKYTKPMKGNKTDRKDAKWICDLYMCGMVKPSFIPPADIRELRDLVRYRYKLTCMITGEKNRAQNCLTVSNLKLDDVFSDVFGKSSRSITEQILQHPGEKFDVAPFVHGRCKTPIEEIQAAVDGAISKEQAVKLRQCLDHIDELNKHISELEQEILRLSDKYEAALNLIRTVPGFDKNPMTAVQILSEIGGDMSVFPTAKHLVSWAGCCPRNDQSNQKIKSTRISRAGSYFKPVLVQVANALIKSKKHLEFTNRYKRIKARRGHKKAIIAICRMILTAIWHILSDLKPYTPEGFLESHPVKEGKVLSSSQALNFFKQRGYIIKDEPLSVS

SEQ ID NO: 332066 - protein, 342 aa, unidentified
MDHFAGLDVSVKETSVCIVDDAGKIVREVKVASEPEDLLAVLKNPAYHFNRIGLEAGPLSQWLYSALAEAGLPVICVETRHMRAVLKAQINKTDRNDARGMAQMMRAGLYRPVHVKTLRSQKLRMLLTHRKLLQSKAIAIDNDLRGTLRNFGLKVGVVRTVKFETRIRELVANFPDIAAMVEPLLIVRRVLREQFCVLHRRLLAIVRDDEVCRRLMTAPGVGPVVSLTYRATVDVPARFRKSKSVGAVFGLTCAKYQSGEVDWSGRISRCGDEMMRVMLYEAAQAMMRSNKWSWLKAWAMQIARRRGKKKAIVALARRLAVIMHRIWVDGTEFRWTREVAAA

SEQ ID NO: 332067 - protein, 361 aa, unidentified
MKIIGCDFHPSFQQIAMIDTETGEMIQRRLLHADGEARRFYESLTGEVVVGIETSGNTLWFERLLEKLGHKLLIGDATAIRAASPRHQRCDPRDARNILQLLLEKRFPSIWVPSMGERDLRQLLKHRHTLVQMRTRAKNQLQHIAMNQGLQKKSKLWTKAGMEQLKNLELEPWTKRRRDDLLEILEQMDTRIAELSREVEVEARGCAKAVLLMSHPGVGPIVALATVVTLGDVSRFPRAKHVASYLGLIPREDSSGEHRRLGSITKQGNSFMRFLLVQAGMSAVRGDAELGRVYKRLAQRKHHGVAKVAVARKLVLRLYWMLRTNKRYPEVVRMQGSSSHSVVEVMADRLSERPASRRSTQ

SEQ ID NO: 332068 - protein, 414 aa, unidentified
MDVLHERCAGVDISKKDAKVCVRTPTAKRRGSFTTETTTWGSTTNAVLALRDHLLAAEVTLVVIEATSDYWKPFYYLLSEDLAVILVNARQVKNLPGRKTDVSDAAWLAQLGAHGLVRPSFVPDQPVRELRDLTRARTQLTRERGQIVQRREKLLEDTGIKLAAVASDIMGVSGRAMLEALVSGEREPQTLAELAKRKLRNKIPELTEALTGCFRDHHAFLVRLHLDHYDQLTDAVGQLDARIEEAMAPFRGALDLLDTIPGINRAVAEVIVAETGGDMARFASARHLASWAGVCPGHHESAGRTKNTKVRPGNPYLKGALGLAAFGAVRTKDTYLQARYKRLTARRGPLRALVAVEHSIITAIWHMLTDHVTYREPGGAYFTQRDPERATRRAINALNQLGYTVTLNPLGTTA

SEQ ID NO: 332069 - protein, 363 aa, unidentified
MKKSTKGARREVKIKWDEVAAIGVDLGDRFSQFFCVNAAGERIGEGRVPTMAAAMEKEFGSIGPKQIAIETGTHSPWVSRLLARLGHHVTVANSRKLRLIYENRRKNDRVDAEYLARLVRLDRKLLCPVEHRNERAQQHVAVVRARGVAVAIRTTLINHVRGAVKSIGMRLPKCSAEAFVKRGSGAIPAELTSALEPLLALITSTNEQITKYDRSIERLFEDEYREVKVLTQIAGVGPLTAVTFAVTIGDRKRFARSRTVGAWVGLTPGQRASGKQDPQQRITKEGDEHLRSLLVNCAHYVLGPFGPDCDLRRHGLAIAARGGANAKKRAVVAVARKLAVLMHRLWCTQGVYEPLRNATSIAA

SEQ ID NO: 332070 - protein, 434 aa, unidentified
MGELKKILENTAGIDIGSEKVFVAVEGKSVRNFRTFTSSYKELCTYLKENGVRHVAMEATGIYWCTLYDILEQAKFNVCLVNPSDTKNFPGRKTDVQDCQWIQTLFSYGLLKKSFVPQDIVRKLRVYTRMREDKLQMGASHINHMQKSLVQMNIRLPEVLSQTHGASGMAMISAILKGERDAHVLLSYCTSDLRKRKGADILLALEGNYKEEYLFELKQAYDGYLFYINQVKLCDVEIEKILREFDSQSNTNFRDNKKPKAVRHNKPDINKLHDLLLGIHGSNATVLPGITDYSLMRLTAELGNNIYQWPNVKSFVSWLGLAPGKNQSGKMNKRSKKRAITRGGQIFKQAAQSMLASSKLGIGVFAKKLKARRGAGIAIKATARKIAELYYNLTKHGLNYVETGIEFYEQKQKEQQLKYLTKKANELNLQLISY

SEQ ID NO: 332071 - protein, 364 aa, unidentified
MDQVVECPAALDVHKAQVTACVRTPGENGRRREEVREFKTTVRSLLALRDWLAGLGVTTVAMEATGVYWRPVWAVLEDEFELLLCNAAHVKNVPGRKTDVGDSQWLCQLLEFGLLHPSFVAPKPVRELRELTRRRRTLVRERAQEANRLHKSLEDTGIKLDCVASDILGVSGRAMLDALLAGQRDPQALAGMAKGRMRVKHSALIEAFEGCRFSSQHALLIGGILRHIDFLDGEIAALGDAIEAHIATEGDQGPKRPFELAVRLACSLDGIQARTAEMLIGEFGTDMSRFPSDAHFASWAAQCPGNHKSAGKRRSGKTRKGPKWLDGALHDAAMGAMVFTKTPYLRPSSASVFEKPTSPSFAAA

SEQ ID NO: 332072 - protein, 341 aa, unidentified
MSIVGGLDIHRSQVTFDYLDTATGEVRCGQVRPADREHLRAWLARFAGQDGDFAMEGCTGWRYVAEEVAAAGLRPHVADPAELAALRGRRRHAKTDRADARFAREQLQAGRLPECWIPPPHILECRALLEAYHDLRAEHTAWLQRIQAVLFHQGAPHPGSLTAAGGQDRLAEAAAGLSAAGQAQVANALAMTAACEQRLETTRRQVAEAARHLTGARALQERIYGAGPATALALACWLGGAGRFSSARKAVRFAGLDVTVYSSAGKRAPGHLSRQGPAVLRWCAYEAGKTHAHTAAPDHAYYAAVKDRIDGKRASLSEARKIIRRAAHILAELGDDALAPC

SEQ ID NO: 332073 - protein, 423 aa, unidentified
MGQWGARGVVSLTDRTSIDGNTKVDKAQTAWAGIDVGKTHHWVCVLDAEGNKLSSMKVANDQTEITATIATVGALADRIVWAVDIIGAPSAMLLALLIQAGQSVRYASGRVVAAMSAAYSGEGKTDAKDAYVIAETARIRRDLTVIDPGTDLVRNLELLTGHRADLIADRVRMINRLRDVMTSVFPSLEREFDYSSCKGALVLLTGYASPERLRRVGETRLAGWLQRRRVRNYAAVAARAIAAARAQSVTLPGQEIAAAMIAELATNTLALDQRLTELDAQIAATLDEHPQAEIIQSMPGFGPILGATLLVAAGDLAAFPNAGHLAAAAGLVPVPNDSGRRTGNLHKPRRYSRPLRHVFYLSAQTSMMRDGPNRDYYLKKRDRGRTHTQAVIALARRRIDVLWALLRDERIYTAIPPTLAQAA

SEQ ID NO: 332074 - protein, 388 aa, unidentified
MNVGADKSEPLTAIHTDLGAIFVSLELSRSSWLITSLSPGGGEKMSKHSVPGGDFAGLMERFAQLQEKARLRTGQSFRIIVVQEAGLDGFWIHRALQNEGIESHVVDAASIATSRRRRRAKTDKIDGETLVRALLAYKRGEPRVCAMVKAPTPDEEDRRHLCRERKALTAERVRHVNRIKGLLFSQGISGYQPLRRDRRQRLEELHTGDGRAFPQHLKALVNRELDRLELLLKQIKTVEAARDALLAVGQTAKPAPAAMLLDIRGIGPEFAAILWSEGLFRHFENRRQIAAYAGLAPTPWQSGAVDREQGVSKSGNPRLRTTLIQLAWLWLRNQPRSALSLWFHERVRRNGGRLRKTTIVALARKLLVALWKYVTAGVVIEGVTMKVA

SEQ ID NO: 332075 - protein, 345 aa, unidentified
MNVTTIGIDLAKNVFQVHGVDERGQAVLRKQLKRSQVLQFFVNLPACLIGMEACGGAHYWARELTKLGHTVKLMAPQHVKPYVKRNKNDARDAEGICEAVSRPTMRFVPIKNAQQQALLGLHRARQGFVKARTAQANQIRGLLSEFGVVIPKGIHCIAQKLPQIVQDADNGLPAVTRELFSGLLEHFRQLDRQVEQLQAQIQVWHRDDPQSRRLQAVPGIGPLTASALVASIGDARMFKSGRQLAAWVGLVPRQDSTGGKERLLGISKGGDVYLRTLLIHGARAVLRHLDRHPDQAQGWLGRLAARRNPNIAAVALANKNARIVWALLAHGREYQSHYSQAVARA

SEQ ID NO: 332076 - protein, 352 aa, unidentified
MSRKRTDAALVFIKPDRLQAPNTSAHAQAGDAKTMSESQVVVGIDVAKAHVDCAVLGADFGARQFANDIDGHSALAAALQPLSVALVVMEATGGYESALACALQAAGLAVAVVNPTRDFAKGIGRLAKTDRIDAEALAELAATLARRRDLARFIRPLPDAQQQELAALVTRRRQLLTMLGAERLRLQLATVKVRPSIDALIEAIRAQLEDIDAQMQAHLQEHFAALDDLLRSARGIGPIASATLIATLPELGRLSRREISALVGVAPMANDSGTSHGRRRITGGRFQVRRVLYMATLTATIHNPTIKAHYQRLLAAGKLPKVALVACMRKLLTMLNAMVRTQRRWSDEFHRA

SEQ ID NO: 332077 - protein, 384 aa, unidentified
MKTNSSAPQALYLGLDVHKAETVIAILEADREAEPRHYGTVTTSQHALERAMRRIAKNQGRKLCDLHVCYEASGCGFWIARRLIQMGIRCEVIAPSLIPTKSGDRIKTDKRDAMKLARSLRANDLVAVNIPDSTDEAIRDLCRARTDVVDDLRRAKTRLLALLRRLGYKYDGKTHWTEAHKRYLRHLTLPDPAHNIVLEDNLRTVDFNSERIAKLEDAMLKLLEDWQRKPLVDAMMAFKGFQLVAAMVTVSEIGTFSRFEHPKKLMAFLGLIPSENSSGTSKRQGAITKCGNPHARWILIEQATHYRVPPKVSAALSKRQEGQATWIKDLSWGTQMRLSHRFKSLKKRQLHHNKIKVSVARELCAFLWELGTRIEASQEAAPKQ

SEQ ID NO: 332078 - protein, 386 aa, unidentified
MIVIGADTHKGSHALAAVDEGTGRVRGQREIKAEEPGHLAAVRWARDLDADRVWAMEDCRAVSRRFEQALLAAGERVVRVAPHRMGDSRKGERQPGKSDQIDALAIARAVVKDGVEQFPIAYLDEQAMEIRLLLDHRNDLVADRTRTVNRLRWHLLQLCPELERSVKRGSFNQSRVLDRVDRRLRQMPAGAQVRVARDQVARIRQLNRQAEQLKRELLELVKAYRPQLLAETGCGPLVAAILIGRTAGAERFRSDASFALLSGTAPIPCSSGQRTQHRLNRGGDRQLNHALHIIAITRASHDPETKAYLARKEAEGKTTKGALRCLKRALARRFHHLLAEPPADQPQAVDGQPANKPDRPAIPERSRPRREVEQISAAPNPTVCII

SEQ ID NO: 332079 - protein, 337 aa, unidentified
MNNSVIGLDIAKNIFHMYTFVKGKHIKKKLKRTELLAFFVNYPASLIGIEACGSAHHWARELTKLGHEVVLLNTRFVKSFVIGNKNDFNDAAAIFDAVTRPNKRVVTVKTIEQQDVQLVHNIRQGLLGNRTALVNQIRGLLSERGVIIPKGINNVREQLPLILEDAENNLTSIAREMFSEQYENLRKLDDEIKEQDRRISRLCNNNELSKRFLKVPGIGLMTASIIASDVGNGKGYPSSRDYAASLGVVPRQHSSGGKLVYLGISKRGNKYIRTLLIHGARSVIKNSNKKKDKLSLWLQSLVERRGFNKAAVALANKNARILWAMATQEKEYDALLV

SEQ ID NO: 332080 - protein, 412 aa, unidentified
MLFVGDDWAETHHDIEIQDETGRRLVRRRLPEGIGGIAQLHELIGQHAGDGDDADDPARVVIGIETDRGPWVQALLAAGYQVFAINPLSVARYRQRHVTSGAKSDPGDAKVLADLVRTDRQHHRPIAGDTELAEAVKVLARAHQNVCWMRGRQASALRSTLREFFPGALAAFDQLTHPDALAVLQMAPTPAAGRRLSRSKIATALRRSGRQRNVEIRAEQIQDALRAPQLEQPPLIADAFGASVAAYVAMLAATVAQARALEGQLEASFGQHPAAEILQSQPGLGGILGARVLAEFGDDPTRYAHPKARKNYAGTSPITKASGTRHAVLARVATNKRLRDALHLQAFAALTSSPGARAYYDEHRARGAGHNQALRAVSNRLVGILHGCLRHGVPYEEATAWPRYQPHSQAAA

SEQ ID NO: 332081 - protein, 370 aa, unidentified
MQFIGIDLHTNKFTCSYRDENSPPDAKKGKRTETFELTERGLAAFYQTLTSDTYVLVEATITTFSFVRLIEPMVKKVIVANTYELKQISLARTNTDKIDANILSRMIKMQILGKETAISPVVVAPVEIQELRGLFTTYRLYRKQTTQIKNRIHSLLKEKLYGFTQEEIFSQKSRKMICGLENNTVMSFQINELMEILENLEKRIDILEDKVKEQAEPYMREIEILTSMKGIGVLTAIAIIADIIKVDRFKNSKSFTSYLRSAPKVSNSNTSEKTKGINKKGRKLAATLVTQSLNHVLDASEKLNNWYKEKIENKKAGLVRTGLRRRAFAEMFQMLKKGEYHYGRDKRIHEAKMLQYKRFLEKRKNLLKSA

SEQ ID NO: 332082 - protein, 468 aa, unidentified
MGQKRSRSPQPSGKHAKHTSLLERVNHNAAGIDCGSETHYVAVPPERDPDSVRSFKAFTSDLHRLADWLVACKIKSVALESTGVYWIPIFEILEERGFEVVLVNSRHIKNVPGRKTDVLDCQWIQQLHSVGLLRGSFRPAAEITSLRAYLRHRDKLVQSAAAHVQRMQKALVQMNLQLHNVISDITGVTGMRILRDIVAGVTDPRALAAHRDHRCRASQDEIVASLTGNYRAEHLFILRQHLELFDTFQQHIQTCDGEIESLLHQLAAKQGEPKTPVPSPRSKPRFYDNEPRFEIRDPLYRLAGADLTQIDSIGPYTALKIIAEIGTDMSRWPTYKHFTSWLTLAPRNKITGGRLISSKTQPSANRAATVLRMCAMVVGRTSTALGAYYRRIAYRIGKPKAITATARKLAILVYCTLKGDMDYKDPGAQAYDEQHRAKTLQNLRNRARQLGFGLVHVDTGELLQGPVS

SEQ ID NO: 332083 - protein, 386 aa, unidentified
MKRDDLSRSLVAFDQGNTLVAVLELSLTGWLVAGLVPHLTRQPLKKLKSDPLALLALLRRWRDQSTKAGGQIRRMVLAFEAGRDGFWLARWLRVRGIEAYVIHPTSIPVSREHRRAKTDRLDTSLLMRALLGWLRGEPKHCSMAAIPTAAEEDACRPTRERETLVRERTRVVNRIKSTLIRFGIRSFKVKLRQARQALEALRTPEGEPLPPNTLAELRRDVARLELMREQIAEIERTRLERLKQAPHKGTHPMIRMLARVMGIGIETADMLVHEVLRRNLRDQRAVARYSGLTGSPDESGSKRREKGLARAGNARVRRGMIQLAWRWLMFQKNSALAQWYQARTADGRPGLRKTMIVALARKLLIALWRYVTSGETPAGAVLRPAT

SEQ ID NO: 332084 - protein, 320 aa, unidentified
MLSFCGIDVSKDRLDVMVLPDEYSSSVPNDPAGWAILVEQLRGFSITAIGIEASGGYERGAVRSLQAAGMPVRQVNPFKLRQFAKASGVLAKNDPLDARMIASFVGIMPTRPAQRTTPPAEQLVEMLAVRRQLSAEKTAAENASRLLEDLMLQRLSRRRIARLAADIELLDKRLVEIVATDATLAHRYRLLTSMPGVGPVLACTLIALLPELGGMSRKQVAALVGVAPYAFESGTLKGRRCIWGGRANVRQVLYMAAMSASNWNPVLKLFHDRLKGAGKLPKVVIVAVMRKMITTLNAMVRDDIAWADRLSGRHSVTTAR

SEQ ID NO: 332085 - protein, 400 aa, unidentified
MNIIGIDVSKGESHATLIDKEFGETNFVFRHNKSGFQKLKSFMNENTIVIFETTGIYSAQLSRFLQNCKVKTYELNPLEASLRMASMRRNKTDAKDSLKLALLGVTQLSELERNHRIYFDSQYQNLHILALRYRQLIKTRTRIINHLRASLELTFPELNSIFKSAHEIIALQIFKQYCHPDFLVGLSIQKMTNNVYLSVSKHIHKDLIQEYCQKVWLAAKDSYPAVNADSQEIEIIYEYCDEIQQYNKTINWTKKKLIRLASSLENFKIICSIPGTGQLNTSLLLGLAGDISRFDNYKQLNAYLGLDLNRYQSGQYEKHDTINRRGSSQGRAVETDMIRSMLRNQNKIQNHLIDYYYKLKKPPFNKHDKVALIACANHLNRTIINLVHTHQVYDYQKATH

SEQ ID NO: 332086 - protein, 428 aa, unidentified
MKYNTQNAKIKSITEKTLIVGIDVGSETHFARAFDWRNYEYSKKPLEFSNTEAGSMTLKAWMADFAEKYGKNVVIPGMEPTGHYWFNLGAYLQDNGMKPVHVNPHHVKKSKELDDNNPNKNDRKDPKTIAALVNEGRFSYPYIPTGIYAEIRSLSNLRLQTQEEITRIKNRIARWFSIYFPEIKDVYRNPDSVSGLMILKEAPLPQDIVKLGVDGINKIWRDAKLRAAGLKRAKTLVTAAEHSIGSQEAPDSARIELKNLLNDYEIYKNREEDLMSLTEEKLSEIPHIDKLLEIKGVGLKTVSGFVAEVGDITRFDNPKQLQKLAGYAIVECSSGKHKGESHISYRGRKRLRYVLYEAAISLIARNEEFKEVHRYYRTRKENPLKKMQSVIAVACKVLRIFYTILTKGVTYDGAKMMQDIKRPQMLAA

SEQ ID NO: 332087 - protein, 343 aa, unidentified
MRSDYRLFVGADIAAASVTVAWQAPGAAVGRPVTIEQSPTGFAALRQRLLATGRAPATILVVMEATGSYWLALAQSLAAHGFAVSVINPLQAHHFAKALLRRAKTDAIDAQTLAQLAALLQPAPWTPPPAIYEELRQRLTQRDALLALRQQVRNQRHALLQGPTVVTSVQARMEDLIDTLTAQIAAVEAELAAVVDQDTAWAGAIRRLQSIPGIGRLTAAWLVVSTLNFTLCATAEQAAAYAGLVPLPHESGTSVRGRPSIGRGGNGRLRTALYMATLSAAQHNPAIKPFYDRLRAAGKPKKVARCAAARKLLHLAWAVGTTQQPFDPGYQQQQHAPFHAQAA

SEQ ID NO: 332088 - protein, 296 aa, unidentified
MKKLFIGIDFSKEKLDATIILACGMNEIGSREYGRFPNNTTGYRKLCNWVKTNAWNTIAEEWLFCGEDTGSCSIGLSKWLYGKGYDIWIENAYAIKHSSGIQRVKNDKADSAIIAEYAWRQQDKVVPFEPLNESLAQLREVFLYRHKLVGQRVAMELRKEDKSQSNKSKAISFINRKSKHLIAEINKTIAECDKAIDSIIEADEELKENYAIITSIKGVARQNATCMLVYTNNFKKFGYDPRKIACYYGVAPFGKQSGTSVNTPAHTSHFANKLIKSLLGQAAHIAKIYNPEIRDD

SEQ ID NO: 332089 - protein, 309 aa, unidentified
MEIVVGIDVSKERLDVAILPQGEVFAVGNDHAGIDELVERLKGIGVDAIALEATGGYEMLAVAGLSSAGLTVLVINPAQVRAYAHAIGRRAKTDPIDAAVIAAFVLATKPEIRPLRDAETQALSELVARRRQIVQMVVAEENRLRMALAKQAQKSIKRLLKALRRELESLDADLDSHIRKSPVWRVREALLTSVPGVGATTARTLLAELPELGSLDRRQIASLAGLAPWTRQSGKWKGKSFIGGGRGKVRAVLFMAALVASRYNPDLKAFRDRLVAAGKPKIVAIVATMRKLLTILNAIIRDGRPWQTA

SEQ ID NO: 332090 - protein, 367 aa, unidentified
MSTAKFIGLDVHKETIAVAVANDGRSGEIRFHGTIPNTGAAIRRLVTRLAAPDVTLHFCYEAGGCGYGIHRQLTDLGVECSVIAPSVIPRKSADRVKTDRRDAQMLARLLRSGELTAIWVPDEAHEAIRDLIRGRRQAKQDLVASQQTVLSFLLRHGRKFTGRSNWTKAHWRWLGEQAFDAPHQQFVFGEGIRRIEEAQHRCDRLDSMLVEALPQWSLAPLVQALQALRGVGLVVAATLAAEIGDLSRFDTPKQLMGWLGLVPSEASSGTRTRRGAITKTGNREARAMLVEAAWSYRLPAREERRYQMRVEGLPEDIRAIAWKAQVRLCQRYRSLASTGKALPKVITAIARELVGFIWDIGRRIQPI

SEQ ID NO: 332091 - protein, 264 aa, unidentified
MTKIICGVDVSSTSLDAFVGPSGPAHSFRNTAEGIAELAAFCRQQSVDLVAMEASGGYEKQAFALLWAGGVPVALLNPRAVRDFAKGMGLLEKTDCIDARVIAWFAAVKGSMSNAPASAEQQRLKALVTRLRQLTELQAAQRNQRLLVSEATVLELIAELLKVVASQMRMLEAEIAALLASDPLWQKLDQALRSIKGVADRTVARVMAEMPEIGTLSNKAVSKLAGLAPLAHDSGKREGKRLVRGGRSQCAGDSVCSCRCGASS

SEQ ID NO: 332092 - protein, 368 aa, unidentified
MSHDTTTFVGLDVHKDTIAVACIGTDPDESVVDVGTIGTQQYAIDRLLKKLSGRGRLRLVYEAGPCGFWLERYLREKGYACGVAAPSLIPQRPGDRVKTDRRDARKLALALRAGTLTLVHIPTPGEEQFRDVVRAWQQAKRDVTGARQRLKSFLLRHDIRYTGRANWSAAHRRWLADLSLASPARRIVFEELIGAITERERRRDRLEHQLDALAPTWSGYALAQALLAFRGIQKTVAWTVVAEAGDLARFALPTQFMAWLGLVPSEHSSGATRRQGPITRCGNRWARTLLVEAAWSYRYSPQVSRIIEARAGQIDPAIRAIAWKAQLRLHHVFKKLTARGKHKNVAVTAVARELAAFLWAAAREIEAN

SEQ ID NO: 332093 - protein, 402 aa, unidentified
MNAVGIDVSKGKSMVAIMRPFGEIVSAPFEIKHTASGINSLVELINSVEGESRIVMEHTGRYYEVLAHQLSKANLFVSAINPKLIKDFDNDSLRKVKSDKADAVKIARYALDKWQNLKQYNVMDELRNQLKTMNRQFGFYMKHKTAMKNNLIGILDQTYPGVNTYFDSPARSDGSQKWVDFASTYWHVDCVRKMSLNAFIDHYQNWCKRKKYNFSQSKAEEIYGKAKELVPVLPKDAITKLIIKQAVDQLNSASTTVESLRTLMNETASKLPEYPVVMAMKGVGTSLGPQLMAEIGNVSRFTHKSAITAFAGVDPGVNESGTYEQKSVPTSKRGSADLRKTLFQVMDVLIKTHPQDDPVYQFLDKKRAQGKPYYVYMTAGANKFLRIYYGRVKEYLASLPES

SEQ ID NO: 332094 - protein, 342 aa, unidentified
MYYIGLDIHKKTISYCVKEVSGQIHSEGTVPATRPDLDSWMKTVPQPWSAAMEATIFTGWIYDHLLPHAAVLKVAHPLMLRAIALAKKKNDRIDAGKIADCLRCNFLPECYMASTAIRERRRTLRYRNLLVRQAVQLKNKISGLLLETGVSYNKQKLHKVGYFRELLRTNQEITGRLRPLLKQCRENLERLQKIESALVRGLNKDPLLTKRVERLKTIPAVGPITALTWVLEIGDVKRFPSLKQAISYCGLCGDEKSSADIARRTPLTKQRNKHLQTVLVEAAKMAPRRSSDLAMVYEKEKMKGNKNRATLAVARKMVAYLLAVDRGEREFVPLENHKKAVA

SEQ ID NO: 332095 - protein, 406 aa, unidentified
MFYLGIDVALNTHRLVILDDNGERVSSGISFQNNTADFEKVLIKLKELSINPDNSIAGLEATGNNWENLYCFLTSNNFKTILLNPHQTNKFREALRKKAKTDDIDAFVIAGLLRSNEFASSYVPEDKIQTLRELTKLRYEFIKDHKNYQRQVLALLTIIFPEYKQTALKNPFAIASIAIFKAFPTAKHLSKTKPKHIEKIVRSIKGNNFNVKEIENLISIAKTSVYSGRCQESRALTLNILLTQVENFDKSIRQLEEQVNLILSPTSNDDINSFPGSNLLTIPGVGPRTLAAILSCVGESGQAFSDGVKLIGHIGFFPQIYESGETKRANKLSNKGPAYLRHALYMASVACVKHNLQLRNLYHTKISQGKKPKQALICVAKKLAHMCLSMLHSGQDYNPARVFCYA

SEQ ID NO: 332096 - protein, 332 aa, unidentified
MSDQAKTIDIIGADISSGGGGAAWVRSNKPQQTIANNRKAILAWLKQLPPNCVIGMEATGRYHYLLADLAVMCGHTVYVINPKHLASYARGVGQRGKTDPLDAQVIARYVDRERDQLHPYVVPSPLQRTLRSLLSQRSGMVRHSVAIKQNLEATPVEANTALKRARQKVLHSLAGLIAEIDRELKRIVITDTTLETKRKQLQAITGIGLLNSMALTHRFDRTPFANSDAVVAAYGMDPRPKDSGKHVGKRRLTKQGNPEDRRLIYLAAQSASKTKLFNPLYKSLLARGFATTEAILILARKLLRIAFAVWTSGKPFDPTKIGAKGVLPHLKI

SEQ ID NO: 332097 - protein, 403 aa, unidentified
MELSEIGVFVGVDMAKTDHFAQATTTDGVELFARSVLNDQTAIEKLIDDDAGHGAVAVVIDMTASNAQLLLAVAAGREVPVAYVTGLQMRRAADLYAGSAKTDPRDAWVLADFARRNADRLAWLDVGDELLLELRVLNGRDVDLATDANRIINRTRDALTALSPGLERAVGQRLVQAGVRDLIAKWSTPTALRAAGKIKIRNAIKKRSPRLANKITDEIWAALDAQTVVLPAEETWGQVVGELLADLDRIQTQRARLAAQIEEAFLAHPLGQVLVTLCGFGPRTGARTLAEIGDPTRFANGSRLASYAGLSPTDWRSGSSIKGAFQHRGGNHRLKNAMFLAAFVATQHDPDARVYYQRKRAEGKKHNAAVICVARRRCDLIHAMLTTTTPYDPSRSKKLAEAA

SEQ ID NO: 332098 - protein, 347 aa, unidentified
MVTIGIDTHKATLAVSAIDGTGRETGARTFPNDRQGHVGLLRWAQAHGSERRFGIEGSGSFGAALARLLVAAGEAVVEVPAILTERERRHLRRAGKSDPGDALAIARVALREAGLGPIPMPGITEDLKLLVDARDQRVGERTRIANRLHAHLVVLAPGYKREIRNLTAARHLAAVADLLDRLGGVRAELARAELARLRELEAESVVLEGRIRSLVRLTGSSLPTITGVAAITAAKLLGETGDPRRIHSTPAFALMSGTAPIPASSGQTSRHRLNRGGNRQLNRALHTIALVQARTDPRAQAYMARRMAEGKSWLEALRCLKRHLADVVLRTMLADLERSAKPAAMGA

SEQ ID NO: 332099 - protein, 429 aa, unidentified
MSEEKPLELRVSVDVGYRRHSVAMGLSSGEVLEEFEIEHRPEGFQEFFSRIEKHHNKEPGSVAVAMEGYNGHARPLDSMVRQRGYRLYNLNNLKFARFKEIFPGAAKSDRIDARKGLELFQLSDHLPLAKEVLQEVTGTPPENEVLKRLTRRRRRLVNERVRVVNNLQADLQAVCPGLLEITGEASNQWFLNFLLSADTLPQLARLKRSTLLKIPAVGVKSAAMIEHWQKRAHFSQEVNWVGEMIQEDARRCVELDEKIKRLEAKIAGIAKDSKIAKILRSIPGFGPVCTSELAGEVGTIERFASEGSLSLYLGMSTLDNRSGKYQGTKAPKHVNTRAKAAMMIGVDRHRKYVPESQRYYAKKRSEGKKHNQAVRSLGRHLSRIIYKMLTEEREYRIGPEKGNTKVKVGPRSCVKTKIRRPKISRKETK

SEQ ID NO: 332100 - protein, 431 aa, unidentified
MWLPFVCAPAGCRAEAWLQRGLPCSQQQCPPRNPYRSTTRRGSGITKVFIGVDPHKLSATIEVVDDRERVLVTGRFATDKAGYAQMRKHVGAWPERVWAVEGSNGAGRPLAQRLLADGEHVLDVPAKLAARVRLFDTGHNRKTDARDAHAVAVVAVRTKTLRVLKVDGELEALRMLCDRREELTRLRVQTVNRLQRLLAELVPARAKKDLTALQAKAILATVRPHDIAGKTRRRIAAEELADLVAVEAKMKKATAELTVLVNTRGSRLMELHGVGPVVAARTLADIARFADRNRFASWTGTAPLEASSGEIVRHRLSRAGNRRMNHMIHIAAATQIRLDTEGRAYYRRKRAAGKTKLEALRCLKCRISDAVYRQLLSDAPPVAAQVVNAGPGRHRGASHNPARPYPRLVRRGRPTPRATSSRPLDNRGGPK

SEQ ID NO: 332101 - protein, 348 aa, unidentified
MEEIIRIGLDTSKSVFQLHGVNEAEEPVLRKKLRRSQVLAFFAALLPTKVGMEACGAAHYWARELRALGHDVVLLPPQYVKPYVKRSKSDAADAEAICEAMSRPSMRFVPVKSADQQALQMLAKLRAQFIGRRTQLANSMRGFAAEFGYVAPKGLARLGDLLADIRIDATMPNMAREMFETLVRDDARIDEEIAALDGKLLALHRSNEVSRRLAAIPGIGPIGATLLAIKVTDAHGFGCGRDFAAWLGLTPKNHSTAGKNRLGVITRAGDEMLRAVLVVGATAVIQHTRRTGKRAWPWLEALIARKPAKLAAVALANKLARIAWKLMVGGEVYRPVGTVVPVATSARP

SEQ ID NO: 332102 - protein, 361 aa, unidentified
MKIIGCDFHPSFQQIAMLDTETGELVERKLQNPQEATQFYEALAGQEVLVGLESMGNTQWLERLLQRLGCTCWIGDAQAIRASNPRKQKTDKRDAGHILRLLQEERFPKIWVPSMEERDLRQLLKHRHTLVQMRTRIKNQLQHIALNQGWQKKRTLWTQSGQQWLSQLELEPWTRRRRDDLVQMLEEMNQRIAQLNSAAEQAAQQRADAVLLMSHPGVGPILALATVLTLGQVSRFPRGKQVASYLGLIPKESSSGQRRRLGAISKQGNSFMRFLLVQAGMGAARGDAGLGRVYKRLLAQKKHHGVAKVAVARKLVVRLYWMLRENRQYPAVVRMQGSPSHPVAEAKAVALSGRPASQTNP

SEQ ID NO: 332103 - protein, 340 aa, unidentified
MKKFLFIGIDFSKSKFDVTVLKSIDQQDFAQAIFLNEKQGFNEFLKWVTKQSNVPKQDWLFCGEHTGLYSRGLMDFLIKKKLFIWLENPLQIKCSWGIKRGKTDKIDSLEIARYALRFEDKAVACKPENKDIESLRLLSAYRGRLVKNKVSLEVSAKETRRVISRDTTSRIIFENSQHNIDRIKKEIKVIETKMHQVIMSGDLKENYLLVVSIKGVAMVTAIALIIHTNNFEAFKTSRQLACYCGVVPFEKTSGTSIKKGNHISQLANKEIKTLLTQCARCAVQYDKELAAYYTRKIAQGKKDRIVINNVRNKLIHRIFAVVNNRIPYRVNYLNPFADCA

SEQ ID NO: 332104 - protein, 351 aa, unidentified
MAYATEKRNSEVIFLGTIGTRQCDIDKLIRKLHSKSAQLIFVYEAGPCGYWLYRYLAKKGLVCWVVAPSLIPKKAGDRVKTDRRDAAQLARLMRSGDLTPVYVPEVEDEAIRDLVRAREDAIGDLKAAKYRLKAFLLRQDIRYEGKANWGAAHLRWLAEIVCPTPAQQCVFQEYVRAVSDPHERLQRLEAELHEQVKNWRLYPVVEAIQAMRGVQFTVAVTVIAELGDLTRFENPRQLMSYLGLTPSECSSGERRRQGGITKAGNTHARRAMIEGAWAYRYPAKVSRHLQLRLEHLPKAIQDIAWKAQVRLCKRYRRLLARGKNANQVVVAIAREMAAFMWAIAREVQTAH

SEQ ID NO: 332105 - protein, 328 aa, unidentified
MYTVGCDVSKATLDAAWWEDSTGRWHERGKLRNRRGGHRKLLRWMMKVCGCAPHELCLILEATGVYHRPLAEYASRAGVQVIVVNPGRSAEHASSQNRLNKSDRLDARGLQVYGRQLEKRHEYVPHSAPVQALQAQLSRLRQLDKDLARERNRLEKCAFIPESRALAASIRRQLKQLQREKQRVQSDIDALIAEQDDLRRIQRRLISIKGIGPITSQWFLPLLYRGQFESARQLAAYLGLTPVHQRSGTSLNKRGRLSGRGNPQLRAQLYMPAVSARTHDPAMARRYDDLIRRGKTPKQALTAVMRKLVHVCYGVVKNDEDYQCPIAA

SEQ ID NO: 332106 - protein, 328 aa, unidentified
MTDQYIGIDLHKAFFQACAVDSTGDRLWEGRFPRTAAGVEALTARCTRRTALAVEASTPTWHFADGIVQAVGNLRIVDPLKTKLKAGYAAKTDRLDARRLADALRRDSVVGIYYPPLAIRELRELCRARHALVQARTALINRLRAVLLRQGLADARRLAKTPDDGWLAELALPPRAAASVTMLRHVLATLRTEAARAEAEVRRATDADPIAIGLQQLRGIGPVLALTIRAEIGEIQRFPTGAHLASYAGLVPRVEMTGGRYRYGRITKRGSPWLRWALIEAAIHGPTRSDRIGRWGRSLAMKKGVLKARVALARVLCEEIHRLWSGIA

SEQ ID NO: 332107 - protein, 354 aa, unidentified
MPKTASIQIAVIGIDIGKNSFHVVGLDRRGAIVLRQKWSRGQVGERLANMPPCLIGMEACVGAHHLSRKLKTLGHDPRLMPAKYVRPYSKGQKNDFRDAEAIAEAVQRPTMKFVPTKTTEQLDLQAMHRVRERLVSQRTGVINQIRAFLLERGIAVRQGRQFLRAELPTVLATRSDVLSTRMLHMIEGLTQDWRQMDERIDKLSTEIEVLAHEDAGAQRLMSVPGIGPIISSAMVAAIGTGATFSKGRDFAAWLGLVPKQISTGDRTILGPISRRGNRYLRALFVQAAWVVLVRVKNWERYGLKSWIEAAKKRLHHNVLAIALANKLARIAWAVLARGGNFELRRSNELSPQPA

SEQ ID NO: 332108 - protein, 335 aa, unidentified
MYYLGIDLHKDESHVAVLDDDAEVVEEIRVKNANLDDVAEEYAGAKAALEATSNYYTVYDTLDEHLDVVVADPTQTKAIGYAEVKNDRLDAKLLAQLRRADMIAESYVPSEELRERRALVRGRKRLVEKRTDFKNEVHALLDKHGITYDWDPFSVNGRDILAGEDVSLGVVGDQLMESFLSIIDELTAQIEELESLIEETAASLEETQLLMTIPGVSFYSSLLITSEIGEIDRFDGAKQVVSYAGLDPVVRESGDSRTEGSISKRGSGDLRWILVQCVQTAVHRCNDPYLGRFYARLKQRKNHQIAIVATARKLLVSIFHMLDRTEVYDPPEVSA

SEQ ID NO: 332109 - protein, 455 aa, unidentified
MTGAKSGGMDAMAMINPGAAAIDIGSTMHMAAVNPRADDNPVRAFGTFTGDLHELARWFKACRVTSVAMESTGVYWIPAFEILEQHGFHVILVNARYAKNVPGRKTDVSDAAWLQRLHSYGLLRGSFRPEAGVATLRAYLRQRERLIEYCASHIQHMQKALMEMNVQLHHVVSDITGVTGMRIIRAIVTGERSPGTLAVMRDVRCHASAEKICAALSGNWRDEHIFALCQSLALYDFYQTKILECDRKLEVALQGLRTGKGHDTSSLPKVRTKTRQVNAPDFEVRSALFRVLGVDLTQIHGIGPSLALKLVGECGTDLAAWPSSKHFTSWLCLAPGNKISGGKLLSSKTRRSSSRTAAHLRLAAITIGRSDTALGAFYRRLSARAGKAKAVTATARKIAVLFYNSLRYGMAYHDPGATRYEEQYRSRAIGNLQRRAKTFGFTLQEMPAEPDMSVS

SEQ ID NO: 332110 - protein, 346 aa, unidentified
MTGLTIGIDIAKRVFQVHAIDNETGEVSSTKLARRDFLAHFQKLSPSLIGMETCGSAHHWARELSGMGHEVRMMNPMYVKPYVKRGKNDVVDAEAICEALTRPTMRFVAVKTVEQQSVLAVHRTRALLIRQRTMLVNALRGHLAEFGIVAPLGIERIPELVDRVLGREGGELGITPLVRSIVAMYAEQIEKIKDQIRMLERELRLWHRTSEASRRVASVPGVGTITATAIVAAMPDPAIFESGRAFAAWLGLTPKSSSSGGKERNGRITKAGDRHIRVLLVLGATSVLRRVRSGQPTPLYGWVKKLLDRKPPRLVTVALANKMARIAWAVMARKMNYQPELAAAVA

SEQ ID NO: 332111 - protein, 343 aa, unidentified
MGQITTAGIDLAKRVFSAHGVDETGRVALRKTVRRDQLLELVASLPPCLIGMEACSGAHEWARTFERYGHTVKLMAPKFVLPYRKSGKNDGNDAEAICEAVTRPNMRFVPVKSLEQQALLALHRVRSGFISERTATINRIRGLLSEFGVVLALRAPTVRRQARAAAESLPVLARRGIEDLLDHLGALDARIDAYDREIEAQARQCEPARRLMKIRGIGPTTALAIVATVGNAREFHNGRQFAAWIGLVPRQYSTGGKPRLGHISKQGDPYLRSLLVQGARSVLQTASAHADRISRWSLGIEQRRGYYRALVAIAAKNARIAWALLAKNEPLRTSPGVPERAPA

SEQ ID NO: 332112 - protein, 353 aa, unidentified
MTSTKYIGMDVHKESISIAVRNDAGKIVMECVIETKANSILDFIHGLRGELQVTFEEGTWATWLYDLLKPHVTKLVVCDPRKNTRQGNKNDQIDARELADRLYMNKLSSVYHGGASVRTLKELARSYLTISKDLARVMSRVKAIYRSWGIPCAGKQVYAPRHRADWLAKITEVGVLRRAEFYYQQLDALRSLRHEARRDLLAESKKHKATKLLCQIPSIGPIRAALLIALIQTPHRFRTKRPLWKYSGFAIETHSSADYRSVKGQLQKAKKQVSVRGLNRDCNHDLKNLFKSAATIASVKPGPFQEFYAALVAKGMRPEMARLTLARKIATIVLIVWKKGVSFDAQYLKPQTA

SEQ ID NO: 332113 - protein, 367 aa, unidentified
MKKISTAGVKLTQNVSEQKLTIGLDLGDRSSWYCVLDEAGEVLLEQRLGTTRQAMKEAFGGMPRSRIALETGMHSPWVSRGLSELGHEVIVAHARNVRLIGESRKKDDRIDARTLARLARIDPQLLAPVKHRSAQAQADLMVIRARAGLVRARTSLINTARGLTKSYGERLRGCSPRNLNAEKARQLSPELQAALEPLLGAIESLSERIYQYNQQIGKIAKERYPQVARLEQVKGVGTLIALTYMLTLEDAQRFRKSRDVGCYVGLQPGRRNSGQSEPQMHISKEGDPYLRTLLVQGAHHILGRFGADSDLRRWGLKLAERGGKNGKKRAVIATARKLAVLLHRLWVSGEAYEPLRHSRPVLLPAAA

SEQ ID NO: 332114 - protein, 377 aa, unidentified
MPITNLQNSNDFEGQKFYVGLDVHKKSWSVTVRSLQRQVTHFTQPPCAETLARTLKKRFPGGIFYSAYEAGFCGTVAHEQLCKHGITNIIVNPGDVPSTDKQKKTKTDVHDSRLIAENLEKNNLRAIHIFTHEQQQLRSLCRLRECKVKERVRANNRLKGFLVYYGIQVPETISKKEFISQKVLTWLQDLELSCSAGNLALQEIIAELKHQRQQEYRVTKMLRQQVEATHGEEYKRLLTVPGIGPVTAMAMLAETGGLSRFDDPDEYASYLGLMPWDESSGDTIKTKGIQPRCNKHLRPLLIEAAWVSVRKSTELHAYYSKHAAKNNKHAIIKVAKKLAMIARGCVLKKEDYQAGYVPKKQEAKSEKVFQAYTEQHI

SEQ ID NO: 332115 - protein, 414 aa, unidentified
MKSCLFVGIDTHKDSHTAAVLDGYFEVVATISFANSSTGFTGFEEKFKKLRNGKDLIFGLEDSQGLGSFLASYLIGKGYETMEINPITTDRGRKHTVSRDKSDERDAIVIAKTLIRERVSLHPVRINRNSVAIREMTGYRQVLIGESTRIKNRLHMVLFNQYKGVLSCFKDPFGKCALAFFLRYPDPSSLKEADHNSLSDFLKSNSKGMFSKKKARVILSSTGNNIADSLTETRAHIIAAHIERLLGIQEGLKKIQEALEGLVKASSYHSLTSIPGINIVTAAKLISGVADISRFSSSSKLAKFCSIAPSERSTGKKRRYEKSKYGNKSLRSTVYFIALSHISRTRDGRDKNPISRAYYLKKVSEGKTKKEALTCLSRRLVDIIFAVMRDRSIYDFSKSRFTKQRDTELDTVAA

SEQ ID NO: 332116 - protein, 354 aa, unidentified
MKQVTQLDFSGQKIFAGIDVHKKSWKVSIRSEQMELKTFSQNPSADELSNYLKRNYPLADYHVVYEAGFCGFSHQREFSQSGVNCIVVNPADVPTTDKEKRRKSDTVDCRKLGRSLSKGELTGIFIPDVEQQDDRDIIRTYNQMVKDQTRHKNRIRGWLNFQGVTFAESDSRYWSNNFITWLKELSLTSSARIALDLKLQGYQQARGMVLAATRQVRILSRQERYRKKIALIRTVPGVGEITALLFVTEVGNINRFKSLDVLCDYVGLVPNTHSTGDKEIVSGLTRRANHQLREKLIEASWTAVRTDPAMTMAFNNYCSRMKKNNAIIRVAKKMLNRIRYVMKNETGYVTAVVK

SEQ ID NO: 332117 - protein, 351 aa, unidentified
MSTQQTSKPKLYIGIDIHKRSWKIHCSTDLFSGKTFSMSPIPEQLRNYVEKHFSEHEVSTAYEAGCCGYYAHRAFMGYGWHSLVVNPADIHRKGKEKFTKTDHIDAQIIARELKDGRLQSIHVPDMEREQLRSLFRRRNNLVKNYRKIKSLIKGQLLNQGVSIPCDFDNSHWSHSFRDWLDNLEFAYVPARMTLDSHMRYFRFVDQELRDISSQLRRYCKEHYRKDYMLLRSIPGIGGIVACGIICELGDLRRFKNIKHLSGYVGLAPGIYQSGDNLRNTGITRRAHQLMRSYFIEAAWQAIRTDPVMQAYYRKHLGKNVKAVIVKIARKLLSRTLAVIKTEIPYEIGVVS

SEQ ID NO: 332118 - protein, 376 aa, unidentified
MERGSLMLNTTTFVGLDVHARSIKAVALDAMTGEVRSATFGYDAAEVAGWVSSVDPSAKCVYESGVTGFDLQKKLSSLGVDCVVGAVSKMIKPPADRKRKNDRNDAEFLARMLSVGNVVEVWVPDDGCEAARDLTRALDDAREDLKRCKQRLSKFLMRHGYAFSETTPTGRRKGNWTAAHWAWIRSISFPEKADGDALAYYVDAVRQAMEDKARLEKLVEAEASKPRWKRRVDSVRCLKGIDVTSAADLVFEAGEFSRFKNARSFAAWLGLTPSEHSSGESVRQGGITKAGNKHLRRVLVESAWHYLGCSPHSKDLAKGQVPDPAARRHAAKGVRRLVERRRAMLERGVHKNKANVATARELACWCWAVGRMVENG

SEQ ID NO: 332119 - protein, 347 aa, unidentified
MKIIGCDFHPSYQQVAWLDTESGEVREATLAHENGEAQRFYESLRGPVRVGMEAVGNTLWFERLLAGLGHEVWIGDAAHIRALVVRRQKTDRRDALHLLELLTSDRFPRIWVPGPEQRDTRQLLLHRHKLVRLRARVKNELQHLALNQGVRRKRKLWTTAGRQLLESLPLEGWTAQRRQDLLGLLDQLHRRIGELDRAVEAEAARHPAAQLLQTHPGIGPVTGLAFVLTLGPWQRFRCAKAVASYLGLNPREHSSGGRQKLGAISKQGNPLLRSLLVEAALSAVRGDAELRRAYRRLAQRKHTALARVMVARKLAVRLYWMLRSNQPYAPRPAVRMPGSPSHSVVAV

SEQ ID NO: 332120 - protein, 372 aa, unidentified
MTSNSITWVGMDAHKNSIAVAALFPDRTEPVEWTETTTPEAIRRLGRKLRREAPGEVRCCYEAGPTGYQLHRQLEAEGVICEVVAPSLTPVKPGSRIKTDRRDARKLAELLRAGLLTEVQPPSESDEALRDLCRCRDDVRVDLLRARHRLSKFLLRRHCIYRQSKHHWGTRHWAWLEELRFDDPVSQATFDSYMLAVQQLEERQRQLDLQLAEFGGRDPYREPVAWLRCFKGIDTVTAVCVVAELHDFRRFRSARELMSYVGLVPSEYSSGERERRGSITKAGNRHVRRLLVEAAWHHRHRPMISAPLQRRREGQPARVLAIADRAQERLCARYRRMTGRGINNPKTIVAMARELTGYLWAVLHPAATATRN

SEQ ID NO: 332121 - protein, 322 aa, unidentified
MKTANSVSIFVGVDVAKDSLEIYLPFSKQNLSIENSIEAIDELCSQLKKKRKLMVVMEATGGYEKLLVERLFKLGIKVAVVNPRQVRDFAKGIGLDAKTDPIDAQVISKFGEVVQPSAMAKESDHAKKHSALVTRRSQLLDMINQEKNRIKQTWDDDAKQSIRETLETLEKQLKNVEAQLAKMLAGDTANARKIEILESAKGIGPVTISTLIAELPELGNMNRGQVAKLVGVAPINRDSGKSNGKRFIGGGRSHVRRVLYMATLAAIRFNPTIKAYYTHLKAKGKLSKVAIVACMRKLITILNLMIKSDSLWKNAESVPTHR

SEQ ID NO: 332122 - protein, 405 aa, unidentified
MSVHQIAPVTSSTIVVAVDVGKTSAMVSATDDARNRVFGPVGFAMTRSDLAATVARVSEVVTPSVQVKVGIEAAGHYHRPILDYAWPAGWEVLELNPAHVAEQRRVAGRRRVKTDVIDLEAITDLVLAGRGRVICEREVLIGELAAWATHRSRRVATRSATKNQLLGQLDRAFPGLTRALPDVLGTKIGRLVATEFADPARLSALGVSRLIRFAAARDIQLRRPVAERLVLAARDALPTRDGAVARRVLATDLRLLADLDTQIEEAECELAALLPASPYATLSSVPGWGVVRISNYAAALGDPNRWPGPRQVYRASGLSPMQYESAGKRRDGRISREGSVTLRRALIDLGLGLWLTEPSAKAYAVELKSRGKPGGIIGCALAHRATRIAYALVRDHTTYNPSRWA

SEQ ID NO: 332123 - protein, 391 aa, unidentified
MPTVADRPDAPTAIQSNLAAIFVSLELSRSIWLITSLSPGSGEKMSKHSLRAGDVAALLARFSELQKKALARTGKSFPIIAVQEAGLDGFWLHRVLEREGIESHVVDPASIATSRRRRWAKTDMIDGEALLRALLANKRGEPRVCAMVRVPTPEEEDRRRLCRERKVLIAERVEHVNRIKGLLFSQGVVGYEPLRRDRRQRLNELTTGDGRPLPAHLKTHISRELDRLELLLDQLKTAEAERDALLAEQQAATPAQAPVGRMLLEFKGIGAESAATLWLEALFRHFDNRRQLASYAGLAPTPWQSGSVDREQGVSKAGNPRLRAILIELAWLWLRHQPQSALALWFKERVKRNGGRMKKTIIVALARKLLVALWKYVTAGIVIEGAVMKPA

SEQ ID NO: 332124 - protein, 350 aa, unidentified
MLHAGLDLSRNRLDVCLLSEHAEVVEEFAAPADADGLRGLARRVGVHGQPVRGVIESMTGARFVHDTLERLGWDVLIADAQKAKGLAPLACKTDRIDARVLAVLSHRDLVPAIWLPDPSVRREREQARFRLHLVKHRSMLKHRIHSTLITFGHPCPVTDLFGVAGRQLLERLEIPQPWRGTVDASLQLIEELERQIDQINRELRAGGADHPYVPLLLTVPGIGWVLAFTIAAEIGDITRFATAKKLCGYTGLCPRVNQSGEKDRRGPLSKHGPKYLRWAMLEATMHALRHPAYSDRYQRTKRRLGRQRGAKVAQIDIARKLTEAIWHMLTRNQPFNPTPAAGGAAFRLAA

SEQ ID NO: 332125 - protein, 419 aa, unidentified
MKVEYGNVAEDAVWAGVDTHAATNWLSVVDARGSELFSGEFATDPEGYRKLCDEIRRLGSPVAAGVECTGTYGAGLVRAMAAYGIACYEVITPGRPRRGPGCDKDDAADALRAAKQALSGENLAVPKSQDGWVEEVRNMTVAREELVKQCTSLANLALATVRKGPDEIRARLERLGTAKMMGVLAGWDEAEADPICDAVMFSLAALGRVWAEARRSARLLEERIERTLKAGNPALASMYGCGPISAAMLAIAAGDNPERMGSEASFAALCGVSPIRASSGKVERHRLNRGGNRNANKALHIIAMHRMRTDPRTAEYVERRRAEGLSDREIRRCVKRYIAREAYRLIMHPHDVPIEGKGPEMRAERIASGVSQKDAAIALGVTASTLCDLELGHHQFRELALRYRQWIDDGFPLEAGIAS

SEQ ID NO: 332126 - protein, 357 aa, unidentified
MQIIGIDVSKDTLHVALADSRDARNDKVLASHRFTNNDAGFKSFADWMEKKAEAGTVCLMEATGVYHERLADWLHRHGVAVAIELPNKIKYYAKCLNVKTKNDKVDAEIIARYGLHNVCTPWHPMTENLYQMRSLLRQVQSMTKERTRCKNQLHALEHSAHTPETVVVNLRGLIENYDRLIDSYHDEVVRLAKEDEAFYAKVEMVCTIKGVREMTALTVLCETDGFQLCRSARQAVSYAGLDVSEYQSGTILKDKRISKKGNARIRHALYLPAVVAGTTGGPASLMNLYKRVAQKHPSAKKVAIIAVERKLLMLIYTLWKKQEPFDPDKDGKPPVHNAYKRTQAVGSQNTEGSIPCR

SEQ ID NO: 332127 - protein, 467 aa, unidentified
MGVDSRTAVCCYGGVIAAGSTSVSFPLLLDSSGLARSGSTVCEGTGVARQDVIDEVLYLRSAGLDLGKRFLLACVRVPNPKRQGTWSLETERFGTTPAEVRRLLAWLTERRVELVVMEATSDYWRPVYYTLQESLNLMLVNPAHLKGIRGRKSDPNDAAFLARAGASGMVMASFVPPRAVRELRDLTRRRTEVVVARGQEAQRLEKELEDTGMKLTSVLSDVTGLSSRRILDALIGGERGPQALAELSFGAARKKIPALVEALDGTFTDHHAFMCRHYLDQIDHLNTVLAALDARIAKLMGDHDQDIENLDTMPGIGRRAAEIIIAETGGDMAPFASAANLASWIGVCPGMNESAGVAKSGHIRDGNRNLKRVLGVAAMAAIKQKGSYYGVYYRRLAARRGRQRALVAVMHKLATAIWHVLHDKVKHKDLGADYFAKRDPERAMRRMVREANALGMTVRFDPIPAAA

SEQ ID NO: 332128 - protein, 392 aa, unidentified
MVFVGIDVAKDKHDCFILNSEGEVLTDVFTVANSREGFELLLKRIRSCTRPADRIKVGLEATGHYSNNIVRFLLDNGLAPVVINPLHTNLYRKSLSLRQTKTDRIDARTIAMMLMSDVDLKSYTDILYHNEELKSLTRYRFDKVHEVSKLKQSVSRLVNILFPELESLVSSLHLTSIYAILSEFPGAKQIADSHLTHFRAVLKNASKGRYGREKADEIHAAAAKSIGSVSQAKSLELKHTIQQIRLLDKEIAETEASIREIMDGMASPILSIPGIGYRMGAMILAEIGDFSKFESADKILAYAGLSPSIYQSGKFNATGAYAHMEKRGSRYLRYALINAAKYVCHWDPVFAAYLEKKRGEGKHYTVAISHAAKKLVRVIFALQTTGSSYKTA

SEQ ID NO: 332129 - protein, 352 aa, unidentified
MISTQTTAIPKLFIGMDVHKKSWTVHFKTDLFDNKTITIPTDPLVLTNYVQKHFEGHQVSCCYEAGCCGYWIARTLLQQGWEVKVVNPADVPRNNKQDWQKTDRIDSRNLCKHLSDDNLKGIFIPDEEQEQLRSLFRRRVHLARNLRTIKNHIKSQLLYFGIPLPPQYDNPNWSRDMKTWIANLKWKFSSGAETIKSRLKQLEFMWYEELHISNELRAYCRKHYRKDYYLYKSIPGIGGITAAGILSELGDIRRFNRLDELAAIVGLVPGIYQSSDNKINLGLTKRSNHQLRSLLVEASWVAVRNDMALQQYYRKHAHKEPNKAIIKVAHKLLSRMRAVIINGVPYQLGVLK

SEQ ID NO: 332130 - protein, 317 aa, unidentified
MASENLYVGIDVSKRNLDVAVRPTHELWRVGNDDDGIASLITRLQQLRPALIVLEATGGYEELLVIALVAAKLAVAVINPRQARDFAKATGTLAKTDKIDAHVLAHFAEGVRPTPRPMPDEQSRQFSQVLARRRQLVEMLTAEKNRFKMASRPLLRSRISAHMDWLQSELDQTNADLSDLIHQSPMWRERDYILQSTPGVGPVVSCTLLADLPELGTLDRKQIAALVGVAPLNRDSGMMRGKRCIWGGRAQVRSALYMAAVSASRHNPVIREFYQRLCNAGKRKKVALVACMHKLLVILNAMIKNSTVWRLDRTHVI

SEQ ID NO: 332131 - protein, 367 aa, unidentified
MKQQTSAAFETHLKDRDPNYFKGKVIYVGIDVHQKDYQVAKLCNGICLGNHRMRASASVLIEHLQKHYPGAEFSCVYESCAWGFNLQRSLTSVGMKCIVVHAADVSTTDKERKRKTDRVDALKLAQHLAGGELRAIHVPNETIQQHRNLIRYRSKLVGDINQSKNRVKSLLKYQGIEIPEPYMRNNWSRNFLEWMKQQAAVDELLADTLLLMIEQITQLRQLLLKVEAKLRSWRKGAYAAQAKLISSVPGVGPTTAMMFLLEVGDIHRFKSFDALNDFVGFCPDTNSSGQTDRVRGLTARRHKKLRSLLVEAAWEAIRIDPVILDSFDQWSKRMKRNQAIIRVARKLLRRMRAVMIQGQPYQKGVIQ

SEQ ID NO: 332132 - protein, 409 aa, unidentified
MAAVMIGVDPHKGSHTAVVIDQAEMALGEVRVRASASQVQQLLEWAAAWAERTWAVEGAGGLGHLLAQQLVAAGERVLDVQPKLAARVRLLAAGDVNKNDPNDARSVAIAALRSAACPPVRADDHAAVLKVRAKRHRDLSRARNQVVCRLHAVLCELVPGGVSKQIHAAAAVRLLDQIQPAGAVQAARRELAGQFLADLRRLDAQRRDTKKKLAAAIRASGTTVTEVFGVGPAVAAAVIGDVRDISRFPGPDCFAAYNGTAPVEVSSGGRVIYRLSLRGNRRLNHAIHMAAVTQIRYRHTKGRAYYDKKIAEGKTPKEALRALKRQVSDAIYQHLKADARRAAAAAGPGGHRGNGSVASAAGSHPEHRLFGQATPGPEPTLRPRPGPSKTTRQGSSRRTRRLVPEHTST

SEQ ID NO: 332133 - protein, 357 aa, unidentified
MSTKSNKAIVNVAVIGIDIGKNSFHVVGQDLRGAIVLRQKWSRSQVSARLANLPPCLIGMEACVGAHHLARKLTALGHDARLMPAKYVRPYAKGQKNDFNDADAIAEAVQRPTMKFVATKTVDQLDLQALHRVRARLVSQRTGLINQIRAFMLERGIAVRQGIRFLRVGLPDILAQPDEALSPRMRRMIEDLATDWRRLDERIDNVSTEIGAIAKQDSGCARLMSVPGIGPIISSAMVAAIGSGDGFSKGRDFSAWLGLVPKQISTGDRTILGKISKRGNRYLRVLFTQAAWVVLVKPQSWERYGLKSWIDAASKRLHHNVLAIALANKLARIAWAVLAKGRDFEVTRTIDIAPEPA

SEQ ID NO: 332134 - protein, 345 aa, unidentified
MPIVGGLDIHRKQLTFDYLDTVTGEVKRGQIAPADRVHLRAWLARFAGRDDVAFAMEGCTGWRYVAEELAAAGIAAHVGEPADTAAARGRKRHAKTDRTDSRHIRTLLAEGRLPECWVPPAQILGYRALLETYHDLRRERTAWVQRIHAVLFHQGAPALGEGTLRTEQGLAALQTAAAAHLSPAGQLQVATALDMIAAAEARLQPLRHQLLAAARHLAGAKVLAARLYGVGPVTALALTCWLAGEGRFSSSRKAVRFAGLDITVWSSDRKGPPGRLSRQGPPVLRWAVYEAGKTHARASAPDHGYYAAVKDRKNGKRAALSEARKIVRQACHILTELGDDALAAA

SEQ ID NO: 332135 - protein, 340 aa, unidentified
MKNGLKLLGIDIGKNSFHLIGHDAGGHQVLRKCFNRNRLLQFAAQIEPCSIAMESCGGSHWLARKLASLGHRVKLIAPQHVKPYVTGNKNDFIDAEAICEAASRPRTHYVAVKTVEQQVLSVQHRLRESLVCHRTEAINRVHGFLLEFGVALPATKAAIAKVPELIDDSRSDLPLQFKRVMEHLLEDIHRLDTEIKACDAQIKQQLAQDDAGTRLMTIPGIGPITASAFVADLGDASNFRASRDLSAFLGLVPRQFSTGGRPVLLGISKRGDRHLRTLLVQGSRALMIRIERRDDALGQWVRDLLARKHPNKVACALANKLARIVWALLRRGSTYNASMI

SEQ ID NO: 332136 - protein, 438 aa, unidentified
MEVIHPRAAGIDVGSEKLHVAICGGPVQIFETFTASLHALRDHLLSAGVRSVAMEATGIYWLPIYEVLEAAGIEVYVVNGAHVKSLPGRKSDMADCQWLAKLHSHGLLRSGFVPDEWIRRLRDYQRLRQDHVQMASTHVLHMQKALDRMNVKIHEVLSDLMGLSGRRVVQAILEGERDCERLLALCDAQVVRKKRERMRHALQGHWKAEHLFALRQARQGWEFYQQQIAACDREIEATLQEIAALTPPAVGSGNPAEVHKRIYHNAPQIHDLKQLLVRITGGHDLAVLPAFTDYSILQLVAETGTTMTAWPTVKHFTAWSGLAPSSRQSGKRRRREPRFRNRTGRLFCVMARSLARSTKIGLGGFYRRLRATRGPAVANVATARKLAVLYYNTLRYGLTFVEAGLEAYEQHYRQQSVRRLQAAARKFGLTLTPLAKVA

SEQ ID NO: 332137 - protein, 343 aa, unidentified
MKLSRVGIDLAKNVYQLHGVGRSGKTVWKRRLKRHQWFQVLLDTAGPECEIGMEACAGAHHWGRQLQSRGYTVKLIPPQFVKPYVKSNKSDAKDAEAICEAMGRPNMRFVTVKRVEQQDIQATHRVRAELMTQRTAKANQIRGLVAEYGLVAPKHLSSLRAAIPCWLEDAENGLTGDFRALLQGVWTDLLLLDDRVGEMDQKIKQLADNNEDCVRLQQLRGVGPMTSTAMVGTVGDARQYPKSRQMAAAIGITPKQHSSGDRDRLLGISKRGDVYLRTLMIHGARAVVARAKHKDDRLSRWVTNIANKKHPNVAAVALANKTARMAWAMLRHGTDYDPDFAIR

SEQ ID NO: 332138 - protein, 418 aa, unidentified
MTRTLAKKLAHIQPGTLFVGVDLGRDRNVAVVITERGQRLAKFRFPHNREGYAYFRRRLKALQERHQAPAVLIGMEPTNYFWKLLAAELERHDMAYRLVNAYTVKKHREGDQLDRAKDDVRDAFTIADLLRTGKFTETRLLHGRYAELRHYAALYDQLRREAGRYRNNLHNAVGQLFPEATQEFKNLTALTALAMLRHHAAASVIHTLSEEDFIAAVRADFEGQRLCVPKLRRAYTLAARSVGMQEGVQALQLMARQQIEAWAMVQKQWNKVRQALIDTFLAMPESRYLLSVHGLGLVTAAIILAEIGDPKNYRHGRQLVKLAGTQPVPNTSGRKSRSRTPMSHKGRPRLRTALFFAVMRLVQVDDAFARVYLRFQQRDKNPLTKMEALGALMNKLLRVLWALMRHQTYYNPALIDAG

SEQ ID NO: 332139 - protein, 328 aa, unidentified
MYIIGIDVSKNKLDCALIDNSNYDKFKFKVVDNSEGGFVALLDWLSKHIESTVSEYHFVMEATGVYHEKCADYLFNMGAKVSVVNPAHIKYYGQSLGVHSKNDKKDSVVIARYGVTQKPISWLPEPIEIRVLKALASRLDAIEKDIRRENNRCEKSNINPCSDNVLHSIKKMLVALNDEKKSLERLIDNHINQYAYLKNNYALLQSIPGIGPVVSRYMVIIIGSRTFKSASQCAAYLGLVPVQNESGSSLRGRSRLSKAGSPIIRAKLYMAAISALQHNPDIKIQNQRLLKNGKSKMSALCAAMRKLVHICFGVIKHQRPYHVQGALL

SEQ ID NO: 332140 - protein, 406 aa, unidentified
MKSQPQKKSTKASRYGAPHRWCEMNRKQRREMMRRIESEDLSLEVVHPDAAGIDIGNESHYVAVPPRRDSQPVRRFGCTTGELKMMANWLKQCRIRTVAMQSTGVYWIAVFDILEDAGLEVYLVNARDTKNLPGRKTDVQESQWLMKLHTYGLLRNSFRPSQQIRTMRTYWRQRNDLVRAAGRHIQRMQKALTQMNIQLANMLSDISGVTGQAIIKAILAGERDPHQLAAFRDCRVQASEEEIARSLEGNWQQDLLFVLKQEHDGYDFCQQQMTECDRQLHSYLQQREDRTQGASLPEEKRKVRLQRKKKGNKPQFDLRAELFRMTGTDLTQIDSIDVRSAMTILSEAGWDMSKWKTEDHFVSWLRLCPDNKISGDKIIGKGRLPTNNRATIALKMAASTLRVSNT

SEQ ID NO: 332141 - protein, 342 aa, unidentified
MNEYDGKQFVGIDLHRQRSVIVRQSESGEQLSAVRIVNDPVALQLQLDDAGADPEVVLEATYGWYWAVDVLQAHGAQVHLAHPLGVKGFRYRRVKNDVRDAGDLADLLRMGRLPESWIAPPATRELRELVRYRAKLVAIRSGLKAQVHAVLAKAGVLISVSDLFGATGRQRLAKVPLAAAYAERVRSLLELIDILDGHEARFAALIAERLDTHRGYQAIQQVPGIGPVLAAVFVAEIGDVGRFTGPAQLCSWAGLTPRHRESDTVVHRGHITKQGSKLVRWAAIEAVQRHPTTAKIAADKDRIEARRGKNIAKVAAARKLLTLVYYGLRDGHIRALDQDRAA

SEQ ID NO: 332142 - protein, 346 aa, unidentified
MEHYAGIDVSLELSSVCVVDGRGKIVKEAKVASEPEALVCFFKELGVPVNRIGLEAGPLSQWLHAGLTQAGFQTVLLETRHVKAALSAMTVKTDRKDACGLAQLLRMGWFQQVHAKSIGSQEIRALLVARKQLLGRLLDVELSIRGILRGFGLKVGQVTRKTFEARIRELVTGQATLERIAEAMLSARATLQAEYEKLHKAVLAFVREDAVCRRLMTVPGVGPVVAVTFKSAVDDPSRITKSKAVGALFGLTPKKYQSGEKDVTGGITRTGDEMVRTALYEAANVLLSRITRFSKLKRWGMDVAKRRGSKRAKVALARKIGIILHRMWIDGTTYRWTEAKPIAAQA

SEQ ID NO: 332143 - protein, 371 aa, unidentified
MKWLASCQTRWFLTPQQQTRSWRNDRRPTVEHVAIDLGGRESQICIRNSDGKIIKEKRCQTVKLGDYLRDRPRSRVVMETCAESFAVAVGAQLAGHEVRVVPATLVRSLGVGARRLKTDRRDAQALSEVSCRIDLPSVHLRSERSRDRKTLCGMRDALVQARTQLVNTVRGWLRTQLVKVRSGQVESFPERVRETVLSRPEGMPACVERQLQVIETLTPQVNAATKEIAEQAGQDEVCQRLMSVPGVGPITAVRFTATLDVPDRFPDAHRVESYVGLVPSENSSSGRQRRGSITKAGNGAMRWLLVQAAWCLWRTQPHDPMVQWARRIGERRGRSMAIVALARKLCGVMYAMWRDGTSYSPRLAARPVQPA

SEQ ID NO: 332144 - protein, 343 aa, unidentified
MLTKNVIAIDLAKNVLQACHISIHGELMSNKPLSRQKMKEFLAKAKPSIVAMEGCCGCHYWGQLAEKFGHEVRIINPKKVKGYLDGHKTDHNDALAIANAAIQIGIKYSRPKSLEQQAMHSLETSRRFLSRSVVSLALHIRGTILGYGIANPRGEKGLKASVQTVLDGDTPIPSNVVSVLSMLWEQYKELKAKLIAFEKEKNALTRQIEPCQRLMGIEGVGETTAAMLYTTLGDGKQFKNGRQASAFVGLTPKQHSSGGKVFMIGIDKCGGVKELRSLLYLGAMSYVGRLPEKPKTQKDAWLRSIIDRIGFKKACIALANKVVRTAWAMLRYETEYKPVLLTN

SEQ ID NO: 332145 - protein, 343 aa, unidentified
MGEVSTIGLDIAKSVFQVHGVDADGTVIIRKRITRAKLLEFFATLPACLVGIEACPSAHYWSRRLQALGHTVRLMPPSYVKAYVKRSKNDANDAAAICEAVTRPSMRFVATKSEQQQSGLMLHRSRQLLVCQRTMLSNAIRGHMAELGIISAKGRNGTAELLKMIANEQDDRIPAVARFSLDVLARQYAAVRAEIVAIEKRIHAWHRSSEESRRLEEIPGVGPIVATALVAEVGDWKVFSSGRSLAAWIGLVPRQHSTGGKERLGRISKQGNRHLRWLLVAGAMAVIRYARQHGTKRPWLAHLMDRRPIKVAAVALANKIARMAWAMMVRGERFKEPRLLPAA

SEQ ID NO: 332146 - protein, 350 aa, unidentified
MIIIGCDYHPGFQQIAFVDTETGDYGERRLEHSEGAEKFYRDLAAQGKKVRVGMEASGHARWFERLLTELTFELWIGDASEIRAKRVRKQKTDRQDAQHILQLLMENRFPKIWVPSGENRDLRQLLWHRHRMVQMRTRIMNQLQAVALNEGLRCKKRLWRQHGREQLESFRLAPWASRRREDLLQLLDRLNPTITDLTQVIEQEVEKCAEARRLRTHPGVGALTALAFVLIIGRAERFQCGKQIASYLGLVPLEDSSGNRRRLGHITKQGSSMLRFLLVEAAQVTARSIPEWRSKYFHLAMRRGRKIAKVAMARRLAIALYWMWRKGWNYEQSRKFGSHAGQLGTGDGVQ

SEQ ID NO: 332147 - protein, 399 aa, unidentified
MNRNRTVAGLDVHKDSIYLCIMGHDETIIFEKTYGVLTPELRQMCNDMVDRGVSEAAMESTAVYWVPVWNELCESMELKLVNPYFIRQLPGRKSDVRDAQWIAECLLKNLIKGSFVPEPIVQDMRKLNRRIFDLQEDLTYYSNKLDAALQRCGFRLSNYVAKITGKSYRKAVESIASGVTDPDELIKCVHGRIINKHGRETMLAAMTGSFSTTDITIIRQYWELLAIYTRQSEECQSKLTALCEAHFPTEYKRLQTIPGVKERAATAIIAETGVDMKMFATAASLVGWCGLKPRNDVSNGRYKSRKITHGNKYLRKILIEISWTASRTRNCFFSNFSYIQVTQKHKSKMKIQVAIARKILVAVWHMLSKQEDFIDLYLKRLEEQRLMEGKIRQLESKMA

SEQ ID NO: 332148 - protein, 333 aa, unidentified
MSSVTWFVGLDYHQAFLQACVMDRSGTVVLNRRCPNSSQALGQLLTPFKGQVAIAIESCCGAADLAEELVRAGQHVTLAHPGYVHKLKQSPDKTDWSDARLLADLLRVGYLPRVWLPPQRLRQLRHVVRWRQQLVQARRAAKLRVTTLLRAERVQLATSSWTKSWRAAVRQCEGLGAEGRWVINQLLDEVEHLQRRIAETEQRLEELTSGDPFVEKLRSLPGIGLVTAVTLRAELGTMERFRSGKQLARFCGLTPRNASSGLKQSDAGLIRAANTVLRSIVIEAAHRLMRVDPHWSRLGQSLKNRGKPGSVATAAVANRWVRWLYHQLKDIAV

SEQ ID NO: 332149 - protein, 364 aa, unidentified
MNFNTNEKINQVSENTLVIGIDIAKHKHFACAIDDRGRVLQKSFPIVQSHLGFEYFYERLMALRTAHKKQEILVGFEPTGHYWMNLASFLTSYGIPFVMVNPMHVNRSKELDDNLQTKNDQKDALVIARLMRDGRFSYPRILEGVEAELRNGATLRSKIQEDLNALQNRVIRWLDRFFPEFTQVFKNFGKMAYAVLEMTPLPSDIKGKSPEDLLFLYRQVEGMKIPQLPKAKQLVEVAQNSIGLTEGLVMAKFEIATLLSQHKLMQAQLDELTSKLVELAKQMTDYEYLASVPGIGDVTIVDLLSEVGSLTQYAHPRQLIKLAGLTLRENSSGQLKGQKRISKRGRRKLRSVASQVPNHQRCFH

SEQ ID NO: 332150 - protein, 413 aa, unidentified
MQVIYERCCGLDVHLKNVVGCRLLTQQKGRVEKSICTFATTTSGLTELDHWLAEGQVEQVALESTGIYWRPIFNRLEGHYEIFLVNPQHMHAIPGHKTDVKDSEWIADLLRHGLLKASFIPSKPIRELRDLVRTHTHLIQERSRHINRIHKILETANIKLGSVVSDVLGKSSRLMLEALIAGNSNSLELAKLARGRMRPKIALLQQALQGQVEPHHRFLLSQTLAQLDFLQQRVGLLEQEVTTRLAPFEKSLALLMTIPGVSRRSATILISELGTDMVPFPSAAHLASWVGLCPGSHLSAGKRRSGKPTKGNPYLRSVLTQVAWVLTRMSGNYLSAQFHHLKPRLGAKKAVIAVAHSVLVIVYHVLAKGEPYQDLGPDYFRRQDKEQQARRFIRQLETLGYRVELAPQEEVTV

SEQ ID NO: 332151 - protein, 352 aa, unidentified
MAKRLWAGLDVGVETTSICIVNEAGDVVHEAMCPTKVRDVHRELAVLRRLRFARVSLEAGVGTALARGLRNLGYSVDIYETRQLSKFLRVRRNKTDAGDANGIAQAGRLGTTIVSKVHLKSLECQSLASRLSIRRHLVRTRVRTINMLCRQIEQFGGRIRNSRKGKDLRLKVEQQIRELFGKASSPLVEQLRSLLDRCEALCTWQEEIDKDLHRLAHEDELCCRLMQIPGVGPICALTFRAAIGEPDRFQNNAAVGCYFGLTPRLHQSGLTSRMGRISKRGNTAARSLLVQAGVHFMRASRTDIELHAWASRIEQRRGRGRARVALARKLAVVMLAIWKSGQDYQPKLIEAA

SEQ ID NO: 332152 - protein, 357 aa, unidentified
MKKAQTPSQTVIGIDLGDKKHAVCVMNQAGKVLSETSIPNNKFALERLCQEFPGALVVIEVGTHSPWISRLLQSRGLRVLVANARKVKAIYTNKRKCDRLDAEILARLARVDPELLHPLEHRSEQAQSDMLSIKMRDAMVRQRTALIVSLRGSLKSLGTRLPGCSSVSFHKKARLRLAEEDPGLLAMTEPVLAAIECLNKQIATCEEAIERIAAERYPEAARLRQIPGVGPITSLSFVLGVEDPERFPESRDVGAWLGLVPGRDQSGDSDKQMPISREGNRYLRGLLVQSAQYILGHFGPDCELKRYGQRIAERGGKAAKKRAVVAVARKLSVLLLTLWKHQRDYEPFHCHREAQAA

SEQ ID NO: 332153 - protein, 380 aa, unidentified
MPCISGSSQQDGFRRGRPIGLGSCETVGEQGRRAITAGLEPEQSLERRKASSDRARQGGAGLHRRKLAMELYVGIDVAKETLAVALSTGEQWDCANHADGIARLLERLAAAPPTLVVLEATGGYENELLAALIAAGIEARRVNPRQVRYFAQAGGQLAKTDRIDARVLAQFAERIRPQARALPDPEREQLKALVTRRSQLIQMLTAERNRRARAPRWLAKSLERTIRALERELAVIDREIAERLERSVTLRPLRELITSVPGAGPVLSATLIARVPELGQLSRHQIAALIGVAPFTRQSGQWRGHDMIFGGRAPVRTALYMAALSAARHNPPLRAFYRRLRAHGKPKKVALTAVMRKLLTILNAMLKHHTPWSAPCPNPA

SEQ ID NO: 332154 - protein, 343 aa, unidentified
MEEYIGLDVSMKETAVSIRRAGERIWRGKCASDPSVIAALIRKRAPAVKRVVFETGPLSVWFYHSLRTEGLPAICVDARHDKAALDMAANKTDANDADGLAQLAEVGFFREVRVKGFNSMLTRTLVAARTRLVRITTELSNQIRGVMKTFGLLVPAGKGSTFENVRNLLADQDGLASIVLPMLEAWRGIRIRAAELGRQLVRDARESQACRILMSIPGIGAITATSFATAIEEPDNFRKSRSVGAWIGLTTRRYQSGEVDYDGHISRRGDRHLRGLLYEAAAVILTRSSTDSALRTWGRHLRERIGFKRAAVAVARKLAVISIRCLRPASCSIRMPELPRKLG

SEQ ID NO: 332155 - protein, 346 aa, unidentified
MDTETGDCGEQRLQHREEAEKFYRDLAAQGMKVRVGMEASGHARWFERLLAELNIELWIGDAAEIRTKRVRKRKTDREDARLLLRLMREDRFPQIWVASWENRDLRQLLWHRHRMVQARTRLMNQLQAVALNEGLRCKKKLWREHGREQLESFRLAPWASRRREDLLKLLDQLNPTIAELTQAIEQEAENCPEAGRLMTHPGVGALTALAFVLIIGRAERFQCGKQIASYLGLVPLEDSSGERRRLGHITKQGNALLRFLLVEAAQVTVRTIPQWRSKYFHLAMRRGRKIAKVAMARKLAVRLFWMMRQEWNYEQVQKFGSHVGQPENRHGVQENTELLTGASRSS

SEQ ID NO: 332156 - protein, 408 aa, unidentified
MEVVYRRCCGIDVHKRKIVACLMTGQRKRDTREFATTTQALREMAHWLKGEACEIVAMESTGSYWKPLYNVFELEGINAMVVNAAHMKTIPGRKTDVKDAEWIADLLRHGLLKASFVPDKDQREYRELTRYRASRVEERAREVNRLQKMLEGANIKLSSHVSDVMGKSGKRLIQLAISHEELTNEQIGAACTGPLKATIDELKASLEGIISPLQRTLFAEVLRVVEEQTAQIERIEAMIRQYTTEAYDAAAKAIDAIPGIARRSAEQIIAEIGVDMSRFPTANHLSAWAGVAPGDNESAGKRKSGKTRQGNKTLKKTLVLCANSAINNRESFFYAQYQRLVVRKGRKKAIVAVAHSMLIAIYHVLSGNEFRDLGADYYAQFNREKKAKSLLKQLNRLGYNVDCPDFAA

SEQ ID NO: 332157 - protein, 400 aa, unidentified
MNAVGIDVSKGKSMVAVLRPLGVVVAKPFEVNHTAAELGKLADFLKSLDGETKVVMEHTGRYYEPVAQVIHDRGLTVSAVNPLLIREYGGNSLRRVKTDKADAKKIARYGLDNWAELREYTPMDTIRYELKTLNRQFHLASKNRTACSNNLVALLDQSFPGVRGWFDSPVRKDGSQKWVDFAMTFWHVDCVRSVSLTVFTERYRKWCKRHGYNFSAEKAEQIHREAKEMISLVSKSATSKLLIQEGASQLTSLSRMVEVLRAEMNRLAMQLPEYPVVMNMYGVGESLGPQLMAEIGDIRRFAGKQSLVAFAGVDPMPNQSGMKDSRSNRSSKRGSPYLRKTLFNVMTALLQNAPSDEHVYQFLDRKRTEGKPFYVYMTAGANKFLRIYYGKVRDHLAALE

SEQ ID NO: 332158 - protein, 326 aa, unidentified
MEHELHYIGIDTAKEKLDVDVLRPDGRHRTKKFANTTKGHDELVSWLKGHKIDHAHICIEATDTYMEPVAECLYDAGYIVSVINPALGKAFAQSEGLRNKTDTVDARMLAEFCRQKRPAAWEAPHPLERALRALVVRHQALTDMHTQELNRTETAREVQRPSIDAHLLWLEAELKRLEKQIKDLTDDDPDMKHRRKLLESIPGIGEKTSAVLLAYIGLKDRFAHARQFAAFAGLTPRRYESGSSVRGASRMSKAGHVSLRRALYMPAMVATSKTEWGRVFRDRLAANGKKGKVILGAMMRKLAQVAYGVLKSGVPFDASRHNPVAA

SEQ ID NO: 332159 - protein, 379 aa, unidentified
MNGPIYEQSVIVGVDAHKYSHTAAAVDAWGQEKGRLNFTNDSLTDCLAWLKTLGRREDVIVAVEDANSYGCHLVSALAEQQFAVRSVPAVLTERDRQHSTQRDKSDFRDAKRVAKVILAKYEETLPVIASLATSAELAAATELNLLLNERRDVVKQGTAIKNQMHSLLHQYYGDHYADGFSKAFNKQAMIFYQANLVQAISADSPNANQAGKALIAESILRRIRRLKLLQEQSAAILKQITKIGETSAPVAALHENIHGCGLLTAGAIMAELVTIRRFGGRDKLAKYAGIAPTLKSSGSHHRLYTNPFGNRLLNKALHTIALSQIAVKGDDRGKIYYRKKLKEGKTKLWALRCLKRRLINLVFRVLKQAEMGSAETAIS

SEQ ID NO: 332160 - protein, 392 aa, unidentified
MYIVGIDIGKNHHEASIVSPKGKQIGRSLRFATTHKGADSLMSFIFKNIGNSPCVFGMEATGHYWYPIYSFLKAKGYTIYVINPIQSDSLRKMYIRQTKNDSIDSFLIAEVIRFGQFGTTSMADENILAMRQLCRYRDSVISSRTEIKLRIGTIMEQIFPEYEKQFSSLWVSTSMGILEKYLTPENIENAPIDELFEIIKDKSHNRLTRAKAISIKEAAADTFGIKIAQDAFSFQLKQLIDRMNFLDKQIEALDIEIMKYYEQFDCYLHTIPGIGIIGAATILAEIGDISRFKNSSALVAFAGIDPTVRQSGEFNSTHNHMSKRGSPYLRHAIFLAATTCSFHNSPLNAYYKKKRDQGKHHLTATGAVARKLTTIIYAVLRDSKPYEPKKFC

SEQ ID NO: 332161 - protein, 343 aa, unidentified
MDYFAGLDVSVKETSVCIVDDAGRLVREVKVASEPEALLQVLMAPGQPFERIGLEAGPLSQWLFSALAEAGLPVICVETRHMRAVLKAQINKTDRNDARGMAQMMRVGLYRPVHVKTLRSQKLRMLLTHRKLLQSKATAIDNDLRATLRNFGLKVGIVGRAKFEVRIKELVEDLPDLAVLVEPLLIVRRVLREQIDILHRRLLVIVRDDDVCRRLMTVPGVGPVVALTYRATVDVPARFRNSKAVGAVFGLTPSKYQSGEVNRSGAISRCGDEMMRMMLYEAAQIVLVRSTKWSWLKAWAMKIARHRGMKKAIVALARRLAVIMHRIWVDGTEFRWTQEVAAA

SEQ ID NO: 332162 - protein, 352 aa, unidentified
MRRPKHQMTGGEDLFVGIDLHKHRWHVSIRTVDVEVFNASIPGTWEALQRVLARYAGHPLQAVYEAGYFGFRLHDRLVDHGIPCLVTPPSLVPQEYGNRVKTDRRDSSKLAHLLAKGLLKRVWVPSEEELYHRQVIRRRRQLVRDRVRTQSRIKAELRFYWVHLEEPRGRWTQIYFETLRRVRFGNRWMQESFDRLLEQYEFLSVQIDKQTQLLRELSETELYRERVEILQSIPGIGVISAMEVLLELQDVSRFRRAEQLAAYVGLTPSQYSSADKVRMGRITGIGKSTLRSLLVEASWTLIRKDQAMREKYDRIKIRSGGKRAIVAIARTLLLRMRRMLLDKQAYALDLAA

SEQ ID NO: 332163 - protein, 339 aa, unidentified
MQIHSVGIDLGKTTFHLVALGAAGKVLVKKKFTQKQLLTFTANMQTSLIGLEACSGAHFLGRALRKQGHDVRLIAAQFVKPFVKSNKNDFVDAEAIAEAVERKNMRFVPIKTDDQLDLQAIHRVRDRLISRRTAVINQLRAFLLERGMVFAQKPAKLKAAMADILENAEADLTPQMRNLIDMLWGEWKLVEQQIEELNDELERISASDAGCTRIRQIPGIGPVVATAIVAAIGNGAAFRKGREFAAWLGIVPRQYSTGGKAKLLGISKRGNVYLRKILIHGARAAVLRIKRDRAPIGAWLDALDSRAPKNVVVVAMANKLARIAWAVLSSGNDYRSVAL

SEQ ID NO: 332164 - protein, 342 aa, unidentified
MTTSAAVRFIGVDVAKLTLSVWAAGDTRPLGTLPNTPDGWQELAAKLAPAPDRPAVPLHLVLEPTGGDQARFVEAALGFGWTVSLVNPVRVRQWADSQGRRTKNDRQDARMLADFGLANQPKPWHPVSDEAAHLDTLLHRKADLEQMLRQERNRQEAAGLRPQMAPAVPASVGRVIAALEEELRPIEQTIAELLGQHPQMKTDARRLTTVPGIAKKTMLPILTLCQRYAALTEGRGDANGIAALVGLDPREFQSGTSVHRRATISRMGDKDLRRRLFMAALGGVGGNNVLKVFYDKMVARGKPKKLALVAAARKLLTWAWAVYRDATDFSPEKTLSRKPAPA

SEQ ID NO: 332165 - protein, 433 aa, unidentified
MNTPHPHDLIIGLDRSDKKADLHFITPATGQRRSQTIDTAPEALWEWLLELRQQHPQARVGLCLEQPAVHLIAFLEAYDWITLYPINPITLQKFREAFVTSRAKDDAKDALYLAELLLTHQDQLQPWVPEDSATRAVQQLVYHRRAVVDERTALTNRLIALLKQYFPQALVLCGEDLWRSLATRFLLKWSSLQAVQKAKPATLKAFYHLNGSRSDKLMEQRLALVQKAVPVTDETALIESFALRVQLICRQLQLVQQTLRSYEQQIAAAYAAHPDHAIFDSLPGAGPVLGPRLLASMGSQRERFGAAADLQQYTGIAPVTKRSGGSCYIHRRYLCPKFQKQSFHEYSKESILWSRWAAAYYLQQRTKGCPHHTAVRALAYKWQRVIFRCWQNRTPYQEAIYEAALRKSGSPLVALFDKVELGKSPFKNPVKKS

SEQ ID NO: 332166 - protein, 395 aa, unidentified
MSKNIKVQAEKKQGVNRAGGSLLRKLELARAKLEKAAAVERVDYYIGIDVGDLKSFYCVLDEFGEILAEGSFPTTASGFERHFKALGRSRIALEVGTHSPWVSEQLEKQGHEVYVANTRKMGGGKKSRRKKNDRLDAEMLARHVRSDPKQLYPIRHRREKTRRGLILLRARDAFVNARTKLVNAARGLVKSSGYRLPKCGSEVFHKLCLEGLPKELQVALKPMLDQIGQLTEKVKGYDKEVNRMSLKAYPETKVLKQVKGVGPLVALAYVLTMEDPGFFRKSREVGPYLGLVPRQYDSGNSSPQLRITKTGDRMMRKLLVQSAQYILGPFGSDSDLRRHGKKIAERGGKNGKKRAIVAVARKLAVLLHRLWQTGEVYNPLYNIQFNEANELRETA

SEQ ID NO: 332167 - protein, 418 aa, unidentified
MEVLHERCAGLDVHKKTVVACVRRARDGGVEKEVRTFKTTTADLLALGEWLDGHDVNHVVMEATGVYWKPVWHILDDGDRELVLANAAHVKNLPGHKSDVSDCDWLSDLEAHGLIRGSFVPNRQTQELRGLLRTRKQKVRERSSNTLRLQKTLEEANIKLDSVISNVIGVSGRRMIEAMIGGETDPVALAALADRRIKAPPEVLCEALRGRVTGHHRFLLGLQLEHIDALDRMIDKIDQQIDASVEPFRAAAGLLTTISGVNQLAGRAIVSEIGIDMSRFETAGHLISWAGLCPRNDESAGKRRSTRIRKGAPWLKDILVQCAWAATRTKATYLHAQFVRIRSRRGPKKAIIAVAASILTAAYHMLKNGVPYRDLGPQHFHSRNKQAQAKRLLARLRDLGFTAEFDSLKPIPDAVVSY

SEQ ID NO: 332168 - protein, 352 aa, unidentified
MAQTLHSAIAVVGIDIGKNSFHVVGHDERGAIVLRQKWSRGQVEARFANMRPCLIGMEACVGAHHLSRKLKAFGHDARLMPAKYVRPYSKGQKNDFRDAEAIAEAVQRPTMKFVATKTADQLDLQALHRVRERLVSQRTGIINQIRAFLLERGIPVRQGQRFLRAELPGILATPPDVLSPRMVQVIEGLAGDWRRLDERIKCLSVEIEALARQDGGCGRLMSVPGIGPIISSAMVAAIGAGDAFSKGRDFAAWLGLVPRQISTGDRTILGKISKRGNRYLRVLFVQAAWVVLIKPKSWERYGLKPWIEAAKKRLHHNVLAIALANKLARIAWSVLAHGRNFEATKISAVAAQ

SEQ ID NO: 332169 - protein, 422 aa, unidentified
MLEQTQDEQEIIARVAALDIGKAELMCCVRVPDPKGGSRRVQEVKSYSTMTRSLQVMADRLMDLGVTRIVMEATSDYWKPPFYLLEAHGFDVWLVNARDVKNLPGRPKTDRLDAVWLCKVAERQMLRPSFIPPVPIRRLRDLTRYRIGLVSDQTREKNRVEKLLEDSQIKLSVVASDIFGVSGRQMMAALIAGERNPQVLAQMARTSMRTKIPQLEEAFVGHFTDHHRFLLTKMLARIDALDSDIADLDTQIEAHLAPFADPMARLDQIPGVGATAAAVIIAEVGVDMTRFPTPAHLSSWARFAPSVKESAGRKKGTGSTGHGDRYLARVLGEAAVGASKTNTFLGERYRRIARRRGKKKAIVAVGRSILVITWYLLSDPEVDFHDLGSGYYDSRINPERRKRNHIRELEALGFKVTLEPAA

SEQ ID NO: 332170 - protein, 310 aa, unidentified
MDHFIGIDVSKATLDIASLPDGESWTVTNDEPGLAELAPRLVALAPVLIVLEATGGFEMLAALTLAKAGLPVAVVNPRQVRDFAKALGRLAKTDALDAALLADFAQRVRPEPRPLPDEAAQLLESLLTRRRQLVDMLTAEKNRLGFARGPVQRDISRHIRWLQKRLTDVDGDLQDAVTASPLYQAKADLLRSVPGVGPVTTLTLLATLPELGHLSRHQIAALVGVAPMNRDSGTMRGKRMVWGGRAPVRAVLYMAALVGLKHNPVLRVFYERLRAAGKPFKVAATACMRKLLTILNAMLQHNQRWDPLHA

SEQ ID NO: 332171 - protein, 344 aa, unidentified
MEHTTIAVDLAKSVFQIAISRRPGHVDEEYRLSRARFVPFFAQQPPATIVLEACGSAHHWARQLQPFGHHVRLLPAHDVHRYVRRNKTDRTDAKALLEVFRNDDLRPVPVKSETQQALAALHRLRSAWVATRTARLNTLRGILREFGVLIPTGAHHVGPHVRALLEDLDAGVPGLLRVALGEAVREIGELEERIRAIERQLATAAEPALVVRQLRTIPGIGVLTATALVAAVGDVQRFPSARHFASYLGLTPREHSSGQRRHLGAISKQGDTYLRMLFIHGARSVLHHAKSKTAPTTDRLRTWALQVERLRGHNKAAVALANKLARIAWAVWRNGNDFAAVPAV

SEQ ID NO: 332172 - protein, 412 aa, unidentified
MYYVGIDIAKRTHVAVIMNEDNSLEVKPFSFNNDKAGFKKLLIYLQTLCCDLSDIVIGMEATGLLFENLYRYLQSLDYNVVLLNPYQTAKFREMDTMKRVKNDNIDSVMIAALLKSGRFSEGYVSQEQLQSLRELYRHRASIENQLKALKRQTSTILTVVFPELETVIRDPFNVTGLALLDKYPTAKHYTNASVDRILKTFRGIKGNNFNRTKAQALLDAAKRTVYSGVAKDARAFNIRTNIEQIRLLQKQLERTLEMMQLLFTSKEVKQEDKEVMEALIDNLRTIPGVADKTILALLAECGNLDRFYAPKALIGFLGLYPTLSQSGDSTRNGRLAKRGASLAKKAIYLASISAIRHNDEMRTIYMNYRSKGRAKKEAIIIVARKLLTIIYTIYTRNVPYDPQRVFVAKPNQ

SEQ ID NO: 332173 - protein, 361 aa, unidentified
MTAPNIVGVDPHRRTFTATVLDSRGGELGHAHFPNTREGHNSGLTWAAGFGSTDRWGVEGASGLGRHLAELLVAAGCDVRDVPPHKTSVRQRGRHEGKTDRLDSLRVAAETQTNPRLARAFKHASPAAPDSVRDRIALWHNARTSLTKIRVQLLGELDALVHDLPEDLRAQLRPAKTVSARVNSLRLLDTSGVTDPTVALRLRLIERRIAMLREVLEQDKATTVELTKLVDEARSTLTELVGIAPRAAAEIIVEVGDIRRFTEAGFARFNGTAPIPASSGEGGNAPVRHRLSRGGNRRLNAVIYRIAMIQLRYEPRARRIHDQACAHGHTSREAMRVLKRHISDAIYRTMLRDARRAADLT

SEQ ID NO: 332174 - protein, 386 aa, unidentified
MQTVADRPAAPTAIRTDLGAIFVSLELSRSTWLITSLSPDGGEKMSKHVVRGGDVAGLLERFAQLREKTRARTGKVFPFVVIQEAGLDGFWIDRALQNEGIESHVVDPASIATSRRHRRAKTDRIDGEVLVRALLAYKRGEPRVCAMVKAPTPEEEDRRRLCRERKVLIVERVRHVNRVKGLLFSQGISGYEPLRRDRRRRLDTLQTGDGRRLPDHLKAQVRRELDRLELLLEQIKAVEAERDVLLAAQRVAAPAAMLLDIKGIGPEFAAILWSEGLFRHFDNRRQVASYAGLAPTPWQSGSIDREQGVSKAGNPRLRTTLIQLAWLWLRHQPQSALALWFEERVKRNGGRLKKTTIVALARKLLVALWKYVTAGVVIEGAVMKTA

SEQ ID NO: 332175 - protein, 354 aa, unidentified
MSQTPDTAIAVIGIDIGKNSFHVVGHDARGAIALRQKWSRGQVEARLANIPPCLIGMEACVGAHHLSRKLVSLGHDARLMPAKYVRPYSKGQKNDFNDAEAIAEAVQRPTMKFVATKTAEQLDLQALHRVRERLVSQRTGIINQIRAFMLERGIAVRQGIGFLRTELPTILATRTDALSPRMLRVIEELAGDWRRLDQRIDGLSGEIEALARQDQACSRLMTVPGIGPIISSAMVAAIGTGDVFSKGRDFGAWLGLVPKQISTGDRTILGKISRRGNRYLRVLFVQAAWVVLVRIKDWERYGLKSWIEAAKRRLHHNVLAIALANKLARIAWAVLAKGRAFELTRTDDAGFRSA

SEQ ID NO: 332176 - protein, 458 aa, unidentified
MSDFFFGIDASKGYSNFVMLDSSKRCVEDDFQLDDTFDGHQKLYSILSEFCVRNPKANIFAAVESTGGYENNWFDALVRFQTHLPIRTARLNPCGVYNNSRAELNRNITDKISAENVAKYMIEHPEKVQYRQQDPLAPLRKQWGFVKMLKKQKTQMLNQLESNLYTANPEILAYCKDHTPAWVLSLLQRYPTAFKLAKAKKSSVSLIPYVTPQKANKLVETAKHSVASAADETTSQIIKALVQQIRQLSKTIDAQTKAMANKCSIPEVELLKTFIGIGNDSAVGLVLEVGSIERFKRAKHLASFFGLHPVYKKSGDGSWGFHMSKKGRTVPRQILYMVAMVAIQSNPLIREIYEKHTEKGMKKKAALGVCMHKIIRIIYGMLKHNQPFDPEIDRANRKKQNTQDEKKVGLDKSRRYQAYDVKAPISRRQAKKREERKQSQSDNNTKCGIKAPVPVLET

SEQ ID NO: 332177 - protein, 415 aa, unidentified
MVDVIVERCAGLDVHRDTVVATVRLPGKGKSHRRRSQETRTFGTTIGQLERLSDWLAECGVTRVGMESTGCYWKTVFYALEDRFECWLVNAKHLRNVPGRKSDVIDSRWCCELVELGLVRPSFVPPPEIRRLRDLTRLRSTQVQERTRTIERLEKVLQDAGIKLTSVASGVYSISARAMLEALLGGVTDPFVLAELAKGRMRKKIPQLQEALASRFDVGHHGVLVAGLLAHIDALDQATGNLEARIGIATAPHADLIELLCTIPGVGVRIAEILIAECGVDMTVFPTVAHLASWAAICPGTNQSGRKRGSGKTRNGDTWLCTALTQAAHAAVHTKNSYLASHYWQLRGRRGEAKAVGAVRHDILTAYYHIVRDRVAYRELGPDWLTRRHSPEHRTRRLVKQLEALGHHVTLQPAA

SEQ ID NO: 332178 - protein, 459 aa, unidentified
MERLRPTTCLTRSLHLNQSVYAGNGSTRPCLIDIAQALPVASTGTNMNESYWIAGIDIHKSMLAVVIADAAEGEFRFERRKFGTLGTDLDELSAWLGERGVREVVMESTALYWKPIWRRLEEQCKLHLAQAHSNRAPRGRKRDFQDAERLVRRFLASELILSFVPDSDQRLWRTLTRAKHQLTRDRVRLYSQVESLLEDARIKLSTCVSDLFGVSSRRILHGLAQGATDPAALAGMAEPELQVTPLQLANALSAAPTMNPMHRQILNLFLQRLELVEQQMATLRLHIAASLDAHQQAVVRLAAVPGYGIDSAQQVIAEVGPQAATFDSPEQLASWVGVCPGREESAEVSRSNRTPKGNRAMRRVLNQVANAAVKTRGSKFQLIYRRFLPRLGHNRAIWAIAHRLCRLTWKILRQGAAYIEYGELPNPKRLRARVAKFTRELRALGYHVIPPAPAPGSSV

SEQ ID NO: 332179 - protein, 412 aa, unidentified
MEVLHPHCAGLDIHKDTVVACVRHMVGGTVKREVRTFKTTTKDLMALSEWLSAERCTDVAMEATGIYWKPVWHILADGDFKLMLANAAHVKNVPGRKTDVNDATWLADLMAHGLIRGSFVPDEPTQEMRNFLRTRKQFVRERSSHVQRIQKTLEDANIKLDSVITDIMGLSGRRMIEALIAGETDPFALAALAHRRIKASQAELEAALRGRVSDHHRFMLRLLLQHIDAIDAAIGQIDQEVDAHVEPFRTAIQILSSIPGISDLSAEVIVSEIGIDMNRFPTEGHLISWAGLCPRNDESAGKRRSTRMRKGAPWLKTTLIQCAWAAARTKGSYLQAQFQRLRSRRGAKKAIGAVAASVLTAAYHMLKNGTLYEDLGADHFDRRAKGKQILRLVSRIQNLGFAVQITPIGAAE

SEQ ID NO: 332180 - protein, 355 aa, unidentified
MTMLSEDYEYVIGGDPDRDTIDLAVLDTATGATRAHIEASADGRGYVRMLDWADDHAPGRRVWALEGTGSFAAGLAEALAKAGEDVVEVGGLKRARGAKNDRLDAVRAARTAMAREHQASPRVRGLREAIRALSATRHGVLVSRTKAINELKSLIVVAPEHLRAALRGGSLAKQLALIESMTTAATAAVDHRITIVTLQSITARIRFLTGQLKDIDPELASLIAAHPAGPALLAEPGVGPVVAAQMLISWSHSGRCRSEAAFASLAGVAPLEASSGQRSRHRLNRGGDRALNRALHTVAITRMRCHPESRAYEARRTLQGKTHRDIRRCLKRSVARRLYRIMESSARVNTTLTAA

SEQ ID NO: 332181 - protein, 401 aa, unidentified
MIDIGDIDVFLGLDVGKGEHHATAVTPAGKKAFDKRLPNTEPKLRELFAKLQAKHGTVLVVVDQPASIGALPLAVARDMNCPVAYLPGLTMRRIADLYPGEAKTDARDAFIIADAARAMPHTLRAIDSEDETIAELEMIAGFDDDLAGEATRVANRLHGLLTQIHPSLERVLGPQLQHPAVLTLLQRFGSPAQIRKAGRRRLVTLLRPQAPRMAERLVDEIFAALDEQTVTVPGTEAAALIVPSLAASLTAVVDQRKLLAGRIEELLEAHPLSKVLMSMPGVGVRTGARILIEVGDGSTFPTAGHLAAYAGLAPATRNSGSSIRGEQPSRRGNKQLKRAFFLSAFAALSDPASRTYYDKKIAQGKHHTQALLCLARRRADVLFAMLRDGTFYEPQTSAAVT

SEQ ID NO: 332182 - protein, 345 aa, unidentified
MQPMYYIGLDVHKRIVSYCVKDGSGTIFAEGTIPATRFDLDHWMKTLLQPWTAAMEATMFTGWIYDHLKPHAAALKVAHPLMLRAIAAAKKKNDRIDARKICDCLRCDFLPECYMASTAIRERRRTLRYRNLLVRQMVQMKIKISALLMEAGVSYNKQRLHKAGYFRELLATNPDIDEGLRSLLRLCRETVVRLQKMESALVRSLESDSLLVDRVERLMTIPAVGPITALTWALEVGEVQRFSSIKKAISYCGLCGAEKSSGSTVQRTPLSKQRNKHLQTTLIEAAKMAPRNSPELAMLYDKEKQKGNANRATLAVTRKLVAYLVAVDRRQKEFLTVERENRTAA

SEQ ID NO: 332183 - protein, 276 aa, unidentified
MDKTPVGIDIAKLKFDVAVWIERKKYKTKVFDNTASGFSDLLKWLLPYGDCHICLEATSHYSVPLATFLVDNGVEVSVKNPARIHAFAQSELSRNKTDQGDAKMIARYCALYAPARWFPAPLNERQLTALIRRLNHLVEMKQMECNRKKGADEIVQPFLTESICALEKQIREIKQKIKQHINDSPELKKNKQLLESIPGIGEILSATLLAFVGDVSKFTSSKQVVAYAGLNPKLCESGVFKGRSRLSKIGCTELRKALYMPALTSITYNPIIKSQW

SEQ ID NO: 332184 - protein, 329 aa, unidentified
MSASICGLDVHKDSTYATILNPEGKIINQTKMSNDRVLPYLSHFNVGKVGMESSNQIAPLFRQLTAKGYNVVVSHPKKTRYIAEAKIKCDRVDSKIIAELVRLDALPLAYFPEGEIAKLREKVRRRAFLVRERVKLRVKVKSVLTYEGLKWPADHGLFTKKGLEWLYGLHLDSVECYLRVLTPLDEEIKLLSKELVGVAEKDEEVKLLMTIPGIGYYTAVLMKSEIGDINRFPFGERLCSYAGLVPSTHASGRTVRHGGITKEGSRWLRWVMVEAAQTHVHKYDTSITRAYNRIAEKRGKKIATVAAARRLLMCSYSVLKNKKPYHDQA

SEQ ID NO: 332185 - protein, 344 aa, unidentified
MDHFAGLDVSVKETSICIVDDAGKIVREVKVASEPEALLAVLKNPAYHFKRIGLEAGPLSQWLFSALAEAGLPVICVETRHMQAVLKAQINKTDRNDARGIAQMMRVGLYRPVHVKTLRSQKLRMLLTHRKLLQSKAIAIENDLRGTLRNFGLKVGMVGKVKFEARIRELVENLPDLAVLVEPMLIVQRTLREQIVILHRRLLAIVRDDEVCRRLMTTPGVGPVVALTYRATVDVPARFRKSKAVGAVFGLTCAKYQSGEVDRNGRISRCGDEMMRVMLYEAAQSMLRSKKWSWLKAWAMQIARRRGMKKAIVALARRLAVIMHRIWVDGTEFRWTREQAAAAA

SEQ ID NO: 332186 - protein, 404 aa, unidentified
MDRTSAGIDWASEEHALCVVDATGQKLAAELFGHDEAGIRALVARMRDLDVEKVAIERPEGLLVDRLLEAGFTVLPVHPNALKATRPRYEAAGGKSDGFDAFCLAELARTDAHRLRVLRPDSDETKALRALTRTREDLVAARVRLGNELRAQLDAFWPGAARIFAEVDSQIALAFLERYPSPADAQGLGVKRLEGFLARHRYSGRRPAAELLERLRLAPEGCAGALETEARRAAVLGLAAALRPIVVQISELTSQIAGAVRAHPDGRVFLPLFKHPKSVITAARLVAEIGDDRTRYPSSESLAADAGMAPVARESGKRKVASFRWACDKRLRDSVACLADSTRHHHPWARSVYLGARSRGLDHPHAIRVLGRAWLRVLWRCWQDEVPYDPARHGNLQRFQPLGG

SEQ ID NO: 332187 - protein, 410 aa, unidentified
MNPLYVGIDVSSKSNVVYFMKPDGSKHSNFSVNNSLDGSRQLSKRIVSAITSLSLTDLIIGLEATSVYGDNLVCFLREDGSLAKYNHKIHVLNPKQVKKFKDAYPDLPKNDYVDSYIIADALRFGRINKEVYRDDYRYKALKNLTRARFFAVQNLTREKQRFLNYLFMKYSSMAQGKVFSDTFSVTALAVYEDFDSADQLAYMDLQELTDFIKEKGRNRFPDPDSVAKAIQKAARSSYRLPKTVNDSVNQVLSISISSIRALESQIKEFDKAIASQIELIPNTLQSIKGIGPVYSAGIIAEIGDINRFPNQAALAKYAGLAWTQYQSGNFEAQNTRLIKSGNRFLKYYLGEAALSLVRCDTEYSCFYHLKYKEVNKYQHKRALALTARKFVRLVFTLLKENRLYIPSGQK

SEQ ID NO: 332188 - protein, 433 aa, unidentified
MIKINYMSTLFVGIDVSSKSNVVCAMDFDQNKYISSSFGNNQPGADDLADMLADCMQQHKNLDTIVIALESTSVYSVHISNFLSTAEVLMPYKPLVFCVNPKATANYRRSYIGMEKTDPTDAFLIADFARVGRIKNLNPWRGAQFIALKRLTRHRMHLSECLTREKTYMVSNMYLKFSELQLLDDENQPFSNIHGATSSAVLTEFLSPQEIIDLSEEELLKFLAAKSKNRISDLSKTSELLRKAARDSYRLDKCMYEPLNISLASSFNCIHTFQKELKLVDQAIENCIRGMTPNALIILKSIPGVGPLLASGIISEIGDITAFHSSDALAKYAGLYWLKNDSGNFVSEDNQLSRAGNAYLRYYLGEAANSVRRYIPEYREFYEKKYAEVTKHQHKRALALTSRKFVRLVFGLLVKNQLYTGEQLDAEPNITSN

SEQ ID NO: 332189 - protein, 350 aa, unidentified
MKRILKQSVGIDVAQKELVVQLGRLYEDLSTEIYAHKCFPNTAKGINTLEQWVLKLTEPTVSIRYVMEATGVYHESLACYLTDHGYSVSIILPNKISNYFRTLSVKTITDKSASEAITLFGLERNLEDWKRPKPVFKYLRQLTRERDQLVQERTMIKNQLHAEKAESDPNPSTLRRIKQRIDLLNKQEGIIKEEIETLVKREKELKTELALLRTIPGIGTLTAATILAETNGFELVRNKRQLASYAGFDVQEKQSGTSVKGKTRISKKGNKNLRKAMHLPALTAIRHDQRFKAIFARLVSKHGIKMKAAVAVQRKLLELSYTIFKSGVSYNKNYLQEEKLSAQKHHHQLA

SEQ ID NO: 332190 - protein, 388 aa, unidentified
MNVGADKSEPLTAIHTDLGAIFVSLELSRSSWLITSLSPRGGEKMSKHSIRGGDFAGLMERFAQLQEKARLRTGQSFRIIVVQEAGLDGFWIHRALQNEGIESHVVDAASIATSRRRRRAKTDKIDGETLVRVLLAYKRGEPRVCAMVKVPTPSEEDRRHLCRERKALTAERVRHVNRIKGFLFSQGVSGYQPLRRDRRQRLEELQTGDGRAFPQHLKALINRELDRLELLLKQIKSVEAARDALLAVKQTAKPAPAAMLLAIRGIGPEFAAILWSEGLFRHFENRRQIAAYAGLAPTPWQSGAVDREQGVSKAGNPRLRTTLIQLAWLWLRNQPRSALSVWFHERVSRNGGRLRKTTIVALARKLLIALWKYVTAGVVIEGVTMKVA

SEQ ID NO: 332191 - protein, 324 aa, unidentified
MKSNTTTVYVGVDIAKATLQVHLQGRQAELKNAPTARAKFCQKLLDIAGAHVVCEATGGYERDLVGALHKAKIPVSVVNPALVRAAAQAQGQRAKTDRIDAAMLTDYGQRYQPQPTPQASQVQRQLVALTQWLKQLIEGLATVKTQAEHHRDLFVRKQHEALLDYYQTQIKAAEEKLGALLKKDRELQQRVEALDAIEGVGSRTALLVLAHMPELGHLNRQQAAALAGLAPWTRESGTMKGMRCIGGGRPEVRLALYMSALSAVRFNPIFRAFYQRLIAKGKLPKVALTAVMRKLIVYMNHKLKALAAQPSSAAEVQVKKIIQK

SEQ ID NO: 332192 - protein, 324 aa, unidentified
MIEAILGIDVSKNTLDVSISSCTKVRTKSFPNSSDGWHHLLDWLITQKIQRVHACLESTGRYSLGIACALYEAGHVVSIINPAQIRDFVRTKLGRNKTDGIDASRIREYCELFKPSPWAPPLEAHRRLGELQTIRSGIIAGLTEWKNRKNSGIVDAEAQALADATISHFTSQLGAVDKAIALTIDNDSDLRSKRDLLLSISGVGDTLAGVVLAELPGPDVLRSSGAVVAYAGLNPRQHQSGTSVDRATRISKIGNAVLRAALYMPALSAMRYNPAIMALVTRLKSRGHLKPKQIVVAAMRKLLVLCFGVLKTGKPFDPAIAMGC

SEQ ID NO: 332193 - protein, 393 aa, unidentified
MGVIIGMDPHKRSATIEVIDSTGRRLSVGRFGTDKVGYAEMLAAGRAHRERVWAVEGCNGIGRHIAHRLVHDGETVLDVPAKLSAQVRTFATGNGRKTDPVDAHSVALAALYAPPDPGLHQVLVEEDLVVMGLLVDRRDELGRARTQTLNRLHRLLLELFPGGAKQYLSAPQARALVATTKPRDLPGKTRRRIVVELIGALEAIDRKIKTAEKDLTALVTERGSSLMELTGIGPTGAARLLADVGDIHRFRDKDRFASWNGTAPLDASSGAQQRHRLSRAGNRRINRTLHIMAVVQLRNPTPGREFYRAKKAGGTPSMMAMRSLKRRLSNIVYARMLSDQQRRDHDMATGPGGQRGSDSDSSATGSQPHTGTSDKPLPGPATTKPRTPVPAMS

SEQ ID NO: 332194 - protein, 350 aa, unidentified
MVNSNKNESMKNLFIGIDYSKKKFDVSLLERYKMQEIKHEYFENTPEGCKAMLKWIQLQTTIPPEEWLFCGEHTGLYGVLLTEFLVKKKFFVWIENPMQIKLSTGLKREKNDKVDSQEIARYAYRFQDKARCFQIQDKSLKSLQLLLSFRDRLMRNKHSILVAAQEIRAVLKRDTTARYIYEQTKKDVERLNKEIKDVESRMKEIIQASEELKENYLLVTSIKGIAMINTVALMIHTDNFTRFQNCRQLACYAGVVPFEKTSGSSIKSGSHISHLANIQIKTLLTQAARSAVLYNPELRQYYERKIKEGKLEQIVINNVRNKLLHRIFAIVQKKQPYQVNYINSLNKNVA

SEQ ID NO: 332195 - protein, 429 aa, unidentified
MNSTQNKKIEQVKETTMIVGIDVGSEKHYFRAFNWRGIELTRKPVAFSNSMEGFNSFYNTIVELMQKSELEEALVGIEPTGHYWFDLGQFMGERNIKFVMVNPHHVHKTKELDDNSPSKNDRKDPRVIAGLVRDGRYFYSYMPTGVYAELRNASNRRFVLVEEQTRAKNRLQKWIAVYFPEYKGIYTHIDAKGGLLVLKQAPTPEEIVRLGVEGIIKIWKDAKLRGNGHKKAMLILNAAMKSIGLKAGLTEARMEIQDLIEDYELQTKRLERVNDLIKELCQQVRYADKLLEIKGIGITTVAGFIAEVGDITRFDSTKELQKLAGLELVADSSGKHNGKTKISKRGRKRLRYLLFEAAISVVGKNEEFKEIHRYYTTREKNPLKKMQSLIAVACKLIRVFHAILTKGIRYDALKMLKDIRHPGEQLKAA

SEQ ID NO: 332196 - protein, 343 aa, unidentified
MEAITTVGLDIAKSVFQVHGIDAAGVVVVRRQLKRRHVLAFFQKLAPCLVGIEACATSHHWSREIAALGHTVRLMPPAYVKPYVKRQKNDAADAEAICEAVTRANMRFVETKTPEQQACLMLHRTRHLFIKQQTSVINSIRAHLAEFGIVAPVGRNGVEELLRIAAGPGDARVPEVARMCIAALGVQLRILKAQILEFDRRIIAWHRSNETSKRLDQIPGVGPALATALVASVPDPKAFRSGRHFSAWIGLVPRQRSSGGKDRLGSISKQGDRYLRGLFTAGALAVIRYAKIHGIGHRPWLTTLLARRPTKVAAIALANKLARIAWAMMAKGERYKEPAALAA

SEQ ID NO: 332197 - protein, 360 aa, unidentified
MNNQSLSNHQTIVGGVDTHKDLHFVAIVDAYDRVLSSNSFPTTRQGYKSMLDWMQSFGEVKRIGIECTGTYGVGLLRYLQQFDIEILEVTAPDKTIRRKRGKDDTIDAENAAHAAFAGIRTVTPKTRDGMVESLRVLKMCRKTAIAARRIALQMIQMNIISAPEAIRESLRTMTRMQLIRTLAAWRPDLSGYRDISTAYKIALKSLARRYLELHDEIADLDVMISVIVDELAPELITGKAIGYESAAQLLITIGDNPERLKSEASFAALCGVNPIPASSGKVNRHRLNRGGDRAANSALHIIAIGRLRIDARTKEYVEKRLTQGHTKLEALRCLKRYIAREVYYTLRKRNNLINSAQIAA

SEQ ID NO: 332198 - protein, 392 aa, unidentified
MYIVGIDIGKNHHEASIVSPEGKQIGRSLRFATTHKGADSLMSFIFKNIGNSPCVFGMEATGHYWYPIYSFIKAKGYTIYVINPIQSDSLRKMYIRQTKNDSIDSFLIAEVIRFGQFGTTSMADENILAMRQLCRYRDSVISSRTEIKLRIGTIMEQIFPEYEKQFSSLWVSTSMGILEKYLTPENIENAPIDELFEIIKDKSHNKLTMKKAISIREAAADTFGIKIAQDAFSFQLKQLIDRMNFLDKQIEALDCQILEYYEKFDCYLHTIPGIGIIGAATILAEIGDISRFKNSSSLIAFAGIDPTVRQSGEFNSTHNHMSKRGSPYLRHAIFLAATTCSFHNSPLNAYYKKKRDQGKHHLTATGAVARKLTTVIYAVLRDSKPYEPKKFC

SEQ ID NO: 332199 - protein, 450 aa, unidentified
MGRPQVIDDEEHERVYEKVAAVDVAKDSGMVCTRMPHPSRPGARQSTVWAVQARMGAIRKLGRQLARDGIEMVTLESTSDYWRIWFFVLEACGLGVQLVNSSQAKNLPGRPKTDRLDAMWLARLTEMGLLRASFVPPAAIRALRDYTRARTRLTQERTRCWQRLEKLLEGALIKISSVASKLTTLSAQDMVRALIAGERDPQVLAALARGKMKAKHDDLAGALDGMFGDHHGELAQLLLDQIAFLDGKIAELTARVEQQATAMPAAWGVNADGTTGPHAGTAPGDPVLPAVQRLAQVPGISEDLARSIIAETGLDMSRFPDAAHLVSWAGLCPRARQSGTRARTGKKGQGNGYLRGYLGQAAIGAAATATFLGERYHRIARRRGKAKAQVAVARSILVIIWHLLASPEAQFTELGYGYYQARTDKDRKIKNHIRQIEALLGHPVTIASAA

SEQ ID NO: 332200 - protein, 342 aa, unidentified
MQITTIGLDIAKNVFQVHGIDAAEKVVVRKQLRRSQVLAFFKALPPCLIGMEACATAHYWARELTKLGHTVRLMPAKDVKAYVKRNKNDAADAEAICEAVRRPTMRFVQIKSPEQQSRLMQHRARDLLMRQRTQVINALRAHLAELGVTAAQGSAGLKQLLAIIAGDEDERLPADAHAVLIVLAAELAAMQTLIASIEKRIMARHRKSDASQRLETIPGIGFVGATAIDATVTDPKAFRSGRDFAAWIGLVPRQDSTGGKQKLGPISKQGDRYLRRILVVGAHAVLRYAKQNPEKYPWLTQLLARKPFKVVAVALANKMARIAWALLVHGGTYRAPALAAAA

SEQ ID NO: 332201 - protein, 378 aa, unidentified
MKKIMRYVGMDVHAETIAIAVVEEDGAERVVGPIANRPEAIRTCLRKLGRAEELHCCYEAGPTGYVLYWQLRRMGIACTVVAPTLIPTKAGDRVKTDRRDARKLARYLRSGDLTAVWVPDEAHEALRDLVRARQAAKIDEKRARHRLQKFLLRHGQRPPEGVKAWRAPHRAWLHKLQLDDATLQVVLGEYFHEVVHSEQRVARLDTAIEQAVEEAPEQLRAVVAALQGLRGVRKVTATAVVAEIGQFSRFAHPRQLMGYSGAVPSECSTGGPGKHQRGAITKAGNAHLRRLLGEAAWCYRFRPAVRYPLKKRQQGLPAEVSDISWKAQVRLCNRYRRMVARGKSKQKVVVAIARELLAFMWAIGIEVEKPQTQTRAAA

SEQ ID NO: 332202 - protein, 408 aa, unidentified
MEITPIYKRVIGLDVHQAKISACALAEQADGTVTVEHREFGAFKRDRRSLAQWAHEFSPDVVVMESTGIYWKSPYAALEAVGIAAWVVNARHVKNVPGRKTDVADAHWLATLARAGLLRPSFIPPADIRYLRLIARQRQNLGGMLASEKNRLHKLLADAGIRLNVLVSDIHGQAGRAMVKALIDGQSIPEVLNLAGRLRASREQLFDALQPEELSAHHLFVLKEVMAHIEELEARMIRFDQALIQGLDAWHPQLNLLQTIPGIDLMGAAMLLVEIGADMNSFGSAEKLASWVGICPGNNESAGKRKSGKTRKGNAWVRRLLCEFAQAAARSRCALKDKFAALSIRKGHKKSIVALAHKMLRTLFAMLKNNTPYRDKAVDYEALSVQRNAPRWIKMLVKHGFMPATATA

SEQ ID NO: 332203 - protein, 428 aa, unidentified
MNHNTQNDKIEAIDSETLVGGIDIGSEYHFIRFFTDRKIELSKKPFKFENNQEGFDQIIGLIEDLKAKYHKKDVYLGMEPTGHYWFNLMIALEFKGYHVVIVNPMHVKKSKELDDNSPAKNDRKDPKVIAGLVIEGRYQKPYLPDGVYAELRSFNILIENATEEMTCKKNQIARWFAIYFPNFKDAFSDYTRKSAMLILKVAPLPVDILKLGEEGVNKIWREAKLRGVGMKKAKELVEAAKCTVGMQRAPKSATLEIRHLIEDFECLSERRMELETEAAELLKQVPNADKLQEIKGVGFKTTLGFVAEIGDLTRFDNAKQIQKLAGLSIVNDESCKHVGEHHISHRGRKRLRYTMYLAGVSVIAHNEAFAEIYQHLITRSENPLKKMQAVIAVSCKLIRIFYGVLAHGITFDENKMLRDITWYGKDAA

SEQ ID NO: 332204 - protein, 400 aa, unidentified
MELVERAWAGIDAGKGHHHVVVIDGEGRRMLSRRVANDEPDLETLIAAIVDCATEVHWTIDLADGPAALVLALLLGRGQRVWYLPGVAVNRASDGYRGEGKTDAKDAAVIADQGRMRRDLRELRLDDPLIAELRMLTGHRADIAADRTRAINRLRIQLLGVSPALERALDFTNRGPLVLISHFQTPRQLAAAGQSGVYRCLRKQKVRHADRLAATAIRAAATQHTSVVSEATAAELIARLAQAVLDLDRQLAELDKQIFLRFEAHRQANVIASMVGIGALLGAEFLAATGGSLDGFASADHLAGYAGLAPAPRDSGRRSGNLHRPKRYNRQLQRVFYTSALISIQTSTASRAFYDRKRAEGKRHSQAVLALARRRVNVLWAMIRDHSLYDDRRSPSTLAA

SEQ ID NO: 332205 - protein, 355 aa, unidentified
MLADQVDHIIGVDTHRDAHSAALVNPAGAVEADITLATDAFGYRRLLRFAQERAPGRRVWAIEGTGSFGSGLTTFLLEQGEWVVEIDRPKRPARRDGAKSDELDAARAAREALSREHLAQPRQRGWREALRVLLVTREGAIASRTRAIGLLKGLIVSAPGPLREQLRRHSTDEQLARCARLRTSAAQSVEHRATVVAIRAAARRSLALEAEARDLESQLELLVHEVAPQLVAERGVGPITAAQVLNAYSHQGRFRSEAAFASLGGAAPIPASSGQTIRYRLNRGGDRQLNRALHTIVLSRLTHDPDTRAYAARRAGEGKTPREIKRCLKRYLARRLFRVLEADSRLAPSPATSGT

SEQ ID NO: 332206 - protein, 341 aa, unidentified
MQVYGIDLSKDKFDVNFFDATGKINTRTVKNGLAGISDFLSGIPSEAILCAENTGSYGDLLVFLCGQYGVQIALVPGYTVKHSLGLVRGKSDPIDAGRLREYGERFFDKLSFKTYQSETMSELRQLYSLRSQLVKARKELRTGAHARQTMPMQSIRTNQILKNTLGSLDAQILEVEKEIELIVKSDSELKENYTFSISVKGVGPVIATDIIIKTGNFKVIDTARKAASYAGVCPFPNASGKMVGKARTSHFADKELKCLLYMGAKSAVKHNKEYNLYYQKKKLEGKPHYLIINNIMNKLLRTIYSVVKNKNAYTPEYMCIDPREKNVNSSDKKSGKKIVFN

SEQ ID NO: 332207 - protein, 357 aa, unidentified
MTPMLTDKVDFVIGVDTHRDSHTAAIVTAAGGLVERLTVATDAFGFRKLDTFAAKHATGRRVWAIEGTGSFGAGLTTHLLGRGEWVVEIDRPARPARRDGAKSDDLDAVRAAREALTREHLAAPRARGDREAMRVLLTAREGAILARTKAIGQLKAMIVNAPQSLRDQLRRGTTDEQLNRCARLRTLPSHSVEHRATVRAIRATARRALMLEAEAAEHETELELLVTAACPQLLDRPGIGVITAAQFLISWSHRDRIRSEAAFASLAGAAPIPASSGATVRHRLNRAGDRQLNRALHTVALTRLRFEPTTKAYAARRTAEGKTPREIKRCLKRAIAREVYRIMQTDAASITTIETAA

SEQ ID NO: 332208 - protein, 336 aa, unidentified
MNGSTGRWVGVDVAKSKLDVALLDERGKVKNHVFDNDAKGHAALMGWLGDRGGSPAHLRVCMEATGVYGEALAIALVDAGWCVSVVNPARIKGFAQSELVRNKTDRADAALLARFGQAMQPEPWVAPPLEVRQLRALVDRLQSLKEMHQQEANRLEAAINQAGMRESIQSHTQWLQASIKQLERQIDDHIDGHPGLREDAVLITSIPGIGNITAAKVMAYLGDVRRFKNAKALAAFIGVTPRLKLSGASVRGRSMISRSGHAQIRHSLYMPAMVALKYNPIVKAFGARLKATGLAPKAVISACMHKLVHLIYGILKSGVPFDARLATPRLDIQDGI

SEQ ID NO: 332209 - protein, 310 aa, unidentified
MAIYAGIDLHSNSNFLSVVDSAGKIIEKRKLANDVQAILHPLAPYRDQVQGIAIESTFNWYWIVDALMDEGYRVHLANPAAIQKYSGLKHSDDASDAAWLAEMLRLGVLPEGYSYPKAERPIRDLLRKRGHLVRLRTSLITSLQGIVSRNNGHSLPGRMIKQLKTNHVAPLCAANEDLALCGEVSKETIDYLGRQIKKIEKQAEERIELRPAYKALLTMPGVGVILGLTIMLETGPIGRFAKAGNFSSYCRKVPSNWISNGKRKGRGNPKNGNKYLAWAFSEVAEFARRYDAASRSWYDRKLARSNRMVA
